United States Patent Application Publication US 2024/0327476 A1 - sequence listing, part 97

SEQ ID NO: 186474 - DNA, 2814 bp, synthetic construct
  misc_feature 1..2814: note = Description of Artificial Sequence: Synthetic coding sequence
  source 1..2814: mol_type = other DNA
atggacgacgacgacgacgacgacgacgtgggcgaccacgacgacgaccatcccggcatggaagtcgttctccatgaagacaaaaaatactatccaactgcggaagaggtctacgggcctgaggtggagacaattgtgcaagaggaggatactcagcctttaacggagccaataatcaaacctgttaaaaccaaaaaattcaccttgatggaacagacactgccagtcactgtgtacgaaatggattttctcgccgatctgatggacaattctgagctgattcgaaacgtaacgctctgcggacacctccatcacgggaagacttgttttgtggactgcttgattgaacaaacccatccagaaattcggaaaagatatgaccaggacctctgctacactgacattctgtttactgaacaggaaaggggggtggggatcaaatccacccccgtgactgtggtcttacctgacacgaaaggcaagagttatttgttcaatattatggacaccccgggccacgtgaacttctcggatgaggtgaccgccgggctgagaatttccgatggtgtcgtgctcttcatcgatgccgccgaaggagtcatgttgaatacggaaagactgatcaaacatgctgtacaggaacgacttgcagttacagtttgtataaacaaaatcgaccggctgatcctcgaattgaagctgcctccaaccgatgcttattacaaactgcgacacatagtggacgaggtcaatggacttattagtatgtatagcacagacgaaaatttgatcttgtcacccctgctcggcaacgtgtgcttttcctctagccagtattccatttgttttaccttgggatcgtttgcaaaaatttatgccgacacttttggcgatattaactaccaggagtttgcaaaacggctgtggggcgatatttactttaaccctaagaccagaaaatttacgaagaaggcacccacatccagctctcagcgatctttcgtggaatttatcctggaacccctatacaagattctcgcacaggtggtgggagatgtggacacttccctcccgaggactttggatgagctgggaattcaccttacgaaagaggaactgaaactaaatattagaccactcttgcgcctggtgtgcaagaaattttttggcgagtttactgggttcgtcgacatgtgtgtccagcacattccgtcccccaaggttggagccaaacccaagatcgagcatacatacacaggtggcgtggactctgacttgggcgaggctatgagtgattgtgaccctgacggcccattgatgtgtcacaccacaaaaatgtacagcacagatgatggagtgcagtttcacgctttcggccgagtgctcagtggcacaatccatgccggacagcccgtgaaggtcttaggtgaaaactatacgctcgaagatgaggaagatagccaaatctgcaccgttgggcgattgtggatcagcgtggctcgttatcacatcgaagtgaatagggtgcccgctgggaactgggtcctgattgagggagtggaccaacccatagtgaagaccgccaccatcactgagccccggggcaacgaagaagcgcaaatctttcgcccactgaaatttaacacaacctcggtgataaagattgccgtcgagccagtgaatccaagtgagcttcctaagatgctggacggcttaagaaaagtgaacaaatcctaccccagcctgactacaaaggttgaggaatccggcgagcatgtcattctagggactggggaactctaccttgattgtgtgatgcatgacctgagaaaaatgtactccgagatcgacatcaaggtggccgatccagtggttactttctgcgaaacagtagttgagaccagcagcctcaagtgtttcgccgagacccccaacaagaaaaataagatcaccatgatcgctgagcctctggaaaagggtctagcagaagatatcgagaatgaagtagtgcagatcacgtggaatagaaagaagttgggggaatttttccagacaaaatacgattgggacctcttggccgcacgaagcatttgggcctttggaccagacgccacaggaccgaacatcctggttgatgataccctgccatcagaagtggacaaagcactgctgggcagcgtgaaagactcaattgtacaggggtttcagtgggggactagagaaggaccgctctgcgacgagctgataagaaatgtcaaattcaaaattttagatgcagtcgtagctcaggaaccactgcaccgggggggcggccagatcatcccaaccgcacgacgagtcgtttactccgcattcctgatggccacccctcgcttgatggagccatattacttcgtcgaggtgcaggccccagctgactgcgtgtcagctgtgtataccgtcctggcacgtagacgagggcatgttacccaggacgcaccaatccccggcagtccgctgtatactattaaagccttcattcctgccatcgatagctttggtttcgagaccgatcttcgcacgcatacgcaaggccaagccttctcactctccgtgttccatcactggcagatcgtgcccggagaccctctggataagtctatcgtgattcgccctctagaaccccaaccagctccccatttagcacgggaatttatgattaagacacgaagaagaaaagggctgagcgaggacgtctctatctcaaagttctttgacgaccccatgctgctcgaactggccaagcaggatgtggttctcaattatccgatgtag

SEQ ID NO: 186475 - DNA, 2919 bp, synthetic construct
  misc_feature 1..2919: note = Description of Artificial Sequence: Synthetic coding sequence
  source 1..2919: mol_type = other DNA
atggacaccgacctgtacgacgagttcggcaactacatcggccccgagcttgattctgatgaagatgacgacgagttaggtcgagaaactaaggaccttgacgagatggatgatgacgatgatgatgacgatgtaggtgaccacgatgatgaccacccagggatggaagtggtgcttcacgaagataagaaatattatcccacggccgaggaggtttacgggccagaggtcgagactattgttcaagaagaagacacgcaaccattgacggagcccattataaagccagtcaaaacaaaaaagtttactctcatggaacagacactgcccgttactgtgtacgagatggattttctagctgacctaatggacaactctgagttgatccggaacgttacattatgcggccatctccaccatggaaaaacctgtttcgtggattgtttaattgagcagacgcaccctgagattagaaagcgctatgatcaggacttgtgctatactgacatactgttcacagaacaagaacgcggcgtggggatcaaaagtacccctgtgaccgtggttctcccggataccaaggggaaaagctacctctttaatattatggacacaccggggcatgtgaacttcagcgacgaagtgacagccggactgcggattagcgatggagtggtgctcttcattgacgccgctgagggggttatgctgaataccgaacgactgatcaagcacgccgttcaggagcggttggctgttaccgtttgcatcaataagattgataggctaatcctcgagttaaagttgcctccaaccgacgcttactacaaactcagacacattgtcgatgaggtgaacggccttattagtatgtacagtaccgatgaaaacctgatactgagtcctctactgggtaatgtgtgcttcagcagctcacagtacagcatttgctttaccttaggatccttcgctaaaatttacgccgatacattcggagatatcaactatcaggaattcgctaagcgactttggggcgatatttacttcaacccaaagacaagaaagttcaccaagaaagcaccaacgtccagctcccagcgctctttcgttgaattcattctagagcccctgtataaaatcctcgctcaggttgtgggtgacgtggacacaagtttgccgagaacccttgatgagttgggcatccatctgactaaagaggagctaaagctgaacatccggccactactacgcttggtatgtaagaaatttttcggcgagttcaccgggttcgtggacatgtgtgtgcagcatattccgtcaccgaaagtcggagcgaaacctaagattgaacacacctataccgggggcgtagactccgatcttggcgaggccatgtctgactgcgatcccgacggaccactgatgtgccatacaacgaagatgtattcaaccgacgacggcgtgcaattccatgcttttggcagggtgctgagcggaaccattcacgccggacagccggtcaaggtgctaggcgaaaactatacattggaggacgaggaggattcacaaatttgcactgtgggccggctttggatttccgtcgctcgctatcatatcgaggtgaatcgggtgcccgctggtaactgggtactgattgagggggttgaccaacccatagtgaagacggccacgattaccgaaccccgcggcaatgaagaagctcaaatatttcgacccctgaagttcaatactacgagtgtaatcaagatcgcagtggaacctgtgaacccatctgaacttccaaagatgctggatgggctgcgcaaggtgaacaagagctacccctctctgacaactaaagtagaggagagtggcgagcacgtgatcctagggacaggtgaactttatctcgattgcgtcatgcacgacctacgcaaaatgtattcggagatagatataaaagtggcagatcccgtggtcactttttgtgagactgtagtagaaaccagttctcttaagtgtttcgcagagacccctaataagaaaaacaagatcacaatgattgcagaaccgctagaaaagggactggccgaagacattgagaatgaggtggtgcagataacatggaataggaaaaagctgggtgaattttttcaaacaaagtacgattgggacctactagccgccaggtctatttgggctttcgggccagatgccaccgggccaaatatactggtagacgatactctgccgagtgaagtggataaggccctcctggggtctgtgaaagactctatcgtgcaggggtttcaatggggtacccgggaggggccgttgtgtgacgaactgattcgcaatgttaagttcaagattctggacgccgtggtggctcaggaaccactgcacaggggaggaggacagattattccaactgccaggagggtggtctactcagcctttctgatggctaccccccgtctcatggaaccctactacttcgttgaggtgcaggctcctgccgactgtgttagcgcagtatacacagtcctcgctcggcgtcggggacatgttacccaagacgcacctatccccgggagtcccctctatactatcaaggcgtttatcccggcaatcgacagctttggcttcgaaactgacctgcggacccacacacagggtcaagccttttccctgtccgtgtttcaccattggcagatcgtccctggtgatccactcgataaatctatcgttatccgaccgctggaaccgcagcccgcgccccaccttgctagagaattcatgattaaaaccagacggcgtaaaggcctttctgaagatgtgagtataagcaagttcttcgacgatcctatgctgctggagttggctaagcaggacgttgtgcttaattaccctatgtag

SEQ ID NO: 186476 - DNA, 1923 bp, synthetic construct
  misc_feature 1..1923: note = Description of Artificial Sequence: Synthetic coding sequence
  source 1..1923: mol_type = other DNA
atggccgccggcggcaccggcggcctgcgggaggagcagcggtacggcctgagttgtggtaggctaggccaagacaacattaccgttctgcacgtgaagctgacagagaccgccataagagccctcgagacctaccagtcccataagaatctgatcccatttcgcccgtctatccaattccagggtctgcacggcctggtgaaaatccccaagaacgacccacttaatgaggtgcataactttaatttctatttatccaatgtagggaaggataaccctcaaggtagttttgattgcattcaacagacgttttcttcatctggagccagtcagttgaattgcttgggtttcattcaagataagatcactgtgtgtgccacaaacgatagctatcagatgacccgggaacgtatgacccaagcagaggaagagtctcgcaacagatcgaccaaggtgatcaagccaggagggccgtacgtgggcaagagggtgcagatccggaaagccccccaggcagtaagtgatacagtgcccgagcgcaaaagatccacacccatgaacccagccaacactatcagaaaaacccatagttcttctaccataagccagcgaccttaccgggaccgcgttatccatctcctcgcgctgaaagcttataagaagccagaactcctggctcgcctgcagaaggatggcgttaatcaaaaagacaagaattctttgggcgccattctacagcaagtggcgaatctgaatagcaaagatctttcttatactttaaaggattatgttttcaaagagctgcagcgcgattggccaggatatagcgagatcgacaggagatccctggaatccgtgttatctaggaaactaaacccctcccagaatgctgctgggacctctagatctgagagcccggtgtgctcttctcgggacgccgtgtcctcaccccaaaagaggctgttggatagtgaattcattgatcctctgatgaacaagaaagcccgcattagccacctgaccaatcgggttcctccaaccctaaacgggcatcttaatcccaccagcgagaaaagcgcggccggcctcccccttcccccagctgccgccgcgatacctaccccccctcctctcccctctacctatctgccaatttcacatccaccccagatcgtcaactctaatagcaactcaccttctactcccgaagggcgaggcactcaggatctgccagtagactcgtttagtcagaatgatagcatttatgaagatcaacaggataaatacacatctaggacatccctcgaaaccctccctcccgggtctgtcttgctgaagtgtcctaagcccatggaggaaaaccatagcatgagtcacaagaagtctaaaaaaaagtccaagaaacacaaggaaaaagaccaaattaagaagcatgacatcgaaaccattgaggaaaaggaagaagacctgaaacgggaggaggagattgccaaactgaacaattcttcaccaaatagttctggaggggtgaaagaggattgcacggcctccatggaaccctccgccattgagctgcccgattacctgattaagtatatcgccattgtgagttacgaacagcgccagaattacaaggacgacttcaacgccgagtatgacgagtatagagccttgcacgcccggatggagactgtggcacgcaggtttataaaactggacgcccagcggaagcggctgagtccagggtctaaagagtaccagaacgtgcacgaggaagtgctgcaagaataccagaagatcaaacaatcctcccctaattaccacgaggagaaatacaggtgcgagtatctgcataacaagctggctcatatcaagcggctaataggagagttcgatcagcaacaggcagagtcatggagctag

SEQ ID NO: 186477 - DNA, 1173 bp, synthetic construct
  misc_feature 1..1173: note = Description of Artificial Sequence: Synthetic coding sequence
  source 1..1173: mol_type = other DNA
atggccgccggcggcaccggcggcctgcgggaggagcagcggtacggcctctcgtgcggccgcctcggccaggataatataaccgtcctccatgtgaaactcaccgaaacagcaattagggctctggagacataccaatcccacaaaaacctgatcccctttcgaccaagcatccaattccagggcctccatggcctggttaaaattccaaaaaatgatcctctgaatgaggtgcataactttaatttctatctttctaacgtgggaaaggataatccccagggctccttcgactgcatccagcagacattttcctcttcaggggcgagtcagcttaactgccttgggtttatacaggataagattacggtgtgcgctacaaacgattcataccagatgacccgggaaaggatgacacaaattgtgaactccaactctaattcaccaagcacacctgaggggagagggacacaggacctcccagtggactccttttcccaaaacgattctatttatgaggaccagcaggacaaatacacatcgaggacatccctagaaacactgccccctggttccgtgttattgaaatgccctaagccaatggaggaaaatcacagtatgagccacaagaagagcaaaaagaaaagtaagaaacataaggagaaagatcagattaaaaagcatgatatcgaaacgattgaagagaaggaggaagaccttaagagggaggaagaaatcgccaagctcaacaatagttcaccaaacagcagcggtggtgtgaaagaggattgtaccgcttccatggagccttctgcaatagagctgccagactacctcataaagtacattgccattgtcagttatgagcagagacagaattacaaggatgatttcaacgcggaatatgatgaatacagggcattgcacgcaaggatggaaactgtggctagacggtttataaagctggatgctcaaaggaagagactttcccccgggtctaaggaataccagaatgttcatgaagaggtcctccaggagtaccagaaaattaagcaaagcagcccaaattaccacgaggaaaagtatcggtgcgaatacttgcacaacaaacttgcacacatcaaaaggctcattggcgagttcgaccagcaacaggcagagtcctggtcctag

SEQ ID NO: 186478 - DNA, 1644 bp, synthetic construct
  misc_feature 1..1644: note = Description of Artificial Sequence: Synthetic coding sequence
  source 1..1644: mol_type = other DNA
atgcggcagaagcggaagggcgacctgagccccgccgagctgatgatgctgacaatcggcgacgtaatcaagcagctcattgaggcccacgagcagggcaaagacattgaccttaataaggtcaaaactaagacagccgccaaatatggactgtctgcgcaacctcggttagtggacattatcgccgccgttcctccccagtacagaaaagtcctgatgccgaaattgaaggcaaagcccatccgcaccgctagcgggatcgcagtggtggccgtgatgtgtaagccccacaggtgccctcacatctcattcacgggaaacatttgcgtttattgccccggtgggccggactctgattttgaatattcaacacagtcttacactgggtacgagccaactagcatgagggctatcagggcacggtacgatccattcctgcaaacacggcatcggatcgagcagctgaaacagctgggacattcagtcgataaggtggagttcatcgttatgggggggaccttcatggcactgccagaggagtatcgcgactactttatccgaaacctgcacgacgccctcagtggacacacttccaataacatctacgaggctgtgaagtatagcgaacgctcattgacaaagtgcatcgggattaccattgagactcggcccgactattgcatgaagcgacatctgagtgacatgctgacatacgggtgtactaggctggaaataggggtccagtccgtgtatgaggacgtagcacgagatacaaaccgtgggcatactgtgaaggcagtgtgcgagtccttccacctggctaaagactcagggttcaaagtggtggcccacatgatgccagacttacctaacgtgggtctggagagagacattgagcagtttacagaattttttgagaacccggcatttcgcccagatggtctgaaactgtaccccactcttgtcattagggggaccggattgtatgagttgtggaagagtggtcgatacaagtcttatagccccagcgaccttgtggaactagtcgcgcgcatcctggcattggtaccgccttggacacgagtttaccgcgtgcaaagagatatacccatgcctctcgtgtcttctggtgtcgagcacggaaatttgcgggagttggcccttgctagaatgaaggatctgggtattcagtgcagggacgttcgaaccagggaggtgggaattcaggaaatccatcataaggtgaggccatatcaggtagagttggtaaggcgggattacgtcgccaacggaggctgggaaacgtttctgtcttatgaagaccccgaccaagatattcttatcgggctgctccgactgagaaaatgttctgaggagacattcagatttgagctgggaggtggggtttccattgtccgagagctgcacgtctatggatctgtggttccagttagctctagagatcctactaaattccagcaccaggggtttggcatgcttttaatggaagaggccgagcgtatagccagggaggaacatggcagcggcaaaattgccgtcatatccggcgtcggcacgaggaactactataggaagatcggctatcggttgcagggtccctatatggtaaagatgctcaagtag

SEQ ID NO: 186479 - DNA, 1368 bp, synthetic construct
  misc_feature 1..1368: note = Description of Artificial Sequence: Synthetic coding sequence
  source 1..1368: mol_type = other DNA
atgtgcaagccccaccggtgcccccacatcagcttcaccggcaacatttgcgtctactgcccaggaggcccagatagcgactttgagtatagcacacagtcttacaccggctatgagccgaccagtatgagggctatcagagcacggtacgacccttttctgcagacacgccacaggattgagcagttaaagcagctgggccactctgtagacaaagttgagtttattgttatggggggaacctttatggctctccccgaagagtatcgggattacttcataagaaatctgcacgatgccctgtctggccacaccagcaacaacatctacgaggcagttaaatattcagaaaggtctctgactaaatgtattggcatcacaatcgaaacccggcccgactactgcatgaagcggcatctttcagacatgcttacatatggctgtactagattagaaattggcgtacaatcagtgtatgaggacgtcgcacgggatacgaatcgcggacacacagtgaaggccgtatgtgaaagttttcatctcgctaaagactctggatttaaggtcgtcgcccacatgatgccagacctgccaaacgtgggtctggaacgtgacatcgaacagtttaccgagttctttgagaaccccgcttttcgccccgatggactcaagctctaccctaccctcgttatcagaggcaccggactttatgaactctggaaaagtggtcgttacaaaagctatagtccatctgatttggtggaactggtggcaaggattttggctctggtgcctccatggacgagggtgtacagggtccagagagacatccccatgccacttgtcagctccggagtggaacacggtaaccttagagagctggcactagctcggatgaaggacttaggcattcaatgccgagatgtgcgcaccagggaggtggggatacaggagatccatcacaaagttcgcccatatcaggttgagctggtgaggagagattacgtagccaatggcggttgggagacctttttgtcgtatgaggaccccgatcaggacatcctgatagggcttctgaggctgcgtaagtgcagtgaggagaccttccgtttcgagctgggcgggggggtgtccatcgtgcgagaattacatgtgtacggttccgtcgttcctgtgtcatcgcgggatcctacaaaatttcaacatcaaggcttcgggatgttgttaatggaggaggccgagcgcatcgcgagagaagagcacggttccggaaaaatcgctgtgatcagcggcgttgggacccgtaattactatagaaagattggctatcgccttcagggtccttatatggtcaagatgctgaagtag

SEQ ID NO: 186480 - DNA, 342 bp, synthetic construct
  misc_feature 1..342: note = Description of Artificial Sequence: Synthetic coding sequence
  source 1..342: mol_type = other DNA
atgatgctgaccatcggcgacgtgatcaagcagctgatcgaggcccacgagcagggcaaagacatcgacctgaataaggtgaagacaaagactgcggccaaatatggtttatcagcccagcctcggctagtggacataatagccgctgttccacctcaatatcgaaaggtcctgatgcctaagttgaaggctaagccgatcagaacggcttcagggatcgccgtagtagcggtgatgtgtaagccgcatcgctgtcctcacatctctttcaccggcaatatttgcgtgtactgcccgggcggcccagatagtgattttgaatactctacccagtcctattag

SEQ ID NO: 186481 - DNA, 1602 bp, synthetic construct
  misc_feature 1..1602: note = Description of Artificial Sequence: Synthetic coding sequence
  source 1..1602: mol_type = other DNA
atgatgctgaccatcggcgacgtgatcaagcagctgatcgaggcccacgagcagggaaaagatattgacctcaataaggtcaagacaaagactgctgcaaagtacggactttccgcacagccaagactggtagacatcatcgccgcagttcctcctcagtacagaaaggtgctcatgcccaaactcaaggcaaaacctatccgcacagcatcggggattgcagttgtggccgtgatgtgcaagcctcatcgctgccctcatatctctttcacaggcaacatttgcgtgtactgcccaggagggccagattccgacttcgaatactcaacccagtcttacacagggtacgaacctaccagcatgagagcgattagagcacgctacgaccccttcctgcaaacccggcatcggattgaacagctgaagcagctgggccactcagtggacaaggtcgagtttattgtgatgggtggaacgtttatggccttaccggaagaatacagagattacttcattaggaatctgcatgacgcactgtcgggccatacctcaaacaacatttacgaggctgtaaaatactctgagcgatcacttacaaaatgtatcggaataacgattgagacaagacctgactactgtatgaaaaggcacctgtccgatatgcttacctatgggtgcactcggctggagatcggtgtgcagtctgtttatgaagacgtcgctcgcgatactaaccgcggccacactgtgaaggccgtgtgcgagagcttccatctagcaaaggactccggcttcaaagtggtagcccacatgatgcctgatctgcccaacgtgggcttggaacgtgacatcgaacagttcacggaattcttcgagaacccagcctttcgccctgatggtctgaagttatatcccactttagtgatccggggaactggactgtatgagctgtggaagtcaggaagatataaatcctactccccctctgatctagtggagttagttgcgaggattcttgctttagtgcccccgtggacaagggtctacagagtgcaacgcgatatacctatgcctcttgtcagttctggcgttgagcacggcaaccttcgggaactcgcactggctcgaatgaaggatctggggatacagtgccgggacgtgcgaaccagagaggtgggtatccaggagatccaccacaaggtgaggccttatcaggtggaattggtcagacgcgattatgtagccaatggtgggtgggaaactttccttagctacgaggacccagaccaggacattctcattggcctcctacgactacgaaaatgctctgaagagactttcagatttgagctgggtggcggggtgtcaatagttcgtgagctacacgtctacggcagcgtggttcctgtctcctccagggaccccactaaattccagcaccagggttttggcatgctgcttatggaggaagcagaacggatcgccagggaggagcatggaagcggcaagatcgcagtcatttcaggagtaggcacccgcaactactaccgtaaaatcggctatagactgcaggggccttacatggtgaagatgctgaaatag

SEQ ID NO: 186482 - DNA, 576 bp, synthetic construct
  misc_feature 1..576: note = Description of Artificial Sequence: Synthetic coding sequence
  source 1..576: mol_type = other DNA
atgatgctgaccatcggcgacgtgatcaagcagctgatcgaggcccacgagcagggcaaagacattgacctcaataaggtgaaaactaaaaccgctgccaagtatggtctgtccgcccagccgcgccttgtcgatatcattgctgctgtgccgccccaatatcggaaggtgctgatgcctaaattgaaggcaaagccaatcagaaccgcatcggggatcgcagttgtagccgtgatgtgtaaaccgcacaggtgtccccatattagctttacgggtaatatttgtgtttattgtccgggcggacccgacagcgactttgaatattcaacacagtcgtacactgggtatgaacctacttctatgcgggccattagagccaggtatgaccccttcctccagacccgacatcgtattgagcagctaaagcaactcggccactcagtggataaagtggagtttatagtcatgggcggaactttcatggccctgcctgaggaatatcgcgattactttattcgtaacttacacgatgccctgtctggacacacaagtaataacatctatgaggccgtgtag

SEQ ID NO: 186483 - DNA, 1287 bp, synthetic construct
  misc_feature 1..1287: note = Description of Artificial Sequence: Synthetic coding sequence
  source 1..1287: mol_type = other DNA
atgagcacccaccagttctaccggaagtacatgtgccccaccagcatgagagccattagagcacgctacgacccattcttacaaacccgccatcgaatcgaacagctgaaacagctgggacattcggtggataaggtggagttcattgttatgggaggaactttcatggctctgcctgaggagtacagagactatttcatccgcaatctacacgatgctctgtcaggacatacgtctaacaacatctacgaggccgtgaaatatagcgagcggtcgttgacaaagtgcatcgggatcaccatcgaaactcgtccagactattgtatgaagcggcacctgagtgacatgctcacctacgggtgtactcggctggaaatcggggtgcagtctgtttacgaggatgtggctcgtgacaccaacagagggcacactgttaaggctgtgtgcgagagctttcatttggctaaggattcggggtttaaggtggttgcgcacatgatgcccgatctgcctaacgtggggctggaaagggatatagagcagtttacagaattttttgagaatcctgcctttaggcccgacggactgaagctctacccgactctcgtaattcgcggcaccggcctatacgaactatggaagtctggtcggtacaagagttactcaccttccgacttagtggagttggtcgccaggatcttggccttagtgcctccatggactcgtgtatatagagtccagcgcgatatccctatgcctctggtgtcatccggcgttgaacacggcaatctgagagaacttgcactggcccgtatgaaggacctaggcattcagtgcagagacgtgcgaaccagagaggtaggaatccaggaaatacaccataaagtcagaccttaccaggtggagttggtgcgccgagattacgtcgccaatggaggatgggaaacattcctgagctatgaagaccccgatcaggatattctgattggactgctccggctgcggaaatgctcagaggagacttttcgcttcgagctcggtggtggcgtgtcaatagttcgtgagctgcacgtgtacggttcagtcgtccccgtctctagtagagatccaaccaaatttcagcaccagggttttggtatgctcctaatggaggaagccgaacgcattgccagagaagaacatggatcggggaagatcgcggtgatctcaggcgtgggcaccaggaattattacaggaaaattggatacagactacaagggccatacatggtaaagatgctaaagtag

SEQ ID NO: 186484 - DNA, 1257 bp, synthetic construct
  misc_feature 1..1257: note = Description of Artificial Sequence: Synthetic coding sequence
  source 1..1257: mol_type = other DNA
atgtgccccaccagcatgcgggccatccgggcccggtacgaccccttcttgcagactcgacaccggatagaacagctcaaacagctcgggcattccgtcgacaaggtggaatttatagtgatgggcgggactttcatggccttgccggaagagtaccgtgattactttatccgtaatctgcacgatgcactgtctgggcatacaagcaacaatatttatgaagccgtcaagtacagcgagaggtcactcaccaaatgtattgggatcacaatcgagacacggcccgattattgtatgaagaggcatttgtcggacatgctaacctatgggtgtacacggcttgagatcggagtgcagtctgtttatgaagacgtagcccgggacaccaacagagggcacacagtcaaggccgtctgcgagtctttccacttggcaaaggattcgggattcaaggttgtggcacatatgatgcccgacctgccgaatgtggggcttgagcgggatatcgaacaatttaccgagttttttgagaacccggcttttcgacccgacgggctcaagctgtatccaaccctagtcatccggggcaccgggctgtatgagctctggaaatccgggaggtacaagagttatagtcccagcgatctggtggagctcgttgctaggattttagccctggtgcccccatggacaagggtttaccgtgtgcagagggacatccccatgcccctagtgtctagcggagtggagcacggcaaccttagagagctagccctcgcacgcatgaaagatctgggcatccaatgcagggacgtacggacccgagaggtgggtattcaggaaattcatcataaggttagaccataccaagtggaactggtgcgccgagactatgtagcaaacgggggctgggaaactttcttgtcctatgaggatcctgatcaggacatactgataggcttgctgcgactgaggaagtgttccgaggaaaccttccggtttgaactgggagggggcgtcagcatcgtccgggagctgcacgtgtacgggagtgtggtaccagtgtcatccagagaccctactaagtttcagcatcagggatttggcatgttactcatggaggaggccgaaaggatcgccagggaggaacatgggagcggcaaaattgccgtaatctcaggggtcggcacccgaaattactatcgtaaaattggttacagacttcagggaccatatatggttaagatgctgaaatag

SEQ ID NO: 186485 - DNA, 1275 bp, synthetic construct
  misc_feature 1..1275: note = Description of Artificial Sequence: Synthetic coding sequence
  source 1..1275: mol_type = other DNA
atggccgccgtggccacctgcggcagcgtggccgccagcaccggctccgcagtcgccacagcttcaaaatcaaatgttacctctttccagagacggggtccacgcgccagtgtcacgaatgatagtggtccaaggcttgtgagcatcgccggaaccagaccctccgtgcgaaatggtcagctgctcgtgtcaactggcctgccggcgttggaccagctgcttggcgggggactcgcggttggcactgtgctgctcatcgaggaggataaatataacatctactctccccttctgtttaagtatttcttagccgaggggattgtcaatgggcataccctgctagtcgcttctgccaaagaggatccagccaacattctgcaggagctgcccgcccctctgttagatgacaaatgtaaaaaagagtttgatgaagacgtatacaaccacaaaacaccagagagcaatatcaaaatgaaaatcgcatggcggtaccagcttttaccgaaaatggagatcggccccgtttctagtagcaggtttggccactactatgatgccagtaaacggatgccccaggaactcatcgaggcatccaactggcatgggttctttctgcctgaaaagattagctccaccctgaaggtggaaccatgttccctgacaccagggtatacgaaattactgcagtttatccagaatatcatatacgaggaggggttcgacggatcaaacccgcaaaagaaacagagaaacattctgagaattggaattcagaacctgggatccccactctggggggatgacatttgttgcgccgaaaacggcggcaatagccattcactcaccaagtttttatatgtactgagagggctcctccggactagtttgagtgcatgtattattactatgcccactcacctcatccagaacaaggcgataatcgcacgcgtaacaaccctgtccgatgtcgttgttggcctggaatcattcattgggtcagagagggagactaatcccctctacaaggattaccacggcttgattcatattagacaaattccaaggctgaataatctgatatgcgacgaatcagatgtgaaggatcttgcctttaaattaaaacgcaaactgttcactatcgagagactccaccttcctccagatctgagtgataccgtaagtcgtagttctaaaatggatctggccgaaagcgccaagaggttaggccctgggtgtgggatgatggcaggcgggaagaagcacctggacttctag

SEQ ID NO: 186486 - DNA, 1431 bp, synthetic construct
  misc_feature 1..1431: note = Description of Artificial Sequence: Synthetic coding sequence
  source 1..1431: mol_type = other DNA
atggccgccgtggccacctgcggcagcgtggccgccagcaccggctctgccgttgctaccgcttctaagtctaatgtgaccagttttcagcgccggggccctagagcttctgtgacaaacgattccggcccgcggctcgtttccattgcaggtacccgtccctcagtgaggaatggccagttgctggtgtctaccggactgccagccctggaccagcttctgggggggggactagccgtgggcacggtgctgctgatcgaagaagacaagtacaatatatacagccctctcttgtttaaatactttttagcagaaggcatcgtaaatgggcacactttgttagtggcttccgctaaggaggatccagccaacatcctccaggaactccccgctcctttgcttgacgataagtgtaagaaggagtttgacgaagacgtttacaaccacaaaactcctgagtctaacatcaaaatgaagatagcatggcgctatcagctgctgcctaaaatggagcagataggacccgtttcctcaagtcggttcggacattactacgatgcaagcaaaagaatgccacaagaactgatcgaagcttcaaattggcacgggttttttctccctgagaagatatcctcgacgttgaaagtcgaaccatgctcgctcactccgggctatacgaagctgctgcagttcatccaaaacatcatttatgaggaaggcttcgacggctccaatccccagaagaagcagcgcaacatcttgaggattggcattcaaaacttagggtctccactttggggagacgacatttgttgtgctgagaacggcggcaacagccactctctgacaaaattcctctatgtgttgcgaggcctccttaggacttcattgtctgcatgcattattactatgcctactcacttgatacaaaacaaagccattattgcccgcgtgaccacgctgtcagatgtcgttgttggcctggaatcattcataggctccgaacgcgagaccaatcctttatataaagactaccacgggctcatccacatccgacaaatcccaaggctgaacaatctgatctgtgacgaatccgatgtaaaagacctagctttcaaactgaagcgaaagctgtttacaattgagtgggttcaggacaactacctgaggcaggaacggaacatctatcctcccgggttctcctaccttttaaagcaaaaggacagtgcctggggcgagggctcccttcagcattcaactttcctgatgtcttttctggctaaagcaaccgcttttgctagcaggctcgtcagacactcagaacctctcaaacagaacggcagcggaagaatccgtcaggctgctggaccacgcctctggcacgacggacgccgtcaagaagctccagggctgctgggtattcctccctag

SEQ ID NO: 186487 - DNA, 1608 bp, synthetic construct
  misc_feature 1..1608: note = Description of Artificial Sequence: Synthetic coding sequence
  source 1..1608: mol_type = other DNA
atggccgccgtggccacctgcggcagcgtggccgccagcaccggcagtgctgtcgccactgcttctaaatcaaatgtcacttcatttcagaggagaggccccagagcgagcgtgacaaatgattccggtccacggttggtgtccattgccggcacgagaccttccgttcgaaacggtcagctcctagtctcaacgggtctgcccgcattggaccagcttctcgggggcgggctggccgttggaacagtgctgttaatcgaggaggataaatataacatttatagccccctcctttttaaatactttctggccgaaggcatcgttaacggacataccctcctggtcgcgtcagcaaaagaagatccagcaaacatactgcaggagctgcctgctcctttgctagatgataagtgcaaaaaggaattcgatgaggatgtgtataaccacaagactccggaatcaaatatcaagatgaagattgcttggaggtatcaactcctgcccaagatggagattggacccgtgtcctcctctcggtttggtcactactacgatgcatccaagcgcatgccgcaggaactgatagaagcatccaactggcatggcttttttctccctgagaaaatctcaagtacattgaaagtagagccctgctcgctgactcccgggtacaccaaactgcttcaatttattcaaaacatcatatacgaggaagggttcgacgggtccaatccccagaaaaaacaaaggaatattctgcgcataggaatccagaatctggggtctcctctctggggggacgacatctgctgcgccgaaaacgggggtaatagtcacagtctaaccaagtttctgtacgtacttcggggcttgctacgaacgtctctgtctgcttgcattatcaccatgccaacgcatctaatccaaaacaaagcaattatcgctagagtaaccaccctgtctgatgttgtggtaggactcgagtcctttattggctcagaaagagagacaaatcccctttataaggactaccacggactgatccacataaggcagatcccccgactcaataatctgatttgcgacgagtcagatgttaaggacctcgctttcaagttaaaacgcaaactgttcaccatagaggcaggggtgcagtggcatgatctgggatcacggcagccccggctgctgggctcttctaattcccccgcatctgctagcttggtcgccggaattaccggagctcaccatcacacccagctaatctttgtattcttggtggagatggggttccatcacgtgggacaagccggcctggagctgttaacgtcaggcgacagttccgcgagcgctagccaatccgccgggatcacaggaatgtcatatcgagcaaggcctagggcattatacttcaaggagaacaagagcaaggttggggcacgccagctgctggaaaccagggaagaacacctgtcaagtcggttacttattcttacccaggccgaaaggctttgcatgggccggcgattctttaccgcctttcacatctttaatgagctgccgtgcaagggcgactgtatttgcctacagacctgtcagacccagtag

SEQ ID NO: 186488 - DNA, 840 bp, synthetic construct
  misc_feature 1..840: note = Description of Artificial Sequence: Synthetic coding sequence
  source 1..840: mol_type = other DNA
atggaggccgtggtgaacctgtaccaggaggtgatgaagcacgccgaccccaggatccagggctacccactcatgggatccccactcttaatgacctccatcctcctcacctatgtgtacttcgtgctgtctcttggtcctaggataatggccaacaggaagccgtttcagctgcgaggcttcatgattgtttataacttttccttagtggctctgtccctgtatatagtgtacgagttcctgatgtccggctggctctctacatacacatggaggtgcgatcccgtggactacagtaactcaccagaggcacttcgaatggtgagagtggcttggctctttttgttcagcaagttcatagaacttatggacactgtcatcttcatcctgcgtaagaaagacggccaagttacttttttacatgtgttccaccatagcgtgctgccatggtcctggtggtggggggtcaaaatcgctcctgggggtatggggtcattccatgccatgatcaatagtagcgtgcatgtcatcatgtacttgtactatggactgagtgctttcggcccagtcgctcaaccctacttatggtggaagaaacatatgactgccattcagttaattcagttcgtgctggtgagcctccatatcagtcagtattacttcatgtcctcctgcaattaccagtatcctgtgattatacacctcatctggatgtatggcacaattttcttcatgttattttcaaatttctggtaccattcctacaccaaaggaaagcgcttgccccgggctctgcagcaaaacggcgcccctggcatcgccaaggtaaaagcaaactag

SEQ ID NO: 186489 - DNA, 759 bp, synthetic construct
  misc_feature 1..759: note = Description of Artificial Sequence: Synthetic coding sequence
  source 1..759: mol_type = other DNA
atggaggccgtggtgaacctgtaccaggaggtgatgaagcacgccgacccaaggattcaggggtaccccctgatggggtctcccttattaatgactagcatcctgctcacttacgtgtattttgtactcagcctaggtcctcgaatcatggctaatcgaaagcctttccaactgcgtgggttcatgattgtttacaatttctcactggtggcgctgagtttgtacattgtctacgaaatggtccgtgtggcttggctcttcctcttttccaaatttattgaactgatggatacagtaatctttatccttaggaaaaaagatggacaagtgaccttcctccatgtttttcaccattccgtgctcccttggagttggtggtggggcgtgaaaatagcacccggagggatggggagtttccatgctatgattaactcttccgtccacgtaatcatgtacctgtactacgggcttagcgccttcgggccggttgcccagccctatctgtggtggaagaagcatatgactgccattcagctgatccaattcgttctggtgagcttgcatatctcacagtactacttcatgtctagttgcaactaccagtaccccgtcatcatccatctgatttggatgtacggcaccatcttttttatgctcttttccaacttttggtaccatagctacacaaaggggaaaagactcccacgggcgctgcaacaaaacggtgccccggggatcgcgaaagttaaagcaaattag

SEQ ID NO: 186490 - DNA, 891 bp, synthetic construct
  misc_feature 1..891: note = Description of Artificial Sequence: Synthetic coding sequence
  source 1..891: mol_type = other DNA
atggagcacctgaaggccttcgacgacgagatcaacgccttcctggacaacatgttcggacctagggattctagagtcaggggatggtttatgctggactcatacctgccaaccttctttctaacagtcatgtacttactgagcatatggctgggtaacaagtatatgaaaaaccgtcccgccctgtcccttcgcgggattctgacactttacaatctgggaatcactctgttatctgcttacatgctggccgagctcattctgagtacttgggaggggggctataatcttcaatgtcaggaccttacatccgccggggaggccgacatccgggtggcgaaggtactgtggtggtactatttctcgaagtctgtggagtttttggacactatcttttttgtgctcaggaagaaaacttcacaaattaccttcctccacgtgtatcatcacgccagtatgttcaatatatggtggtgcgtccttaattggatcccatgtggccaatcgttctttgggcccactctcaacagtttcatccacattctgatgtacagctactatggcctgagcgtgtttccatccatgcacaagtacctctggtggaaaaagtatcttactcaagcccagttggtgcagtttgttcttacaatcactcatacgatgtctgctgtggtcaagccatgcgggtttccctttggatgtcttatctttcaatcttcctatatgctcactcttgttatcctgtttcttaatttctatgtacagacttacaggaaaaaacccatgaaaaaggatatgcaagagccacctgcgggcaaggaggtgaagaatgggttttctaaggcgtatttcactgccgcaaacggagtgatgaataagaaggcacagtag

SEQ ID NO: 186491 - DNA, 813 bp, synthetic construct
  misc_feature 1..813: note = Description of Artificial Sequence: Synthetic coding sequence
  source 1..813: mol_type = other DNA
atggtgaccgccatgaacgtgagccacgaggtgaaccagctgttccagccttacaacttcgagctctctaaggacatgagacccttcttcgaggagtattgggccacaagtttccccatcgctctcatctatctggtgttgatcgcagtgggtcagaattacatgaaggaacggaaaggatttaatctgcagggaccccttatcctttggagtttctgtcttgcaatcttctctatcttgggagccgtccgaatgtggggtatcatggggaccgtgctgcttactgggggccttaaacagacagtctgtttcatcaactttatcgataacagcacagttaagttctggtcttgggtgttccttctgtcgaaagtgatagagctgggtgacacggcattcattatcctaaggaaaaggccgcttattttcatacactggtaccatcattctacagtactcgtttataccagtttcggctataaaaacaaggtccctgcgggaggatggttcgtgacaatgaattttggggtgcacgccatcatgtacacttattataccctcaaggctgctaacgtaaagccaccaaagatgctgcccatgttaattacaagcttgcagatcctacagatgttcgtcggggcaattgtaagtatcctgacttatatttggcgacaggaccagggctgccatacaaccatggagcatctgttttggagcttcattctgtatatgacctactttatcttgttcgctcacttcttttgccaaacatacatcagaccgaaagtgaaggctaaaactaagtctcagtag

SEQ ID NO: 186492 - DNA, 945 bp, synthetic construct
  misc_feature 1..945: note = Description of Artificial Sequence: Synthetic coding sequence
  source 1..945: mol_type = other DNA
atgggcctgctggacagcgagcccggcagcgtgctgaacgtggtgtcgacagccttgaatgacacagtggaattctataggtggacctggtccattgcagacaagagagtagagaactggcctctgatgcaatccccatggccaacactgtctatcagcacattgtacctgctgttcgtctggctgggccccaagtggatgaaagaccgggaacccttccagatgcgcctggtccttatcatttacaatttcggaatggttcttctcaacttgtttattttccgggagctgtttatgggatcttacaacgccggatatagctacatctgtcagtctgtggattattcgaataatgtccacgaggtgagaattgctgccgccctatggtggtacttcgtcagcaaaggggtggaatatctagacaccgtttttttcatcctccgaaagaagaataatcaggtgtcctttctgcatgtgtaccaccactgcactatgtttaccctgtggtggattggtatcaagtgggtggccggaggacaagccttctttggggcgcagctaaacagctttatccatgtgattatgtattcctattatgggctaactgcttttggtccttggatacagaaatacctctggtggaaaagatacctcactatgctgcagctgatccagtttcacgttaccatcggtcacacagccctttcactgtataccgactgtccattcccaaagtggatgcactgggcattgatcgcctatgcgatatcctttatctttctgttcttgaacttttacattaggacctacaaggagcccaaaaagccgaaagcgggaaagactgccatgaacggcataagcgcaaatggcgtaagcaagagcgaaaaacagctgatgattgagaatggcaaaaaacagaaaaacggaaaagccaaaggggattag

SEQ ID NO: 186493 - DNA, 900 bp, synthetic construct
  misc_feature 1..900: note = Description of Artificial Sequence: Synthetic coding sequence
  source 1..900: mol_type = other DNA
atggagcacttcgacgccagcctgagcacctacttcaaggccctgcttggcccccgcgatacccgagttaaggggtggttcctactggataattacatacctacatttatttgcagcgtcatctatttgctgatagtctggctgggtccaaaatacatgcgaaataaacagccattcagctgtaggggcatcctggtagtttataacctgggcttgacattgctgtcactgtacatgttctgcgaacttgtgactggtgtgtgggaaggaaagtataacttcttttgccaaggtactaggacagcaggcgaatctgacatgaagatcatcagggtactctggtggtactacttcagcaaactgattgaattcatggataccttctttttcattttgcgcaagaacaaccaccagattactgtgctgcacgtgtatcatcacgcttcgatgctgaatatttggtggtttgtgatgaactgggtcccgtgcggacactcatacttcggcgcaaccttaaactccttcattcatgtgctgatgtatagctactacgggctttcctccgtaccctctatgcgtccttacctctggtggaagaagtatatcacccaggggcagttactgcaatttgtgctgacgataattcagacatcctgcggggtgatttggccctgcacgttcccacttggatggctttattttcagataggctacatgatcagcttgattgcactttttaccaatttttacattcagacctacaacaaaaagggcgctagtaggagaaaggaccacttgaaggaccaccaaaacgggagcatggcagctgtgaatggtcataccaatagtttctcacctttagagaataacgtgaaacctcgcaaactacggaaagattag

SEQ ID NO: 186494 - DNA, 267 bp, synthetic construct
  misc_feature 1..267: note = Description of Artificial Sequence: Synthetic coding sequence
  source 1..267: mol_type = other DNA
atggagcacttcgacgccagcctgagcacctacttcaaggccctgctgggtcccaggggaattagctcatcagtgcttaggatggggcccccattacatacagtcgtgggatggcttcagcagctccaagcagcccatagcgaggaagaagagaagatgttccacctgtgcggcttcaaacataaagaggtggtctctcagtcttcactccccgccgtaatacctcagaactcactagcaaccattgcatcccatgcaccagcctag

SEQ ID NO: 186495 - DNA, 870 bp, synthetic construct
  misc_feature 1..870: note = Description of Artificial Sequence: Synthetic coding sequence
  source 1..870: mol_type = other DNA
atggagcacttcgacgccagcctgagcacctacttcaaggccctgctgggacctcgcgataccagagtgaaaggctggttcctgttggacaactatatacccactttcatttgctctgtaatttacctgctgattgtgtggcttggccctaaatacatgaggaataagcagcccttttcctgcagggggatactggtggtgtacaaattctgcgagctggtcacaggcgtgtgggaaggcaaatataattttttctgccaaggaactagaacagcaggcgaatctgatatgaaaatcatccgggtcctgtggtggtattatttctccaaacttatcgagtttatggacaccttcttcttcattctaaggaagaataaccaccaaattactgtcttgcacgtgtatcatcatgcgtcgatgctgaacatttggtggttcgtaatgaattgggttccatgtggtcactcttatttcggcgccactttaaattcttttatccatgtgctgatgtatagttattacggtctgagttccgtgcctagcatgaggccctacctctggtggaagaagtacatcacgcagggacaactgttgcaattcgtgctgactatcattcagacctcctgtggtgttatttggccttgtacctttcccctgggctggctctattttcagatcggctacatgatttctctaattgccctgtttaccaatttttatatccagacgtataataaaaaaggggcatccagaaggaaagaccacctaaaggaccaccaaaacggatcaatggcagctgtcaacggccatactaactccttctcgcctctggaaaataacgttaagccccgaaaactccgcaaagattag

SEQ ID NO: 186496 - DNA, 981 bp, synthetic construct
  misc_feature 1..981: note = Description of Artificial Sequence: Synthetic coding sequence
  source 1..981: mol_type = other DNA
atggagcacttcgacgccagcctgagcacctacttcaaggccctgctgggccccagggacacacgcgtaaaggggtggttcctgcttgacaactacattccgacctttatctgcagtgttatttatttgctgatcgtatggcttgggccaaaatatatgcgaaataaacagcccttttcgtgtagaggtattctggtggtgtacaatttgggactgacactattgagcctctatatgttctgcgaaagcaaacgggaacagccgcgcaggtcagcttgtgcctccagaactgacccatcaacacagcagcagttaccagagaaccgacttgtaaccggagtgtgggagggtaagtataacttcttctgccaaggcacaagaactgcgggagagtccgacatgaagattatccgcgtcttatggtggtactattttagtaaattgattgagtttatggatacctttttcttcatcctgagaaaaaacaaccatcagattaccgtccttcacgtctaccaccatgccagcatgctaaacatctggtggtttgttatgaactgggtaccctgcgggcactcttattttggcgcaaccctaaactctttcatacatgtgttgatgtacagctattatggcctgagctcagtcccttcaatgcgcccctacctatggtggaaaaaatatattacacagggccaacttctccaatttgttctaactataattcagacctcgtgtggcgtcatctggccatgcaccttccctctcggctggctttacttccaaatcggttatatgatcagcttgattgcgctgtttactaatttttatattcagacctacaacaagaagggcgcaagccgccgcaaggaccatcttaaggaccaccagaacggtagtatggcggctgtgaacggccacaccaattccttctcacctcttgaaaacaatgtgaaaccccgcaagctgcggaaggactag

SEQ ID NO: 186497 - DNA, 900 bp, synthetic construct
  misc_feature 1..900: note = Description of Artificial Sequence: Synthetic coding sequence
  source 1..900: mol_type = other DNA
atggagcacttcgacgccagcctgagcacctacttcaaggccctgttgggccccagagacaccagagtaaaaggctggtttctgctagataactacatccccaccttcatctgttctgtgatttacctgctcattgtgtggttgggtcctaaatacatgcgcaacaagcagcctttcagctgcagagggatccttgtggtgtacaacctgggactcaccctattgtccttatacatgttctgtgagttggtaaccggcgtctgggagggcaaatataatttcttctgtcagggaactcggaccgcaggcgagtcagacatgaagattatccgtgtgctctggtggtactacttttctaagctgatcgaatttatggatacatttttttttatattaagaaaaaacaatcatcagataacagtgctgcacgtataccaccacgcctccatgctaaatatatggtggttcgttatgaattgggtcccgtgtggtcactcttattttggagccactcttaactctttcattcatgtcctgatgtactcatattatggcctgtccagcgttcccagcatgcgcccttacctgtggtggaaaaaatatatcacacaaggccagcttcttcagttcgtcttaacaataatccaaacgagttgcggcgtcatttggccatgcacatttccattaggctggttatattttcagatcggttacatgatttccctaatcgccctgttcaccaatttctacatccagacgtacaacaagaagggcgcttcaaggagaaaagaccacttgaaggatcatcagaatgggtcgatggcagcagtcaatggccacactaacagcttttcgccgctggaaaataacgtgaagccgcgcaagctgaggaaggattag

SEQ ID NO: 186498 - DNA, 798 bp, synthetic construct
  misc_feature 1..798: note = Description of Artificial Sequence: Synthetic coding sequence
  source 1..798: mol_type = other DNA
atgaacatgagcgtgctgaccctgcaggagtacgagttcgagaagcagtttaacgaaaacgaagcaatccaatggatgcaggaaaactggaaaaagtctttcctgttctccgccctctacgccgccttcatattcggaggaaggcacctgatgaacaagcgggcgaaatttgagctccgcaagcctcttgtcctgtggtcactgacgttggccgtgttctcaattttcggggcgctcaggaccggggcctacatggtgtacatccttatgactaaagggttgaaacagagcgtgtgcgaccagggattttacaacggtccagtgagcaaattttgggcctacgctttcgtgctgtctaaagcaccagaactcggtgatactatttttattattctgcgaaagcagaaattaatatttctccattggtatcatcacattaccgtgctcctatattcctggtactcatacaaagatatggttgcggggggcggatggttcatgactatgaactacggtgttcacgctgttatgtatagttactacgcactgcgcgccgcgggcttccgcgtgtctcgcaagtttgcgatgttcattaccctgagccaaatcactcagatgctgatgggctgtgtggtgaactatctggtgttctgctggatgcagcacgaccagtgtcactctcattttcaaaacatattttggagttcactgatgtacctctcatatctcgttctcttctgccacttcttctttgaggcctacataggtaagatgagaaaaaccaccaaggctgaatag

SEQ ID NO: 186499 - DNA, 798 bp, synthetic construct
  misc_feature 1..798: note = Description of Artificial Sequence: Synthetic coding sequence
  source 1..798: mol_type = other DNA
atgaacatgagcgtgctgaccctgcaggagtacgagttcgagaagcagttcaacgagaatgaggccatacagtggatgcaggaaaactggaagaaatcattcttattcagcgccctttatgctgcctttatctttggagggcggcacttaatgaataagagggccaaattcgagcttcgtaagcccctcgtcctctggtctctgactctggcagtttttagcatcttcggagccctccgaacaggcgcgtacatggtttacattttaatgaccaaggggctgaaacagtccgtttgtgaccagggcttctacaatgggcccgtcagcaaattctgggcctacgcctttgtattatctaaggcaccggagctgggcgatactatatttattatactccggaaacaaaagctgatttttctgcactggtatcaccatataaccgtgttgctgtattcctggtactcatacaaagacatggtggcaggcggcggttggttcatgacgatgaattatggagtgcacgctgtcatgtactcttattatgctctgagggcggctggtttcagggtttctcgaaaatttgccatgttcattactctctcacaaattacccagatgctcatgggatgcgtggttaattacttagtgttttgttggatgcagcacgaccaatgtcactcccattttcagaatattttttggagcagcttgatgtacctgtcttatcttgtgctcttttgtcacttcttcttcgaggcctatattggcaagatgcgaaagaccacgaaggccgagtag

SEQ ID NO: 186500 - DNA, 327 bp, synthetic construct
  misc_feature 1..327: note = Description of Artificial Sequence: Synthetic coding sequence
  source 1..327: mol_type = other DNA
atgaacatgagcgtgctgaccctgcaggagtacgagttcgagaagcagttcaatgaaaatgaggccatccagtggatgcaggagaactggaaaaagagctttctattctctgccctctacgccgccttcatatttggtgggcgccaccttatgaacaaaagagccaaattcgagctgaggaagcctctggtgctgtggtctttaaccctggctgttttttccatttttggagcattgcgtacaggcgcctatatggtgtatattctgatgacaaagggtctcaagcagtctgtgtgcgaccaagggttttacaacgggcccgtctag

SEQ ID NO: 186501 - DNA, 414 bp, synthetic construct
  misc_feature 1..414: note = Description of Artificial Sequence: Synthetic coding sequence
  source 1..414: mol_type = other DNA
atgaacatgagcgtgctgaccctgcaggagtacgagttcgagaagcaattcaacgaaaacgaggctatacagtggatgcaggagaactggaaaaagagcttcctgttttccgccttgtacgccgcatttatttttggagggagacatctgatgaataagcgcgccaagtttgaacttcggaagccattggtgttgtggtctctgactctggctgtgtttagcatatttggggctcttaggacaggggcttacatggtctacatcttgatgactaaagggctgaaacagtccgtttgtgatcaggggttttacaatgggccggtctccaaattttgggcctatgccttcgtcctgagcaaagcccccgaactgggagacacgatctttattattctgaggaagcagaagctctag

SEQ ID NO: 186502 - DNA, 846 bp, synthetic construct
  misc_feature 1..846: note = Description of Artificial Sequence: Synthetic coding sequence
  source 1..846: mol_type = other DNA
atggccttcagcgacctgaccagccggaccgtgcacctgtacgacaattggattaaggacgcagatccccgtgtggaggattggctgttgatgtcgagcccactgccacagacaattctcctggggttctacgtgtattttgtcacgagccttgggcctaaactgatggagaatcggaaaccattcgagctgaaaaaagcgatgataacatataactttttcatcgtgttgttctccgtctacatgtgttatgagttcgtcatgagcgggtggggcataggttactcttttaggtgtgacatcgtagactactcaaggtccccgacagcacttaggatggctaggacctgttggctgtattacttttcgaagtttatcgaactgctggacaccattttctttgtcctccgcaaaaagaatagtcaggttacatttctccacgtgttccatcacaccattatgccctggacctggtggtttggggtaaaattcgcagctgggggattaggaacctttcacgctctgctaaacactgctgtacacgtggtgatgtattcctactacggcctatctgcgctgggtccagcttaccagaaatacctgtggtggaaaaaatacctcacatcattgcagctcgtacagttcgtaatcgtagctattcacatctctcagttcttttttatggaagattgcaagtatcagttccctgtttttgcctgcataatcatgtcatattcgttcatgttcctgctcctgtttctgcatttttggtatcgggcctatacaaaagggcaaagactgcccaagactgttaaaaacggcacatgcaagaacaaggataactag

SEQ ID NO: 186503 - DNA, 846 bp, synthetic construct
  misc_feature 1..846: note = Description of Artificial Sequence: Synthetic coding sequence
  source 1..846: mol_type = other DNA
atggccttcagcgacctgaccagccggaccgtgcacctgtacgacaattggatcaaggacgctgaccctagagtggaagattggctgttaatgagtagtcccctcccacagactatcttgctcgggttctatgtctatttcgttacgagcctgggccccaagctgatggaaaaccgaaagcccttcgagctgaagaaagctatgattacctataacttcttcatcgttttattttctgtgtacatgtgttatgagtttgtcatgtcgggatggggcatagggtacagttttagatgtgacattgtcgattactcgagatcacccaccgccctgcgtatggcccgcacatgttggttatactacttttcaaaatttatcgaactgctcgacacgatcttctttgtcttgcggaagaagaatagtcaagtgacgttcctgcacgtgttccatcacacaatcatgccctggacttggtggttcggggtgaagttcgcagccggcggcctggggaccttccacgccctgctgaataccgccgtgcacgtagtcatgtatagctactatggattgagcgcattaggaccagcgtaccaaaagtatctgtggtggaaaaaatatttaacctctctgcaactggtgcaatttgttatcgtggcaatccacataagccaatttttttttatggaggactgcaagtaccagtttccggtctttgcttgcatcatcatgtcctacagcttcatgtttctgctgctattcttgcatttctggtaccgggcatatacaaagggacagcgcctgcccaagactgtcaagaatggcacatgcaagaacaaagataactag

SEQ ID NO: 186504 - DNA, 498 bp, synthetic construct
  misc_feature 1..498: note = Description of Artificial Sequence: Synthetic coding sequence
  source 1..498: mol_type = other DNA
atggccttcagcgacctgaccagccggaccgtgcacctgtacgacaattggatcaaagacgcagatccccgcgtcgaagactggttgcttatgtcctctccattacctcagactatcttgctgggcttctatgtgtacttcgtgacttccctcggcccaaagcttatggaaaacagaaaaccctttgaactcaaaaaggccatgataacgtacaatttcttcatcgtactgttttccgtatacatgtgttacgagtttgtgatgtccggatggggcatcggctactccttccgatgtgatatcgtggattattccaggtcgcccacggccctgcggatggccagaacctgctggctctattatttctccaaattcatcgaactgctggataccattttctttgtgctgcggaagaagaactcacaggtgacctttctgcacgtgttccaccacaccataatgccctggacctggtggttcggcgtgaaatttgcctag

SEQ ID NO: 186505 - DNA, 846 bp, synthetic construct
  misc_feature 1..846: note = Description of Artificial Sequence: Synthetic coding sequence
  source 1..846: mol_type = other DNA
atggccttcagcgacctgaccagccggaccgtgcacctgtacgacaactggatcaaggatgctgacccgcgagtcgaggactggctgcttatgagtagccccctcccacagaccattctgctgggcttttacgtatatttcgtcacctccttggggccaaaactgatggagaatcgtaaaccattcgaactcaaaaaagctatgattacatacaatttctttatcgtgctatttagtgtgtatatgtgctacgagttcgtgatgagtggctggggcatcggttacagctttcggtgtgacatagttgattacagtcgatctcctacagcactgcgaatggcccgcacatgttggttgtactatttttccaagttcatcgaacttttagatactatcttttttgtcctgcggaaaaagaattcccaggtcacatttctacatgtcttccaccatactataatgccttggacctggtggttcggagtcaaattcgcggccggggggctgggtacatttcatgccctgctcaatactgccgttcacgttgtgatgtattcatattatggattgagtgccctcggaccagcctaccaaaagtatctgtggtggaagaaatatctgacctctcttcagctggtgcagtttgtgatcgtggccatacacatttcccagtttttctttatggaagactgcaagtaccaatttcccgtgttcgcttgcattattatgtcctattccttcatgtttttattgctttttcttcatttctggtaccgcgcttacaccaagggtcagagactgcccaagacagtcaagaacggcacctgtaagaacaaggataactag

SEQ ID NO: 186506 - DNA, 498 bp, synthetic construct
  misc_feature 1..498: note = Description of Artificial Sequence: Synthetic coding sequence
  source 1..498: mol_type = other DNA
atggccttcagcgacctgaccagccggaccgtgcacctgtacgacaattggatcaaggatgccgatcccagagtcgaagattggcttttgatgtcaagccccctgcctcagaccatactgctcggtttttacgtctattttgtgacgagtctggggcccaagctcatggagaataggaaaccatttgagcttaagaaggctatgatcacgtacaacttctttatcgtcctgttctcagtgtacatgtgctacgagtttgtgatgtcgggatggggcataggctatagctttaggtgcgacatagttgattactcaagatcacccacagcactgagaatggcgcgtacctgctggttgtactacttctctaagtttatcgaactgttagataccatttttttcgttctgcgaaagaaaaattcgcaggtgacattcctacatgttttccaccacaccattatgccatggacctggtggtttggtgtcaaatttgcttag

SEQ ID NO: 186507 - DNA, 921 bp, synthetic construct
  misc_feature 1..921: note = Description of Artificial Sequence: Synthetic coding sequence
  source 1..921: mol_type = other DNA
atggccgccgccgccgccgccgccgccgccgccggcgccgccggcgggcgtggcagcggccccgggcggaggcgacacctagtacctggtgctggcggggaggcaggcgagggggcccccggcggggctggagactatggaaacggcctggaatcggaggaactggagcctgaggagctcctcctggaacctgaaccggaacccgaacccgaagaagagccccctaggccgagggccccccccggggcaccagggccagggcccgggtccggagcccctggaagccaagaggaggaggaggagccaggactggtggagggagatcccggcgatggcgcaatagaagaccccgagctagaggccatcaaggcgagggtgcgcgaaatggaagaggaggctgagaagcttaaggagctccagaacgaagtggagaagcagatgaacatgtcccccccccctggtaacgcagggcccgtgataatgtccatcgaagaaaagatggaagcggacgcacgcagcatttacgtgggaaacgtagactacggggccacagccgaggaactagaggcacattttcacggctgcggtagcgtgaatcgggtcactattctttgcgacaagttctcaggccacccgaagggatttgcttatatcgaattttccgacaaggaaagtgttcggacttcactggctctggatgagtcactgtttagaggcaggcaaattaaggtgattcctaagcgcaccaaccgtcccgggatatctaccacagaccgcgggtttcctcgtgcccggtacagagcacgtactaccaactacaattcctctcgctcaagattttactcaggattcaactcccggccccgcggtcgggtatacaggggccgggcccgcgccacatcttggtacagtccttattag

SEQ ID NO: 186508 - DNA, 1407 bp, synthetic construct
  misc_feature 1..1407: note = Description of Artificial Sequence: Synthetic coding sequence
  source 1..1407: mol_type = other DNA
atggccatcgccaccagcgtgtacgtggtgcccccccccgcccggccttgcccaacctcgggccccccagcaggtccttgtcctccctctcccgatctcatctataagatacccagagccagcggtacccaattggctgcccctcgcgacgcccttgaagtctacgatgtccctccaacagcactccgcgttccctcttctggtccgtatgactgtcctgctagcttcagccaccccttgactagggtcgcgcctcagccccccggagaggacgacgccccatatgatgtacccctgacgcccaaaccacccgcagagttggagcctgatctggagtgggaaggtggacgggagcccggaccgcctatttacgcagcacctagtaatctcaaacgggcttctgccctgctgaatctttatgaagcccccgaggagctcctcgctgacggagaagggggcggaaccgacgaaggtatctatgacgtccccttgctgggaccggaagcccctccgtcgccagagccacccggggcattagccagtcatgaccaggacactctggctcaactgctggcccggtccccgccgccccctcatcgtcccaggctcccttccgccgagtccttgtcacgtagacccctgcccgccctgcccgtgccagaagcaccgtcgccatccccagtgcccagtcccgcaccaggccgcaaaggatctatccaagataggcccttgccccctcccccaccccgcctgcctggatacgggggtcccaaggttgagggcgacccggaagggcgagagatggaagatgaccccgccgggcaccacaacgaatatgagggaatcccgatggccgaggaatacgactacgtgcacctcaaggggatggataaggcgcaaggatcccgcccccccgaccaggcatgtacaggggaccctgagctacccgagcggggcatgccagccccccaggaggctttatcccccggggagcccctggttgtgtccacaggcgaccttcagctgctttacttctacgcaggtcagtgccaatcgcactatagcgcccttcaggccgccgtggctgcacttatgagtagcacacaggctaatcagcctcccagactgttcgtacctcactctaagagggtggtggtagccgctcaccggctcgtgtttgtgggtgacaccctggggcgccttgctgcatcggcacctctgcgcgcacaggtgcgcgctgcaggtacggctctcggccaggccctgcgggccaccgtgcttgctgtcaagggggccgccttggggtatccaagtagccctgctatacaggagatggtgcagtgtgtgacagaactcgccgggcaggccctgcagttcaccactttgctgacaagtctcgctccatag

SEQ ID NO: 186509 - DNA, 1179 bp, synthetic construct
  misc_feature 1..1179: note = Description of Artificial Sequence: Synthetic coding sequence
  source 1..1179: mol_type = other DNA
atggccatcgccaccagcgtgtacgtggtgcccccccccgcccggccatgtccgacttctgggcccccagccggcccatgtcccccaagtccagacctgatttataagatccccagagcctccggaacccagctggccgcgcctcgggacgctcttgaggtttacgatgttccaccaaccgcactgagagtgccttcttctggcccctatgactgcccagcatctttctcccacccccttacaagggtcgccccacagcccccgggggaggatgacgcacctcctagccctgagccaccaggcgccctggccagccacgaccaggacactctggcccagctgctggctcgctctcctccaccgccacaccggccacgcctgccgagcgcagaatccctgagccgaaggccactgccagcattgcccgttcccgaagcccccagcccctcacctgttccatcaccagctcccggacggaagggttccattcaggacagaccgctgccccctccgccgcctcggctgcccggctacgggggtcccaaagtcgagggcgatccagagggtagggaaatggaagatgatcctgcaggacaccacaatgagtatgagggaataccaatggccgaagagtatgactacgttcatttaaagggcatggataaggcccaggggagcagacccccggaccaggcttgtactggtgacccagagctgccggaaaggggcatgccagccccacaggaagccctcagtcccggtgagcccttagtcgtgagcaccggcgatcttcaattgctgtacttctatgccggtcagtgccagtcccactactcagccctccaagccgctgtggctgccctgatgtcgagcactcaggccaaccagccacctagactcttcgtgccacactctaagcgcgtggtggtggcagctcaccgcctcgtgtttgtgggtgacacactgggtcggttggctgccagcgcaccacttcgggctcaggttcgcgctgctggaaccgctctgggccaggcattacgggctactgtgctcgccgtgaagggagccgcattaggctacccctcgagccccgctattcaggaaatggtccagtgtgtgactgaattagccggacaggccctgcagttcacaacgctgctcaccagcttagccccctag

SEQ ID NO: 186510 - DNA, 1326 bp, synthetic construct
  misc_feature 1..1326: note = Description of Artificial Sequence: Synthetic coding sequence
  source 1..1326: mol_type = other DNA
atgagcgagcgggaggtgagcaccgcccccgccggcaccgacatgcccgccgcgaagaagcaaaaactatcgtcagacgagaattctaaccccgacctttcgggcgacgaaaatgatgacgccgtgtctattgaaagtggcactaacactgagaggccagacacccccacgaacacacccaatgcacccggtcgtaaaagttggggcaagggaaagtggaagagcaaaaagtgcaaatattcttttaagtgcgtcaacagtctcaaagaggatcacaaccagcctctgttcggagttcagtttaattggcactccaaggagggtgatcctctggtgttcgccaccgttggcagcaaccgggttacgttatacgagtgtcacagtcaaggggagatccgactgttgcagtcttacgtagatgccgatgcggacgaaaatttttacacatgcgcctggacctatgacagcaatacctcgcaccccctcctggcagtcgccgggagtcgaggcatcatcaggatcattaaccccatcaccatgcaatgtatcaagcactacgttggccacgggaatgccatcaacgagttaaagtttcatccccgcgatccgaatctgcttcttagtgtctccaaggatcacgccctgagactgtggaatatccagaccgacacattggtggccatatttgggggtgtggaaggccatagagatgaggtgttgagcgctgattacgacctgcttggggagaaaattatgtcctgtggaatggaccatagtctcaagctgtggcgcattaattccaaacgtatgatgaatgcaattaaggaatcctatgactacaacccgaataagaccaacagaccatttatcagtcagaagatacactttcctgatttttcaacccgggatattcaccggaattatgtcgattgtgtgcggtggctgggagacctcattctgtccaagtcatgcgagaatgctatcgtttgttggaaacctggaaagatggaggacgatatcgataagattaagccttccgaaagcaacgtcaccatcctgggcaggttcgattatagtcagtgtgacatttggtatatgagatttagcatggatttttggcagaaaatgctggcactgggcaatcaggttggcaaactgtatgtgtgggatctagaggtggaagatcctcacaaggcgaaatgtactacgctgacccaccacaagtgcggtgctgccatacgacaaaccagtttcagccgggacagcagtatcttgatcgccgtctgtgacgacgcctcgatatggaggtgggatcgtttgcgttag

SEQ ID NO: 186511 - DNA, 1203 bp, synthetic construct
  misc_feature 1..1203: note = Description of Artificial Sequence: Synthetic coding sequence
  source 1..1203: mol_type = other DNA
atgagcgagcgggaggtgagcaccgcccccgccggcaccgacatgcctgccgcaaagaagcagaagctgagttccgacgaaaattctaatccggatttgtccggagatgaaaatgacgacgctgtctcaatcgaaagcggcaccaataccgaaaggcctgacacccctacgaatacaccgaacgcaccaggccgcaagtcctggggcaaaggtaagtggaagagcaaaaagtgcaagtatagctttaaatgcgtaaacagcttaaaagaggaccacaatcagcccttgttcggcgtgcagttcaactggcattctaaggagggcgatcctttggtctttgcaacagtcggttccaaccgtgttaccctctacgagtgccattcccagggggaaattagactgctgcaatcttacgttgatgcagatgccgatgaaaacttttatacatgtgcttggacttatgactctaatacaagtcacccactactggcagtcgcggggtcacgcggtatcatccgcatcattaaccccatcacgatgcagtgcatcaaacattatgtcggccacggaaatgcaatcaacgaactcaaatttcacccaagggatcccaatctgctgctgtccgtgtccaaagaccacgccctgcgcttatggaatattcagactgacactttggtggctattttcggcggggttgaagggcaccgggacgaagtcctgtctgccgactacgacttacttggggagaaaataatgagttgtggtatggatcacagcttgaagttatggcggattaactccaagaggatgatgaacgccatcaaggagagctacgactacaaccctaataaaactaaccggccctttatttctcaaaaaatccactttccagacttcagtacccgtgatatccatcgcaactatgtggattgcgtcaggtggcttggggacttgattctcagcaagagctgtgagaacgcgatagtgtgttggaagcctggcaaaatggaggacgacattgacaagatcaaacccagtgagtccaatgtcacaattctcgggaggttcgactactctcagtgtgatatctggtacatgagattctctatggatttctggcagaaaatgttagctctcggcaatcaagtgggtaaactatacgtgtgggacctggaggtcgaggacccacacaaagccaagtag

SEQ ID NO: 186512 - DNA, 1401 bp, synthetic construct
  misc_feature 1..1401: note = Description of Artificial Sequence: Synthetic coding sequence
  source 1..1401: mol_type = other DNA
atgagcgagcgggaggtgagcaccgcccccgccggcaccgacatgccagccgccaagaagcaaaagctgagcagcgacgaaaacagtaaccctgacctctccggcgatgagaacgacgacgctgtctccatcgaatctggcactaacacagaaagaccagacacacccacaaacacccccaatgccccagggaggaaatcctggggcaagggcaagtggaagtcgaagaaatgcaagtacagttttaaatgcgttaacagcctgaaagaggatcacaaccaacccctgtttggcgtgcagttcaattggcacagcaaggagggcgacccccttgttttcgcgactgtcggttcaaaccgagttactctctacgaatgccactcccaaggcgaaattagattactgcagagctacgtggacgcagatgctgacgaaaatttctacacatgcgcttggacatacgactctaacacttctcatccactcctcgctgttgctggttcacgaggcattattcgcattatcaatcccattactatgcagtgtattaagcactatgtcggacacggcaatgccattaacgagctgaagttccatccacgcgacccaaacctgctgttgagcgtgtctaaggatcacgcactgaggctatggaacatacagactgatacactggtagctatatttggaggcgtcgaaggtcatagagacgaagtcctgtctgcagattacgacttgctgggagaaaaaattatgtcctgcggtatggatcattcattaaagctgtggcgaattaatagtaaacggatgatgaatgcaataaaggagagttacgactataatccaaacaaaactaatagaccatttatatcacagaaaattcactttcccgattttagtacacgagatatccataggaactacgtagactgcgtcagatggttaggggacctgatcctctctaaatccggcagggccattttacattctcaccagcagtgcatgagagatcctgtctcccccaacctgagacagcatctttcctgtgagaacgctattgtctgttggaaacctggcaagatggaggatgacatcgacaagattaaaccgagcgagtccaatgtcactatactgggccgattcgattactcccagtgcgacatttggtatatgcggttttctatggatttttggcagaaaatgctagctctgggtaatcaggtcgggaagctgtacgtctgggatctcgaagttgaggatcctcacaaggccaaatgcactacacttacccatcacaagtgcggtgctgccatccgccagacaagtttttctcgggattcaagtatcctgattgcagtatgtgatgacgcttctatttggagatgggaccggctaagatag

SEQ ID NO: 186513 - DNA, 471 bp, synthetic construct
  misc_feature 1..471: note = Description of Artificial Sequence: Synthetic coding sequence
  source 1..471: mol_type = other DNA
atgagcgagcgggaggtgagcaccgcccccgccggcaccgacatgccagcagccaagaagcagaagctgtcatccgacgaaaactctaatcctgacctgagtggcgacgaaaatgacgacgccgtgtccattgagtccggcacaaatacggaacgccctgatacccctacaaacacccccaacgctccagggcggaaatcttggggcaagggaaagtggaaaagcaagaagtgtaagtacagcttcaagtgtgtaaactccctcaaggaggatcacaatcagcctctcttcggggtgcaatttaattggcactccaaagagggggatccccttgtttttgctaccgtgggttctaatagagtgaccttgtacgagtgccattcgcagggtgagatacgtctgcttcagtcttacgtggacgccgacgctgatgaaaacttttatacttgtgcctggaaatgctatcagtag

SEQ ID NO: 186514 - DNA, 660 bp, synthetic construct
  misc_feature 1..660: note = Description of Artificial Sequence: Synthetic coding sequence
  source 1..660: mol_type = other DNA
atggacaactacgccgacctgagcgacaccgagctgaccaccctgctgaggaggtataatattccccatgggcccgtcgtggatctgaacagtactcgcggtgacgcagatatgtatgacctcccaaaaaaagaggatgccttactgtatcagtctaaaggttataatgatgattactatgaggaaagctatttcacgaccagaacctatggcgagcctgaaagcgccggccctagcagagcagtgaggcagagtgtaactagcttcccagatgctgatgccttccatcaccaagtccacgatgatgatttactcagctccagtgaagaggaatgcaaagatagagagcgccctatgtacggccgggactcagcataccagagtatcacgcattatcgccctgttagcgcgtcacgtagcagcctcgacttaagctactatccaacatcaagttctacctcctttatgtcaagtagtagttctagctccagctggcttactaggcgggccattagaccagagaaccgggccccaggcgcagggttaggccaggatagacaggtgcctttgtggggccaactgctcctctttcttgtattcgtgattgtgttattttttatttaccacttcatgcaagcagaggagggcaatcctttctag

SEQ ID NO: 186515 - DNA, 765 bp, synthetic construct
  misc_feature 1..765: note = Description of Artificial Sequence: Synthetic coding sequence
  source 1..765: mol_type = other DNA
atggacaactacgccgacctgagcgacaccgagctgaccaccctgttacggaggtacaatatcccacatggcccagtggttggaagtacacgacggctttatgaaaagaaaattttcgagtacgaaactcagcgccgcagactcagtccgcccagctcatcagctgcctcttcttactcatttagcgacctaaactccacgcggggggatgcggatatgtatgatcttcccaaaaaggaagacgcactgttataccaaagcaaaggctacaatgatgattactacgaagaaagttattttaccaccagaacatacggggaacccgagtctgcgggcccatcccgcgcagtgagacaaagtgtgacaagttttcctgacgctgatgctttccaccaccaggttcacgacgatgacctcctgtcctcttctgaagaagagtgtaaggaccgggagcggcctatgtatggccgtgatagcgcctaccagtcaattactcactatagacccgtaagtgccagcaggtcctcgctcgacctgtcatattaccccacatcttcttccacctcctttatgagctcttcctcttctagctcttcctggctgacaagacgcgccatccgacctgaaaaccgggcgcccggcgctggattgggacaggaccggcaagtgccattgtggggtcaactgcttctgttcttagtgttcgtcattgtgctttttttcatctatcactttatgcaggctgaggaggggaacccattctag

SEQ ID NO: 186516 - DNA, 441 bp, synthetic construct
  misc_feature 1..441: note = Description of Artificial Sequence: Synthetic coding sequence
  source 1..441: mol_type = other DNA
atgaccaccaacgccggccccctgcacccctactggccccagcacctgagactcgacaatttcgttcccaacgatcgcccaacatggcatatactcgcagggctttttagcgtgaccggcgtgctggtcgtaaccacctggctgctatccggcagggctgcagttgtgccactgggtacttggcgtaggctgagcctgtgttggttcgctgtatgcgggttcattcacctggtaattgagggttggtttgtgctttattacgaagatttgctaggggatcaggccttcttgtcccagctgtggaaagaatatgcgaagggtgacagtcgctatatactcggagataatttcactgtatgcatggaaaccattacggcctgcctgtggggccccttgagcctgtgggtggtgatcgctttcctgcggcaacaccctctgtag

SEQ ID NO: 186517 - DNA, 483 bp, synthetic construct
  misc_feature 1..483: note = Description of Artificial Sequence: Synthetic coding sequence
  source 1..483: mol_type = other DNA
atgaccaccaacgccggccccctgcacccctactggccccagcacttgcgcctagacaattttgttcctaacgatcgccccacgtggcatatcctggctggcctgttcagtgttaccggcgtcctggtggttacgacctggttactctctggccgagcagccgtggtgcccctcggaacctggcgtagactttcgctgtgctggttcgcagtatgtggattcatacatctcgtgattgaaggctggttcgtactgtactacgaagacctactgggggatcaagccttcctcagccaattgtggaaggagtacgcaaagggtgattcgcgatacatactgggtgacaatttcaccgtctgtatggagactataacagcatgtctctggggccccctatctctatgggtggtgattgcttttctgcgacagcaccccctacgtttcattcttcagttggtggtttcagtcggccagatttactag

SEQ ID NO: 186518 - DNA, 693 bp, synthetic construct
  misc_feature 1..693: note = Description of Artificial Sequence: Synthetic coding sequence
  source 1..693: mol_type = other DNA
atgaccaccaacgccggccccctgcacccctactggccccagcacttaaggctggacaattttgtgcccaacgaccggcctacctggcacatcctggccggtctcttcagcgtaacaggcgtgttggtggtcacaacctggttgctatccggaagagccgccgttgtccccttaggtacatggagacgcctgtcactatgttggtttgcagtctgtggctttatccatctcgtcatagaagggtggttcgtgctctactatgaagacttgcttggcgatcaggctttcctgagccagctgtggaaagaatacgctaaaggggattcccgctatatcctgggcgacaattttacagtctgcatggaaacaattaccgcctgcctgtgggggcctctgtccctgtgggtggtgatcgccttcctacggcagcaccctctgcgctttatactacagcttgtggttagtgttggtcaaatctacggcgatgtcctgtactttctgacggaacatagggatgggttccagcacggagaactgggtcaccccctgtatttctggttttactttgtcttcatgaatgcactctggttagtgctccccggcgtgctggtgctggatgctgtcaagcacctaactcacgctcagagtacactggacgccaaggctaccaaagcaaagagcaaaaagaattag

SEQ ID NO: 186519 - DNA, 873 bp, synthetic construct
  misc_feature 1..873: note = Description of Artificial Sequence: Synthetic coding sequence
  source 1..873: mol_type = other DNA
atgtgcctggccggctgcaccccccggaaggccgccgcccccggcaggggagccctgcctcgcgctagactgccaaggactgcccctgccgccgccaccatgtttcaaccggctgccaaacgtgggtttacaatagaatccctggtggctaaggatggcggaacgggcggaggcaccggagggggtggcgccggttcccatctcttggcagcagcagcttctgaagagccccttcgccccaccgccttgaattacccccacccctccgcggccgaagcagcctttgtgtctggtttccctgctgctgcagccgcgggggctggccgaagcctttatgggggacccgagctggtgttccctgaggccatgaaccacccggccctgacagtgcaccctgcccaccaattgggagcatcgccactccagccgccacatagctttttcggggcccagcacagggatcccctccatttctatccatgggtgctgagaaacaggtttttcggccatcgcttccaggcgtcagacgtgccccaagatggactgttgctacacggccccttcgccaggaagcccaaacggatccgaacagctttcagcccttctcaactgctcaggcttgagcgcgctttcgagaagaatcattatgtggtgggcgctgaacgaaaacagctcgctgggtccctctctctctcagagactcaggtgaaagtgtggttccaaaaccgccggaccaagtacaagcggcagaagctggaggaagaaggacccgagtcagagcagaaaaaaaagggcagccaccacatcaaccgctggcgtattgctactaagcaggctaatggggaggacatcgacgtgacttctaacgactag

SEQ ID NO: 186520 - DNA, 759 bp, synthetic construct
  misc_feature 1..759: note = Description of Artificial Sequence: Synthetic coding sequence
  source 1..759: mol_type = other DNA
atgttccagcccgcccccaagcggtgcttcaccatcgagagcctggtagccaaagatagcccattacctgccagcagatctgaggaccccattcgtcctgccgccttgtcatacgccaactcctctccgatcaatcccttcttaaatggctttcactccgcggcggcggctgccgccggccgcggggtttactcaaacccagacctagtcttcgccgaagccgtgtcgcacccccccaaccctgccgtaccagtacatcccgtgccaccgcctcatgccttagccgcacacccactgccctcatctcattccccccatcctctgtttgcaagccagcagcgggacccgtcaaccttttacccctggcttatccaccgctatcgttatctcggccacaggttccaggggaacgacacgtccccggagagctttctgctccacaatgccctcgcccgtaaaccaaagcggattcgaaccgcctttagcccgtctcaacttttgcggctggaacacgcctttgagaagaaccattacgtggtaggcgcagagagaaaacagctggcccattctttaagccttaccgaaactcaggtcaaggtgtggtttcaaaatcggcgcacgaagtttaagagacagaaactagaagaagaaggcagtgactcacagcagaagaagaagggcacccatcacattaatagatggcggatcgcgaccaagcaggccagccccgaggagatcgatgtgactagcgacgactag

SEQ ID NO: 186521 - DNA, 510 bp, synthetic construct
  misc_feature 1..510: note = Description of Artificial Sequence: Synthetic coding sequence
  source 1..510: mol_type = other DNA
atgttccagcccgcccccaagcggtgcttcaccatcgagagcctggtggcgaaagacagtccactccccgccagtcggagcgaagatcccatcagaccagccgctctgagctacgcaaatagtagcccgattaaccccttcttaaatggattccactctgctgccgcggctgccgcaggacggggagtgtattcaaatcccgacctggtcttcgctgaggccgtgtcacatccccccaatccggcagtcccggttcatcctgtgccccctccccacgctctggctgcacatccgttgccatcctcgcacagtccacatcccttatttgcgagtcaacaacgtgacccctccacattctatccgtggttaattcacagatacagatacctgggtcaccgcttccagggcaagagcatggtctcagagccaaaaaataaggtccagaaggccgaggccggcggacggcggctgagatttgcgacaaaagagaagagagatgccccctactag

SEQ ID NO: 186522 - DNA, 957 bp, synthetic construct
  misc_feature 1..957: note = Description of Artificial Sequence: Synthetic coding sequence
  source 1..957: mol_type = other DNA
atggccatcaagagcatcgccagccggctgcggggcagccggcggttcctatctgggttcgtagctggcgccgtggtgggcgcagccggcgccggcctcgcggctcttcaattctttagatctcagggcgcagagggcgcgttgaccggtaagcagcccgatggcgacgctgacaggaaacactgcaagtttaagcccgatccgaacatcccacccaccttctccgccttcaacgaggactatgtagggtctggctggtctcggggccatatggccccggcaggtaataacaagtttagcagcaaagcaatggccgagacattctacctgtccaatattgttccacaggattttgacaataattccgggtactggaaccggatcgaaatgtactgtcgggaacttaccgagcgtttcgaggacgtttgggtggtgagtggtcctctcacactgcctcaaactcggggcgatgggaagaagatcgtttcctaccaagtgataggagaggataacgtcgcagtgccaagccacctatataaagttattctggcccgacgctccagcgtaagcaccgagccccttgctctaggagcgtttgtcgtgcccaacgaggccattggatttcagccccagcttactgagtttcaggtctccttgcaggatctggaaaagctgtccggcctggtcttctttccacacctggatcgcacgtctgacatcaggaatatctgctctgtagacacttgtaagttgttagacttccaggagtttacattatatttatctacacggaagatcgaaggggctcgatctgtcttacgcctcgagaaaatcatggagaacctgaagaacgctgagatagaaccggatgattatttcatgtctcggtatgaaaaaaaactggaagagttaaaggctaaggaacagtccggaactcagattcggaaaccatcctag

SEQ ID NO: 186523 - DNA, 1107 bp, synthetic construct
  misc_feature 1..1107: note = Description of Artificial Sequence: Synthetic coding sequence
  source 1..1107: mol_type = other DNA
atggccatcaagagcatcgccagccggctgcggggcagccggcggttcctgagtgggttcgttgccggagcggttgtgggcgctgctggcgccggactcgcagcgcttcagttctttagatctcagggtgccgaaggagctctgaccggcaaacagccagatggaagcgcggagaaggcagtcctggagcaattcgggtttccactgacggggacagaagcacgatgctacactaaccacgcactgagctatgaccaggctaaacgtgtgcctcgttgggtcttagagcacatcagtaagagcaaaatcatgggagatgctgaccgaaagcattgcaagtttaagcctgacccaaatattcctcccacgttcagtgcgtttaacgaggactatgtagggagtggatggagtagaggccacatggcccctgcaggaaacaataaattctccagtaaggccatggcggagacattctacttgagcaacatcgttccccaggatttcgataacaactctggatactggaataggatcgaaatgtactgccgagaactgaccgagaggttcgaggacgtatgggttgtgtcagggccactgaccctgccccagacccgcggcgacggaaagaagattgtttcatatcaggtcatcggtgaggacaatgtggccgtgccatcccacctctacaaggtgattcttgctcgcagatctagcgtttccaccgaaccattagccctcggggctttcgtggtccctaatgaagcaatcggttttcagccccagctgacagaatttcaggtgtctctgcaggatctggaaaagctctctggactcgtgtttttcccacatctcgatcggacaagcgacattagaaacatctgttcagtggacacgtgcaagcttctcgatttccaagagttcacgctatacctgagtactcgcaaaatcgaaggggcaagaagcgtcctcagattggagaagatcatggagaacttaaaaaacgctgagattgagcccgacgattatttcatgtccaggtacgagaagaaattagaagaattgaaagccaaggagcagagcggtacgcagatcagaaaaccaagctag

SEQ ID NO: 186524 - DNA, 450 bp, synthetic construct
  misc_feature 1..450: note = Description of Artificial Sequence: Synthetic coding sequence
  source 1..450: mol_type = other DNA
atggcccccgccggcaacaacaagttcagcagcaaggccatggccgagaccttttacctgtccaacattgtcccgcaggactttgacaataattctggctactggaacagaatcgagatgtattgtcgtgagctcacagaacgcttcgaggatgtctgggtcgtttccggtccccttactctgccacagactcggggggacggtaagaagatcgtcagctatcaggtaatcggcgaggataatgtcgcagtgccctcccatctgtacaaagatcatgccggatgctgcgtggaaagccccctcgggaccaggacaagcgaggaggccactgcccgcatccaggagcgtgatgacgggggctctgaccagaggtctggattagtcgagctgggcatttatttcgagggccgagccaacagaatctcgggccggatcggttgtcgcgtgtag

SEQ ID NO: 186525 - DNA, 819 bp, synthetic construct
  misc_feature 1..819: note = Description of Artificial Sequence: Synthetic coding sequence
  source 1..819: mol_type = other DNA
atgggctacttcctgaagctgtacgcctacgtgaacagccacagcctgttcgtttgggtgtgcgacagatcatacaaacggtcctttcgacccatgattcttaataaaattaaagagctgtccagaaatcagttctccactatgtcccacctccgcaaagatagccagccttcctcacctggagacgatgccatggatcgcagtgggctgccggacctacaggggagattcgagctctctggcaagaaccgtcaataccccctcgacgccttagaacctcaaccttccataggagacatcaaggatatcaagaaagcagccaaaagcatgcttgatcccgcacacaaaagtcacttccatcccgttaccccatcccttgtctttttgtgttttatcttcgatgggctccaccaggctctgctatcggtgggagtgtctaaaaggtccaacaccgttgtgggcaatgagaatgaggaacgaggcaccccttacgcttctagattcaaggacatgcccaactttatcgctttggagaaaagctccgtgctccgccactgctgcgatctgctgatcgggattgcagctggcagcagtgacaagatttgtacatcttcccttcaggttcaaagacgtttcaaagccatgatggcgtctatcggtaggctcagccatggggaatccgcagatctgctgatttcctgcaatgccgaatccgcgatcggttggatttcaagcaggccatgggtgggggaactgatgttcacactcctgttcggagactttgagtccccattgcacaaactgagaaagtctagctag

SEQ ID NO: 186526 - DNA, 894 bp, synthetic construct
  misc_feature 1..894: note = Description of Artificial Sequence: Synthetic coding sequence
  source 1..894: mol_type = other DNA
atgcgggccctgcgggccggcctgaccctggccagcggcgccggcctgggagcagttgtggaaggatggcgccggcgcagagaggacgcccgtgctgctcctgggttgctgggtagactgcccgtcttgcctgtggcggcagcagccgagctgccacctgtcccagggggtcctcggggcccaggcgaacttgcaaagtacggtctgcctggactcgcacagttaaagtcacgggagtcctatgtcctttgctacgatccccggactcggggcgctctgtgggtggtcgaacagctgcgtcccgaacggctgagaggggacggcgaccgtcgtgagtgcgactttcgcgaggacgatagcgtgcacgcttatcacagagctaccaacgctgactacagagggtccggcttcgatagggggcatctcgcagcagccgccaaccataggtggtctcagaaggccatggatgacacattttacctatcaaacgtcgccccccaggttccccacctcaatcagaatgcatggaataaccttgagaagtattcgcgatctctgactcgttcctaccagaacgtttatgtgtgtaccggcccgctcttcctgccaaggaccgaagccgacgggaagtcatatgtaaagtaccaggtgattggtaagaaccacgttgcagtccctacacatttttttaaggtgcttattctcgaagccgccgggggccagatcgagcttcgaacctacgtaatgcccaacgctccagtggatgaagcaatcccacttgagagatttctggtgccgatcgagtcaatcgaacgcgccagtggtttattgtttgtgccgaatatcttagcgcgtgctggcagccttaaagctatcaccgccggctccaaatag

SEQ ID NO: 186527 - DNA, 2847 bp, synthetic construct
  misc_feature 1..2847: note = Description of Artificial Sequence: Synthetic coding sequence
  source 1..2847: mol_type = other DNA
atggtgttcctgcccctgaagtggagcctggccaccatgagcttcttactgtcctccctcctggccctgctgacggtctcgactccatcgtggtgccaatccaccgaggcctctcctaagcggagtgatggcacaccatttccctggaacaagatcagactgcctgaatatgtgatcccagtacactatgatctgctgatccacgcaaacctgaccacacttaccttttggggcaccactaaggtggaaattaccgcgtcgcagcccacctctaccatcattctccactctcaccatttacagattagcagggcaacattgcggaagggcgcaggcgagcgtctatctgaagaacccctccaggtcctcgaacatccacgccaggagcaaatcgccctcttggcaccagaaccattactggtgggcctaccctataccgtggtaattcactatgcgggcaatctgtccgaaacctttcatgggttctataaatctacatatagaacaaaagagggtgagttgcgcatcctcgcctcaacccagtttgaaccaactgcagcccgaatggctttcccctgctttgatgagccagcctttaaagcaagcttcagtattaaaattagacgcgaacccaggcatctggccatctccaacatgcccttagtgaagtctgtcacggttgccgagggtctcattgaggaccatttcgatgttaccgtaaagatgtcgacgtaccttgtggccttcattatttctgatttcgaatcagtctcaaagatcaccaagtctggagtaaaagtaagtgtgtatgctgtgcccgataagattaaccaagccgattacgcgctcgatgctgccgttaccttactggagttctatgaggactactttagcattccctatccattacctaagcaggacctggcggcaatccccgatttccaatcaggagccatggaaaactggggtctgaccacctaccgggagtccgccctgcttttcgatgcagaaaagtcaagcgctagttccaaattgggcatcaccatgactgtggcccacgaactcgcccaccagtggtttggcaacctggtcaccatggagtggtggaacgatctgtggcttaatgaagggtttgccaaattcatggagttcgtgtcggtttctgtgactcatcccgagctgaaagttggggactactttttcggcaaatgcttcgacgccatggaggtagacgcactgaactcctcccaccccgtgtctacacccgtcgagaatccggctcagattagagagatgtttgatgatgtgagttatgataagggcgcttgcattttgaatatgctgcgcgagtatctatccgcagatgccttcaaatctgggatcgtgcagtatttacagaaacatagttacaagaacaccaagaacgaagacctgtgggactctatggcaagcatctgccctaccgatggagtgaaggggatggacggtttctgctctcgttcccagcatagcagctccagttcccattggcatcaggagggtgtggatgtgaagacaatgatgaacacctggacccttcagaaaggctttccactaattacaatcacagtgcgggggcgcaatgtacatatgaaacaagaacattacatgaagggttccgatggagctccggatactggatatttatggcatgtccccctgacttttattacctccaaaagtgacatggtgcaccggttcctgctcaagaccaagacagacgtgctgattctccccgaggaggtcgaatggattaagttcaatgtcggcatgaacgggtattacatagtgcattacgaagacgacggatgggactctctgacgggtttgttgaagggtacacacacggccgtgtcgtctaacgacagagcatcactgattaacaacgcctttcagctggtatctatcgggaagctcagtatcgagaaagccttggatttgtcactgtacttaaaacatgagaccgagatcatgcccgtctttcaaggccttaacgagctgatcccaatgtacaagctaatggagaagagggacatgaacgaggtggagacccaattcaaggcttttctgatcaggttgctccgcgatcttattgacaagcagacctggacagatgagggatctgtgagcgagcggatgctgagaagtcagctgttgctgctggcctgcgtgcataattatcaaccttgcgtacagcgggccgaaggctattttcgcaagtggaaagagagtaatggcaatctaagcctgcccgtggacgtgacacttgccgtgtttgcagtgggggcgcagtcaactgaaggatgggacttcctgtatagtaagtaccagttctcactgtcctccaccgagaagtcacaaattgagttcgcgctttgtagaacacagaataaagaaaagcttcagtggctgctcgacgagtcgtttaagggcgataagattaagactcaggaatttccccagatcctgaccctgattgggcgcaatccagtgggctaccctctggcttggcagttcttgcgcaagaattggaacaagctggtccagaaatttgaactgggcagttcttccattgcccatatggtgatggggacaacaaaccagttttccacgagaacccgcctggaggaggtgaaagggttcttctcctcactgaaagagaatgggagtcagctccgctgtgtgcagcagacaattgaaacgatcgaagagaatatcggctggatggacaagaactttgataagatcagagtgtggcttcagagcgaaaaacttgagcacgatccagaggccgacgctaccggatag

SEQ ID NO: 186528 - DNA, 2826 bp, synthetic construct
  misc_feature 1..2826: note = Description of Artificial Sequence: Synthetic coding sequence
  source 1..2826: mol_type = other DNA
atggtgttcctgcccctgaagtggagcctggccaccatgagcttcctgctgtccagcctgctcgctctgttgaccgtctctaccccaagctggtgccagagcactgaggccagtccgaagaggtctgacggcaccccatttccgtggaacaagatcagactgcctgaatacgtgattccggtccactatgacctgctcatccatgcgaaccttacgacactaacattctgggggactacaaaggttgaaatcaccgcctcccagccgactagcacaatcatcctccattcacaccatctgcaaatctctagagctacattacgcaaaggtgccggcgagaggctgtcagaagagccactgcaagtcttggaacacccgagacaggaacagattgctctcctcgcaccagagcccctgctggtgggcttaccttatacggtagtcattcattacgctggtaacttgtcggaaaccttccacggattttataaaagcacttaccggaccaaagaaggcgaactgagaattctggcctcaacgcaatttgaacccactgccgccagaatggccttcccatgtttcgacgagccggctttcaaggcttccttttctattaaaataaggagggagccacggcatctcgccattagcaacatgccactggtgaagagtgtcacagtggctgagggcctaatcgaagaccactttgatgtgacggtcaagatgtccacttacctggtggcatttattattagcgactttgagagtgtgtccaagattacaaagtctggagtaaaagtgtctgtctacgccgtcccagacaagattaatcaagccgattacgccttggacgctgcagttactctactcgaattctatgaggactacttctcaattccataccctttaccaaagcaggacctcgcggccatcccagattttcagtcaggggctatggaaaattgggggctaaccacatatcgagagtctgcattgctgtttgatgccgaaaagtcttccgccagctcaaaactggggatcactatgacggtcgctcacgaactcgcccaccaatggttcggaaacctcgtaaccatggagtggtggaatgatctgtggctaaacgagggcttcgccaaatttatggagttcgtgtcagtaagcgttacccaccccgagttaaaggtcggcgattacttttttgggaagtgttttgacgctatggaggtggatgctcttaatagttctcacccagtttctacacccgtcgagaatcccgcccagattagggaaatgtttgacgatgtgtcgtacgataaaggagcctgcatactcaacatgctgcgcgaatacctatctgccgatgccttcaagagcggaatcgtgcagtatctgcagaagcactcctacaaaaatacaaagaacgaggacttatgggactcaatggcctcgatctgtcccaccgacggtgtgaagggcatggacgggttttgtagcagaagccagcactcctccagtagcagtcattggcaccaagaaggggtggatgttaagactatgatgaacacatggacgctgcagaagggttttcccctcatcaccatcaccgtgagaggtcggaatgtgcatatgaaacaggagcattatatgaaaggaagtgacggagcacctgatacgggatatctatggcacgtgcccctgacatttatcacatctaaatcagacatggtgcatcggtttctactgaagaccaagaccgatgtgcttattctgccagaagaagttgaatggattaaatttaatgtgggtatgaatggctattacatcgtacattacgaggatgatggttgggacagcttgaccgggctactcaaaggaacccacaccgccgtctcaagtaacgatcgggcatccctcattaacaatgcattccaattggtgtcgatagggaaacttagtatcgaaaaagccctcgatctcagtctgtatttaaagcacgaaaccgaaatcatgcctgtgttccaaggcttaaatgaattgatccccatgtacaagctcatggaaaagcgggacatgaacgaagtggaaacccaatttaaggccttcctcatccgactcctgcgggacctaatcgataaacagacttggaccgatgaagggtccgtgtctgagcgaatgctgcgcagtcagctgttgctgctggcatgtgttcacaactatcagccttgcgtacagcgggcggaaggttacttcagaaaatggaaagagtcgaatggaaacctcagcctacccgtggatgtgactcttgccgtattcgcagttggtgcgcaatccacagagggttgggacttcctatattcaaaataccagttttcactttcctcgacagagaaatcacagattgaattcgccctatgccggactcagaacaaagaaaagttacagtggctattggacgagtcctttaagggcgacaaaattaagactcaagagttcccccagatcctgacgttgatcggcaggaaccccgtcggctacccgctggcgtggcagtttctgcgaaagaactggaacaagctcgtgcagaagttcgaactcggatcctcctccatcgctcacatggttatgggcacgactaaccagttctcgacgcgcactagattggaagaagtgaagggcttttttagcagcttgaaagagaatggttctcagttgaggtgcgtgcagcagactatagagaccatcgaggaaaatatcggctggatggacaagaactttgacaaaattcgagtttggttacagtcagaaaagctcgaacgcatgtag

SEQ ID NO: 186529 - DNA, 2826 bp, synthetic construct
  misc_feature 1..2826: note = Description of Artificial Sequence: Synthetic coding sequence
  source 1..2826: mol_type = other DNA
atggtgttcctgcccctgaagtggagcctggccaccatgagcttcttgctgagttctctgttggccttgctgaccgtctccacgcccagttggtgccagagcacagaggcctcacctaagcggagcgacgggaccccgttcccctggaacaagattcgtctgccagagtatgtgatcccagttcattacgacctgctgatacatgccaatcttactaccctgacattctggggcacgactaaagtagagattaccgcttcacaacccaccagcacaatcatactgcactcccaccatttacagatctctcgcgccaccctgaggaagggagctggcgagagattatcagaggaaccgctccaggtccttgaacacccaaggcaggagcagattgctctgctcgcacctgagccattactggtgggcctcccctacacagtggtgattcactacgcgggcaatctctccgagacttttcacggcttctacaagtcgacatatagaacgaaggagggtgaactgcggatcctcgcttccacccagtttgaaccaactgctgcgagaatggcctttccgtgctttgatgagcccgcctttaaggcgtccttcagtatcaagatcaggagggagcctcgtcacctcgcaataagtaatatgcccctggttaagtccgttaccgtggccgaggggctgatagaggaccacttcgatgtgacggtgaagatgagtacttatctggtggcttttattatttcagacttcgaaagtgtcagcaagattacaaagagcggcgtgaaggtgagcgtttatgccgtccctgacaaaattaatcaggcggactacgctctggatgctgccgtgacccttctcgaattctatgaggattacttttccataccttatcctctccccaagcaggatttagccgccatccctgattttcaaagcggagcaatggaaaactggggactgacaacttatagagagagcgccctcctttttgatgcagagaaaagtagtgcctcctcaaagctgggcattacaatgacggtggcgcacgaactggcccatcaatggtttggaaacctcgtgacaatggagtggtggaatgatctttggctgaacgaggggtttgctaagttcatggagttcgtctccgtttcagtgacccacccagaattgaaggttggcgactactttttcggcaaatgctttgatgccatggaggtcgacgccttgaatagtagtcatcccgtgtctacaccagttgagaaccccgctcagatccgtgaaatgtttgatgacgtgagctacgacaaaggagcctgtatactcaacatgctgcgcgaatacctgtcagccgacgcatttaaatcaggaattgtccagtatcttcagaagcactcttacaagaataccaagaatgaggacctgtgggattctatggcaagtatctgtcctacagatggggtcaaaggaatggatggcttttgttcccgctcacagcactcctcttcgagctctcactggcatcaggagggcgtcgatgttaaaaccatgatgaatacttggacactgcagaaagggtttccccttatcactattacagtgcggggacgcaatgtgcacatgaaacaggaacactacatgaagggatccgacggagccccagacacagggtatctctggcacgtgcctctgactttcattactagcaaaagcgacatggtgcaccggttccttctgaaaactaagactgatgtgctaatcctgccagaagaggtagaatggattaagttcaacgtcgggatgaacgggtattacatcgtccactacgaagacgacggctgggacagtctgactggcctgctgaagggaacccacactgccgtgtctagcaatgatcgtgcatcattgattaacaatgccttccagctggtgtcgattggcaaactgtccatcgaaaaagctctggatctatctctgtatctgaagcacgagacggagatcatgccagtatttcagggtttgaatgagttaattccaatgtataaattaatggagaagagggacatgaacgaagtcgagacccaatttaaggcctttttaattaggttactacgagacctgatcgacaagcagacttggactgacgagggcagcgtgtcagaaaggatgttgcggtctcagctgctgttgctagcatgtgtccataactaccagccttgtgtccagagagcggagggctacttcaggaagtggaaggaatccaacggcaatctctcactgcccgtagatgttactttggccgtatttgctgtcggcgctcagagcactgaagggtgggattttctgtacagtaagtaccagttctcactgtcttccacagagaaatcacaaattgaattcgcactgtgtcgcacccagaataaagaaaagctgcagtggttgctggacgaaagtttcaagggagacaagattaaaacccaggaatttccccagatcctgacgctgatcggtaggaaccccgtggggtacccgctcgcgtggcaattcctgcgaaagaattggaacaaactggttcagaagttcgaattgggcagttcctccatcgcacacatggttatggggaccacaaatcaattctccacgcgaacacgtttggaagaggtcaaaggcttcttcagctctctgaaagagaatgggagccaactgcgttgcgtgcagcagactatcgagacgattgaggagaacattggatggatggataagaatttcgataagatccgggtttggctgcagagtgagaagcttgaacgcatgtag

SEQ ID NO: 186530 - DNA, 390 bp, synthetic construct
  misc_feature 1..390: note = Description of Artificial Sequence: Synthetic coding sequence
  source 1..390: mol_type = other DNA
atggtgttcctgcccctgaagtggagcctggccaccatgagcttcctactgtcctcattactcgccctcctaacagtgtccaccccctcctggtgccagagtaccgaggcatccccaaagcggtcagacggaacacccttcccctggaacaaaatccgtttaccagaatacgtgatcccagtacattacgatctactgattcacgccaaccttacgaccctgaccttctggggcacgactaaggtggagattactgcctcacaaccaacctcaacgatcatcctgcactcacaccacctgcagatcagtcgagccacgcttagaaagggagctggcgagcgcttgtctgaagagcctctgcaggtgctggaacatccaaggcaggagtag

SEQ ID NO: 186531 - DNA, 2748 bp, synthetic construct
  misc_feature 1..2748: note = Description of Artificial Sequence: Synthetic coding sequence
  source 1..2748: mol_type = other DNA
atgttccacagcagcgccatggtgaacagccaccggaagcccatgttcaacatccaccgcggcttttactgtctcaccgccatcttacctcaaatttgcatttgtagccagttttccgtcccctcttcttaccattttaccgaagaccccggggccttccctgtcgcaactaacggtgagcgatttccttggcaggaactcagactgccttccgtcgtaatcccccttcactatgatctgtttgtgcaccccaacctcacatcattggatttcgttgccagtgagaaaatagaagtgctagtctcaaatgcaacgcagtttatcatccttcatagcaaggacctcgagatcaccaacgctactctgcaatcagaggaagattccagatatatgaaacctggcaaagagctgaaagtgctgagttaccccgctcacgagcaaattgccctgttagtccccgaaaaactcactcctcacttgaagtattatgtggccatggacttccaggccaaactcggggacggctttgagggtttttacaaaagcacatacagaacacttgggggtgagaccagaattcttgctgttacagactttgaacccacccaagctcgaatggcattcccatgcttcgacgagcctctgttcaaggccaacttcagtattaaaattaggagggagagcagacatatcgccttatctaacatgcctaaagttagcatatacgcctctcccgacaaaagaaaccagacccactatgcccttcaggcaagcttaaaactcttagacttttatgagaaatactttgatatttactatcccctgtcaaaactagatttgatcgccattcctgacttcgcccccggcgctatggagaattggggactgataacttatagggagacaagcctgttatttgaccctaagacaagctcagcgtcagacaaactgtgggtaactagagtgatcgctcatgaactggcccaccagtggttcgggaatctcgtcaccatggagtggtggaacgatatttggttgaaagaaggctttgcaaaatatatggagttaattgcagtgaacgctacataccccgagctgcagtttgacgactattttctgaatgtttgttttgaggtaattacaaaggacagtctgaatagctcaaggcccatctctaagccagctgagactcccacacaaatccaggagatgttcgatgaggtcagttacaataagggcgcctgcattctcaacatgctgaaggattttcttggagaggagaaatttcaaaagggcattatacagtatctgaagaagtttagctacaggaacgcgaagaacgacgatctgtggtcatccctgagtaatagctgcctggaatctgacttcacctccggcggggtctgtcacagtgatccaaagatgaccagtaatatgctggcattcttaggcgagaacgccgaggtcaaggaaatgatgaccacgtggacgctgcagaaggggatccctctattagttgttaaacaggatggctgcagcttaaggcttcagcaagagagattcctgcagggcgtttttcaggaggatcctgagtggcgcgcccttcaggagcggtacctttggcatatcccattgacctattccacgagttcgtctaacgtcattcaccgtcacattcttaaatctaagaccgacacccttgatttgcccgaaaaaaccagttgggtaaaatttaacgtggatagcaacggatactatatcgtgcattacgagggacatggatgggatcagctgatcactcaacttaaccagaaccacaccctgttgcgtccgaaggacagggtgggcctaatacacgacgtgttccagttagtgggggcaggacgattgactctggataaggccttggatatgacttactatctgcaacatgagacatcttcccctgccctgctggaaggcctgtcttatcttgaatcattttaccacatgatggataggaggaacatttcagacatttccgaaaaccttaaacgctacctgctccaatactttaagcccgtcatcgatagacaatcttggtcagacaagggcagcgtatgggataggatgctcaggtccgctctgttaaagctggcatgcgatctgaaccacgccccctgtattcaaaaagccgccgagctgttttcccaatggatggaatcatccggtaaactcaacatacctacggacgtactgaaaatagtgtatagcgtgggcgcgcagacaacggcggggtggaactacttgctggagcagtacgagctgagtatgtcgtctgccgaacagaacaaaatcctctacgcattgagcacatcaaaacaccaggagaaactccttaaacttatagagctgggcatggagggcaaggtgataaagacacagaaccttgcagcactcctgcacgctatcgccagaagacctaaaggccagcagctggcatgggattttgtgcgcgagaattggactcatctcctgaaaaagtttgacctagggtcgtacgacatacgtatgatcatcagcggtacaactgcccatttctcctccaaagataaactccaggaggtgaaactcttcttcgagagcctagaggcccagggtagccatctggacatttttcagacagtcttggagaccataactaagaacataaagtggctcgagaagaacctgcccaccctccgcacgtggttgatggtaaacacatag

SEQ ID NO: 186532 - DNA, 2883 bp, synthetic construct
  misc_feature 1..2883: note = Description of Artificial Sequence: Synthetic coding sequence
  source 1..2883: mol_type = other DNA
atgttccacagcagcgccatggtgaacagccaccggaagcccatgttcaacatccatcgggggttttactgtctgactgccatcctgcctcagatatgtatttgcagtcagttttccgtccccagctcataccactttaccgaggacccaggagcattcccagttgccactaatggagaacgcttcccatggcaggaactaagactgcctagtgtggtgattcccttacactatgatttattcgttcaccccaatttaacctcgctcgactttgtcgcttcagaaaaaattgaagtgctggtgtccaatgcaacccaatttatcatcctgcattccaaagatttggaaataactaacgcaacactccagtctgaagaagattccagatacatgaaacccggcaaggaactgaaggtcctctcttacccagcgcatgagcagatcgctctcctggtgcccgagaaactcaccccccatttaaagtattacgttgctatggacttccaggccaagttgggtgacggcttcgaagggttctataaatccacctataggaccctggggggtgagactcgcattttggctgttaccgacttcgagcctacgcaagctcggatggcattcccgtgcttcgacgagccattgtttaaagctaacttttcgataaaaattcgcagggagtctcggcatattgccttaagcaatatgcccaaagttaagaccattgagctcgagggaggcctgctagaggatcatttcgagaccaccgttaagatgtccacatatcttgtggcctacattgtttgcgattttcatagcctgtctggatttactagtagcggagtcaaagtatcaatttacgcgtcccctgataagagaaaccaaacccactatgccctccaggcttctctgaaattactggatttctatgaaaaatactttgacatctactatcccttaagtaagctagatcttatcgccatcccagactttgcccctggagctatggagaattggggcttgattacatatcgcgaaacttcgctgctctttgacccaaaaacctcatctgcttcagataagctctgggttaccagagtgattgcccacgaactcgcccaccagtggttcggcaatctggttaccatggaatggtggaacgacatctggctgaaggagggttttgcaaagtatatggagttgattgcggtgaacgctacttatccagagctgcagtttgatgactactttttaaatgtgtgttttgaagtcataacaaaagacagtttaaattcatccagacctatctcgaaacccgccgagaccccaacacagatccaagagatgttcgatgaggtatcatataataaaggcgcctgcattctgaacatgctgaaggattttctgggcgaggaaaaattccagaagggaattattcagtacctgaagaaattcagctaccgcaacgccaagaatgatgacctctggtcaagtctctccaattcttgcctggaatctgatttcacatccggaggcgtttgtcattcagatcctaaaatgaccagcaacatgctcgcctttttgggagagaacgccgaggtcaaggagatgatgacaacctggaccttgcagaagggcattcccctgctggttgtgaaacaggatggctgctcgttgagactgcagcaggagaggttcttgcagggtgtgttccaagaagaccccgagtggcgggctctgcaggaacgctacctttggcacattcctctgacttactcaaccagcagctccaatgtgatccatagacatattctcaagtctaagaccgatactctggaccttccggagaaaacgagctgggtgaaatttaatgtggactccaatggttactacatagtccattacgaggggcatggatgggatcagttgatcactcagctgaaccagaatcacaccctgttgcggccgaaggatagagtcggtttgattcacgatgtcttccaactcgttggcgctgggaggctcacactcgacaaggccttggatatgacctattatctgcagcatgagacctccagccctgctctgctggaagggctgtcatatctggagagcttctaccacatgatggataggcggaacatctctgacatctcagaaaatcttaagcggtacttactgcaatactttaaaccagtgattgacaggcagtcctggagtgacaaaggctccgtgtgggatcgtatgctccggtcggcccttttgaagttagcttgtgacttgaaccatgccccctgcatccagaaggccgctgaactattttctcaatggatggaatcttctgggaaattgaatattccgacagatgtgctgaagatagtatactctgttggcgcccagaccactgccggatggaattacttgctggagcagtatgagttgagtatgtccagtgccgagcagaacaagatcttatacgcactcagcaccagcaagcaccaggagaagctgctcaagctcattgagctgggcatggagggcaaagtgattaagacgcagaatctagccgctctgctccacgcaatagcccgacggccaaaggggcagcagctggcatgggattttgttagggagaactggactcatttgctcaaaaaatttgatcttggctcgtacgacattaggatgattattagtggaaccacggcccacttttcttccaaggataagctacaagaggttaaactattttttgagtcccttgaggcccaagggtcccacctggacatttttcagactgtcctggagactattaccaagaatataaaatggctggaaaaaaatctgccgactctgcgtacctggctgatggtgaacacctag

SEQ ID NO: 186533 - DNA, 1053 bp, synthetic construct
  misc_feature 1..1053: note = Description of Artificial Sequence: Synthetic coding sequence
  source 1..1053: mol_type = other DNA
atgttccacagcagcgccatggtgaacagccaccggaagcccatgttcaacatccataggggcttttactgtcttacagcaatactgcctcagatctgcatttgctcacagttttcagtgccttcatcgtaccatttcaccgaagaccccggagcattcccagtggccaccaacggagagaggtttccatggcaggagctgagattgccttccgtggtgattccactgcactacgacttgttcgtgcacccaaatctgaccagtctcgacttcgtggcttcggagaaaatagaggttctggtttccaatgcaacacagtttatcatcctccactccaaggatctggagatcacaaacgccactctgcagtccgaggaagactccagatacatgaagcctggcaaggaactgaaagtactctcataccccgcccacgagcagattgcactgcttgtcccagaaaaactaacgcctcatctgaaatactatgtggccatggattttcaagctaaattgggcgatgggtttgagggtttctacaagtctacctacaggacgttaggtggcgagactaggatcctagccgttaccgatttcgagccgactcaggctaggatggctttcccttgttttgacgagccactgtttaaggctaatttctctattaaaataagacgcgagtctcgacacattgcactgtccaacatgcctaaagtaaagacgatagaactggagggcggattactggaagatcattttgaaactactgtcaagatgtcaacatacctggtcgcctacattgtctgcgatttccactctctgagcgggttcacaagctcaggcgtgaaggtgtcaatctatgcaagccccgacaagcgcaatcagacacattacgcgctccaggcttcacttaagttactggatttctatgaaaagtacttcgacatttactatcctctgtccaaactcggcatgtttaagtttcatataatcgtctttatctttgcacataaaacctgtttcgaccttttcccattatccctttctatgtag

SEQ ID NO: 186534 - DNA, 2085 bp, synthetic construct
  misc_feature 1..2085: note = Description of Artificial Sequence: Synthetic coding sequence
  source 1..2085: mol_type = other DNA
atgttccacagcagcgccatggtgaacagccaccggaagcccatgttcaatatccacaggggcttttattgcctgaccgctatcctgccgcagatttgcatctgtagtcagttttccgtgccttctagctaccacttcactgaagatcccggagcgttccccgtcgcaacaaacggagagagattcccttggcaggagctgaggttaccaagcgttgtcattcccttgcactacgacctctttgttcatcccaatctaactagtttagacttcgttgcctctgaaaagatcgaggtgcttgtcagtaatgcgacccaattcatcatcttacattccaaggacctggaaatcaccaatgccactcttcagagcgaggaggattccaggtacatgaagccaggtaaagaacttaaggttttgtcgtaccctgcccacgagcagatcgccttgctggtaccagaaaaactcacaccgcacttaaaatattacgtggccatggactttcaggctaaattgggcgatggctttgaggggttctacaagagtacttacaggacactcggcggggagacacgaatcttagctgtgacagatttcgagcctactcaagcaaggatggcctttccttgtttcgatgaacccctgtttaaggccaacttttcaatcaagattcgacgtgaatccagacatatagcattgagtaacatgcccaaggtgaagacaatcgaattagaggggggtctgttggaagatcatttcgagaccaccgtgaagatgagcacatacctggttgcttacatcgtatgcgactttcacagcttaagtgggtttacatctagcggcgttaaagtctcgatttatgccagccctgataaaaggaaccaaacccattacgccctgcaagcatcccttaagttgctcgacttctatgagaaatattttgatatttattaccccctgagcaagttagatttaatcgctattccagacttcgctccaggtgctatggaaaattgggggcttattacctaccgtgagactagtctgcttttcgatcccaagacctcctcagcctctgataaattatgggtgacaagagtaatcgcacacgagttggcacaccagtggttcggcaatctcgtcaccatggagtggtggaatgatatctggctgaaagaagggtttgccaaatatatggaactgatcgccgtgaatgccacttaccctgagcttcagttcgacgactacttcctgaatgtgtgctttgaagtcatcacgaaggactcactcaactcctcaagaccaattagtaagcccgccgagacaccgacccaaattcaggagatgtttgacgaggtgtcctataataaaggcgcctgtatactcaatatgctgaaagattttcttggtgaggagaaattccagaaagggattatccaatatcttaagaaattttcctatcgcaacgcaaagaacgacgacctgtggagctctcttagcaactcctgtttggagagtgactttacaagtggaggggtgtgtcatagcgacccaaagatgaccagcaacatgctcgccttccttggtgagaatgcagaggttaaagaaatgatgactacgtggacgctccaaaagggaatcccactgctggtcgtaaagcaggatgggtgtagtctgcgcctccagcaggaacgcttccttcagggcgtgtttcaggaggaccctgagtggcgggctctgcaggagcgctacctatggcacattcccctgacttactcaactagttcatcgaacgtaatccataggcacattctcaagagcaaaaccgacacccttgatctccccgaaaagacttcatgggttaagttcaacgttgacagcaatggctactatatagtccattatgagggccacggttgggatcaactgatcacccagctaaatcagaaccatactttgctgcgacccaaggatcgggtcggcctgatacatgatgtgtttcaattagtgggcgcaggccggctcacactggacaaagccctggatatgacgtattacctgcagcacgaaacctccagcccttag

SEQ ID NO: 186535 - DNA, 1452 bp, synthetic construct
  misc_feature 1..1452: note = Description of Artificial Sequence: Synthetic coding sequence
  source 1..1452: mol_type = other DNA
atggaggagggcggcggcggcgtgcggagcctggtgcccggcggcccagtccttttagtgctgtgtgggctgctcgaagcttccggtggcggaagagcccttcctcaactgtcagatgatataccattcagggtgaactggcctgggactgaattctcattgcctacaacaggggttctctacaaggaagataattatgtaattatgaccaccgcccacaaagagaagtacaagtgcatcttgcctctggttaccagcggtgatgaggaggaggagaaggattataagggccctaaccccagggagctcctcgagcccctcttcaagcagtcatcctgttcctaccgcattgagtcctattggacttacgaagtgtgccacgggaaacatatccgccagtatcatgaggagaaggagacaggtcagaaaataaacatccacgaatactacctgggtaatatgcttgcaaagaatttgctgtttgaaaaggaaagggaagccgaggaaaaagagaagagcaatgagatacccacaaaaaacattgaaggtcagatgacgccttattaccccgtgggtatggggaatggcaccccctgtagcttgaaacaaaaccgacctcgctcgtcaacagtgatgtatatctgtcatcccgaatccaagcacgaaattctgtcagtggctgaagtcacgacatgtgagtacgaggtggttatcctgacaccactgctgtgctcccatcctaaatatcgcttcagagcctccccagtcaacgatatattctgtcagagtctgccgggctccccttttaagcccctgaccttgcgccagttggaacagcaagaagaaattctccgcgtgccgttccgtagaaacaaagaggaggatttgcagtccacaaaggaggaacggttcccagctattcacaaatccatcgcaatcggcagccagccggtattgacagtagggaccacccatatctctaaacttacggacgatcagctgattaaagaatttctcagcggatcatattgcttccgtggtggagtgggatggtggaaatacgaattttgttacggaaaacacgtgcaccaataccatgaagataaggattcaggaaagaccagtgtcgtcgttgggacttggaatcaagaagagcatatagaatgggctaaaaaaaacactgcacgggcgtaccacttacaggatgatggaacccagacggtgaggatggtctcgcacttttacggtaacggagatatttgcgacataaccgataagcctcgccaggtgactgtcaagctcaaatgcaaggagtccgattcacctcatgccgtgactgtgtatatgctggaaccccatagctgccagtacattttgggcgtcgaaagccctgtgatttgcaagattctggacaccgccgacgagaacggattactctccctgccaaactag

SEQ ID NO: 186536 - DNA, 1290 bp, synthetic construct
  misc_feature 1..1290: note = Description of Artificial Sequence: Synthetic coding sequence
  source 1..1290: mol_type = other DNA
atggaggagggcggcggcggcgtgcggagcctggtgcccggcggccccgtcctgcttgtactttgtgggttgctcgaagcctccgggggtggccgcgcccttccccagctcagcgacgacattcctttcagagtgaattggccagggactgagttctcgctgcccacaaccggcgtgctctataaggaagataattatgtcatcatgacgacagcacataaggagaagtacaagtgtattcttccactggtgacctcaggagacgaggaagaagagaaagattacaaaggacctaaccccagagaactgctagagcctcttttcaaacagtcttcttgttcctacaggatcgaaagctattggacctacgaggtttgtcacgggaaacacatcagacagtaccatgaggaaaaggaaacagggcaaaagatcaacatccatgaatactatctgggtaacatgctggctaaaaatctgctattcgagaaggaacgtgaagccgaggagaaggaaaaatcaaacgaaattcccacgaagaacatcgaaggacagatgaccccttactacccagtaggcatgggaaatggcaccccctgttccctgaagcaaaataggcctcgtagttccacagtcatgtacatctgccatccagaatctaagcacgaaatcctctctgttgccgaggtaaccacttgtgagtacgaagtagtgattcttaccccccttctatgctcacatcctaagtacaggtttcgcgcctcacccgtgaatgacattttctgccaaagccttccaggctcaccctttaaacccctgacacttagacaactggagcaacaagaggagattctaagagtgcccttcagacgcaacaaagagggtgtcggatggtggaagtacgagttttgctatgggaagcacgtccaccaataccatgaagacaaggactccggaaaaacttctgtggttgtgggcacttggaatcaagaggaacacattgagtgggctaaaaaaaacaccgctagagcgtaccacctgcaggacgacggcacacagacggtgcgcatggtgagccatttttacggcaatggggacatctgtgatattacagacaagcccaggcaggtaactgtgaagttaaagtgcaaagagagcgattctccccacgccgtcacagtctacatgctggagcctcattcatgccaatatattcttggagtagagtcaccggtgatctgtaaaatcctggacaccgctgatgagaacggactgctctctctgcccaactag

SEQ ID NO: 186537 - DNA, 1374 bp, synthetic construct
  misc_feature 1..1374: note = Description of Artificial Sequence: Synthetic coding sequence
  source 1..1374: mol_type = other DNA
atggaggagggcggcggcggcgtgcggagcctggtgcccggcggccctgtgctcttggtgctgtgcggactattggaagcgagcggtggcgggcgcgctctgccacagctctcagacgacatccctttcagagtgaactggccagggacagagttcagcctaccaaccacaggggtgctatacaaagaggataactacgtaatcatgactaccgcccataaggagaagtataagtgtatccttccattggttacctctggagacgaagaagaggaaaaggactataaagggccgaatcccagagaattgttagagccgctgttcaaacaatcgagttgtagttaccggatcgaatcttactggacctacgaggtgtgtcacgggaaacacatccgtcaatatcatgaagagaaagagactggtcagaagatcaatatccatgaatactatttggggaacatgcttgccaagaatctgttatttgaaaaagaacgggaggccgaggagaaggagaagagcaatgagatccctactaaaaatattgaagggcagatgactccttattacccagtcggcatgggcaacggaaccccgtgctcacttaagcagaatcggccccgcagctcaacagtcatgtacatctgccatccagagagtaagcacgagattcttagcgtcgccgaggtcacaacctgcgaatacgaggtggtcatcctgacgcccctgctgtgctctcatcctaagtatcggttccgcgcgtcaccagtgaacgacatattctgtcaaagtctgcctgggagcccgttcaagcccctcacactccgccagctcgaacagcaggaggagatacttagggtgccctttcgcaggaacaaagaagaggatctgcaatcaacgaaagaggagcggttccccgccatccacaagagcatcgcaatcggctcccaacccgtgctgacagtcggaactactcacatttccaagctcactgatgatcagctgatcaaagaatttctttcaggtagttactgtttcagggggggcgtcggctggtggaagtacgagttctgctatggtaagcatgtacatcagtaccacgaggataaagactctggaaaaaccagcgtggtcgtgggcacctggaatcaagaagagcacatcgagtgggctaagaagaacacagcacgggcctatcatctccaagacgacggtactcagacagtgcgttgcaaagaatctgactcccctcacgccgtaaccgtctacatgttggaaccacactcttgccagtatatactcggggtggagtcacctgtaatttgcaaaattctagatacagccgacgaaaatggccttctgtctctgcccaattag

SEQ ID NO: 186538 - DNA, 2715 bp, synthetic construct
  misc_feature 1..2715: note = Description of Artificial Sequence: Synthetic coding sequence
  source 1..2715: mol_type = other DNA
atggagtggggcagcgagagcgccgccgtgcggcggcaccgggtgggggtcgaacggcgggagggggccgctgcagcccccccaccggaaagagaggccagagcccaagagcccctcgtggacggctgctctggtggaggacggacccggaagagaagccctggtggctcagggggggcctcccgaggcgcgggcacagggctatctgaagtgcgcgcagccctggggctggccttatacctgatcgcccttcgcacacttgtacaactgtcactgcagcagctggtgcttagaggcgctgcgggacatcggggtgagtttgacgcactgcaggcaagagattatctggaacacatcacctcaattgggccaaggaccaccggatcacccgaaaacgagattctcaccgtgcactacttgttagaacagatcaagctgattgaggtacagagtaacagcctgcacaagatcagtgtagacgttcagaggcccacaggaagcttctctattgacttcctcgggggatttaccagctattacgacaacattacaaacgtggttgtgaagcttgaaccaagggacggcgcccagcacgcagtcctcgcgaactgtcactttgactcagtggcaaacagtccaggagcgtccgacgatgcggtttcttgttctgtgatgttggaagtgctacgagtgctgagcacttcatctgaggcgctgcaccacgctgttatcttcctcttcaacggtgcagaagagaacgtactgcaagcctcccacggatttatcactcagcacccatgggcctccttgattcgggcattcatcaatttggaagctgcaggggtcggggggaaagagctggtgtttcagaccggccccgaaaacccatggctagtgcaagcctacgtgagcgcggcaaaacatcccttcgcgtcggtcgtggcccaggaagtttttcagagtggcatcattccatccgacacagatttcagaatatacagggatttcggcaatatccccggcattgacctcgccttcatcgaaaacggctatatttatcacacaaagtacgacaccgctgacaggatcctgacagacagtatccagcgtgcgggtgataatatcctcgcagttctgaagcatctagcgacatccgatatgcttgctgccgctagtaaatatcggcacggaaatatggttttctttgatgtcctaggcctattcgtgatagcttacccttctcgcattgggtcaatcatcaactatatggtggttatgggcgtggtcctttacctgggcaagaagttccttcaaccgaaacacaagaccggtaactacaaaaaagactttctttgtggcctgggaatcacattaatttcttggtttacgtcgctggtcactgtgctaatcatcgcagttttcatatcattgatcggacagagcctgtcctggtacaatcatttctatgtatctgtctgtctctacggaacagcaaccgttgcaaaaatcattcttatccacaccttggctaagaggttttactatatgaatgcctcagcccaatacctgggagaagtttttttcgacatttctctttttgtgcactgctgtttcctagtaaccttgacgtaccagggtctgtgtagtgcattcatctcagctgtgtgggttgccttcccccttcttaccaagttgtgcgttcacaaggactttaagcagcatggcgcacaaggcaagttcattgccttctacctgctgggtatgtttataccatatctctatgctttataccttatctgggcagttttcgagatgttcactcctattttaggccggtccggctcggaaatcccacctgatgttgttctggcctctatcctcgctggctgcactatgatcctttctagttacttcattaatttcatctaccttgctaaatcgacgaaaaaaaccatgctcaccctgacattggtgtgtgccatcacttttctcctggtctgctctggtacttttttcccttatagttccaatccggcaaaccctaaaccaaaaagagttttcctacagcacatgacacggaccttccacgatcttgagggaaatgccgttaaaagagacagtggaatctggattaacggattcgactacactggcattagtcatataacgcctcacatcccagaaatcaatgattctatccgcgcccactgcgaggaaaacgcccccctgtgtgggttcccctggtacctgcccgtccacttcctcattagaaagaactggtatttacctgccccagaggtgagccctcgcaacccaccccatttcaggctgatcagtaaggagcagacgccttgggattccattaaactaacatttgaagctaccggtccttctcatatgtccttttatgtgcgggcacataaaggatcaacattgtcacaatggagcctcgggaacggaacccccgtcacctcaaagggaggagattatttcgtgttttactcccacggcttacaggcctctgcatggcaattctggatcgaggtccaggtatctgaggagcaccctgagggcatggtgaccgttgccattgcagcccactatttatcgggggaagacaaacgcagccctcaactcgatgccctgaaagaaaagttcccagactggaccttcccttctgcttgggtctgtacctacgacctgtttgtcttctag

SEQ ID NO: 186539 - DNA, 1056 bp, synthetic construct
  misc_feature 1..1056: note = Description of Artificial Sequence: Synthetic coding sequence
  source 1..1056: mol_type = other DNA
atgctggaggtgctgcgggtgctgagcaccagcagcgaggccctgcatcacgcggttattttcctgtttaacggcgctgaggaaaatgtgctccaagcgagccacgggtttattactcagcatccttgggcctccctcatccgcgcattcattaatcttgaggccgccggcgttggaggaaaagaactggtcttccaaaccggcccagagaatccttggttggttcaggcctacgttagcgcagccaaacatccatttgcctccgtcgttgcacaagaggtattccaatccggaatcatcccaagcgatacagactttcgcatttatcgagacttcggcaatattcccggaatcgacctggccttcattgagaacggatatatctaccacacaaagtacgacaccgcagaccggattttaactgattccatccaaagggcgggcgacaacatcctagccgtcctcaaacatcttgccaccagtgacatgctcgccgcggcctcaaaatacagacacggtaacatggttttcttcgatgtcctcgggctctttgtcatcgcatatccctctcgaataggaagtatcattaactacatggtggtgatgggggtggtcctgtacctcgggaagaaattccttcagcccaagcacaaaacgggcaactataagaaggattttttatgtgggcttggaatcaccctgattagctggttcacaagtctggtcaccgtgctgatcattgcagtattcatctctctgataggccaatcgctgtcctggtacaaccacttctatgtttccgtttgtctatatggaactgccaccgtggctaaaatcatcctgatccatacgctcgccaaacgcttctattatatgaacgcttcagcacaatatctcggcgaagtattcttcgacatctcactattcgtacattgttgcttcctcgttacattgacctaccagggtctgtgctccgcatttataagcgcggtgtgggtggcattccctctgctgacaaagctttgtgtgcacaaagacttcaaacaacatgattag

SEQ ID NO: 186540 - DNA, 2715 bp, synthetic construct
  misc_feature 1..2715: note = Description of Artificial Sequence: Synthetic coding sequence
  source 1..2715: mol_type = other DNA
atggagtggggcagcgagagcgccgccgtgcggcggcaccgggtgggagtggagagaagagagggcgcggctgccgcacctccaccagaaagggaggctcgcgcccaggaacctctggtggatgggtgctcgggcggtggcagaacacgcaaacgatcacccggcggcagcggcggcgccagtcggggggctggaactggactgagcgaggtgcgagccgccttaggtctggccctctacctcattgccttacgtacgctggttcaattatcattgcagcaactcgttctacgcggagctgctggacatcgaggggagtttgatgccctacaagcaagggattatctggagcatatcacaagcatagggccgagaactaccggtagccccgagaatgaaatcctcacagttcattatctgctggagcagattaaacttatcgaagttcagtccaacagccttcataagatttcagtagatgtgcaacgacccactggctccttctcaatcgactttttgggcggctttaccagctactatgataacattaccaatgtggtcgttaaactagagccacgggatggagcgcagcatgccgtgctcgcaaattgtcattttgactctgtagcaaattcccccggcgccagcgacgacgctgtaagttgctctgtcatgctggaagttctgcgagtgctgtcgaccagctcggaggccctgcatcatgcggtgatatttttgttcaatggcgcggaggagaacgttctgcaagcaagccacggattcataactcagcacccatgggcatcgctcatcagagcatttattaacttagaagccgcaggggtcggaggcaaggagctggtttttcaaactggccccgagaacccatggctcgttcaggcttatgtgagcgctgctaaacacccatttgcgtctgttgtggcgcaggaagtgttccaaagcggcatcattccatccgacactgactttcgtatataccgggattttggtaatatccctgggattgatctggcatttattgagaatggttacatctaccacaccaaatatgacactgctgacaggatccttaccgatagcatccaaagagcaggggacaatatcctagcagtcctgaagcatttggccacttcagatatgcttgccgccgcaagcaagtaccgacatggtaacatggtgttcttcgacgtacttggtctctttgtcatagcatacccttctaggataggctctatcataaattatatggtcgtcatgggagttgttctctatctgggaaaaaaatttcttcagccaaaacacaaaacgggtaattacaagaaggatttcctgtgcggccttggaattactctcatttcttggttcacttccttagttaccgtcctgatcatagctgtgttcatcagccttatcggccagtctttatcttggtacaaccacttttacgtgtctgtctgcctctacggcacagctactgttgctaagataattttgattcataccctggccaagaggttctactacatgaatgcatccgctcagtacctcggggaggtgtttttcgacatatctctcttcgttcactgctgcttcctcgttacgctgacgtaccaggggctctgctccgcttttattagcgccgtctgggttgccttccccttgctgacgaaactctgcgtacataaggatttcaagcagcacggggcccagggcaagtttatcgctttctaccttctcggaatgtttattccctacctctatgccttatacctgatctgggcagtatttgagatgttcaccccgatcctggggagatcagggtctgagattccacccgatgttgttctcgcgagcatattggccggatgtaccatgatcctttccagctacttcataaacttcatctatcttgccaagagcaccaaaaaaactatgttaaccctcactctagtgtgtgcgatcacattcctgctggtctgttcgggcactttcttcccttactcatctaatccagctaatcctaaacccaagcgcgtgtttctccagcacatgacacgtactttccatgatctagaaggcaatgccgttaaaagggactctgggatctggatcaatggcttcgattatacaggaatttcccacatcaccccgcacatccccgaaataaacgatagcattcgggctcactgtgaagaaaatgcgcccctgtgcggtttcccttggtaccttcccgtccactttctgattagaaagaactggtatttgccagccccggaagtctcccctaggaatcccccacactttaggctcatcagcaaagaacagactccttgggactctatcaagctaaccttcgaagcgacaggtccaagtcatatgtccttctacgttagggctcataagggaagcacattatctcagtggtcactcggaaacggcacgcctgtgacatccaaggggggggactatttcgtcttctatagtcatggtctgcaagctagtgcctggcaattctggattgaagtacaggtgtctgaagagcatcctgaaggcatggtaactgtcgccatcgccgcccactatctgtcaggggaggataaaaggtctccccagctcgatgccctgaaagaaaagttccctgactggaccttcccctccgcttgggtgtgtacctatgacttgttcgtcttctag

SEQ ID NO: 186541 - DNA, 1260 bp, synthetic construct
  misc_feature 1..1260: note = Description of Artificial Sequence: Synthetic coding sequence
  source 1..1260: mol_type = other DNA
atggtggtgatgggcgtggtgctgtacctgggcaagaagttcctgcagcccaagcacaaaaccgggaattataagaaggacttcttgtgtggactgggcatcacactcatctcctggtttacatcactggtgactgtgctcatcatagcagtattcatatctttgattggtcaaagcttaagttggtacaaccacttttacgtttcagtatgcctgtatgggactgccaccgttgccaaaatcatcctgatacatactttggctaaaagattttactacatgaacgcctcggctcagtatttgggtgaggttttcttcgatatctccttattcgttcactgctgctttttggtgaccctgacctaccaaggtctgtgtagcgcttttatcagtgctgtgtgggtagcctttcctctgctcaccaaattgtgcgtgcataaagatttcaaacagcatggtgctcagggtaagtttatcgctttctacctgctaggaatgttcatcccgtatctgtacgcactctacctgatctgggcagtgttcgaaatgttcacacctatactcggacgatccgggagcgaaattcctccggatgtcgtactggcgtcaatcctggctggctgtacaatgattcttagtagctatttcatcaatttcatctacctggccaagtccactaagaagaccatgttgacacttaccttagtatgtgccattactttcttactcgtgtgttccgggactttttttccatatagcagcaaccccgccaatcccaagccaaagagagtgtttttacagcatatgacgcgcacttttcacgatctggagggcaacgccgtgaaacgtgactctggaatctggatcaacggttttgactacacaggcatttctcacataacgccacacatcccggaaattaacgactcgatcagagcacactgtgaagaaaatgcccccctatgcggatttccctggtatctgccggtccacttcctcatccggaaaaactggtatttgcccgcccccgaggtctcaccgaggaatcctccccactttagactcatcagtaaggagcagacgccttgggattctatcaaactgactttcgaggcaaccgcctgtctgcccatactgcaaatactcgatctgccagccagtacaatcatgacaaaaccctatgttctgctctgctcatccccccagcgtgtaaacaccttctccgttgtgagttggcagtggcatccatctcataaatag

SEQ ID NO: 186542 - DNA, 786 bp, synthetic construct
  misc_feature 1..786: note = Description of Artificial Sequence: Synthetic coding sequence
  source 1..786: mol_type = other DNA
atggccgccgccgtgccccgggccgccttcctgagccccctgctgcccttactgttaggctttctgctgctttcagcccctcacggtggctctgggctccacaccaagggtgccttgcctttggatactgtaacattttacaaggttattccgaagtctaagtttgtacttgtgaaatttgacacccaatatccttacggggagaagcaggacgaatttaaacgcctggccgagaattctgcttctagtgatgatctactagtcgccgaggtaggcatctccgactatggtgacaagctcaacatggaactatcagagaaatataagctggataaggagagctatccggtgttctacctgttcagagacggtgacttcgagaatcctgtgccctacacaggggcagtgaaggttggcgctattcagcgctggctgaaaggccagggggtctacctgggcatgcctggatgccttccggtgtacgatgccttagctggagagtttattagagcctccggggtggaggctagacaggctctgctgaagcaaggccaggataacctctcctccgtgaaggaaactcagaagaaatgggccgaacagtacttaaagataatgggcaaaattctggaccagggagaagacttccctgcatccgagatgacacggatcgccaggctgattgagaaaaacaaaatgagcgacggtaagaaagaggagttgcagaaaagcctcaatattcttacggccttccagaaaaagggcgccgaaaaggaagaactgtag

SEQ ID NO: 186543 - DNA, 162 bp, synthetic construct
  misc_feature 1..162: note = Description of Artificial Sequence: Synthetic coding sequence
  source 1..162: mol_type = other DNA
atggccgccgccgtgccccgggccgccttcctgagccccctgctgcctctccttcttggcttccttttgctcagtgctcctcacggcggatccggcctgcacaccaaaggagctctgccactggacactgtgaccttttataaaatcatggtcacctcgtag

SEQ ID NO: 186544 - DNA, 2925 bp, synthetic construct
  misc_feature 1..2925: note = Description of Artificial Sequence: Synthetic coding sequence
  source 1..2925: mol_type = other DNA
atgcggcgggccggcatcggcgaggacagccggctgggcctgcaggctcagcccggagcggaaccctcacctgggcgagccggaacagaacgttcactcggaggcacccagggcccaggccagccgtgttcatgccccggggcaatggcctctgctgttcgaggcagccgtccatggcctcgactgggacttcagctgcagttcgcagcactgctgcttggaacgttgtctcctcaggtgcatacattaaggcctgagaatctactcctcgtttcaacccttgacggctctttgcacgccttgtcaaaacagacgggtgatctgaagtggacgttgagagacgatcccgtgatcgaaggcccaatgtacgttacagaaatggccttcctttccgacccagctgacggaagtctgtacatcttaggtacccagaaacagcaggggctaatgaagctgccctttaccatccccgaactggtgcatgcgtccccctgcagatcttctgacggagtgttttacactggccgcaagcaggatgcctggttcgtagtggaccctgagtctggagagacacagatgaccttaaccactgagggtcctagcacaccacgtctgtacatcggtagaacgcagtacactgtgaccatgcacgacccgcgcgcacctgctttgcggtggaacacaacctatcgacgttactcagcaccgccaatggacggctccccaggcaagtacatgtctcacctggctagttgtggcatgggcctgttacttaccgtagatcccgggagcggcaccgtcttgtggactcaggatctgggcgttccagtgatgggagtgtacacatggcaccaggacgggttgagacaacttccccacttgaccttggcccgtgacacactgcactttctagcactgagatgggggcacatccggctgccggccagcggccccagggatacagctaccctcttcagcaccctggacacacaacttttaatgaccctctacgtggggaaagacgaaactgggttttacgtaagtaaggccctggtacacacaggggttgctcttgtgcccagaggcttgactctcgctcccgcggatggtcctactacggacgaagtgacactccaggtctccggggaacgtgaaggctcaccctccaccgccgtgcgctatcccagcggctctgtcgctctcccttcccagtggttgcttattggacaccatgagctccctcccgtgctgcatactaccatgctcagagtccatccaacactgggctctggaaccgcagaaacccggccccccgaaaacactcaggcgcccgcctttttcctcgagctcctctccttatctcgggagaaactgtgggactccgaactgcaccccgaggaaaagacacctgactcttatctggggctggggccccaggacctccttgcagccagcttgaccgctgtgctgcttggcgggtggatactcttcgtcatgcgccagcagcagcctcaggtggttgagaaacaacaggaaaccccccttgcccctgctgatttcgctcacatttcccaggatgcacagtccctgcattcgggtgccagccgccggtctcaaaagcgcctgcaatctcccagcaagcaagcccagcccctggatgaccctgaggccgagcagctgacggttgtgggcaaaattagcttcaaccccaaggacgtcctgggccggggcgccggcgggaccttcgtttttcgcggacagttcgaaggtcgggccgtagctgtaaagcgactcctgagagaatgcttcggcctggtgcggagagaagttcagttgctgcaggagtctgacaggcacccgaatgtcctcaggtatttctgtacagaaagaggaccacagttccactacatcgcccttgagctgtgccgggcctcactacaggaatatgtcgagaatccagaccttgatcgggggggcctggaacctgaagtcgtgctgcagcagctgatgtcaggattagcgcaccttcacagcctgcatattgttcacagggatctcaaaccaggcaatatcctgatcactgggcccgatagccagggtcttggcagggtggtgctgagcgattttgggctgtgtaagaaacttccagcggggagatgctcgttttccctgcactctgggattcctgggaccgaaggctggatggcccctgagcttctgcagctgctgccaccagacagccccacaagcgccgtcgatattttctcagcaggatgcgtgttctactatgtgttgagcggcggctctcacccatttggcgacagcctgtatagacaggcgaatattctgacaggcgcaccctgccttgctcacttagaagaggaggtccatgacaaagtagttgcacgggatcttgtcggcgcgatgctttctccactgccacagcccaggccatccgctccacaggtgctggcacaccctttcttctggagccgcgctaagcaactgcagtttttccaagacgtgtctgattggctggaaaaggagagcgaacaggagcccctggtgcgcgcactggaggcgggtggctgtgccgttgttcgagataactggcatgagcacatctccatgcctctacagactgacctccgcaagttccgcagctacaagggtacaagtgttagggacctgctgagagccgtgcgaaataaaaaacaccactatagggagctccccgtagaggtccgacaggccctcggacaggttcccgacggcttcgtgcaatacttcactaaccgctttcctagactcctgctacacacccacagggctatgagaagctgcgcttctgagtcgctgttcttgccttattatcctccagatagtgaggctcggcgcccatgccccggcgccactggccggtag

SEQ ID NO: 186545 - DNA, 2625 bp, synthetic construct
  misc_feature 1..2625: note = Description of Artificial Sequence: Synthetic coding sequence
  source 1..2625: mol_type = other DNA
atggccagcgccgtgcggggcagccggccctggccccggctgggcttacagttgcagtttgcggcccttctcctgggaacactgtcccctcaggtacacaccttgcgccccgagaatctcctgttagttagcactttggatgggtctttgcacgcactgtcaaagcagactggagacctgaaatggaccttgagagatgatccagtgatcgaaggaccgatgtatgtgactgagatggctttcctttccgatcctgccgacggcagcctgtacattctcggaacgcaaaaacaacagggtctgatgaaactgccgttcaccattccagagttagtacatgcatctccttgtcgttcaagtgatggagtgttttacacgggaagaaagcaggatgcttggtttgtcgtggaccctgaatcgggtgagacccagatgacattaaccactgagggcccttctactcctagactgtacattggcaggacacagtataccgttactatgcatgatcccagagcacctgcattgaggtggaacaccacttacaggcgctactctgctccgccaatggacggctcccccggaaagtacatgtctcatttggcctcttgtggaatgggtcttcttctcaccgtggacccaggatccgggaccgttctttggactcaggatttgggcgttccggttatgggagtttatacttggcatcaggacggactacgtcagttgccccatctgaccttggcaagagacaccctgcacttcctagcgctcaggtggggacacatccgtcttcctgcctccggtcccagagacactgccaccctgtttagcactctggatactcagctgctcatgaccctttacgtcggtaaagacgagacagggttttatgtgagcaaagccctagtacacacaggagtggcccttgttcctcgcggtctcacgctggcacccgcagacggccccacaacagacgaggtcacgctgcaggtaagcggagaaagagagggttcaccctctacagctgtgcgctacccgagcggcagtgttgccttgccatctcagtggctgctcatcggtcatcacgagctgccccccgttctgcacactacgatgctccgcgtccacccaaccctcggctccgggaccgcagagacacgccctcctgaaaatacccaggcacccgccttttttctcgagcagcagccacaagtggtggagaaacagcaggagacacctttagcaccagctgatttcgctcacatcagtcaagatgctcagtcactccattctggggccagtcggcgtagtcaaaaaaggctgcaatctccctctaagcaggcccaacctctagatgatcctgaggccgagcaattgactgtcgtgggaaaaatttcattcaatccaaaagatgtcctggggcgcggagccggagggaccttcgtcttccggggacagttcgaggggagggccgtagccgttaaacggctgttgagggaatgcttcggcctggtgagacgtgaagtgcaactcctgcaggagtctgaccggcaccccaatgtgctgcgctacttttgtaccgagcggggccctcagttccattatatcgcactggaactttgccgggcatccctgcaggaatatgtggagaatccagacctggatagggggggtctcgagcctgaagtagtgctacagcagctgatgtctggcttggcccatttgcattcattgcacatcgtacaccgggacctcaagcctggaaacattctgataacaggccctgactcgcaagggctggggcgagtggtactgtctgacttcgggttatgcaaaaagttacctgcaggccgttgttccttcagtttgcattcagggattcctggaactgaaggctggatggcccctgaactgttgcagttgctgcccccagacagccctacatctgccgttgacatttttagtgccgggtgcgttttttactacgtactgagtgggggctcacacccatttggcgacagcctttatagacaggcgaatatactcacgggagccccttgtctggcccatctggaggaggaagtccacgataaagttgtggcacgagatctcgtcggtgccatgctgtctccccttccccagccaagaccttcagcccctcaggtcttggcccatccatttttttggtcgagggccaaacagctccagttctttcaggacgtaagtgattggctcgaaaaagagtctgagcaggagccgcttgttcgagccctggaagccggggggtgcgccgtggtgagggacaattggcatgagcacatttcaatgcctctacagactgacctgaggaaatttagatcttacaaaggcacaagtgtccgtgaccttttacgagcggtgagaaataagaaacatcattaccgagagctgcctgttgaggtcaggcaggcccttgggcaggttcccgacggattcgtgcagtactttactaacagatttccgagattgcttctacacactcacagagccatgcggagttgtgccagtgagagtctgtttttgccttattacccccctgactctgaggccagaagaccttgtccgggcgctaccggacgttag

SEQ ID NO: 186546 - DNA, 354 bp, synthetic construct
  misc_feature 1..354: note = Description of Artificial Sequence: Synthetic coding sequence
  source 1..354: mol_type = other DNA
atgagccagaagcaggaggaggagaaccccgccgaggagaccggcgaagaaaagcaggacacacaggaaaaggagggaattctgcccgagagagctgaagaggccaagctaaaagctaaatacccctccctaggccagaaacccggcggatccgacttcttgatgaagcgccttcagaaaggacagaaatatttcgatagtggcgactacaacatggctaaggcaaagatgaagaataagcagctgccctcagccggcccagacaagaacttggtgacaggcgaccatatcccaactccccaggacctacctcagaggaagagtagcctggttacgtctaaacttgccggttag

SEQ ID NO: 186547 - DNA, 414 bp, synthetic construct
  misc_feature 1..414: note = Description of Artificial Sequence: Synthetic coding sequence
  source 1..414: mol_type = other DNA
atgagccagaagcaggaggaggagaaccccgccgaggagaccggcgaggagaagcaagacacccaggaaaaagagggcatattgccagaacgggccgaagaagctaaacttaaggctaagtaccccagtctcgggcagaagccaggtgggtctgactttctgatgaagcggctgcagaagggcgactacaagagcctccattggtccgtgttgctgtgtgctgacgaaatgcagaaatactttgactctggcgattacaatatggcgaaggccaagatgaaaaacaagcagctaccatcagccggcccagataaaaatctagtgacgggtgatcacatccccaccccacaggatctgcctcagagaaaaagcagccttgtgactagtaaactcgccgggggacaagtggaatag

SEQ ID NO: 186548 - DNA, 423 bp, synthetic construct
  misc_feature 1..423: note = Description of Artificial Sequence: Synthetic coding sequence
  source 1..423: mol_type = other DNA
atgagccagaagcaggaggaggagaaccccgccgaggagaccggcgaagaaaagcaggacacccaggaaaaggagggcattcttcccgaacgggccgaagaggccaaacttaaggccaaataccccagcctaggacagaaacctggtggatcggatttcctcatgaaaagattgcagaaaggcgtgtggggcatcgtctcatatccgctgagcttagagctcaaagaagttctgagaatgaaatcagtggagcagaagtactttgactctggtgactacaacatggctaaggctaagatgaaaaacaaacagctgcctagcgctggcccggacaagaatctggtgacaggcgatcacatcccaacccctcaggatctgccacaacggaagtcctcccttgtgacctccaaactggccgggtag

SEQ ID NO: 186549 - DNA, 354 bp, synthetic construct
  misc_feature 1..354: note = Description of Artificial Sequence: Synthetic coding sequence
  source 1..354: mol_type = other DNA
atggccggcggcctgggctgcgacgtgtgctactggttcgtggaggatacacaggagaaggaaggaattctccctgagcgcgctgaagaagcgaaacttaaagcgaaatacccttctctgggacagaaacctggcggtagtgacttcctcatgaaacggttacagaaggggcagaaatatttcgatagcggggattataacatggcaaaggccaagatgaaaaataagcaactcccctccgctggccccgataagaaccttgttactggggaccatattcccactccccaggatctgcctcagaggaagagcagcctggtgacgagtaagctcgcgggtggccaggtcgagtag

SEQ ID NO: 186550 - DNA, 402 bp, synthetic construct
  misc_feature 1..402: note = Description of Artificial Sequence: Synthetic coding sequence
  source 1..402: mol_type = other DNA
atggccggcggcctgggctgcgacgtgtgctactggttcgtggaggacacgcaggaaaaagagggaatccttcccgaaagggctgaggaggcaaagcttaaagcaaagtacccctccttgggccaaaagcccgggggctccgatttccttatgaagcgcctccaaaaaggcgattacaagtccttgcattggtccgtactcttgtgcgccgacgaaatgcagaagtactttgactctggtgattacaacatggccaaggctaagatgaagaacaagcaactcccatcagcagggccagataagaatctcgtaactggcgatcacatcccaacaccacaggacctgccccagaggaagagttctctggttacctcgaaactggcaggtggacaggtcgaatag

SEQ ID NO: 186551 - DNA, 318 bp, synthetic construct
  misc_feature 1..318: note = Description of Artificial Sequence: Synthetic coding sequence
  source 1..318: mol_type = other DNA
atgagccagaagcaggaggaggagaaccccgccgaggagaccggcgaggaaaaacaggatacacaggaaaaagaaggcattcttccggaaagggctgaggaggctaagctgaaagcaaagtatccatctctggggcagaaaccaggcggaagcgactttctaatgaaacgcctccagaagggggtctggggaatcgtctcttatccactatctctagagctgaaggaggtcctgcggatgaagagcgttgaagtgttacttgacccgtttctggaggtgttgctcttaaatcggagccgcggagaatttgaaatctag

SEQ ID NO: 186552 - DNA, 435 bp, synthetic construct
  misc_feature 1..435: note = Description of Artificial Sequence: Synthetic coding sequence
  source 1..435: mol_type = other DNA
atgagccagaagcaggaggaggagaaccccgccgaggagaccggcgaagagaagcaagacacccaggagaaggagggtatacttcctgaacgcgctgaggaggctaaactcaaggcaaagtatccatcacttggacagaagcctggaggatccgactttctgatgaagcggctgcagaaaggcgtctgggggattgtttcttatcctctgagtttggagcttaaggaagtcttgcgcatgaagtctgtggagcaaaaatactttgatagcggcgattataacatggccaaggcaaagatgaagaacaaacaactgccaagcgctggtccagacaagaatttagtgacaggggaccatatccccacgcctcaagacctgcctcagcgcaaaagctctctggtcacaagcaaactcgccgggggccaggttgagtag

SEQ ID NO: 186553 - DNA, 366 bp, synthetic construct
  misc_feature 1..366: note = Description of Artificial Sequence: Synthetic coding sequence
  source 1..366: mol_type = other DNA
atgagccagaagcaggaggaggagaaccccgccgaggagaccggcgaagaaaagcaggacacccaagaaaaggagggcatcctgccagaacgcgctgaagaggcaaaattgaaggccaagtacccgtccctggggcaaaagccaggaggctcagatttcctgatgaagcgtctgcagaaaggccagaaatatttcgactctggcgactacaatatggcaaaggcgaaaatgaagaataaacagctgccctccgccggcccagataagaacctggttacaggggaccatatccccacccctcaggatcttccacagcgtaagtctagtctggtgacgtccaaactggctggaggtcaggtcgagtag

SEQ ID NO: 186554 - DNA, 402 bp, synthetic construct
  misc_feature 1..402: note = Description of Artificial Sequence: Synthetic coding sequence
  source 1..402: mol_type = other DNA
atgagccagaagcaggaggaggagaaccccgccgaggagaccggcgaggagaagcaggacacacaggagaaggagggcatcctgcctgagcgcgccgaagaggccaagctaaaggcaaaataccccagcctgggacaaaagcccggcggctctgattttcttatgaaaagactgcaaaaaggggactataagtccctgcactggtcggtattgctctgcgcagatgagatgcagaagtactttgattctggggactataacatggccaaagcaaagatgaaaaataagcaactcccatccgctggccctgacaagaatctagttactggtgaccatatcccgaccccccaggacctgcctcagcgcaagtctagcctggtaacaagcaaactcgcaggctag

SEQ ID NO: 186555 - DNA, 318 bp, synthetic construct
  misc_feature 1..318: note = Description of Artificial Sequence: Synthetic coding sequence
  source 1..318: mol_type = other DNA
atgagccagaagcaggaggaggagaaccccgccgaggagaccggcgaggaaaagcaggacactcaggagaaagaaggaatcctgcccgaacgtgcagaggaggctaagctcaaagcaaaatatccctctctgggacagaaacctggtggttctgactttctgatgaagcggctgcaaaaaggcgtttggggaatcgtttcataccccttgtctctggagttaaaagaagttctcagaatgaaatccgttgaagttctccttgatcccttcttagaagtcctgttactgaacagatctcggggtgagtttgaaatctag

SEQ ID NO: 186556 - DNA, 342 bp, synthetic construct
  misc_feature 1..342: note = Description of Artificial Sequence: Synthetic coding sequence
  source 1..342: mol_type = other DNA
atggccggcggcctgggctgcgacgtgtgctactggttcgtggaggacacccaggagaaggagggtatactccccgagcgagcagaagaagccaagttaaaagcaaaatatccttctttgggccagaaacccggcggatcagacttcctcatgaagcgactgcagaaaggacagaagtatttcgactccggggactataacatggcaaaggccaagatgaagaacaaacaactgcctagtgccgggcccgacaagaatctggtgactggagaccacatccctactccacaggatttaccgcagcgcaagtccagcctggtcacttctaagttggccggatag

SEQ ID NO: 186557 - DNA, 1173 bp, synthetic construct
  misc_feature 1..1173: note = Description of Artificial Sequence: Synthetic coding sequence
  source 1..1173: mol_type = other DNA
atgatcagcctgcccggccccctggtgaccaacctgctgcggttcttgttcctgggactgtcagctcttgccccaccttctcgggcccagctgcagctgcacctgccagccaacaggctgcaagcggtggagggcggtgaagtggtcctgccagcttggtatactctgcacggcgaggtgtcttcaagtcagccatgggaggtcccttttgtcatgtggtttttcaaacaaaaagaaaaagaagaccaagtcttgtcatatattaacggggttaccacaagtaaaccgggagtgtcactggtgtactctatgccaagcagaaatcttagcctgagactggagggcctccaagagaaagactctggcccgtattcctgttcagtgaacgtgcaggataaacaagggaaaagtagaggccatagtattaaaactctcgagctgaacgtactggtgccacctgcaccccctagctgcaggcttcagggagtcccgcacgttggtgcaaacgtcaccttgtcctgtcagagtccgcgctctaagccagccgtgcagtaccagtgggatagacagctgccttcattccagacattttttgcgcctgccctggatgttattagaggcagcctcagcctgacaaatttgtcatcctcaatggcaggcgtatatgtctgcaaggcgcataatgaagtcggaactgcccagtgcaacgtgactttggaggtaagcaccggcccgggtgcagccgtagtagccggggccgtggttggcacacttgtaggtttgggattactggccggacttgtcctcctctatcacagaagaggcaaagccctggaagagcctgctaacgatattaaagaggacgccatcgccccaaggacccttccttggcccaaaagctctgatacaattagcaagaacggtaccctgtccagtgtgacctccgcacgcgctcttcggccaccacacggccctcctcggcctggtgcgctcactccaactcccagtctctcttcacaagctctcccaagcccacgcctgccaacaaccgacggtgctcaccctcaacctatatccccaattccaggtggcgtgtcttccagcggcttgagtaggatgggtgcagtcccggtgatggttccagctcagtcacaagcgggaagcctggtgtag

SEQ ID NO: 186558 - DNA, 426 bp, synthetic construct
  misc_feature 1..426: note = Description of Artificial Sequence: Synthetic coding sequence
  source 1..426: mol_type = other DNA
atgatcagcctgcccggccccctggtgaccaacctgctgcggttcctcttcctggggctgtccgcattggatgtcatacggggatcgctgtccctgacaaacttgtcctcatctatggccggggtatatgtgtgtaaggcccataacgaggtgggtaccgcacagtgcaacgtaacccttgaggtgtccacggggccaggtgcagctgtcgtggcaggggcagtagtgggaactcttgtcggattaggcctactcgctggtctggtcctgctctatcatcggcggggaaaggctctggaggaaccagctaatgatattaaagtcagatctccactgggactttctttcagcgcgcccaaaatggaatggttatggaagtggcgggatgcccatttctaccgagatagttatctgagtaagtggtag

SEQ ID NO: 186559 - DNA, 2613 bp, synthetic construct
  misc_feature 1..2613: note = Description of Artificial Sequence: Synthetic coding sequence
  source 1..2613: mol_type = other DNA
atgaccgccgacaaggagaagaagcggagcagcagcgagcggcggaaagaaaagagcagagatgctgcgcgctgtaggagaagcaaggagactgaagtgttctacgaacttgcccacgaactgccattaccacatagcgtgtcctctcacttagacaaggcctctattatgcgattggctatcagctttcttcgcacacacaagctgctaagctctgtgtgttcagaaaatgagagtgaggcagaagcggaccagcagatggacaatctgtaccttaaagccctcgagggatttatcgccgtggtcactcaggatggcgacatgatcttcttgtcagagaatatcagcaagtttatgggactcacgcaggtagaactaaccggacattcaattttcgacttcactcatccctgtgaccatgaagaaatccgggagaacctgagcctcaagaatgggagtgggtttgggaagaaatccaaggacatgagcactgagcgcgacttttttatgagaatgaaatgcaccgtaactaaccgcggaagaacagtgaatctgaagagcgcgacatggaaggtgcttcactgcacgggccaagtgaaggtgtataataactgccctccgcacaactctctttgtgggtataaagaacctctgctgtcctgtctgattatcatgtgcgagcctatccagcatccctcacacatggatatacctttggactccaaaactttcctctccaggcacagcatggatatgaagtttacatactgcgacgatagaataacagaactcattggatatcatcccgaggagcttctgggccgctctgcatacgaattctaccacgcccttgattcagagaatatgacaaagtcccaccagaacctttgtaccaaagggcaggtggtgagcggacagtatcgtatgctcgcgaagcacggagggtatgtttggcttgaaactcaggggaccgttatttataatccccgcaatctgcagccacagtgcattatgtgcgtaaactacgtcctaagcgagatcgaaaagaatgacgtcgtgttcagcatggaccagaccgagagtctgttcaagccccacttgatggcaatgaattccatatttgactctagcggcaagggagccgtgtcagaaaagagtaactttctttttacaaaattgaaggaagagccggaagagctcgcccaacttgcgccgacccctggggatgctattatttccctcgacttcggcaaccaaaactttgaggaatccagcgcgtatggaaaggctatcttacctccatcacagccctgggccacagagcttcgcagccatagtacacaaagcgaggctggctctctccctgcttttacagtcccacaggcagctgcacctggatctaccaccccatccgccacctctagcagctccagttgcagcacacctaattctcctgaggattattatacctccctggacaacgatctgaaaatagaggtgatcgagaagcttttcgcgatggatactgaagcgaaagaccagtgttccacacagacagatttcaacgagctggaccttgaaacattagccccatatataccgatggacggagaggattttcagcttagtcccatttgcccagaagagaggcttttagccgagaacccccagtcaacgccccagcactgttttagcgccatgactaatatcttccagccattggcccctgtggctcctcatagccctttcctgctggacaagttccagcagcagctggagtccaagaagactgagcccgaacatcgcccaatgtcttctatcttttttgatgccggctctaaagctagccttcccccctgctgtggacaggcttccactccactgagcagcatgggtggcagaagcaatacccagtggccccctgaccctcccctgcacttcggaccgacgaagtgggccgtcggcgatcagaggacagaatttctaggcgctgccccattaggacccccagttagccctccccatgtgtccacctttaagactcggtctgccaaaggtttcggtgccaggggccctgacgtgctgagccccgctatggtggccctctcaaacaagctgaagctgaagcgacagttggaatacgaggagcaggcttttcaggatctgtctggaggggacccccctggtggcagtacatctcacttgatgtggaaaaggatgaagaatcttaggggggggtcctgtccattgatgcctgataaacccctatccgcaaacgtccccaacgacaagttcacacagaatccaatgcggggactcggtcatccccttagacatctcccactcccacagccccccagcgcgatcagccccggagagaactcaaaatcgcgttttcccccacagtgctatgctacacagtaccaggactattcgctgagctccgctcacaaggttagcggtatggcctcccgattgctggggccctcctttgagtcttacctgctgcccgaactgaccaggtacgactgcgaggtgaacgtccctgtgcttggcagttctaccctgctgcaggggggggaccttttgagggcattggatcaggcgacgtag

SEQ ID NO: 186560 - DNA, 780 bp, synthetic construct
  misc_feature 1..780: note = Description of Artificial Sequence: Synthetic coding sequence
  source 1..780: mol_type = other DNA
atgaccgccgacaaggagaagaagcggagcagcagcgagcggcggaaggagaagtctcgcgatgcagcaagatgccggcgaagtaaagagacagaggtcttttacgaactggcacacgagctccctctcccgcatagcgtctcttcacatctcgacaaagccagtatcatgcggttggccattagttttctgcgaacccacaaactgctttccagcgtctgctccgaaaatgagtcagaggcagaggccgaccagcagatggataacttgtacctcaaagccctggaaggctttattgcagtcgtgactcaggacggggatatgattttcctttccgagaacatatctaagttcatggggctcacacaggtcgaactaaccggacactctattttcgacttcactcacccttgtgaccacgaggaaatcagagagaatctctcactgaagaacgggagcggctttggcaagaagtccaaagatatgtccactgagagagatttttttatgcggatgaaatgtacagtaaccaatcgggggcgaactgtcaacctgaagagcgctacatggaaggtcctccactgcaccggccaagtgaaagtgtacaacaactgtcctccccataattctctctgcggttacaaagagccactcctatcctgtctcatcatcatgtgcgagccaatccaacacccctcccacatggatattccactagattctaagactttcctatctcggcacagtatggacatgaagtttacttattgtgacgactag

SEQ ID NO: 186561 - DNA, 537 bp, synthetic construct
  misc_feature 1..537: note = Description of Artificial Sequence: Synthetic coding sequence
  source 1..537: mol_type = other DNA
atggtgagcgtgcccaccacctggtgcagcgtggccctggccctgctggtggctctgcacgagggtaaaggccaagcagcagccacgctggagcagccagcttcttccagccacgcacaagggacccacctcagactccgccgctgcagttgcagttcctggctggataaagaatgcgtgtacttctgccacctggatatcatttgggtaaacacgcccgagcagaccgctccatatgggctgggaaatccgcctagacgaaggcggcgctctctccctagaaggtgccagtgtagttccgccagagatcctgcttgcgcaacattttgcttgcgacgcccatggaccgaggctggagccgtcccttctcgaaaaagccctgcagacgtctttcaaacaggaaaaacaggcgccactacaggcgagctgcttcagagattgagggacatttccactgtgaagtccctgtttgctaagcgacagcaggaagccatgagggaacccaggagtacacatagtagatggcgaaagcgctag

SEQ ID NO: 186562 - DNA, 660 bp, synthetic construct
  misc_feature 1..660: note = Description of Artificial Sequence: Synthetic coding sequence
  source 1..660: mol_type = other DNA
atggagcccggcctgtggctgctgttcggcctgaccgtgaccagcgccgccgggtttgtgccctgttcccagtctggtgatgctggtcgcagaggagtgtcccaggcccccacagccgcgagatccgaaggagattgtgaggagacagtagccggcccaggcgaggagactgtcgccggtcctggcgagggcacagtggctcccacagcgctgcagggcccgagccctggctctcctgggcaggagcaggctgctgaaggcgcacctgaacatcataggtcacgccgctgcacttgcttcacttacaaggacaaagagtgcgtttattactgtcacttagacattatctggatcaacacgcccgaacaaacagtgccatacggcctgtccaattaccgaggcagctttagagggaaacggtccgccggtccacttccgggaaatttgcagctgagccaccggccccacctccggtgtgcgtgcgtgggacgatacgacaaggcgtgcttacacttctgcactcagacattggacgtgagttcaaatagtcgaactgccgaaaaaaccgacaaggaggaagagggcaaggtgcgcggtgcaaaccggggactttgccagagaaggctgaagtcccgcactaataaggctagccgcctatag

SEQ ID NO: 186563 - DNA, 717 bp, synthetic construct
  misc_feature 1..717: note = Description of Artificial Sequence: Synthetic coding sequence
  source 1..717: mol_type = other DNA
atggagcccggcctgtggctgctgttcggcctgaccgtgaccagcgcagcaggatttgttccttgctcccagagcggggatgccggaagaagaggcgtttcccaggcaccgactgctgcgcgctccgagggagactgtgaggaaaccgtggctgggccaggcgaggagaccgttgcaggtcctggcgaggggaccgtggctccaacagccctccagggaccatccccagggtcccctggccaggaacaggcagccgagggggcccccgagcatcaccgaagtagacggtgtacttgtttcacctataaagacaaggaatgcgtgtactactgccatttggacattatatggattaacacacctgaacaaacagtgccctatggactgagcaactaccgagggtcattcaggggtaagcggagcgctggacccctgcctggcaatctgcagttgagccaccggcctcacctccgttgtgcctgcgttgggcgttacgataaggcatgtctgcacttctgtacacagaccctggacgtgagtagcaatagccggaccgctgaaaaaacggacaaagaggaggaagggaaggttgaggtcaaggaccagcaatccaagcaggcattagatctgcatcacccaaaactgatgcccggctctggactggccttggctccctctacatgtccaaggtgcttgtttcaggaaggcgccccctag

SEQ ID NO: 186564 - DNA, 579 bp, synthetic construct
  misc_feature 1..579: note = Description of Artificial Sequence: Synthetic coding sequence
  source 1..579: mol_type = other DNA
atggagcccggcctgtggctgctgttcggcctgaccgtgaccagcgccgccgggtttgtcccttgtagtcagtccggggatgccggccgcaggggcgttagtcaggccccgaccgccgctcgctctgaaggcgattgtgaggaaactgttgccggacctggtgaggaaactgtagccggcccaggagaaggtaccgttgctcccaccgcattacagggtccctcccccgggtcacctggtcaggaacaggccgcagagggagcgccagagcatcacaggagccggaggtgcacatgtttcacttacaaagacaaagagtgcgtctactattgtcatctggacattatctggattaacacacctgagcagaccgttccttacggattgagcaattacagagggagcttcagaggtaaaaggtcagccggccctcttccaggtaacttgcaactgtctcaccggcctcatctacggtgcgcatgcgttgggcggtatgataaggcctgccttcacttctgtacccagactctcgatgtttcacggctgaagagtcggaccaataaggcatctaggctatag

SEQ ID NO: 186565 - DNA, 717 bp, synthetic construct
  misc_feature 1..717: note = Description of Artificial Sequence: Synthetic coding sequence
  source 1..717: mol_type = other DNA
atggagcccggcctgtggctgctgttcggcctgaccgtgaccagcgcagcagggtttgtgccctgcagtcagtccggtgacgcgggacgcaggggggtaagccaggctcctacggccgcccgatctgagggggattgcgaggagaccgtggccgggcctggagaggaaacggtggccggcccaggcgaaggcacagttgccccaacagccctgcaaggcccttcccccgggtcacctgggcaagaacaagccgcagaaggagcccctgaacatcacaggtcgcgaaggtgcacatgttttacatataaagacaaggaatgcgtatattattgtcaccttgatattatatggattaacacgcccgaacaaacggtgccatacgggctgagcaattatcgcggtagcttccgggggaaacggtctgccggcccacttcctggcaatttgcaactcagtcaccggcctcacctgagatgtgcatgcgttggacgctacgacaaggcttgtttgcacttctgtacacagaccctggacgtatcatcaaatagccgcacagccgagaagacagacaaggaggaggaggggaaggtggaagtgaaagaccagcaatccaagcaagcgctagatctccaccatcccaaactcatgcccgggtccggcctagctctggctcccagtacgtgtccaaggtgcctgtttcaggagggggcaccatag

SEQ ID NO: 186566 - DNA, 675 bp, synthetic construct
  misc_feature 1..675: note = Description of Artificial Sequence: Synthetic coding sequence
  source 1..675: mol_type = other DNA
atggagcccggcctgtggctgctgttcggcctgaccgtgaccagcgctgccgggtttgttccttgttcgcagagtggggatgcgggccggagaggggtcagtcaggccccgacggctgcccgctctgaaggagattgcgaggaaaccgtcgccgggcccggtgaagagaccgtggccggtccaggcgagggtaccgtggctcctactgctctgcaaggaccatctcccgggagtcccggtcaggaacaggcggccgagggcgctcctgagcatcatagaagcaggaggtgtacctgtttcacatataaagataaggagtgtgtgtattattgtcaccttgatatcatttggattaatactcctgagcaaactgtcccctatgggctgagtaattacagaggtagctttcggggaaaacgctctgctggacctcttcccggaaacctgcaactgtcacaccgcccgcatctgaggtgtgcctgtgtggggaggtacgacaaggcgtgtctgcacttctgcacccagacactagatgtatctcggcaggtggaagtcaaggaccagcagagtaaacaggccctggatctccatcaccctaaactcatgcctggctctggcctcgccttggcgccctccacatgccctcgatgcctgttccaggaaggcgctccatag

SEQ ID NO: 186567 - DNA, 2304 bp, synthetic construct
  misc_feature 1..2304: note = Description of Artificial Sequence: Synthetic coding sequence
  source 1..2304: mol_type = other DNA
atggaggccctgcgggagagcgtgctgcacctggccctgcagatgtctacttataagagagccactttggacgaggaagacctagttgatagcctgtcagagggcgacgcatatcctaatggcttgcaggtcaattttcactccccgcggagcggccaacgctgctgggccgctcggacccaggtggaaaaacgactggtggtattggtcgtcctcttagctgccggcctcgttgcttgcctggccgccctagggatccaatatcaaacacgatctccctctgtttgcctatcagaagcatgcgtgagcgtcacatcctccatcctgtcttctatggacccaactgtggatccctgtcacgatttctttagttacgcctgtggcggctggataaaggcaaatcccgtccctgatgggcactcacgctggggaacctttagcaacctgtgggaacataaccaggcgattataaagcatctgctggagaatagcacagcgagtgttagtgaagccgaaaggaaagcgcaggtatactaccgcgcctgcatgaacgagacacgaattgaagagctgagggctaaacctttaatggagctaattgagcggctaggtggctggaacattactggcccctgggcaaaggacaattttcaggatacgctccaggtggttaccgcgcattatcggacgagcccattctttagcgtgtatgtgtcggccgactccaaaaatagcaacagcaatgtcatccaagtagaccagtctggcttgggactaccctcgagggattactatctaaataagaccgagaatgaaaaggtcctcactggatacctgaattatatggtccagttgggtaaactgcttggtggcggtgacgaggaagccattcggccacagatgcagcaaattttagatttcgaaacagcactcgcaaacatcactatcccacaggagaagcgtcgtgacgaggagcttatctatcataaggttactgccgcagagctgcaaacccttgctcctgcgattaattggctgcccttcctaaataccattttctatccagtcgagatcaacgaaagcgaaccaatcgtggtgtatgacaaagagtaccttgaacaaataagcactctcataaataccacagaccggtgcctgctcaataactacatgatatggaacctcgtgcggaaaacctcgtccttcctcgatcagagatttcaggatgccgacgaaaagtttatggaggtgatgtatggaacaaaaaagacttgcctacctcggtggaaattctgcgtttccgatactgagaacaacctgggatttgccctggggcccatgtttgtgaaggcaaccttcgcagaagacagcaagagcatcgctacagaaatcatcctggagattaagaaggcctttgaagagtcacttagcacgctgaagtggatggacgaagaaacgaggaagtccgccaaggagaaggccgatgccatctataatatgattggctaccccaattttattatggaccccaaagagctcgacaaagtcttcaatgactacacggctgttccggacctgtattttgagaacgccatgcgcttcttcaatttttcctggcgggtcaccgctgaccagctgcggaaagcacctaaccgtgaccagtggagtatgaccccccctatggtcaatgcttactatagccctaccaagaacgagattgtttttcctgctggaatcctacaggcaccattttacacaagaagctcccccaaggctttgaatttcggcggcatcggggttgtggtgggccatgagctgacccacgccttcgacgaccaagggagggagtacgacaaagacggaaacctgcgcccgtggtggaaaaattccagtgtcgaggccttcaagaggcaaacagaatgtatggtcgaacagtactcgaattactcagtcaatggtgagcctgtgaacggtcgtcatactctgggagagaatatcgccgacaatggcggattaaaggccgcttacagggcctatcaaaactgggtgaagaagaatggtgcagagcatagcctccctacactggggctgacaaacaatcaactgttcttcctgggctttgcccaggtttggtgttccgtgcgcactcccgagagttctcacgagggtctcatcactgacccgcatagtccgtctcgattccgggttatcgggtcgctaagtaactctaaggagttctcggaacactttcgctgtcctcctggtagtccaatgaacccaccgcataagtgcgaagtctggtag

SEQ ID NO: 186568 - DNA, 2277 bp, synthetic construct
  misc_feature 1..2277: note = Description of Artificial Sequence: Synthetic coding sequence
  source 1..2277: mol_type = other DNA
atgcccctgcagggcctgggcctgcagcggaaccccttcctgcagggtaagagaggccctggcctgacatcatctccacccctactgccgccatcactgcaagtcaatttccatagcccacgaagcggccagagatgctgggcagcgaggacccaggtggagaaacgcctcgtcgtcctggtagtgttgctggcagcaggactggtggcctgtttggctgccttgggtattcagtaccagacccggtccccctcagtatgcctcagcgaggcatgcgtgtcagtgacttctagcatcctctccagcatggacccgacagtggacccttgtcatgactttttctcttacgcctgcggcggttggattaaagccaatccagtgcctgacggtcacagccgctggggaaccttctccaatttatgggaacacaaccaagcaatcattaaacacctgttagagaatagcaccgctagcgtgtccgaagctgagcgaaaagctcaggtatactatcgggcctgtatgaatgaaacacgaatcgaggagctgcgggccaagcccctcatggaattaatcgaaaggcttgggggctggaacataaccggcccgtgggcaaaggacaattttcaagacactttgcaagttgtcacggcgcactaccgaaccagtccattcttctcagtttatgtttccgccgactctaagaactccaatagtaacgtgatccaggtcgatcagagtggattgggactaccaagtcgcgactactatctgaacaagaccgaaaatgaaaaggtcctgacgggctacctgaactacatggtgcagctgggcaaattacttggtggtggagacgaggaggcgatccgcccacaaatgcagcagatcttggatttcgagaccgcgctggcaaacataaccatccctcaagagaagcgccgggacgaggagctgatctaccataaagtaaccgccgcggaattacaaacccttgcccccgccatcaattggttgcccttcctgaatactatcttctatcccgttgaaatcaacgagtcagagcctattgtcgtatacgacaaggaatacctggaacagataagcaccctgatcaatactaccgacaggtgtctcttaaacaattacatgatttggaacctcgtgagaaaaaccagttcctttttagatcagagatttcaggatgctgatgaaaaatttatggaggtcatgtatggcaccaaaaagacatgtctccctcggtggaagttctgtgtgtctgacaccgaaaacaatctcggctttgccctgggccccatgtttgtaaaagcaacgtttgcggaagactccaaatcaattgccaccgagatcatcctggagatcaaaaaagctttcgaggagtctctgtcaacactgaagtggatggacgaggagacacgcaaatctgccaaagaaaaggctgatgccatatataacatgatcggttacccaaactttatcatggatcccaaagaattggacaaagtcttcaacgactacactgccgtgccagatttatacttcgaaaacgccatgcggttctttaacttttcctggagggtcactgcagatcagctgcgcaaggcccctaacagagaccagtggagtatgactcctcccatggtgaatgcttattatagtcccactaaaaatgagatcgtcttcccagctgggatcctgcaggcgcctttttacactcgctcaagccctaaagccctgaacttcggtggaatcggtgtggttgtcggtcatgaactgacacacgcctttgacgatcaagggcgggagtacgacaaagacggtaacttgaggccttggtggaagaacagctcagtagaggcatttaagcggcagaccgagtgtatggtcgagcaatactccaattatagtgtgaacggtgaacctgtcaacggccgacacactctcggggagaatatcgctgataatgggggcctgaaagctgcataccgcgcgtaccagaactgggttaagaagaatggagctgagcactctctccccacactcgggttaaccaataaccagcttttttttttgggttttgcccaagtctggtgctccgtacgaaccccggagtcttcccacgaaggccttattacggacccccactctccatcacggtttcgagttattggctctctcagcaactccaaggagttctctgagcacttccggtgtcctcccggctcaccaatgaatccgccccataagtgcgaagtttggtag

SEQ ID NO: 186569 - DNA, 2313 bp, synthetic construct
  misc_feature 1..2313: note = Description of Artificial Sequence: Synthetic coding sequence
  source 1..2313: mol_type = other DNA
atgcggggcgtgtggcccccccccgtgagcgccctgctgagcgccctcggaatgtccacttacaaaagagccaccctcgacgaggaggatcttgtagattcactctctgaaggtgacgcatatcctaatggccttcaggtgaactttcacagtcccaggagcgggcagaggtgctgggcagcaagaactcaggtggaaaaaaggctcgtcgtgctggtggtattattggcggctggccttgtagcctgccttgcggccctgggcattcagtaccagactaggagcccttcagtgtgtttgtctgaggcatgcgtctccgtgactagctccattctgtcctcaatggaccccacggttgacccctgtcacgatttcttcagctatgcttgtggaggctggatcaaggccaacccagtaccagacggtcactctcggtggggaacattttcaaatctctgggagcacaatcaggccatcatcaaacatctgctcgagaattcgacagctagcgttagcgaagccgagcgcaaggcacaggtctactatagggcttgcatgaacgagaccaggatcgaggagctcagggccaagccacttatggagctcattgaaaggcttggaggatggaatatcaccggtccgtgggcaaaagataatttccaggacaccctgcaggtcgtcaccgcacattatcgcacctcaccattcttcagtgtgtacgtttctgccgacagcaaaaactctaactccaacgttatccaggtggaccagtcaggtttaggactgcctagcagagattattatctgaacaaaactgagaatgaaaaggtcttgacagggtacctgaactacatggtgcagctgggcaagctactggggggcggagacgaggaagccattcgcccccagatgcaacaaatactggacttcgaaacggcactcgcaaacattaccatcccacaggaaaagcgacgagatgaagaattgatctaccacaaagtgactgccgcggaactgcagactttagcacccgccattaactggctcccgtttctcaataccatcttctatcccgtcgaaataaatgagagtgagccaattgtggtgtacgataaagaatatctggagcagatctctaccctcatcaacaccacagacagatgccttctcaacaactatatgatctggaacctcgtgagaaaaacgagttctttcctggaccagagatttcaggacgctgacgaaaagttcatggaggtcatgtacggaaccaaaaaaacatgtcttcctcggtggaagttttgcgtgagcgacacagaaaacaatcttgggtttgctttggggcctatgtttgtgaaggcgacgtttgcagaggattcaaaaagcattgcaacagaaatcatccttgaaataaagaaagcgttcgaagaaagcttatcaactctgaagtggatggatgaggagactaggaagtctgccaaggagaaggcagatgcaatatataatatgatcggctaccccaattttatcatggaccccaaagagcttgataaggtgttcaacgattacacagccgtgccggatctgtacttcgagaacgcaatgagattttttaacttctcgtggcgggtgactgcggaccagcttcgaaaggctcctaaccgcgatcaatggagcatgaccccccccatggtaaatgcctactactcaccaacaaagaacgagatcgtgtttcctgcgggaattctccaagctccattttatacccgttccagtcctaaagcattgaattttggcggcataggcgttgtggtcggtcatgagttaacccatgcttttgacgaccagggaagggagtatgacaaggacggaaacctgagaccttggtggaaaaacagtagcgttgaagcctttaaaaggcagaccgagtgcatggttgaacagtacagcaattacagcgtcaatggcgaacccgtgaacggaagacataccctgggggagaatattgccgataacggcggcctgaaggccgcgtaccgcgcctatcagaattgggtgaaaaaaaatggtgccgaacatagtttgcctactctgggactcaccaataaccaactttttttcctcgggttcgcacaggtatggtgttccgtgcgcacgcctgaatcctcacacgaggggctgatcaccgatccccactccccctcacgattccgggttataggatccctctcaaatagcaaagaattctccgagcattttagatgcccccctggcagcccaatgaatcccccacacaagtgcgaggtgtggtag

SEQ ID NO: 186570 - DNA, 2265 bp, synthetic construct
  misc_feature 1..2265: note = Description of Artificial Sequence: Synthetic coding sequence
  source 1..2265: mol_type = other DNA
atgatgagcacctacaagcgggccaccctggacgaggaggacctggtggatagtctttcagagggtgatgcttacccaaatgggttgcaggttaattttcacagcccacggtcaggtcaacgctgttgggctgccaggactcaggttgagaagcgtctggtagttcttgtcgtcctgctcgccgcgggtctggtagcctgcttggccgctctcggtatccaataccaaacccggtcacctagcgtctgtctgagtgaggcgtgtgttagtgttacttcgtcaatcctttcctcaatggaccccacggttgatccatgccacgatttcttttcgtatgcttgcggaggctggattaaggcgaatccagtgccggatgggcactctcggtggggaacattcagcaacctttgggagcataatcaggctataattaaacacctgctcgagaacagtacagcttctgtgtctgaggccgaacgcaaggcacaggtgtattatcgggcttgcatgaatgagaccagaattgaagagctgcgcgctaaacctttgatggagctgatagaacgcctcggggggtggaatataacaggtccctgggccaaagacaacttccaggatactctccaagtagtgaccgctcactaccgaactagcccctttttctcagtgtacgtgtccgccgattccaagaattctaacagcaacgtgattcaagtcgatcagtccggcctgggactcccgagtagggattattacctgaataaaaccgaaaacgaaaaagtgctgaccggatacctgaactatatggtgcagctggggaagctgctcggcggtggtgacgaggaagccatacgcccacagatgcaacagatcctggattttgaaacagctcttgccaacattaccattccacaggaaaagagacgcgacgaggaattaatttatcacaaggttacagccgcagagctgcagacgctggctccagcaatcaactggctaccatttctgaatactatattttaccccgtggaaattaatgaatccgagcctatagttgtctacgacaaagagtacctcgaacagatcagcactctgataaacactactgatagatgtctgttaaacaattacatgatctggaacctggttcgcaagacctcatccttcctggatcagcgcttccaggatgccgatgaaaagtttatggaagttatgtacggcacaaagaaaacttgtttgccacgctggaagttttgtgtttctgatactgagaataacctgggtttcgctctgggccctatgttcgtcaaggctacatttgcggaggactcaaagagtatcgcgacagagattattttagaaataaagaaggcatttgaggagagtctgtctaccctgaagtggatggacgaggagaccaggaagagcgctaaagagaaagctgacgctatctataacatgattggataccccaacttcattatggaccccaaggagcttgacaaggtgttcaacgattacaccgcagtccctgatctttacttcgagaacgccatgcggttctttaatttctcatggcgggtgacagcagaccagctgagaaaggcccccaatcgcgaccagtggagtatgacaccgccaatggttaacgcatactattcccctaccaaaaatgagatcgtgttcccagcaggcatactgcaggcccccttttatacacgttcatcccctaaggccctaaacttcggcggcataggagtagtggtggggcacgagctcacgcacgcttttgacgatcagggaagggagtacgacaaggacggtaacctgcgtccttggtggaagaatagctctgtcgaggcctttaagaggcagacagaatgtatggtcgagcagtattccaactattcagtcaacggggaacctgtaaatggccgacatactctgggagagaatattgcggataatggcgggctgaaagcggcgtacagagcttaccagaactgggttaaaaaaaatggggccgaacactccctccctacattgggtctcaccaacaaccaactcttctttctggggttcgcccaagtgtggtgcagcgtgcggacacccgaaagcagtcacgaaggtctcattaccgatcctcattcaccttccaggttccgggtaattggatctctctccaactccaaggaattctccgagcattttaggtgtccccctggatcacctatgaaccctcctcacaaatgtgaagtgtggtag

SEQ ID NO: 186571 - DNA, 2217 bp, synthetic construct
  misc_feature 1..2217: note = Description of Artificial Sequence: Synthetic coding sequence
  source 1..2217: mol_type = other DNA
atgcggggcgtgtggcccccccccgtgagcgccctgctgagcgccctcggcatgtctacttacaaaagagctacactggatgaggaggacctggtagatagcttgtctgagggcgatgcatacccaaacggacttcaggtgaattttcactcgccccggtccggccaacggtgctgggccgcccgaacccaggtggagaaaagactggtggtcctggtggtgctgttggccgccggacttgtggcgtgtttagcggcactcggtattcagtatcaaacaaggagccctagcgtgtgcttgtctgaagcatgtgtcagtgtgacatcatccatcctatcttcgatggatccgacggtagacccctgccatgactttttttcctatgcctgtggcggctggatcaaagctaatcccgtccccgatggccacagccgatggggcactttctcaaatttgtgggaacacaaccaggccattataaagcacctacttgagaacagcacggccagtgtgagcgaggcagaaagaaaagcccaagtctactaccgtgcctgcatgaatgaaactcgaatagaggaactgcgcgctaaaccactgatggaactgattgagaggttaggcggttggaatatcactggaccttgggcaaaggacaatttccaggatacactccaggtggtgaccgcgcactatcgcacttctcccttcttttccgtatacgtctctgctgattccaaaaattccaattctaacgttatccaggtcgaccagtccggtcttggcctcccaagccgagattactatctcaataaaaccgagaacgagaaagtactgacaggctacctgaattacatggtgcagttaggcaagttattgggaggcggtgacgaggaggcgattcggcctcaaatgcagcagatattagactttgaaaccgccttggccaatatcacaattccccaggaaaagaggagggacgaagagctgatttatcacaaagtgacggccgccgagctccagacactcgcccccgccatcaactggttaccattcttgaacaccatcttctatcccgtggagattaacgaatcagagcctatcgttgtgtatgacaaggaatatctcgagcaaatctctactctgatcaacacaactgaccggtgcctgctgaacaactacatgatctggaaccttgttaggaaaacatcctcgtttctggatcaacggtttcaggacgccgatgagaagttcatggaagtaatgtatgggaccaaaaagacttgcttgcctagatggaaattttgtgtgagcgacaccgaaaacaacttagggtttgccctgggccccatgtttgtcaaagcaacgttcgccgaggattccaaaagtatcgcgacagaaattatcctggagatcaagaaggccttcgaggagagcctatctaccctgaaatggatggacgaggagacacggaaatccgccaaggaaaaggccgacgccatctacaacatgatcggctacccaaatttcatcatggatcccaaggagttggacaaggtattcaacgactatactgcagtgcccgatttgtatttcgaaaacgctatgagattttttaacttctcgtggagggtgaccgctgatcagctgcgaaaagcacccaatcgggatcagtggagcatgactcctcccatggtgaacgcttactattccccaaccaagaatgagatcgtgttccctgcaggcatactccaggccccattttataccagatcttcccccaaggctctaaattttgggggtataggagtcgtggtcggtcacgagctgacccacgcgttcgacgaccagggcagggaatatgacaaggatgggaacttgcgaccttggtggaaaaattccagtgttgaggcctttaaacgacagacagaatgcatggtggaacagtactctaattacagcgtcaacggggagccagtgaacgggaggcatactcttggtgagaatattgcagacaatgggggtttaaaggccgcatacagggtttggtgttctgtgcggacccccgagtcatctcatgagggcttgattacggatccacattctccaagtaggtttagggtaattgggagtcttagtaatagcaaggagttttcagaacattttcgctgcccaccgggctcaccaatgaatccccctcataaatgcgaggtttggtag

SEQ ID NO: 186572 - DNA, 2328 bp, synthetic construct
  misc_feature 1..2328: note = Description of Artificial Sequence: Synthetic coding sequence
  source 1..2328: mol_type = other DNA
atggagcccccctacagcctgaccgcccactacgacgagttccaggaagtgaagtacgtgtcccggtgtggagctggcggggctagaggcgcttcactgccccctgggtttccactgggagcagcacgcagtgcaacaggagcccggtccggccttccacggtggaaccgacgcgaagtgtgtttgttgtcaggactcgtttttgccgccgggctctgcgccatattggctgccatgctcgcattaaaatacctggggccggtggctgctgggggtggggcttgtcccgagggttgtccggaacgcaaggcattcgccagagccgccagattccttgcagctaacctggacgccagcatagacccttgtcaagacttctactcctttgcctgtggcggttggctccggcgacacgctatcccggacgacaagctcacatacggcacgatagctgcaattggcgaacagaatgaggagcgactaagaagactgctggccagacctggagggggaccaggaggggcggctcagaggaaagtgcgggcatttttccggtcatgcctcgatatgcgtgaaatcgagcggttggggccaaggccaatgctggaggttatcgaagattgcgggggatgggatttgggtggggctgaggagagacctggagtcgccgcccgctgggatctcaatagactgctgtataaagcacagggcgtatactcagctgctgctctcttctctctgaccgtgagtttagatgacagaaactccagtcgctatgtaatccgcatcgatcaagatgggttgactctgcccgagaggaccctgtacctggcacaggacgaagattctgagaaaattctggccgcatatcgggttttcatggaaagggtcctgagtcttttaggtgccgacgccgtggagcagaaggcacaggaaatcctacaggtagagcagcagctggcgaatatcaccgtgagcgagcacgacgatctgcgtagagacgtgagtagcatgtataataaagtaacactgggacaacttcagaagatcactccgcacctcagatggaagtggctcttggatcaaatttttcaagaggatttcagcgaggaggaggaagttgtactactggccacagattatatgcagcaggtgagtcaacttattagatcaactccacatcgcgttttacacaactatcttgtgtggcgcgtggtggtggtgctgagcgagcacctctcccctcccttccgggaggcactgcatgagctggcccaggagatggaagggtcagataagccccaggaattggccagagtttgtctcggacaggccaatcgccactttggcatggctctgggcgccctgttcgtgcacgagcacttcagcgccgctagtaaggccaaggtccagcaactcgtggaggacatcaagtatattctgggtcaacggctggaagagctggactggatggatgctgagacacgagccgcggcccgcgcaaaacttcagtacatgatggtgatggtagggtacccagacttcctcctcaaaccggacgcagtggacaaggagtacgaatttgaagtgcacgaaaagacatatttcaagaacatactcaactccatcagatttagcattcagctgtctgtgaagaagatcaggcaggaggtggataagtcgacctggctgctaccaccccaggccctgaacgcctactatctcccaaacaaaaaccaaatggtgtttccagctggcatactgcagccaactctgtatgaccctgacttccctcagagtttgaattatgggggtatcgggactatcatcgggcatgaattaactcatgggtacgatgactggggcggacagtacgaccgctccggaaatcttctccactggtggacagaagcctcgtacagtcggtttctgcggaaagccgagtgtatagtgcgcttgtacgacaacttcacagtttacaatcagcgcgtgaatggcaagcacaccttgggcgagaacatcgcagatatgggggggctgaagctggcctaccacgcctatcagaaatgggtgagagagcacggaccggaacatcctttgccacggctcaagtacacacacgaccagctgttcttcattgcattcgcacaaaactggtgtattaaaaggagatcacagtccatctatctccaggttctgactgacaaacacgccccggaacactacagagtcctcggcagtgtctctcaatttgaagagttcggcagagcatttcactgtccaaaagacagcccgatgaacccagcacataaatgctctgtgtggtag

SEQ ID NO: 186573 - DNA, 2322 bp, synthetic construct
  misc_feature 1..2322: note = Description of Artificial Sequence: Synthetic coding sequence
  source 1..2322: mol_type = other DNA
atggagcccccctacagcctgaccgcccactacgacgagttccaggaggtgaagtacgtgtctcgctgcggagccggcggggctcgcggcgccagccttccacccggattccctctgggagccgcccgatcagccacaggtgctagatccggccttcccaggtggaatagacgtgaagtatgcctacttagcgggctggttttcgcagccgggctgtgtgcaatcctagccgccatgcttgccttgaaatatctcgggcccgtggcagcggggggaggcgcctgtccagaaggctgtcctgagaggaaagcattcgcgagggcagctagattcctggcggccaacctggacgctagcatcgacccgtgccaagatttttactcctttgcttgtgggggatggctgcgacggcacgctattcccgacgacaaactgacgtacgggaccatcgccgcaatcggtgagcagaatgaagagcggctgaggcgactgttggcacggccaggcggagggccgggcggcgccgcccagcgcaaagtccgagccttctttagatcttgcctggatatgcgggaaattgaacggctagggcccagacctatgttagaggttattgaagactgtggcggctgggacctgggtggggcagaggagcgtcccggggttgccgccagatgggacctcaatcgactgctgtataaggcccagggtgtgtattctgcggcggccttgttctccctgacagtgagtcttgacgacagaaacagctcccgctacgttatacgcatagatcaggacgggttgactctgccagagaggacactgtacctggcccaggacgaagactctgaaaagatccttgcagcttatcgtgtttttatggagcgggttctgtctctgctgggtgccgatgctgtggaacagaaggcgcaggaaattctgcaggtggagcagcagcttgctaatatcacggtgtccgagcacgatgatcttaggcgcgacgtcagcagtatgtacaacaaagtcaccctgggtcagctgcaaaaaatcaccccccatctgcgctggaaatggctgctcgatcagatctttcaggaggatttcagtgaggaagaggaggtggtcttgctggctacggactacatgcaacaggtgtctcaactgatacggtctacaccacaccgcgtgctacataattatctcgtgtggcgggtggtagtcgtgctgagcgagcacctcagccccccttttcgggaggcactgcatgaactggcccaggaaatggaaggatccgataagcctcaagaactcgcccgggtttgcttaggacaagccaacagacacttcggtatggccttgggagccctctttgtacatgaacacttttcagccgcttctaaggcaaaggttcagcagcttgtggaggatatcaagtatattctggggcagaggctggaggagttggactggatggatgctgagacacgggcggctgcaagggcaaagcttcagtatatgatggtcatggtggggtaccctgatttcttgcttaaacctgacgctgtggacaaggaatacgaattcgaggtccacgagaagacgtactttaagaatatccttaactccattaggttttctatacagctgtccgttaagaagattcggcaagaagtcgataagtggctgctccccccccaggccttgaacgcgtactatcttccgaataagaaccaaatggtgtttccggccggaatccttcagccaaccctttacgacccagacttcccccaatcgctgaattacggcggcatcggcacaatcatcggccacgaactcacccacggctatgacgactgggggggccagtatgaccgctcgggcaatctccttcactggtggacagaagcctcttactcgcggtttttaagaaaagcagaatgcatagtcaggctatacgacaactttacagtatacaatcagagggtaaatggaaaacatactctgggtgaaaatatcgccgatatgggcggtttaaaactcgcctaccatgcataccagaaatgggttcgcgagcacggccctgagcacccactcccacgactgaagtacacgcatgatcaattgttcttcattgcctttgcccagaactggtgtatcaagcggcggtctcagtcaatctacctgcaagtcctcacagacaaacacgcccctgagcactatcgcgtgctcgggagtgtcagtcaattcgaagaatttggaagggcctttcattgccccaaggacagtccgatgaatcctgctcataagtgctctgtgtggtag

SEQ ID NO: 186574 - DNA, 1284 bp, synthetic construct
  misc_feature 1..1284: note = Description of Artificial Sequence: Synthetic coding sequence
  source 1..1284: mol_type = other DNA
atggagaccctgtgcctgcgggccagcttctggctggccctggtgggatgcgtcatttccgacaaccctgagcgttattctaccaacctaagtaaccacgtcgatgactttaccacgttccggggcacagagctaagtttcctcgtgaccacccatcaaccaacaaatctggtactgccttcaaatggaagcatgcataattattgcccccaacaaacaaagatcacttctgcttttaagtatatcaatacagtcatctcatgtactatctttattgtgggaatggtcggtaacgccaccctgctcaggattatttaccaaaataagtgcatgaggaacggccctaatgccctgatcgcctctttggccctgggcgatctgatatacgtggtgattgatttaccgattaatgtgttcaaattactcgctggacgttggccttttgaccacaacgatttcggcgtgtttctttgcaaactgttcccattcctgcagaagagttcagtgggtatcacagtcctgaatctttgcgccctctctgtagaccgataccgggcggtagcaagttggtcccgagtccagggcataggaatcccgctggtgacagcaatagagatcgttagcatctggattttgagcttcatcttggcaatacctgaggccatcggattcgtgatggtgccattcgaataccgcggagaacagcacaaaacctgcatgctaaatgcaacttcaaaattcatggaattttatcaggatgttaaggattggtggctctttgggttctacttctgcatgccgctggtttgtactgcgatattctataccctgatgacctgtgagatgctaaatcgccgcaacgggtctctgaggattgcactgagcgagcacctgaaacagaggcgggaggtagccaaaaccgtgttctgtctcgtggtgatcttcgcactttgctggtttcctctgcacctgtcccggatactcaagaagacagtgtataatgaaatggacaagaatagatgcgagctgctttcgtttctgcttctgatggactacatcggcattaatctggctaccatgaactcttgcatcaatcccatcgctctctatttcgttagtaaaaagtttaagaactgcttccagtcctgcctgtgttgttgttgctaccaatccaagagcctgatgacttccgttcctatgaacgggacaagtattcaatggaaaaaccatgaccaaaacaaccataatacagatagaagcagccacaaggactctatgaactag

SEQ ID NO: 186575 - DNA, 486 bp, synthetic construct
  misc_feature 1..486: note = Description of Artificial Sequence: Synthetic coding sequence
  source 1..486: mol_type = other DNA
atggagaccctgtgcctgcgggccagcttctggctggccctggtgggatgcgtgatttctgacaacccagagaggtatagcactaatctgtctaatcacgtggatgattttactacctttcgggggacagagctcagttttctggtgaccacacaccagccaacaaatctggtactgcccagcaatgggtcaatgcacaattattgcccccaacagacaaagatcacatccgcattcaagtatattaacaccgtgattagttgtacgatattcatagtgggtatggtgggaaatgctaccctgttgagaattatctaccaaaataagtgtatgaggaatggacctaatgccctcatcgctagcctcgcgctgggagacctgatatatgtggtgattgatttgcccatcaatgtgtttaaggtgcagtctagctgtctattagagagttgttccggcaactgggacagcttcggcaattgtcattag

SEQ ID NO: 186576 - DNA, 957 bp, synthetic construct
  misc_feature 1..957: note = Description of Artificial Sequence: Synthetic coding sequence
  source 1..957: mol_type = other DNA
atggagaccctgtgcctgcgggccagcttctggctggccctggtggggtgtgtcataagcgataaccctgaacgctattccactaatttatcaaaccatgtggatgacttcaccacgttccgaggcaccgaactgagctttttggtgactacgcatcagcccacaaacctggtgctacctagcaacggatcgatgcacaattactgcccccagcaaacaaagataactagcgcctttaaatatatcaacacagtcatttcctgcaccatctttattgtgggcatggtggggaatgctacactgctgaggataatttaccaaaataagtgtatgagaaatggccctaatgccctcattgcgtctctcgcactcggcgatttaatttatgtggtgattgaccttccaatcaacgtctttaagttttatcaggacgtgaaggattggtggttgtttgggttttacttctgtatgccactggtctgcaccgcaatcttttatactctaatgacctgtgagatgctgaatcgacgcaatggatccctgaggatcgcactaagcgagcatcttaagcagcgaagggaagtcgctaaaaccgtgttttgtctcgtggttatttttgcattgtgttggtttcctcttcatctgagtcgaatcctgaagaagacagtgtacaacgagatggataagaatcgctgtgaactgctctctttcctgctgctgatggactatattggtattaatctggctacaatgaatagttgtattaaccccatcgccctgtactttgtatccaaaaagttcaaaaactgttttcagagttgtttgtgctgctgctgttaccaatctaagtctctgatgacaagcgtgccgatgaatggaacgtctatccagtggaaaaaccatgaccagaacaatcacaatacggatagatccagccacaaagactccatgaattag

SEQ ID NO: 186577 - DNA, 564 bp, synthetic construct
  misc_feature 1..564: note = Description of Artificial Sequence: Synthetic coding sequence
  source 1..564: mol_type = other DNA
atggagaccctgtgcctgcgggccagcttctggctggccctggtgggatgcgtcatttcggataaccccgaacgttacagcaccaacctctccaaccacgttgacgatttcaccactttcagagggacagagctgagctttctggtgaccacgcatcagcctaccaatttggtcctcccttctaacggctcaatgcataactactgccctcaacagactaaaattacctccgccttcaagtatataaataccgtgattagttgcacaatattcattgtgggaatggtgggaaacgcaaccctcctgcggattatctaccagaacaagtgcatgaggaatggccctaatgccttgatcgcatccctcgcactgggggatctgatttatgtggtaatagatctacccataaacgttttcaaactgctggccggcaggtggccttttgatcacaacgattttggggtgttcttgtgcaaattgtttcctttcctgcagaaatcatctgtcgggattaccgtcttgaatctgtgcgctctgagcgtggatcgcaaaaccgagatgtag

SEQ ID NO: 186578 - DNA, 957 bp, synthetic construct
  misc_feature 1..957: note = Description of Artificial Sequence: Synthetic coding sequence
  source 1..957: mol_type = other DNA
atggagaccctgtgcctgcgggccagcttctggctggccctggtgggttgtgttatatcagataacccagaacggtacagcacaaacttgagcaatcacgtagatgacttcacgacatttcgtggcacagaactgtcctttttagttactactcaccagcccacaaacctggtattaccttccaacggcagtatgcacaattattgccctcagcaaaccaaaattacctctgcattcaagtacatcaacacagtgatatcatgcaccatcttcattgtgggaatggtcggaaatgcaaccctgctgcggataatttaccagaacaagtgcatgcgcaatggacccaacgctttgatcgctagcctcgcacttggagatttgatatatgtagtgattgaccttccaattaacgtatttaaattctatcaggatgttaaggattggtggttatttggcttctacttttgtatgccactcgtgtgcaccgctatcttttacacgctgatgacctgtgagatgctgaatcgcagaaacggtagcctgcgtatagccttgagtgaacacctgaaacaacgaagagaagttgccaagacagtcttctgtcttgtcgtgatcttcgcattgtgttggttccccctccatctcagcagaattctgaagaagactgtctataacgaaatggataagaatcgctgcgaactactctcctttctgctgctgatggactacatcggcatcaatttggcgactatgaattcttgcatcaatcccatcgccctttacttcgtgagtaaaaaatttaagaattgttttcagtcctgcttgtgctgttgttgttaccagtctaagagcctgatgaccagtgtgcccatgaacggcacaagtatccagtggaagaatcatgatcagaacaaccataataccgatcgcagttcccataaggattccatgaattag

SEQ ID NO: 186579 - DNA, 1179 bp, synthetic construct
  misc_feature 1..1179: note = Description of Artificial Sequence: Synthetic coding sequence
  source 1..1179: mol_type = other DNA
atggaggagcagcagcccgagcccaagagccagcgggacagcgcccttggcgctgcagccgccgctacgccgggtggcctctccctttccctgtcccctggcgccagcgggtcttcgggcagtggaagcgatggggattcagtgcctgtttctcctcagccagcccccccttctccacccgccgccccctgtttacccccactggcccaccaccctcatctgcctccccaccctccgcctccacctcctcagcacctggctgcacccgctcaccagcctcagcccgcagcccagttgcatcgaactacgaatttttttatcgataacatactgcgacccgattttgggtgcaagaaagagcagccaccaccccaactgctcgtcgctgccgccgcacggggaggcgcaggtggaggcggccgcgtggagcgcgatagaggtcagacagcagcaggcagggaccctgttcatcctctgggtacgagggcgcccggcgcggcctcattgctgtgtgcccccgacgcaaactgtgggccacccgacggctctcagcccgccgccgccggcgccggagccagcaaggcgggaaatccagcggccgccgccgccgcggctgccgcagctgttgctgcagcagccgcagctgccgctgccaagccctcggacacaggaggtggaggaagcggaggtggcgccggatcccccggggcccagggaaccaaatatcccgagcacggcaaccctgccattctcctcatgggttctgcaaatggagggcctgtcgttaaaacagattcccagcagccgctggtctggcccgcttgggtgtactgtaccagatactccgaccgtccatccagcggccccagaactcgcaaattgaagaaaaagaagaatgaaaaggaagacaagcgcccccgaacagctttcacagccgagcaattacaaagattgaaggccgagtttcaggcgaaccggtacatcactgaacaaagacggcaaactctcgcccaggagctgagtttgaacgaatcccagatcaaaatctggttccagaataagcgagctaaaattaaaaaagccactggaatcaagaacggccttgcattgcatctgatggcacagggactttataaccatagcactaccaccgttcaggataaggatgagtcagaatag

SEQ ID NO: 186580 - DNA, 1002 bp, synthetic construct
  misc_feature 1..1002: note = Description of Artificial Sequence: Synthetic coding sequence
  source 1..1002: mol_type = other DNA
atggaggagaacgaccccaagcccggcgaggccgccgccgccgtggaggggcagagacaaccagagagcagtcccggaggcggttctgggggcggggggggaagtagcccaggtgaggcagacactggaaggaggcgcgctctgatgctgcccgccgttctgcaagcacccggtaaccaccagcacccgcatcgcatcacaaatttcttcattgataatatcctgcggcctgagtttggccgccgtaaagatgctggtacatgctgtgcgggcgctggggggggcaggggggggggcgctggtggcgagggtggcgcctctggcgcagaagggggaggcggcgccggcgggtccgagcagttactaggttccgggagtagagagcccaggcagaaccccccatgtgcccccggggccgggggacccctacccgccgccgggtccgactctcccggcgatggcgagggcggatccaagaccctgtcactgcacggcggggccaagaagggaggcgacccagggggcccgctggacggaagtctgaaagccagagggttgggcgggggcgacctcagcgtatccagcgatagtgactccagtcaagccggcgccaatctgggcgcccagccaatgctctggcctgcctgggtgtattgcacccgctacagcgatagaccttcttcgggaccgagatcccgcaaacctaagaagaagaaccccaacaaagaagataagcgaccccgcaccgcattcaccgccgaacagctgcagcggctcaaagcagagtttcagacaaatcgatacctgaccgagcagagacggcagtcactggctcaggagttatcactgaacgagagtcagatcaaaatctggttccagaacaagagagctaaaataaagaaagcgaccggtaataagaacaccctggccgtccacctcatggcccaggggctatacaaccactctactactgctaaggagggaaagtctgattccgaatag

SEQ ID NO: 186581 - DNA, 2184 bp, synthetic construct
  misc_feature 1..2184: note = Description of Artificial Sequence: Synthetic coding sequence
  source 1..2184: mol_type = other DNA
atgcccccccccgccgacatcgtgaaggtggccatcgagtggcccggtgcctaccccaaactgatggagattgaccagaagaagccattgtccgctatcattaaggaggtgtgcgatgggtggtcccttgctaatcacgagtactttgctctccagcacgccgacagttcaaacttctacattacagaaaagaatagaaacgagattaagaacggaacgatcctcaggttgaccacatctccagcccagaatgcccagcaattgcacgagagaatacagagctcaagcatggacgctaaacttgaggcactgaaggacctcgcgagcttaagccgcgacgtgacttttgcacaggagtttatcaatctcgacggtatctcgttgctcacccagatggtagagtccggcaccgagcgttaccaaaaattgcagaaaataatgaaaccatgcttcggagacatgctcagttttaccttgaccgcctttgtggaattaatggaccatgggatcgtttcctgggacacattctctgtggctttcattaagaaaattgcatcctttgttaacaagtcagctatcgacatctcgattcttcagaggtctctggccatcctggaatctatggtcttaaacagtcatgacctgtatcaaaaggtggcgcaggaaattaccatcgggcagcttatccctcaccttcaaggttcagaccaggagattcagacttatactatcgccgtcattaacgcactatttctaaaagcccccgacgagcgccgacaggagatggccaacatcctcgctcaaaaacagctgcgctccattatccttacacacgtgattagggctcaacgcgcaataaataacgagatggcccaccagctctacgtgctgcaggttctcacatttaatttactggaggacaggatgatgacaaaaatggacccccaggaccaggcccaaagggacattatctttgagctgcgacggatcgcctttgacgcagaaagtgaaccaaataactcgtctggaagcatggagaagcggaagtctatgtacacgcgggactataagaaattaggctttatcaatcacgtgaaccccgccatggattttacccagaccccgccaggaatgttggcactggacaacatgctgtatttcgccaaacatcatcaggatgcatacatccggattgtgctggagaactcatcccgggaagacaaacatgaatgtccctttggtagatcctccattgagctgaccaaaatgctgtgcgaaatcctcaaagtgggggagcttcccagcgagacctgtaatgatttccatccaatgtttttcacccatgaccgctcttttgaagaatttttctgtatctgcattcagctcctgaacaaaacctggaaggagatgagggctacaagcgaggactttaacaaagtgatgcaggtcgtcaaggaacaggtaatgagggctctgactaccaagccttcatcactggatcagtttaagtccaaactccagaatctctcatacactgagatcttaaaaatccggcagtccgagcggatgaaccaggaggacttccagtcccgtccgatcctcgaactgaaggagaagatccaacccgaaattttggagctgatcaaacagcagcggctgaaccgcctggtcgagggaacgtgctttagaaagctgaacgcccgccgtagacaagataaattctggtactgtcggctctcccccaatcacaaagttttacattacggtgatttagaggaatcgccccaaggtgaagtaccacatgatagcttgcaggacaagctccccgtcgctgacatcaaggctgtggtgacagggaaagactgcccgcacatgaaggagaagggcgctctgaagcagaacaaggaggtgctagagctggccttttctatcctatatgatagcaactgtcagttgaattttatagctcccgataagcatgaatattgcatttggactgatggactgaacgctctgttaggaaaagacatgatgtctgacttgacgcggaacgatctggatactctactctccatggagatcaagctgagactcctggatctcgaaaacatccagattcctgatgcaccgcccccaatccccaaggaaccgtccaactacgacttcgtttatgattgcaattag

SEQ ID NO: 186582 - DNA, 1290 bp, synthetic construct
  misc_feature 1..1290: note = Description of Artificial Sequence: Synthetic coding sequence
  source 1..1290: mol_type = other DNA
atgagcgagcaccagaaggagcagaccctggacacccccagcctgcggacagttactctcacggtcagagtgcacggatttattctggaagtcagtaaaaccaaaaacccgcctattcctgacacattttggccacctagatgggatcatcggccctcacctgggggggagactaatgcatattgtcagatgaaccacgtgaacccagccatggattttactcagactccacctgggatgctggcactggacaacatgctgtacttcgctaaacatcaccaagatgcttacattaggatcgtcctggaaaatagtagccgcgaggataaacacgagtgcccatttggccgctctagtatcgaattgactaagatgctgtgtgaaatcttgaaagttggagagctgccttcagaaacctgcaatgactttcaccctatgttcttcacgcatgacagaagtttcgaggagtttttctgcatctgcatccagctgctcaacaaaacttggaaggagatgagagccacaagtgaggacttcaacaaggtgatgcaggtggtgaaggagcaggtgatgcgggccttgaccacaaagccctccagccttgatcagttcaaatcaaagttgcagaatttaagctatactgaaattttaaaaattcgacaatccgagagaatgaaccaggaggacttccagtcccgccctattctcgaactgaaggaaaagatacagcctgagatcctggagctgattaaacagcagagactaaataggctggtcgaaggcacctgcttccgtaagcttaacgctaggcggaggcaagacaaattctggtattgcagactctcaccaaaccataaagtcttacactacggagatttggaagagtctcctcaaggggaagtgcctcatgattctctgcaggacaaactccccgtggccgacatcaaggccgtggttactgggaaggattgtccccacatgaaagagaagggggcactcaaacagaacaaggaggtcctggagcttgccttttctatcttatatgattccaactgccaattaaacttcattgcgcctgataagcacgagtactgtatctggacggacggactgaacgccctcctgggaaaagacatgatgtcagaccttaccaggaatgacctggatacacttctgagtatggaaataaaacttagacttctggacctggagaatattcaaatacctgacgcccctcctccgatccctaaggagccgagcaactacgacttcgtatatgattgtaactag

SEQ ID NO: 186583 - DNA, 1896 bp, synthetic construct
  misc_feature 1..1896: note = Description of Artificial Sequence: Synthetic coding sequence
  source 1..1896: mol_type = other DNA
atggacgccaagctggaggccctgaaggacctggccagcctgagccgggacgtcaccttcgcccaggagtttattaatctggatggaatctcgctgctgactcagatggtcgagtccggaaccgaacggtatcagaagttacaaaaaattatgaaaccttgctttggagacatgctgagttttaccttaacagcctttgtcgagctaatggaccacgggatcgtgagctgggataccttctcagtcgccttcattaagaaaatcgcaagctttgtcaacaagagtgccattgacattagtattcttcagcggtccctggcaatcctggaatctatggttcttaacagtcatgatctgtaccagaaggtggcccaagagatcactattggtcagctcatcccccacctgcagggttcggatcaggagatacagacatatacgatcgccgtcatcaatgccttgtttttaaaagcccctgacgaaaggcgacaagagatggccaacatcttggctcagaagcagttgagaagcatcatattgactcacgtgattagagcccagagggcaatcaataatgagatggctcatcagctttacgtactgcaagtgcttacctttaatctactcgaagataggatgatgaccaaaatggacccccaggaccaggctcaaagggatattatatttgagttgcggcgtattgcattcgacgcagagtcggaacccaacaatagctctggctctatggagaagcggaaatctatgtatacgagagactataaaaagcttggtttcattaatcatgtcaatccagctatggattttacacagacccctcctggcatgctggccctggataatatgctctattttgccaaacaccatcaggacgcatacatacgtattgtgctggagaatagttccagggaggataaacacgagtgcccttttgggcgctccagcatcgaattgaccaaaatgctctgcgaaatcctgaaagtgggggaactaccctctgaaacttgcaacgatttccacccaatgttttttactcacgataggtcgttcgaagagtttttctgcatctgcatacagttgctcaacaaaacctggaaggagatgcgcgcaacaagcgaggatttcaacaaagtgatgcaggtcgtgaaagagcaagtcatgagagctctgaccacaaaaccctcgtccctggatcagttcaagtctaagctgcagaacctgagctataccgagatcctcaagattcggcaatcagaacggatgaaccaggaggatttccaatctaggcctatccttgagctgaaagaaaagatccaacctgagatccttgaactcattaagcagcaacgattgaacagactggttgaaggcacctgcttcaggaagctcaatgcacgtcgcagacaggataagttctggtactgtcgactgtcacccaaccacaaagtgctgcattacggtgacctcgaggaatctccccaaggggaggtgccccatgacagtctccaggataagttgccggtagctgatatcaaagccgtcgtgaccgggaaggattgcccccatatgaaagaaaaaggcgcactgaagcagaataaagaagtgcttgaactggcattctccatcctttacgatagtaattgtcaactgaatttcattgcccccgataaacatgagtattgtatttggacagacgggttgaacgccttgttgggtaaagatatgatgagcgacctgactaggaacgacctggataccttgctgtctatggagattaagctgaggttactggatctggagaatattcagatcccggatgccccacccccgatccccaaggagccctccaattacgatttcgtttacgactgcaactag

SEQ ID NO: 186584 - DNA, 744 bp, synthetic construct
  misc_feature 1..744: note = Description of Artificial Sequence: Synthetic coding sequence
  source 1..744: mol_type = other DNA
atgcaggtggtgaaggagcaggtgatgcgggccctgaccaccaagccaagtagcctggaccaatttaaaagcaaactgcagaacctctcttatactgagatcctgaagatcaggcagtcggagaggatgaaccaggaggactttcagtctagacctatacttgaactcaaggagaagatccagcctgagatcctggaacttattaagcaacaaagactgaatagactggtagaaggtacctgctttcggaagctgaacgctagaagacgacaggacaagttctggtactgccgattatccccaaaccacaaggtgctgcactatggagacctggaagagtcgcctcagggagaagtgccacatgatagcctgcaagataagctgcccgtggcagacattaaggccgtggtcacaggaaaggattgtccacatatgaaagagaaaggagccctgaagcagaacaaggaggttctggagctcgctttttcaatcttatatgactctaattgccagcttaatttcattgcaccagacaaacacgaatactgtatttggactgacgggcttaatgccctgctcgggaaggacatgatgtcagatctgacgcgaaacgatttggacaccttactgtcaatggagattaaattaaggttactcgatcttgagaatatccagatacctgacgccccacctcctattcccaaggagccaagtaattatgatttcgtctacgattgtaactag

SEQ ID NO: 186585 - DNA, 744 bp, synthetic construct
  misc_feature 1..744: note = Description of Artificial Sequence: Synthetic coding sequence
  source 1..744: mol_type = other DNA
atgcaggtggtgaaggagcaggtgatgcgggccctgaccaccaagccaagctcactggaccagtttaaaagcaaactgcagaatctgagctatactgagattttaaaaattagacaatcggagagaatgaaccaggaagacttccagagccgcccgatactcgagttaaaagagaagattcagcccgaaatcctcgaattaatcaaacaacaaaggctgaaccgcctggtggaaggtacatgttttcggaagttgaatgcgaggcgcagacaggacaagttctggtactgtcggttgagtccgaatcacaaagtgctgcactacggggatctcgaggagtctccccagggcgaggtgccacacgactccctccaggacaagctgccagtggctgacattaaggctgtagtcacagggaaggattgcccccacatgaaagagaaaggggccctgaagcagaacaaggaagtgctggaactcgccttctcgatcctttatgacagtaactgccaactgaatttcatcgcacccgacaagcacgagtattgcatttggaccgatgggttgaacgcactgttggggaaggacatgatgtctgacctcacaaggaacgacttagacacactgttatcgatggagatcaaattgcggctgctggatttggagaacatccagattccagacgccccccctcctatccccaaagagcctagcaactacgacttcgtgtacgactgcaactag

SEQ ID NO: 186586 - DNA, 2184 bp, synthetic construct
  misc_feature 1..2184: note = Description of Artificial Sequence: Synthetic coding sequence
  source 1..2184: mol_type = other DNA
atgcccccccccgccgacatcgtgaaggtggccatcgagtggcccggtgcatatccgaagctcatggaaattgatcaaaaaaagccactgtccgctatcataaaggaggtctgtgacggctggagcctggccaatcacgagtacttcgctctgcagcacgctgattcctctaacttctacattactgaaaaaaataggaatgagatcaaaaacggcacaatactgaggctgactacttcacctgcacagaacgcccagcaactgcatgagcgtatccagagctcttccatggatgcgaagctggaggctcttaaggacctggccagcctgtcacgggacgtgaccttcgcgcaggagtttattaatctcgacggcatctcccttctgacccagatggttgaaagtggcaccgaaagatatcagaaattgcagaaaattatgaagccctgcttcggagatatgctgtctttcactctgacagcgttcgtcgaactgatggaccacggcatcgtctcatgggatacatttagcgtggccttcatcaaaaagatcgctagtttcgtgaacaagtccgccatcgacataagcattttgcagagaagtcttgcaatcctcgagagcatggtgctgaatagtcatgacctgtatcagaaggtcgcccaggagattaccattggtcaactgattccccatctacagggaagcgaccaggagattcagacctacactattgccgtgatcaacgctctgttcctaaaagcacctgatgagaggcgccaggagatggctaacattttagcccaaaagcagctgcgttcaatcatccttactcacgtgatcagggcacagcgagccattaataacgaaatggctcaccagctgtacgtgctacaggtgctgacatttaatctacttgaagataggatgatgactaaaatggatccgcaggatcaagctcaacgggacatcatcttcgagctgagacgcatagctttcgacgctgagtctgaaccaaataactcttccggttccatggaaaaacgcaaaagcatgtacacacgtgattataagaagcttggatttatcaatcatgttaacccagctatggactttacgcagactccgcccggaatgctcgcattggataacatgttgtattttgcgaagcatcatcaggatgcttacattcggattgtgctggaaaatagttctcgggaggataagcatgaatgccccttcgggcgcagctccatcgagctcaccaaaatgctgtgcgagattctgaaggtgggcgaacttcctagcgaaacttgcaacgacttccatcccatgtttttcactcatgacagatctttcgaagagttcttctgcatctgtatacaattgctcaataaaacatggaaagaaatgagagccacatcagaggatttcaataaagtgatgcaggtggttaaggaacaggtgatgagggctttgacaaccaaaccgtccagtctggatcagttcaagagcaaactgcagaatctgagctacaccgagatattgaaaattcgccagtccgaacgcatgaatcaggaggacttccaatccagaccgatattggaactgaaggagaagattcagcctgaaattcttgagctgatcaagcagcagcggctaaaccgcctggtggaaggaacttgtttccgcaagttgaacgcgagacgcaggcaggataaattctggtattgtcggctgtcacccaatcacaaggttctgcattatggtgacctggaggagagcccgcaaggggaggtaccccatgactctttgcaggataaactgcccgtagccgacatcaaggcagtcgtgaccggaaaagactgtcctcacatgaaagaaaaaggcgctctgaagcaaaacaaagaagttttagagctggctttctctattttgtacgacagtaattgccagctgaatttcatagctccagacaagcacgagtactgtatatggacagacggcctaaatgcactgctcggtaaggatatgatgagtgatctgacccgaaatgacctagacaccttattgtccatggagatcaagctcagattactggatctcgagaacatacagattcccgacgcacctccacccatcccaaaggagccctcaaactacgattttgtgtacgactgcaactag

SEQ ID NO: 186587 - DNA, 180 bp, synthetic construct
  misc_feature 1..180: note = Description of Artificial Sequence: Synthetic coding sequence
  source 1..180: mol_type = other DNA
atgcccccccccgccgacatcgtgaaggtggccatcgagtggcccggcgcctatccaaagttgatggagatcgatcagaaaaagccactaagcgccatcatcaaagaggtctgcgacgggtggtcactggccaatcatgagtattttgctctgcagcacgccgattcctcgaatttttag

SEQ ID NO: 186588 - DNA, 2184 bp, synthetic construct
  misc_feature 1..2184: note = Description of Artificial Sequence: Synthetic coding sequence
  source 1..2184: mol_type = other DNA
atgcccccccccgccgacatcgtgaaggtggccatcgagtggcccggggcataccctaagctgatggagattgatcaaaaaaaaccactcagcgccataatcaaggaagtatgcgatgggtggagcttggcaaatcatgagtacttcgcgctgcagcacgcggacagctccaatttttacattaccgagaagaatagaaatgaaattaagaatggcaccatcctgcggctgaccacgtcacctgcccagaacgcccagcaactgcacgaaagaattcagtcttcttccatggacgcgaagctggaggctctgaaggatcttgccagtctgagtcgcgatgttacctttgcgcaggaatttatcaacctggatggcatcagcttgctcacgcaaatggtggagtcaggaactgagagatatcagaagttgcagaagatcatgaagccctgctttggcgacatgcttagtttcaccctaaccgcatttgttgaacttatggaccacggaattgtaagctgggatactttttcagtggcctttataaagaaaattgcatccttcgttaacaaaagtgctatcgacatcagtattctgcaacggagtctggccatcctggagtctatggtgctgaatagccatgatctttaccagaaggtggcccaggagatcacaatcgggcagttaattccacaccttcagggctccgaccaggaaatacagacctatacaatcgccgtgatcaatgcgttgttcctgaaggccccggacgagcgtcgtcaggagatggccaatattttggcccaaaagcagctgagatcaattatcctgactcacgttattagggcccagagagccatcaataacgagatggctcaccagctatacgtactgcaagtgttgaccttcaacctattggaagacaggatgatgactaagatggatccacaggatcaagctcagagggacatcatctttgagctccggcgaatcgccttcgatgcagaatcagaacctaacaacagtagcggcagcatggaaaagcggaagagtatgtacactagagattacaagaagctggggtttatcaatcatgtcaaccccgcaatggatttcacgcagactcccccggggatgctggcactggacaacatgctgtacttcgccaagcaccaccaggatgcatacattagaatcgtcctcgaaaacagttcacgtgaagacaaacatgaatgtccctttggccggagcagtatcgaattaactaagatgctctgcgagatcctcaaggtgggagagctcccctccgagacctgcaacgatttccacccgatgttttttacccatgatcgttcgtttgaggaatttttctgtatttgtatccaattgctaaacaaaacttggaaggaaatgagagccactagcgaggattttaacaaagttatgcaagtggtgaaggaacaggtgatgagagcactcactactaagccgtctagcctggaccagttcaaatcaaagctacaaaacttgtcttacaccgagattctcaaaattcgccagtccgaaagaatgaaccaggaagactttcagagtcgacccattctcgaactcaaggagaagattcagcccgagatcctggaacttattaaacagcagcgcctgaatcggctcgtggagggcacctgcttccggaaattgaacgcacggagacggcaagacaagttctggtattgtcggcttagtccaaaccataaggtgttacactatggcgacctggaggaatccccccagggagaggtgccacacgactcattgcaggataagttaccggtggccgacattaaggccgtcgtcactgggaaggattgtccacacatgaaggaaaaaggcgccctgaagcagaataaggaggttctggagctggcatttagtatcttatacgacagtaactgccagctgaattttatcgcccctgataagcacgagtactgcatatggactgatgggttaaatgccctgctcggtaaggatatgatgtccgatctcacaaggaatgacctggacaccctgctttctatggaaataaaattgagactgcttgacctggagaacattcagatccccgatgcccctccaccaatcccaaaggagccatccaactatgactttgtgtacgactgcaattag

SEQ ID NO: 186589 - DNA, 246 bp, synthetic construct
  misc_feature 1..246: note = Description of Artificial Sequence: Synthetic coding sequence
  source 1..246: mol_type = other DNA
atgcccccccccgccgacatcgtgaaggtggccatcgagtggcccggtgcctacccaaaactgatggagatcgaccagaaaaaacccctgagcgctatcataaaggaggtgtgcgatggttggtctctggccaatcatgagtattttgcactacaacatgcggattcctccaatttctacattacggagaaaaacaggaatgagataaagaatggcacgattcttagactaaccacctccccttag

SEQ ID NO: 186590 - DNA, 450 bp, synthetic construct
  misc_feature 1..450: note = Description of Artificial Sequence: Synthetic coding sequence
  source 1..450: mol_type = other DNA
atgcccccccccgccgacatcgtgaaggtggccatcgagtggcccggcgcatatcccaagctcatggagatcgatcagaagaagcctctgtctgccatcatcaaggaagtatgtgacggctggtctctggcaaatcacgaatactttgccctgcagcatgctgatagcagcaatttttatattaccgagaagaaccggaatgaaattaaaaatgggactatccttagactgacgacaagccccgcgcaaaacgctcagcagctacatgagcgaatccagtctagcagcatggatgccaaacttgaggccctcaaggacctggcctccctgtcgagggatgtgactttcgcccaggagtttattaacctcgatggcatttccctgttgacacagatggtggagtctgggactgagcggtatcagaagttgcagaaaattatgaagccttag

SEQ ID NO: 186591 - DNA, 2163 bp, synthetic construct
  misc_feature 1..2163: note = Description of Artificial Sequence: Synthetic coding sequence
  source 1..2163: mol_type = other DNA
atgcccccccccagcgacatcgtgaaggtggccatcgagtggcccggcgctaatgcacagctgctcgagattgatcaaaaaaggccactggccagtattatcaaagaggtttgtgacggctggtctctaccgaacccagagtactatacactgcgctatgccgatgggccccagttatacattactgagcaaacccgctcagatattaaaaatgggacaattcttcaactcgccataagtccaagcagagccgcccgccagctaatggaacgaacgcagtctagtaacatggaaaccagactcgacgctatgaaagagctggctaagctttccgccgatgtaacctttgctacagaatttatcaacatggatggaatcatcgtgttaactcgcttagtggagtccggcacaaaactgttgagtcattacagtgagatgttagcctttacccttaccgcatttctcgaactgatggaccacggtatcgtctcttgggacatggtgagtatcacattcatcaaacaaatcgccgggtacgtcagtcaacccatggtggatgtcagcatcttgcagcgatcactcgctattctggagtctatggtgctgaacagccagtctctgtaccagaaaattgcagaagaaattaccgtgggccaactcatctcccatttgcaggtctcaaaccaggaaatccagacatatgctattgccctgatcaacgctctattccttaaggcacctgaggacaaaaggcaggacatggctaacgccttcgcacagaagcacctcagaagtattattctgaaccatgtaatcagaggcaaccggccgataaagactgaaatggcccatcagttatacgtgctgcaggtgctcacattcaatctgttggaggagaggatgatgacaaagatggaccccaatgaccaggcacagagggacatcatttttgaactgcgccgcattgctttcgacgctgaatccgatccatcaaacgcgccaggctctgggactgaaaaaaggaaggcaatgtatactaaagattacaaaatgctggggttcaccaaccatattaaccctgcaatggacttcacgcagaccccccccggaatgctagccttggacaacatgctgtatctggcaaaggtgcatcaggacacttatattagaatcgtgctagagaacagctccagggaggacaaacacgagtgtcctttcggcaggtctgctattgaattaaccaaaatgctttgtgagattctgcaagtgggtgaactcccaaatgaagggaggaacgactatcatcctatgttcttcactcacgatagggcttttgaggagctttttgggatttgcatacagctgctgaacaaaacatggaaggagatgcgggccaccgctgaagactttaataaagtgatgcaggttgtgcgggaacaaattacacgggccctaccgagcaaacccaattctctcgatcagttcaaaagcaagctgaggagcctgagctattctgaaatactcaggttacgccaaagtgaaaggatgtctcaggacgatttccaatcccccccaatcgtggagctcagagagaagatccaaccggaaattctggagttgattaaacagcagcgcttaaaccgactgtgcgagggaagctcctttagaaagatcggcaaccggcgtagacaggaacgcttttggtactgcagactggcattgaaccataaggttttacactatggagacctggacgacaaccctcagggggaagtgacttttgagtccctccaggaaaaaattcccgtcgctgatattaaggccatcgttacagggaaggactgtcctcatatgaaggagaagtctgcacttaagcagaacaaggaagtactcgagctcgctttcagcatcctgtatgatcctgacgagaccttgaacttcatagctcccaacaagtatgagtactgtatttggattgacgggcttagtgccctcttagggaaagatatgtcctctgagcttactaagagtgatttagatacgctgttatctatggagatgaaacttaggcttctcgatttggaaaacatccagattccagaagcacctcctcctattcctaaggagcctagcagctacgattttgtctaccattatggctag

SEQ ID NO: 186592 - DNA, 2157 bp, synthetic construct
  misc_feature 1..2157: note = Description of Artificial Sequence: Synthetic coding sequence
  source 1..2157: mol_type = other DNA
atgcccccccccagcgacatcgtgaaggtggccatcgagtggcccggagcaaacgcccagttgctggaaatcgaccagaagcgcccacttgcctctatcatcaaggaggtctgcgatgggtggagcctccccaaccccgagtactataccttgaggtacgccgatgggccccagctgtatatcactgaacaaactagaagtgatatcaagaacggaactatcttgcagttggcaatctccccatccagagcagcccgacagttaatggagcgaacccagagctcaaatatggagacccgcctagatgccatgaaagagttagctaaactaagtgccgacgtcaccttcgcaactgagttcattaatatggatggtatcattgtgctcacgaggttggtcgaaagtgggactaagctcttgtctcacgagatgctcgccttcacattgaccgcttttctcgagctgatggaccacggaatcgtctcttgggatatggtttccatcacctttatcaagcagattgccgggtacgtgtcacagcccatggtggacgtgtccatcctgcaaaggtctctggcaatactggaatctatggtcctaaatagccagagcctgtaccagaagattgctgaggagatcacggtggggcaattaatctcccacctgcaagtgtcaaaccaggaaattcaaacctatgcaatcgccttgatcaacgctctcttccttaaggcccctgaggataagaggcaggacatggcgaacgccttcgcacagaaacacctcagaagtatcattctgaatcacgtgatacgagggaatcggcctattaagaccgagatggctcatcaactgtatgttcttcaagtcttgacctttaacctgctagaagagaggatgatgacgaagatggatcctaatgatcaagctcagcgggacatcatctttgagctgcgtagaatcgcattcgacgcagaaagtgacccatccaacgcacccggctccggaacagagaagagaaaggccatgtacacaaaggactataagatgctgggtttcactaatcacattaaccctgcgatggacttcacccagacgcctcccgggatgctcgcccttgataatatgctctacttggccaaggtgcaccaggatacttacatccggatagtgcttgagaattcttcacgggaagataaacacgaatgtccattcgggagatccgcaatcgagctgactaagatgctgtgcgaaattcttcaagtgggggaactccccaatgagggacgcaacgattaccacccaatgtttttcacccacgacagagcatttgaggagctgttcggtatttgtatacagctgctgaataagacttggaaggagatgcgggccactgccgaggacttcaataaagtcatgcaagtggttcgcgaacagatcacccgggctctaccttcaaaacccaacagcttagatcagttcaaatccaagctgcgcagcctgagctatagcgagattctcagactcagacagagcgaacggatgtctcaggatgactttcaatctccccccatagtcgagttacgcgaaaagattcagcccgaaatccttgagctcataaaacagcagcgactgaacagactgtgcgaggggtcttcgttccggaaaatcggcaaccggcgaagacaggaacgcttctggtattgcagattagcccttaaccacaaagttctgcactacggggacctggacgataatccccagggggaggtaacattcgaaagcctgcaggaaaaaatacccgtggcagacataaaagccattgtcactgggaaggattgcccccacatgaaggagaagtctgcccttaagcagaataaggaggtgctcgaacttgccttcagcatcctctacgatcctgacgagaccttgaacttcatcgcccccaacaaatatgaatactgtatttggattgatgggctctccgccctgctgggtaaggacatgtcgagtgagttgaccaaatccgatctggacaccctcctctccatggagatgaaactgcgccttctggacctagagaatatccagattcccgaggcccccccacccatccctaaagagccctccagttacgactttgtgtatcactacggatag

SEQ ID NO: 186593 - DNA, 1899 bp, synthetic construct
  misc_feature 1..1899: note = Description of Artificial Sequence: Synthetic coding sequence
  source 1..1899: mol_type = other DNA
atggagcggacccagagcagcaacatggagacccggctggacgccatgaaggaactagctaagctgtcagccgacgtcactttcgctacagagttcatcaatatggacgggattatcgtcctgacaaggctggtggaatccggaacgaagttgctgtcccactatagtgagatgttagcgttcaccctgacagctttcctggagctgatggatcatggcattgttagctgggatatggtgtccatcacgtttatcaaacagatcgcgggttacgtatcacagcctatggtggacgtgtccatcctgcaacgaagcctggccattctggaatctatggtgctgaattctcagtctctgtaccagaagatagccgaggaaatcacagtggggcaacttatttcacatctacaggtgtccaatcaagaaattcaaacctatgctattgctttaatcaacgctttgtttctgaaagctcctgaggacaaacgacaggacatggccaacgcgtttgcccaaaaacacctgcggagcatcattcttaatcacgtgattagagggaatcggcccataaaaaccgagatggcacatcagctatatgtgcttcaggtgctcaccttcaacctactcgaggagaggatgatgaccaagatggatccaaatgaccaggctcagagagatattatctttgaacttaggcgcattgcctttgatgctgaatcagacccaagtaatgcccccggctccggaacagaaaagaggaaggctatgtatacaaaagactacaaaatgctgggcttcactaaccacattaatccggccatggacttcacacagacgccacctgggatgttggccttggacaacatgctgtacctggctaaagttcaccaggacacctacatccgaatcgtcctggaaaatagcagcagggaagataagcatgagtgtcctttcggaaggagtgcaatagaacttacaaagatgctctgcgagattctgcaggtgggcgaacttcctaacgaggggcgaaacgattaccatcctatgttctttacccacgatcgagcctttgaggagcttttcggaatctgtattcagcttctcaacaaaacatggaaggaaatgagggcaacggcggaagatttcaataaagtcatgcaagtggttagagaacagattacgagagctctgccatctaagccaaactctctggatcagttcaagtccaagttgcggtctctgagctacagtgaaatcctcagactgcgccagtcagagcgcatgagccaggacgatttccagtcacctccgatcgtggaattaagggaaaagatccagccagagattctggagttaatcaagcagcagagactgaacaggctctgtgaaggatccagtttcaggaaaatcggaaacaggcggaggcaggaaagattttggtactgccgattggccctgaatcataaggtgctgcactacggtgatcttgacgacaatccccagggcgaagttacctttgaatctctgcaggaaaaaattcccgtagcagatatcaaggccatcgtgacgggaaaggactgccctcacatgaaggaaaaatcagcccttaaacagaacaaggaggttctggagctggccttctccatactatatgaccctgacgaaacccttaactttatagccccaaacaaatacgagtactgcatctggatcgacggcctctcggcactgctgggtaaggatatgtcatctgagctcactaagtcggatttggatacactgctatcaatggaaatgaagttaaggttactggacctagagaatatccagattcctgaagcccccccaccaattcccaaggagccaagctcatacgattttgtataccactacggttag

SEQ ID NO: 186594 - DNA, 2163 bp, synthetic construct
  misc_feature 1..2163: note = Description of Artificial Sequence: Synthetic coding sequence
  source 1..2163: mol_type = other DNA
atgcccccccccagcgacatcgtgaaggtggccatcgagtggcccggagctaacgctcagctgctcgagatagaccagaagagacccctggccagcatcatcaaagaagtgtgcgacggctggtcactccccaacccagagtactatacccttaggtacgcagatggcccccagctgtatatcacagaacaaacgaggtccgatattaagaatggaactatcctgcagctggcaattagcccttcacgtgccgcacggcagctgatggagaggactcagtcaagtaatatggaaaccaggctggacgccatgaaggaactggcaaagctgtcagccgatgtgacatttgccacagaatttatcaacatggatggaattatagtgcttacacgattagtggagtccggaacgaagctgctgtcacattattccgagatgcttgcattcactttgacggcctttcttgaactgatggaccacggaatcgtgtcctgggatatggtgagcattactttcatcaaacagattgcagggtatgtgtcacagccaatggttgatgtgagcatactccagagaagtctcgccatcctggagagtatggtgctgaatagccagtcattatatcagaagattgccgaggaaattaccgttggccagctgatctcacacttacaagtgtctaaccaggaaatccagacctatgctatagcactgataaacgctctttttcttaaggcacctgaggataaacgccaggacatggcaaacgcattcgctcagaaacacctgcgtagtattatcttgaatcatgtgatccgcgggaaccgcccgataaagacagaaatggcacatcagctgtatgtgttgcaggttttaacgttcaatctactggaggaaaggatgatgacaaaaatggaccccaacgaccaggctcaacgcgacattatcttcgagctacgaagaatcgccttcgacgcagagagcgatcccagcaatgcaccaggatccggcacagagaaacgcaaagctatgtacaccaaggactacaaaatgttagggtttacgaatcacattaaccccgctatggatttcacacagacaccgccaggcatgctagccttggataacatgttgtatctggcaaaggtccatcaagatacctatattcgcatcgtgctcgagaattccagccgtgaggacaaacacgagtgcccattcggccggagcgccattgagcttacaaagatgctgtgtgaaatattacaggtaggcgagcttccaaatgagggaagaaacgactaccaccccatgttttttactcatgatagggccttcgaggaactgttcggcatatgcatccagttgctgaacaagacatggaaagagatgagagcaacagctgaggacttcaacaaggttatgcaggtcgtgcgagaacaaatcactagagccctgccctccaaacctaactctctggaccaattcaagagcaaactcagatcactcagctacagcgagattcttcgattgcgccagtctgagaggatgagtcaggatgactttcagagcccgccaatagtggaactacgggaaaagatccagcctgagatcttagaactaatcaaacagcagcggctgaaccgcctctgtgaaggctctagcttcagaaaaatcggtaataggagacgccaagaacgtttctggtattgtaggttggcattgaatcacaaggtgcttcactacggcgaccttgatgacaatccccagggcgaagtgacattcgaatcccttcaggaaaaaattcctgttgccgatattaaggcaatcgtgaccggcaaagactgtcctcacatgaaagagaaaagcgctctcaagcagaataaggaggtacttgaactggctttctccatattgtatgacccagacgagaccctgaatttcattgctcccaacaagtacgagtactgcatttggatcgacggactgtcagcccttcttggcaaagatatgagttcagagctgactaaaagcgatctggacactctgttaagcatggaaatgaagctgcgccttcttgacctagagaatatccaaatccccgaggctccgcctccaattcctaaggagccctcgtcctacgatttcgtgtaccactacggctag

SEQ ID NO: 186595 - DNA, 804 bp, synthetic construct
  misc_feature 1..804: note = Description of Artificial Sequence: Synthetic coding sequence
  source 1..804: mol_type = other DNA
gaggagatcaccgtgggccagctgatcagccacctgcaggtgagcaatcaggaaattcagacctatgctatagccctgataaatgcactcttcctcaaagctcccgaagacaaaaggcaggacatggctaatgcctttgcacagaaacacctaaggtcaattatcctgaatcacgtcatccgcgggaacaggccaatcaagactgaaatggcccaccaactatacgttttgcaggtgctcactttcaacctgcttgaggagagaatgatgaccaaaatggatccaaacgatcaagcacagagagacatcatattcgagcttcggcgtatcgcattcgacgccgaaagcgacccctcgaacgctccagggtctgggacagagaaacgaaaggctatgtatacgaaggactataagatgctgggctttacaaaccacatcaatccagccatggacttcacccagaccccccccgggatgctcgcccttgataacatgctctacctggctaaggtccatcaggacacatacatacggatcgtcttagagaattcttcgagagaagataagcatgagtgccccttcggaagatcagcaatcgagcttactaagatgttgtgcgagattctgcaagttggcgagcttcctaacgaaggccggaatgactatcatcctatgttctttacacatgacagagcctttgaagagctctttgggatctgcatccagctgctgaataaaacctggaaggaaatgcgggccaccgcagaagacttcaataaagtgtctgtttcgggcttgttgtag

SEQ ID NO: 186596 - DNA, 2199 bp, synthetic construct
  misc_feature 1..2199: note = Description of Artificial Sequence: Synthetic coding sequence
  source 1..2199: mol_type = other DNA
atgcccccccccagcgacatcgtgaaggtggccatcgagtggcccggcgccaatgcccagctgctggagatagaccaaaagcgacccctagctagcatcatcaaagaagtgtgtgatgggtggagtctacccaaccctgaatactatactttgagatacgctgacgggccccagttgtacattaccgagcaaactagatctgacatcaaaaatgggacgatcctacagctcgcaatctcgccaagccgcgcagcacgccagctgatggaaagaacccagtcatcaaacatggaaaccagacttgatgccatgaaagagttagccaagctctccgccgacgtcaccttcgcgaccgaattcattaatatggatggaatcatcgtgctgacccgacttgttgagtctggaacaaaactgctcagtcattactcagaaatgctggcttttacactgactgcttttcttgagctcatggatcacgggatcgtctcctgggacatggtatccataacattcattaagcagatcgcaggttacgtctcccagcctatggtagacgtatctattctgcaaagaagcctggctattttagagtctatggttttgaacagtcagtcgctctatcagaagattgctgaggagatcaccgtcggtcaattaatatcacacttgcaagttagtaatcaagagatccagacctacgccattgccctgattaatgctttgtttctgaaagccccagaggacaagagacaagacaaacacttaaatcccctggatctgcccgtgacagatatggccaacgcttttgctcagaagcacttacggagcattatcctgaatcatgtcatccggggtaaccgccctattaagactgagatggcgcatcagctgtacgtgttgcaagttttgaccttcaaccttctggaagagcgcatgatgactaaaatggatcctaacgaccaagctcagcgagacataatctttgagctgaggcggatcgcattcgatgccgagagtgacccctcaaatgcgcctgggtcgggtactgagaagcgcaaggcaatgtacacaaaagattataaaatgctgggattcacgaatcacatcaatccagccatggatttcacccagacgccccccgggatgctcgctctggacaacatgctgtacctggcaaaagtgcaccaggacacttacattcgtattgtgctggagaactctagtcgtgaggacaaacacgagtgcccctttggcagatctgccatcgaactgacaaaaatgttgtgtgagattcttcaggttggggagctcccaaacgaagggaggaatgactatcatccaatgttctttacccacgacagggcctttgaagaattgtttggaatctgcatccagttgcttaataagacctggaaagaaatgagggcaaccgcggaggatttcaataaggtgatgcaggtggtccgggagcagattacccgcgccttaccttcaaagcccaattcactcgaccagttcaaatctaaacttaggagtctgtcatactcggagattttacgactgcgacagagcgagcgtatgtctcaggatgactttcaaagcccccctatcgtggaacttcgagagaagatccagccagagatacttgagttgatcaagcagcagcgcctgaatcgattatgcgagggctcttcattcagaaagatcggtaatagaaggagacaggaaaggttctggtattgtcggctggctctaaatcataaggtcctccactatggcgacttagacgacaacccccaaggagaagtgaccttcgagagtctgcaggagaagatcccggtcgccgatatcaaggcaattgtgacaggcaaggattgtccgcacatgaaagagaaaagtgcactgaaacagaataaggaagttctggagctggcgtttagcatcctgtacgacccagatgaaacccttaacttcattgcaccgaacaagtacgagtactgcatttggattgatggactgtccgcgctactgggaaaggacatgtcaagtgaactgacaaagtccgacttagacaccctcctgagcatggaaatgaaattgcggctgctggacctggaaaacatccagatccccgaggcgcctccacccattcctaaagagccgagttcctacgatttcgtttaccactatgggtag

SEQ ID NO: 186597 - DNA, 1614 bp, synthetic construct
  misc_feature 1..1614: note = Description of Artificial Sequence: Synthetic coding sequence
  source 1..1614: mol_type = other DNA
atggtggacgtgagcatcctgcagcggagcctggccatcctggagtctatggttcttaacagtcagtccctataccagaagatcgcagaggagattaccgtcgggcagctcatcagccatctccaagtgtccaatcaggagatccagacttacgccattgcgctgataaatgccttgtttctgaaagcccctgaggacaagcgccaagacatggcaaatgcatttgctcaaaagcacttaaggtccatcattctgaaccacgtcataagggggaataggccaattaagacagagatggcgcaccagctttacgttctgcaggtgctcacattcaaccttctagaagagagaatgatgaccaaaatggatcccaacgatcaagcacagagggacatcatcttcgagctccgaaggatagccttcgatgccgaaagtgatccttcaaacgccccggggtctggaacagaaaaaaggaaggccatgtacacaaaagactacaagatgctaggtttcaccaaccacatcaatcccgctatggactttactcagacaccgcccggcatgttggccctggacaacatgttgtatctggcaaaggtgcaccaggatacctatattcggatcgtgctggaaaattcatcccgcgaggataagcacgagtgtcctttcggaagaagcgcaattgaattgaccaaaatgctttgtgagatcctccaggtaggagagctgccgaacgagggcaggaacgattaccacccaatgttcttcacgcacgacagggctttcgaagagctctttggcatttgcatccaactactgaacaagacatggaaggagatgcgcgctaccgcagaggattttaacaaagtgatgcaggtggtgagagaacagatcacccgtgccctgccatccaaacctaattcactggatcagtttaaatctaagctcagatccctgtcatattcagaaattttgaggctcaggcaatcagaaagaatgtcacaggatgattttcagtcgccccccatcgtcgaactgagggaaaagatccaacctgagattctggaactcatcaaacagcagcggttgaatcgcctgtgtgaagggtccagcttcagaaagattgggaataggagaaggcaagagcgattttggtactgcagactggccctgaatcacaaagtcctgcactatggagatctcgacgataatccacagggggaggtcacgttcgagtcgctacaggagaagatacctgtcgctgatatcaaagcaattgtaaccggaaaagactgcccgcatatgaaagagaaatccgccctgaaacaaaacaaagaagtcctcgaacttgcattcagcattctgtatgatcccgatgagactctgaacttcatcgcaccgaacaaatatgagtactgcatctggatagatggccttagtgctcttctcggcaaagatatgagtagtgaactcaccaagtctgatctagacactttactgtctatggagatgaaactgaggctgctggacctcgaaaacattcagatcccagaggctccccctccaattcccaaagaacctagctcttacgattttgtctatcactacggatag

SEQ ID NO: 186598 - DNA, 1017 bp, synthetic construct
  misc_feature 1..1017: note = Description of Artificial Sequence: Synthetic coding sequence
  source 1..1017: mol_type = other DNA
atgcccccccccagcgacatcgtgaaggtggccatcgagtggcccggtgctaatgcccagctgctggaaattgaccagaagagaccactggcatctatcatcaaggaggtgtgcgatggatggtcattgccaaatccagagtactacaccctgcgctacgccgatggaccacagctatacatcacagaacagacacgctcagacattaagaatggaaccatcctgcagctggctatctcccccagccgagccgccagacaactgatggaaagaacacagtcgtcaaatatggagactcgattggacgccatgaaggagctcgctaaacttagcgccgacgtcacattcgccaccgaattcattaacatggatgggattatcgtgctcactcggttggtggagagcggtactaagctgctctcacactactctgagatgctggcatttacactgaccgctttcctcgagcttatggaccatggaattgtaagctgggatatggtgtctatcacctttatcaagcagatcgcggggtacgtaagccaacccatggtagacgtttcaatcctgcagagatccctggccatcctggaatctatggtcctaaactctcagtcactctaccagaagattgccgaagagattacagtgggacagctgataagccatctacaggtctccaaccaagagatccagacctatgcgatagctctcataaacgccctctttctgaaggctccagaggacaagaggcaagacatggccaatgccttcgctcaaaaacacctgagaagtataattttgaaccacgttatacgcggcaatcgccctattaagaccgaaatggcgcaccagctttatgtcttacaggttctgacatttaatctcctggaagaaagaatgatgaccaaaatggaccccaacgatcaagcccagcgtgatataatatttgagctgaggcgcatcgccttcgatgcagaatccgaccccagtaatgccccagggtctggcacttag

SEQ ID NO: 186599 - DNA, 852 bp, synthetic construct
  misc_feature 1..852: note = Description of Artificial Sequence: Synthetic coding sequence
  source 1..852: mol_type = other DNA
taccaccccatgttcttcacccacgaccgggccttcgaggagctgtttggaatttgcatccagctgctgaataagacgtggaaggagatgcgagcaaccgcagaagatttcaacaaagtgatgcaggtggtgcgggagcaaatcacgcgggccctgcctagcaaaccaaatagtctcgaccaatttaaatcgaaacttagatcgctatcttacagcgaaattctgcgcctccgccaaagcgagcggatgtctcaggacgattttcagagcccaccaattgttgaactgagagagaagatacaacctgagatcctggagctcatcaagcaacagaggcttaaccggctgtgcgaaggctcaagcttccggaagatcggcaatcgccgccgccaggaacgattctggtattgtagactcgccctgaatcataaggtactgcattacggcgatctggacgacaaccctcagggagaggtgaccttcgagtctctccaggagaagaacatcaaagcaatcgtgactggcaaggactgcccccatatgaaggaaaaatctgccttgaaacagaataaggaggtcctggagttggcattttctatcctgtacgatccagatgagacccttaacttcatcgcacccaacaagtacgagtattgtatctggatcgatggcttgtctgcactcttgggaaaggatatgagtagcgagctcactaagagcgacctggataccttactaagtatggagatgaagctccgacttctggatctcgaaaacatccagattccagaagccccacctcccattcctaaggagccttcttcatacgactttgtttatcattatggatag

SEQ ID NO: 186600 - DNA, 1359 bp, synthetic construct
  misc_feature 1..1359: note = Description of Artificial Sequence: Synthetic coding sequence
  source 1..1359: mol_type = other DNA
atgcacgtgatccggggcaaccggcccatcaagaccgagatggcccatcagctgtatgtgttgcaggtcctgacctttaatcttctcgaagaaagaatgatgacgaaaatggatccaaacgatcaggcacagagggatattatcttcgagctgaggcggatcgcctttgatgctgaatctgatccaagcaatgcgcccggatctgggacagagaaaaggaaagcgatgtataccaaagattacaagatgctagggtttacgaatcacatcaacccagctatggacttcacccaaaccccacccggaatgctggcccttgataatatgctttacctagcgaaggttcatcaggatacctacatcagaattgtcctggaaaattcctctcgcgaagataaacatgagtgcccatttggcaggtccgcaattgagttgaccaaaatgttgtgcgagatactgcaagtcggagagctccccaacgaaggccgcaatgattatcacccaatgttcttcactcatgatagagcttttgaagagctctttggaatctgtattcagctgctgaataaaacctggaaagagatgcgggctacagcggaggatttcaacaaggtcatgcaggtggtccgcgaacagatcacacgcgctctgccctcaaagccaaattctctggatcaattcaaatcgaagctgcggagtctaagctactccgaaattctccgcttacgtcaatcagaacggatgtcccaggatgatttccagtcgccccctattgtggagctgagagaaaaaatccaacctgaaatcctggaactgatcaagcagcagaggctgaatcgactatgcgagggatcctcttttaggaaaattggcaaccggaggcggcaagaaagattttggtattgtcgcctggcccttaaccataaggtgttacactacggagatctggatgataatccccagggcgaggtgacattcgagtccctgcaggagaaaatcccggttgccgacattaaggcgatcgtgacaggcaaagactgcccccacatgaaggagaaatctgcactgaaacagaacaaggaggttctggagctggcattcagcatactatatgatcctgacgaaactctcaattttatcgcccccaacaaatatgaatactgtatttggatcgacggcctctccgctttgctcggtaaagacatgagcagcgagttgaccaagagtgatctcgataccctcctgagtatggaaatgaagctgcggctcctagatctggagaacatacaaattcccgaggccccgccacccattccgaaagagccctcaagctacgacttcgtttaccactacggatag

SEQ ID NO: 186601 - DNA, 2322 bp, synthetic construct
  misc_feature 1..2322: note = Description of Artificial Sequence: Synthetic coding sequence
  source 1..2322: mol_type = other DNA
atggcccggagcagcagcctgggccgggagtgcggcaccccccggtctggcctcggcaagggaggtccccctaggcctcagggcccccaggccagatgtacgctcggccgacggtgtacagtgtctggcaagtgccgcagaccccgaccaagctggactatggctcctccccgtaatgtcgtcaagatcgcgattaagatgcgggatgccatcccacagctgatacaattagatcaagcaaagcccctcgccgcggtgctgaaagaggtatgtgacgcatggagcctgacccacagtgagaggtatgccctgcagttcgccgatggccatcggaggtatatcacagaaaataatagggccgaaatcaagaatggctctatcctgtgcttgtccacggcccccgacctggaggcagagcaattacttggcggtctccagagcaatagcccagagggacgcagggaggctcttagacgcctggtgcctttggcctcagacatgatctttgctcgggaagtgatctcaaggaacggtttgcagatactcggcaccatcattgaagacggagatgacttaggtgaggtgttggctttgagtctgcgagcgtttagcgagcttatggagcacggtgttgtgagttgggagacacttagtatacctttcgtgcgaaaagtggtgtgctacgtgaacatgaacctgatggacgcctctgtcccacctctggccctgggactgttagagtcagtcactctaagctcccctgcgctgggacaattggtcaaaagcgaggtgcccctagatcgtctgttagtgcaccttcaagtcatgaaccagcagctacaaacaaaagctatggctctgctcactgctctcctgcagggtgccagcccagtcgaacgaaagcacatgctggactacctctggcagcggaatctgaggcagttcatttataaaaatatcattcattcagcagctcctatgggagatgaaatggcccatcatctatatgttctgcaggctttgatgttggggctactggagcctagaatgcggacccctcttgacccatattcccaagagcaaagggagcaactacaggtgctcaggcaggctgctttcgaggttgagggagagtctagcggggctggcctaagcgctgatcgccgacgctcattgtgtgctagggagtttaggaaactgggattctctaatagcaaccccgctcaggatcttgaaagggtgccaccagggcttctggcactggacaacatgctatatttttcccggaatgcacccagtgcatatagcagattcgtgctggagaacagctctcgagaagataagcacgagtgcccattcgctagggggtccatccagcttaccgttctgctctgcgaactcctgcgggtgggggagccttgttccgagactgctcaagatttttcacctatgttctttggccaggatcagtcatttcacgaacttttctgcgtgggcattcagctcctgaataagacatggaaagaaatgagggccacgcaggaggactttgataaggtcatgcaagtggtccgagagcagctggcccggaccttggccttaaagccgacaagtctcgagctgtttcgaacaaaagtaaatgcattgacatacggggaggtgctgcgcctgcgacaaacggagaggctacaccaggaaggaaccctggcaccaccaattcttgagctgcgcgagaagttaaaacctgagcttatgggtctgatccgccagcaaagacttctacgactgtgcgagggcacattgttcaggaagatttcctcacggaggcgccaggataagctgtggttttgttgcctgagccctaatcataaactgctccagtacggagacatggaggaaggcgcttcgccacccacacttgaaagccttcctgagcagctacctgtcgcggatatgagagccttattgacaggcaaggattgcccacacgtgcgcgagaaaggatccggcaagcagaataaagacctttacgaactggccttttccatctcttatgatcgtggggaggaagaagcttacctgaacttcattgccccatcaaaacgggaattttatctgtggaccgatggactctcagccctgcttgggtccccgatgggtagcgagcaaacaaggcttgacttggaacagttattgaccatggagacaaagctccggcttctggaactcgaaaatgttcctattcccgagagacctccccccgtgccccccccacccacgaattttaatttttgttacgattgtagtattgctgagccgtag

SEQ ID NO: 186602 - DNA, 2511 bp, synthetic construct
  misc_feature 1..2511: note = Description of Artificial Sequence: Synthetic coding sequence
  source 1..2511: mol_type = other DNA
atgagcaagctgagcttccgggcccgggccctggacgccagcaagcccttaccggtcttccgatgtgaggacctcccagacctgcatgagtacgcctccatcaatcgagcagtgcctcagatgcccactggaatggaaaaagaggaagagtcagagcaccacctccagagggcgatctccgcacagcaggtgtacggtgaaaagagggacaatatggtcatccccgttccagaggccgaatctaacatcgcttactatgagtcgatatatcccggcgaatttaagatgcctaagcaattaatacatatccagccttttagcctcgatgctgagcagcctgattatgacctggattcggaagatgaagttttcgtcaataagctcaaaaaaaagatggatatttgccctcttcagttcgaagagatgatcgatcgcctcgaaaaggggtcggggcagcaacccgtctcccttcaagaagccaagctgctgctgaaggaggacgatgagctgattcgcgaagtttacgagtattggattaaaaagcgtaagaactgtcgcgggccttccctgattcctagcgtcaaacaggaaaaaagagacggatcctccacaaacgacccgtacgttgcatttagaagaaggaccgagaagatgcagactcggaaaaacaggaaaaacgacgaagcatcatacgaaaagatgcttaagctaaggcgagatctgtctagagccgttaccatcctggagatgattaaacggagagaaaagtcgaagcgcgagctactgcacctgactctggagattatggagaaacgatataatctaggtgactataacggtgaaattatgtccgaggtgatggcacaaaggcagcccatgaagcctacatacgcaatcccgattattcccataaccaacagctcgcagttcaaacaccaggaggctatggatgttaaagagtttaaggtaaacaagcaggacaaggctgacctgattcgccccaaaagaaagtacgaaaaaaagccaaaagtgctcccttcctcagccgcggccacgcctcaacagacatctcccgccgcactgccagtatttaatgccaaggacctgaaccagtacgacttcccaagctccgacgaggagcccctaagccaggtcttgtcaggctctagtgaggccgaagaggacaacgaccctgatggacccttcgctttccgccgtaaggccggctgtcaatactatgccccacatctcgaccagacaggaaactggccgtggacatcacccaaagacgggggcctgggtgatgtcaggtataggtactgcctgaccactttgaccgtgccacaacggtgcatcgggtttgcgcgcagaagagtcggtagaggcggtcgagtcttgctggacagagcacactccgattacgattccgtgttccaccacctcgatctcgaaatgcttagtagccctcagcattctccagtcaatcaattcgcaaacacatcagaaacaaataccagcgataaatcgttctctaaggacctatctcagatcttagtcaacatcaagagctgtcggtggcgccactttagacctagaaccccctccttgcatgacagtgataatgatgaattatcatgtcgaaaactctatagatccataaaccgaacgggaactgcccagcccggaacccaaacatgttcaacctcaacgcaatccaagagctcgtctggaagcgcccacttcgccttcactgccgaacaataccagcagcatcaacagcagctggctctgatgcagaaacagcagttagcgcagatccaacaacagcaggccaacagtaactcttctactaatacctcccaaaatctcgcgagtaatcagcagaaaagtggttttcgcctgaatattcagggactggaaagaaccctccagggatttgtgtcaaagaccctagactctgcaagcgctcagttcgccgcaagtgcactggtcacatcagaacagctcatggggtttaaaatgaaagacgacgtggtcttggggatcggcgtaaatggcgtactgcccgccagtggggtgtacaaagggctgcaccttagctccacaacacctaccgccctagtgcatacatctccatcaactgcagggtccgctcttttacagccctccaatatcacacagacgtcatcaagccacagcgcattgtcacatcaggtaaccgccgccaactcggccaccactcaagttctgattggtaacaatataaggctgaccgtgcctagctccgtggctacagtcaattcaattgcccctatcaacgcccgccatattccacgaactctctcagctgtcccatcaagcgctctgaaactcgcagcagccgcgaattgccaagtgtctaaggtgcccagctctagtagtgtggattcggtgcccagagaaaatcatgagagcgaaaaaccagccttgaataacattgccgacaacacggttgccatggaagtgacttag

SEQ ID NO: 186603 - DNA, 2442 bp, synthetic construct
  misc_feature 1..2442: note = Description of Artificial Sequence: Synthetic coding sequence
  source 1..2442: mol_type = other DNA
atgagcaagctgagcttccgggcccgggccctggacgccagcaagccacttcccgtcttccggtgcgaagatcttccagatctccacgaatacgcctccattaaccgcgctgtccctcaaatgcctacaggcatggaaaaggaggaggaaagtgagcaccacctccagagggcgatatcagctcaacaggtgtatggtgaaaagcgggacaacatggttattccggtgcccgaggcggagtctaacattgcttactacgaatcaatttatcctggcgaatttaaaatgcccaagcaactcatccacattcagcccttcagcctcgacgccgaacaaccagactacgacctcgacagtgaggacgaggtgttcgtgaacaaactaaagaagaaaatggatatttgtcctttgcagtttgaagaaatgattgatcgactcgagaagggaagtgggcagcaacccgtctccctgcaagaggccaaactcctactgaaggaagacgacgagctgattcgtgaagtttatgagtattggatcaagaagcgaaaaaactgcagagggccttccttaattccttccgtcaaacaggagaagcgcgacgggagctctactaatgacccgtatgtagccttcaggcgtcgaacagaaaagatgcaaaccaggaaaaatcgtaaaaacgatgaggcttcatatgagaaaatgctaaaactaagacgcgatttgtcccgggccgtcactatcctggagatgattaagcgacgggaaaagagcaaaagagagttgcttcatctgacgttggagatcatggaaaaaaggtacaatctgggagactacaatggggaaataatgtccgaggtcatggcacagaggcaaccaatgaaacccacctacgcaatccccataataccgatcaccaattccagccagtttaaacaccaggaggccatggatgttaaagagttcaaagtgaacaaacaggataaagccgatctaatcaggccaaaacgcaagtacgagaagaaacccaaagtgctgccgtcctccgctgcagccacgccacagcagacgagtccagctgcactcccggtgtttaatgccaaagacctgaaccagtatgacttcccatctagtgacgaagaaccactatctcaggtgctttcaggaagttctgaggcggaggaagataatgatcccgacggcccgttcgccttcaggcggaaggcagggtgccagtactacgctccgcatctggaccaaactggcaattggccttggacatcccctaaggatggcggtctgggtgatgttcggtacagatattgtctgactactctgacggtacctcagcggtgcattggctttgcacgcagacgcgtgggacgcgggggtagagttctccttgatagagcccatagcgattatgactcagtgtttcaccacttagatctggagatgctgagttccccccagcactccccagtgaaccaattcgcaaatacttccgagaccaataccagcgacaaatctttctccaaggacctcagccagatcttagtgaatatcaagtcttgccgttggagacacttccgcccccggacaccttcccttcacgattccgataacgatgaactctcctgcagaaagttgtatcgatctattaacaggacaggcactgcccaacccggtacacagacttgttctaccagcacacagtcaaagtcttccagcgggtcagcccacttcgcctttacagcggagcagtatcagcagcatcaacagcaattggccctgatgcagaaacagcaactcgcccaaattcagcagcagcaggccaattccaattcatcaacgaatacaagtcagggttttgtgagcaaaaccctggactccgcttcagcccagtttgccgccagtgccttagtcacttccgaacagttgatgggattcaagatgaaagacgacgtggtccttggtattggcgtgaatggcgtcctacccgcctccggggtgtacaagggcctgcatttatctagcacaacgccaacagctctggtccacacctcccctagtaccgccggcagcgccctgctgcagccttctaacatcacccagaccagttcaagccatagcgccttaagccatcaggttacggcagctaactcagcgaccacgcaggtcctgatcggaaataatatccgcctaactgtgcccagttctgtagccaccgtcaactccattgccccaattaacgcgcggcatatacctagaacattaagtgccgtaccgagttcggcgctgaagctggcagccgctgccaactgtcaggtttccaaggttccttcttcctcctccgtggactcggtcccccgtgagaaccatgagtctgaaaaacccgctctgaacaatatcgctgataacactgtcgctatggaagtgacatag

SEQ ID NO: 186604 - DNA, 2292 bp, synthetic construct
  misc_feature 1..2292: note = Description of Artificial Sequence: Synthetic coding sequence
  source 1..2292: mol_type = other DNA
atggagcaccacctgcagcgggccatcagcgcccagcaggtgtacggcgaaaagcgggacaacatggtgatccctgttcctgaagccgaatcaaacatcgcctattatgaatcaatctaccctggagaattcaagatgcccaagcagctgatacatatccagccattcagtctagacgcggaacaaccagactacgacctcgatagtgaagatgaagtgttcgtgaataagctgaaaaaaaagatggatatttgtcctctacagtttgaggagatgatcgataggctggaaaaagggtcaggccagcagcctgtttccctgcaggaggccaaactcctcctgaaagaggatgatgaattgatcagggaggtgtacgagtattggatcaaaaaacgtaagaattgcagaggccccagtttgattccatccgttaagcaggaaaagcgggacggctccagcaccaacgatccatatgtggcgtttcggcgaagaacagagaagatgcagacaaggaagaaccgcaagaatgacgaagcatcctacgaaaaaatgctaaaactcagacgggatctgtcacgcgcagtcactattcttgagatgattaaacgccgcgaaaagtcaaagagggagctcttgcacctgacccttgagattatggagaaacgatataacctgggcgattataatggagaaataatgagcgaagtgatggcccagcggcagcccatgaaacctacttatgcaatcccaatcattcccattacaaattcttcccagtttaaacaccaggaagctatggacgtgaaggaatttaaggttaataagcaagataaagctgatttgatccggcccaagcggaagtacgagaagaaaccgaaggttctgccctcgtccgccgctgccacaccgcaacagactagtccagccgctctccctgtgtttaatgctaaagatctgaaccaatatgatttccccagctccgacgaagaacctctgtcacaggtgctgtcaggctcaagcgaggcagaagaagacaatgaccccgatgggcccttcgcttttcgcaggaaagcggggtgtcagtactatgccccacacctggaccagactgggaattggccctggacgagccctaaggacggcggcctcggcgacgtcagataccggtattgcctgactacgttgacggtgcctcaacgttgtatcgggtttgccagacgccgggtcggcagggggggtcgggtgctcctggacagggctcattccgactacgacagcgtgttccatcacctggatctggagatgctcagtagtcctcagcactcgcccgtcaatcagtttgcaaacacctctgaaactaatacatcagataagagcttcagtaaggatctttcccagatcctggtaaatatcaagtcttgccgctggcggcactttcgaccccgtacacccagcctgcacgacagcgacaatgatgagctaagttgtcggaaactgtatagatcaataaatcgaacaggcaccgctcagcccggcacacagacctgctctacgagcacccagtctaaatctagttcaggctctgcacatttcgctttcacagctgaacagtatcaacagcatcaacagcagttagctttaatgcagaagcaacagttagcccaaatccagcagcagcaagcaaactccaattcctctactaatacttctcagggattcgttagtaaaaccctggactccgcgagcgcccagttcgccgcttctgccctggtcacctcagagcagctcatgggcttcaaaatgaaggatgacgtcgtgctgggcattggcgtgaacggagtgttaccagcctccggggtctataagggcttacacctcagcagcacgactcccactgcgctggtacatacaagtcccagcacagcaggctcggcactgctgcagccttctaacataacacaaactagctcaagtcactcggccctgtcccatcaggtcacagctgcaaattcggctaccacccaggtgctgatcggcaataacatccggctgaccgtgccaagctctgtggcaaccgtcaacagtatagctccaatcaatgcccggcatattccccgcaccttatccgccgtgccttcctctgccctcaagctcgccgcagctgccaattgccaggtctctaaagtgccttcctcctcttcagtggactctgtgcccagagagaaccatgagtctgaaaagcccgcactcaacaacatcgcggataatactgtagcaatggaggtcacttag

SEQ ID NO: 186605 - DNA, 2424 bp, synthetic construct
  misc_feature 1..2424: note = Description of Artificial Sequence: Synthetic coding sequence
  source 1..2424: mol_type = other DNA
atgagcaagctgagcttccgggcccgggccctggacgccgccaagccgctgcccatatatagaggcaaggacatgcccgatctcaatgattgcgtttccattaatagagctgtccctcaaatgccaaccggcatggaaaaagaggaagaatctgaacaccatcttcagagggctatcagcgcacaacaggtattccgtgagaaaaaagaaagcatggtgatccccgtccccgaggccgaaagcaacgtcaactactataatcggctatataaaggtgagtttaaacagccgaagcagttcattcatatccagccattcaatttggataatgagcagcccgattacgacatggatagcgaagacgaaacactgctgaaccgattgaaccgcaaaatggagatcaaaccactacagtttgaaattatgatcgaccgattggagaaggcctcttccaaccaactggtcaccttgcaggaggcaaagttgcttctgaatgaagacgactatctaattaaagccgtgtacgactattgggtgcggaagaggaaaaactgtcgggggccttctttgatcccacaaattaagcaggagaagcgtgacgggtccactaataacgatccgtacgtcgcctttcgccgtcgtacggaaaagatgcagaccaggaaaaatagaaagaacgacgaggctagctacgaaaagatgctgaagctccgtcgagaattctctcgtgcgataactatcctcgaaatgatcaagcgccgcgagaaaactaaaagggaactgttgcacctgactttggaggttgtagagaagcgctaccacctcggcgattatggcggcgagatcctgaacgaagtcaagatttctagatcggaaaaggaactatatgccacaccggctacactccacaacggaaaccaccataaggttcaagagtgcaaaaccaaacacccccaccatctttcattgaaagaagaagctagcgatgtcgtcaggcagaaaaagaaataccctaagaagcccaaggccgaggcactaatcacctcccagcagcccaccccagaaaccctgcctgtgattaataagtcagacataaagcagtacgattttcatagctctgacgaagacgagtttcctcaagtgttaagtccagtcagcgagccggaagaggagaatgaccctgatgggccctgtgcgtttcggcgcagggcaggctgtcagtactatgcccctcggcttgaccaggctaaccactcctgcgagaatagcgaattagccgatctggacaagctgcgctatcgacactgcctgactaccctcacggttcctaggcgatgtatcggttttgcccgacgaaggattgggcgtggggggagagtgatcatggaccgtatctccaccgagcacgatccagtgctaaaacaaattgacccagaaatgcttaattccttttcatcttcaagtcagacaatagacttctcctcaaactttagtcggaccaatgcctccagcaagcactgtgaaaacagactgtctctgtctgaaatactgagcaatatccggagttgccgactgcaatgttttcagcctagattgctgaatctccaggactcagacagcgaggagtgcacgagccgaaagccgggtcagacagttaacaataagagagtgagtgccgcttctgtggccttactgaatacttcaaaaaatggcatctccgtcactggaggcataaccgaagagcagtttcagacacaccagcagcagcttgtccagatgcaacggcagcagctggcccagttgcaacagaaacaacaatctcaacactcctctcagcaaactcaccccaaggcccagggtagcagtacatcagactgcatgtcgaaaaccctggactccgcctccgcccactttgcggcctccgctgtggtgtctgctcccgtaccctcccgttccgaggtcgccaaagaacagaatacaggccataataacattaatggcgtggtgcagcctagcgggacctccaaaacattgtacagcacaaatatggccctttccagctcacctgggatttctgcagtacaactcgtaaggacagtggggcatactactaccaaccacctgatccccgctttatgcacctcatcacctcagacacttcctatgaacaatagttgtctaaccaatgccgtgcacttaaataatgtatctgttgtgtctcccgtgaatgtgcacattaatacacgcacctctgcgccctctcctactgcccttaaactcgccaccgtagctgcttcaatggaccgcgtcccgaaagttacaccaagctccgccatttcttcaattgcccgggaaaaccacgagcccgaacggctgggattgaacggcatcgcagagacgaccgtggccatggaagtgacatag

SEQ ID NO: 186606 - DNA, 315 bp, synthetic construct
  misc_feature 1..315: note = Description of Artificial Sequence: Synthetic coding sequence
  source 1..315: mol_type = other DNA
atgagccacaccatcctgctggtgcagcccaccaagcggcccgagggccggacttatgctgactatgaatctgttaacgagtgcatggaaggcgtctgtaagatgtacgaagagcacctgaaaagaatgaatcccaatagtccttccattacctacgacatcagccagctgttcgattttatcgatgatttggctgacctgtcgtgcctggtgtatcgggctgacacacagacgtatcagccttacaacaaggattggatcaaagagaagatctatgtgctcctgagaaggcaggctcagcaggccggaaaatag

SEQ ID NO: 186607 - DNA, 2253 bp, synthetic construct
  misc_feature 1..2253: note = Description of Artificial Sequence: Synthetic coding sequence
  source 1..2253: mol_type = other DNA
tacagcaagatggagatccccaacccccccaccagcaagtgcatcacctattggaaaaggaaggtgaaaagcgaatacatgcggttgcgtcagctgaagagactgcaagctaatatgggcgcaaaagccctgtatgtagctaattttgcaaaggtgcaagagaagacccagattttgaatgaggagtggaagaagctgcgggtgcagcccgtgcaatcaatgaagcctgtctctggccatccctttctgaagaaatgcaccatcgaaagtatttttcctgggtttgcctcacaacatatgctgatgaggtccttgaacacggtggcactggttccaatcatgtactcatggagtcccctccagcagaacttcatggtggaggacgagacagttctctgtaatattccttatatgggagacgaagtcaaggaagaagacgagactttcatcgaagagttgattaacaactatgatgggaaggtccacggcgaagaggagatgatcccaggatccgtgctgatttcagacgctgtctttctggagttagtggacgccctcaatcagtatagcgatgaagaagaagagggacacaatgataccagcgacggcaagcaggacgattctaaggaagacctgcccgtgacgcggaaacggaagcggcacgctattgagggtaacaagaagagctccaaaaaacagtttccaaacgatatgattttttctgcgattgcctctatgttcccagagaacggtgtacccgacgatatgaaggaacgttacagagagctgaccgaaatgtcagatcccaatgccttgcctcctcagtgtaccccgaacatagacggacccaacgccaagagtgttcagcgagaacaaagtttacactccttccataccctgttctgtaggcgctgctttaagtacgactgctttctacacccattccatgcaaccccaaatgtgtataaaaggaagaacaaagaaataaaaatcgaacctgagccttgtggcacggattgctttctgctgttggagggcgctaaggagtatgcaatgctgcacaatcctcggtctaagtgctccgggcggagacgtagacggcaccatattgtctcagcttcctgttcaaacgcgtcagcatctgccgtggctgagacgaaagagggcgactctgacagagacacaggtaacgactgggcctcctcctcaagtgaggcaaacagcaggtgtcagactccgaccaagcagaaggcatctccagctcccccccagctttgtgtcgtggaagccccgtctgaaccggtggaatggacaggcgctgaagagtctttatttcgagtgtttcatggtacctatttcaataacttctgtagcatcgcccgccttctgggtaccaagacctgtaagcaggtgtttcagtttgcagtgaaagaaagtctgatccttaagctgccgactgatgagctgatgaaccccagtcagaagaagaaacgtaaacacagattgtgggcagctcattgcaggaaaatccagctgaagaaagacaattcttcgacacaagtctataactaccagccatgtgaccatcctgaccgaccctgtgacagcacatgtccctgcatcatgactcagaacttctgtgaaaagttttgtcagtgcaatccagactgccagaacagatttccaggttgccggtgcaagacccagtgcaacacgaaacagtgtccatgttatctcgcggttcgcgaatgcgatccggacctgtgtcttacgtgcggcgcaagtgagcactgggactgcaaagtcgtgtcatgtaagaactgtagcattcagcgaggtctgaagaagcatctactgctggctcctagtgacgttgctggatgggggacattcattaaggagagtgttcagaagaatgagttcataagcgagtattgcggtgagctcatttctcaggatgaggccgatcggcggggcaaggtgtacgacaaatatatgtcctcctttctttttaatttaaataacgattttgtggtggacgctacacggaagggaaacaagatcaggtttgccaatcatagtgttaaccctaactgttacgctaaagtcgtgatggtgaacggtgaccaccgcatcggcattttcgcaaagcgggccatccaggccggggaggagttgtttttcgattatagatattcacaggccgacgccctgaagtacgtggggattgagagagagaccgatgtgctatag

SEQ ID NO: 186608 - DNA, 2124 bp, synthetic construct
  misc_feature 1..2124: note = Description of Artificial Sequence: Synthetic coding sequence
  source 1..2124: mol_type = other DNA
atggagatccccaacccccccaccagcaagtgcatcacctactggaaaaggaaggtgaagtcagagtacatgcgcctccgacaacttaaacggcttcaagcaaacatgggagcgaaagctctctatgtggcaaactttgccaaagtgcaggagaaaacccagattctcaacgaggagtggaagaaacttagagtccagcctgtgcagagcatgaagccagtatccggccaccccttcctcaagaaagtggaggacgagaccgtactttgcaacatcccatacatgggagacgaggtaaaagaggaagatgagacgttcatagaagagttgatcaataactatgatggtaaggtgcacggggaagaagaaatgattcccggctccgttctgattagcgacgcagttttcctggaattggtggacgcccttaatcaatatagcgacgaagaggaagaaggccataatgatacctcggacgggaaacaggacgacagcaaagaggacctgcccgtaactcggaagaggaagcggcacgctatagagggcaacaagaagtcttcaaagaagcagttccccaatgacatgatcttttcagccattgcttctatgtttccagagaatggcgtgccagatgacatgaaggaacggtatcgtgaacttaccgagatgtctgaccctaacgccctgccaccccagtgtaccccaaatattgacggacctaatgctaagtctgtccagagagagcagagcttgcatagctttcacaccctcttctgcagaagatgtttcaaatacgattgctttctccatccctttcacgcaactcccaatgtttataagagaaagaataaggaaattaaaatagaaccagagccctgcggaactgattgcttcctcctgcttgaaggcgccaaggaatacgcaatgctgcacaacccaaggtcaaagtgctctggacgtagaaggcgtcgtcaccacatagtcagcgcctcctgctctaatgctagcgcttccgctgtcgccgagacaaaagaaggtgacagtgaccgcgacacagggaacgactgggcttcatctagctcagaggccaattcaagatgtcagacacccactaaacagaaagcatcaccggcgccaccacaattgtgcgtagtggaggcaccttccgagcccgtggagtggacaggagcagaggaatccctgttccgggtatttcacggcacctactttaacaacttctgctccatcgcaaggttacttgggaccaagacgtgtaagcaggtctttcagttcgccgtaaaggagagcttaatcttaaagctgcccaccgacgaacttatgaacccttctcagaagaagaagcgtaagcacaggctgtgggcagcgcactgtcgtaaaatccagctgaagaaagataattcaagcacacaggtctataactatcagccatgcgaccatcccgacagaccatgcgactccacatgtccatgcatcatgacccagaacttttgcgaaaaattctgccaatgcaatcctgactgtcaaaatcggttccccggctgcagatgtaaaacacagtgcaataccaagcaatgcccatgttacctggcagtgagggagtgtgacccagacctctgtctgacctgcggagcctctgagcactgggattgtaaagtcgtctcctgcaagaattgtagcattcagcggggactcaagaagcatcttctgctagcaccgagcgacgttgccggatgggggacattcatcaaggaaagcgtgcagaagaacgagttcatctcggaatactgcggagagctaataagtcaggatgaagccgatcggaggggaaaagtatacgacaagtatatgagcagtttcttgttcaacctaaacaatgattttgtagtggacgcgaccagaaaaggaaacaaaatccggttcgcgaatcactccgtgaaccccaattgctatgctaaagtggttatggtcaacggggatcatcgaattggcatctttgccaagcgcgcaatacaggcaggagaagagttgttcttcgattacaggtactcacaggcggatgcgctgaagtacgtcgggatcgagcgcgaaacggatgtcctgtag

SEQ ID NO: 186609 - DNA, 2244 bp, synthetic construct
  misc_feature 1..2244: note = Description of Artificial Sequence: Synthetic coding sequence
  source 1..2244: mol_type = other DNA
atggagatccccaacccccccaccagcaagtgcatcacctactggaagagaaaagttaagtctgagtatatgcgcctgcgtcagctcaaacggcttcaggctaacatgggtgcaaaggcactctatgtcgctaattttgcaaaagtacaagagaaaacacagatcctgaatgaagaatggaagaaactgagagtgcagcccgtgcagagtatgaagcccgtgtcgggacatccattcttaaagaaatgcacgatcgagtctattttcccaggttttgcttctcaacatatgctcatgagaagcctgaatacggtggcactggtcccgatcatgtactcttggtctcctcttcagcagaacttcatggtggaagacgaaacagtgctgtgcaacatcccctacatgggcgatgaggtgaaagaggaggacgagaccttcatcgaagaacttattaataattatgacgggaaagtacacggggaagaggagatgattccaggctctgttctaatctctgacgccgtgttcctggaactcgtggacgccctaaaccagtactctgacgaggaagaggaaggccataatgacacatcagatgggaaacaagacgatagtaaagaggatttgccggtgactagaaagaggaagcggcacgctattgagggcaataagaaatccagcaaaaaacagttcccaaatgatatgatcttcagtgcaatcgccagcatgttcccagagaacggcgtcccagatgatatgaaagagagatatcgggagttgactgaaatgtctgaccccaatgcactgcccccccagtgtacccctaatattgacggccctaacgcaaagtccgtgcagcgcgagcagagcctgcattccttccatacattattctgtcggcgctgttttaagtatgactgctttctgcatccattccacgctactcccaatgtatataaacgcaaaaataaagaaatcaagattgagcctgaaccctgcggtacagactgtttcctgctcctagagggagccaaggagtacgcaatgctacacaatccaagatctaagtgctcaggccgaagaaggaggcgccaccatatcgtctcagcctcatgctccaacgcaagcgcctctgccgtggccgagaccaaggaaggggattccgacagggacactgggaacgactgggcatcatcctcttccgaagccaattctcgatgtcagaccccaaccaagcagaaagcctctcctgcccctccacagctctgtgtcgttgaagccccaagcgaaccagtggagtggacgggcgcggaggagtctctttttcgagtctttcacggcacctattttaacaacttctgtagcattgccagattgctgggaactaagacctgcaagcaggttttccagtttgcagtgaaggagagcctgatcctcaagctgccgacggacgagctaatgaacccatcccagaaaaagaaaagaaaacaccggctgtgggctgcacactgtcgaaagattcagctaaaaaaggataatagttccacgcaggtgtacaattatcagccgtgtgaccacccagaccgcccctgcgattcaacatgtccttgcatcatgactcaaaacttttgcgaaaaattttgtcagtgtaatcccgattgccagaatagatttcctgggtgtcgatgcaagacgcagtgtaacacgaaacaatgcccctgttatctcgccgtgagagagtgcgacccagacctgtgtctgacatgcggagcatctgagcattgggactgcaaggttgtgtcttgcaagaactgcagtatacaacgaggacttaaaaagcaccttctgctggcgccctctgatgtcgctggatgggggacgttcatcaaagagagcgtacagaagaacgagtttatctctgagtactgcggggagcttatcagccaggacgaggcggaccgccgtggcaaggtgtatgacaagtatatgtcttcatttctcttcaatctgaataatgactttgtggtagatgctacgaggaaaggcaataaaattaggtttgctaaccacagtgtgaaccccaattgttacgccaaagtcgtgatggtgaacggtgaccataggatcgggatttttgcaaaaagggccattcaggccggagaggaattgtttttcgactacagatatagccaggccgatgcccttaagtatgtgggaatcgaacgggagaccgatgtgctctag

SEQ ID NO: 186610 - DNA, 1827 bp, synthetic construct
  misc_feature 1..1827: note = Description of Artificial Sequence: Synthetic coding sequence
  source 1..1827: mol_type = other DNA
atggaggaggccagctgccccacctgcagcgtgaacgaggcctgcgagtggactccctttagtcagaaggaaatgattccagggagtgtcctgatctccgatgccgttttcctggaactggttgatgccttgaaccagtatagcgacgaagaagaagagggccacaacgataccagcgacggcaagcaagacgatagcaaagaggatctgcccgtaactcgtaagaggaagcggcacgccatcgaaggtaataagaagtccagcaagaaacagtttcccaacgatatgatcttttccgccatcgcttcaatgtttcccgagaatggcgtacctgacgatatgaaagagcgctaccgggagttaaccgagatgagcgaccctaacgctttgcccccccagtgcacaccaaacatcgatggccctaacgcaaaatccgtgcagagggagcagtcactgcacagtttccacacgctgttctgtagaagatgctttaagtacgactgttttctgcatccatttcacgccacacccaacgtgtataaacggaagaataaggagattaaaattgagcccgaaccctgtgggacagattgtttcttgttactggaaggcgctaaagaatatgcaatgttacataaccccagatcgaaatgctcgggcaggagacgcaggcggcaccacattgtctcagccagctgttctaatgcctccgcttccgccgtggccgagacgaaggagggtgatagcgatcgggacacgggaaatgattgggcttctagctcgagcgaagccaattccaggtgccagacaccaactaagcagaaggcctccccagccccaccgcagctgtgtgttgtcgaagctcctagtgagcccgttgagtggaccggggcggaagagtccctgttccgcgttttccacgggacatattttaacaatttctgttctatcgccaggcttctcggtacgaaaacatgcaaacaggtgttccagttcgccgtaaaggaaagcctcatcctcaaactaccaactgacgagctcatgaaccccagccagaagaaaaaacgcaagcatagattgtgggctgcccactgtcgcaagatccagcttaagaaagacaatagtagtacacaagtgtacaactaccaaccatgtgaccaccccgatcggccctgcgactctacctgtccttgcatcatgacccaaaacttctgtgaaaaattttgtcaatgcaaccccgactgtcaaaacaggtttccggggtgccgctgtaagactcaatgcaacacaaagcaatgtccttgttatttggccgtgagggaatgcgaccctgatctctgtctgacttgtggcgcttccgagcattgggattgtaaggtagtttcatgtaaaaattgctccatacagcgggggctaaaaaaacatttactgttggcaccaagtgatgtcgcaggctggggtacctttattaaggaatcagtccagaaaaatgagtttattagcgaatactgtggcgagctgatttcacaggatgaagctgacagaaggggcaaggtctatgataagtacatgagcagctttctgtttaatctaaacaatgacttcgttgtggacgcgaccagaaaggggaacaagatcaggtttgctaaccatagtgtgaatccaaactgttatgctaaggtggtgatggtgaatggtgatcaccgaataggcattttcgccaagagagcaatccaggcgggggaagaactgtttttcgattatagatacagccaagctgacgctcttaaatatgtcgggattgagagagaaactgatgtgttatag

SEQ ID NO: 186611 - DNA, 2256 bp, synthetic construct
  misc_feature 1..2256: note = Description of Artificial Sequence: Synthetic coding sequence
  source 1..2256: mol_type = other DNA
atgggccagaccggcaagaagagcgagaagggccccgtgtgctggcggaagagggtcaaatcagagtacatgcggctgcgccaactgaaacgcttccggcgagcagacgaggtaaaaagtatgttctcttccaatcgacagaaaatcttggagcgcacggagatccttaatcaagaatggaagcagcggcggatacaaccggttcacatactcacctccgtgtcctcactgagaggcacccgcgagtgtagcgtcacctccgatcttgactttccaacccaggtcatacccctcaaaactttgaatgcagtggcctctgtccccatcatgtattcatggtctcctctgcagcagaattttatggtcgaggatgaaaccgttcttcataatataccatacatgggcgatgaagtgctggatcaggatggcaccttcatcgaagaactaatcaaaaattatgatgggaaagtccacggcgatagagagtgtgggttcattaacgacgaaatattcgtggagctcgtaaatgccttgggtcaatataatgatgatgacgacgatgatgacggggacgatcccgaggaaagagaggaaaagcagaaagacttagaagaccacagggatgataaggagtcacggcctccccgaaagtttccttctgataagatcttcgaggcaattagctctatgtttccagacaagggaaccgctgaggaattaaaagagaaatacaaggagctaacggagcagcagctgccaggtgccctgccgccggaatgcacaccaaatatcgacggccccaacgccaagagtgtacagcgggaacagagtctgcattcattccacaccttgttttgtcgaagatgttttaagtatgactgcttcttgcatcggaagtgcaactactcttttcacgcaacccctaacacttacaaaaggaaaaataccgagaccgcactggacaataagccgtgcggccctcagtgttaccagcacttagaaggcgccaaagagttcgccgcagccctgaccgccgaacgcataaaaacacctccgaagaggccaggcggacggaggcgagggagattaccaaacaatagctcccgaccatctacgccaactataaatgtgctggaatcgaaagacacagactctgaccgggaggctgggactgagactggtggggagaataacgataaggaggaggaagagaagaaagatgaaacttccagtagctctgaagccaatagccgctgccaaactcccataaaaatgaagcctaacatcgagccacctgagaacgtggagtggtccggcgcagaagcttccatgtttcgcgttctgatcggaacttattacgataacttttgcgccatagccagattgattgggaccaagacgtgccgccaagtctatgagtttcgagtgaaggaaagttctataatagcccctgcacctgcggaagacgtggacacccccccacgaaaaaagaaacggaagcaccgcctgtgggcagcccactgccgaaagatacagctgaagaaagacggaagctcaaaccacgtgtacaattatcagccgtgtgaccatcccagacagccatgcgattcctcttgtccgtgcgttatcgctcaaaatttctgtgagaaattttgccagtgtagtagcgagtgccagaaccggtttcctggatgcagatgcaaggcccagtgcaataccaaacaatgcccctgttacctagccgtgagggagtgtgacccagatctgtgccttacatgtggcgcagcggaccattgggatagcaagaacgtctcgtgtaagaattgctctatacagcgggggtctaaaaaacacctactccttgctccgtctgatgtggctggctggggcatattcatcaaggatccagtgcagaaaaacgaatttattagcgagtactgcggggaaataatctcgcaggacgaggcagacaggcgcggcaaggtatacgacaaatatatgtgcagtttcctgttcaatctcaataacgacttcgtagttgatgcgaccaggaagggaaacaaaatccggtttgcgaatcactcggttaacccaaactgttacgctaaggtcatgatggtgaatggtgaccaccgcatcggtatttttgcaaaacgagccattcagacaggtgaggagttgttcttcgactatagatatagtcaagccgatgcccttaagtacgtgggaatcgagagagagatggagatcccatag

SEQ ID NO: 186612 - DNA, 2124 bp, synthetic construct
  misc_feature 1..2124: note = Description of Artificial Sequence: Synthetic coding sequence
  source 1..2124: mol_type = other DNA
atgggccagaccggcaagaagagcgagaagggccccgtgtgctggagaaagcgggtaaaaagtgagtatatgaggcttaggcagctgaagcggttcaggcgggctgatgaagtgaaaagtatgtttagcagtaacagacagaaaattctggaaaggaccgagatactcaatcaagagtggaaacagcgaagaatccagcctgtccacattctaaccagtgttagcagtctgcggggtacccgagaggtcgaagacgaaacggtgttgcataacattccctacatgggggatgaggtcctggatcaggacggaacattcatagaagaacttataaagaattacgatggcaaagttcatggggaccgagaatgtggctttattaacgacgagatttttgttgagttggtgaacgccttgggacagtataatgacgatgatgacgacgacgatggcgatgacccagaagaacgagaagagaagcagaaggacctggaggaccaccgtgacgacaaagaatctcggccgccccgtaaattcccctctgataaaatctttgaggcaatctccagcatgttccccgacaagggaaccgcggaggagttaaaagagaagtacaaagaactcacagagcaacaactgccaggcgcactgccacccgaatgtaccccaaacatagatggtccgaacgccaagtccgtgcagagggagcagagtcttcattcctttcatactttgttttgtaggagatgcttcaagtacgattgcttcctccacccctttcacgccacccccaacacatataagagaaagaacacagagacagcccttgacaataaaccatgcggaccccagtgctatcagcacttggagggcgccaaagagtttgccgccgccttgactgccgagaggatcaagacaccccctaaaagaccaggtggccgccgcagggggcggcttcctaacaatagttctaggccttctaccccaactattaatgtgctggagagcaaggacaccgacagcgatagggaggccggaactgaaactggcggcgagaataacgataaggaagaagaagaaaagaaggatgagacctcctcctcttctgaagcaaattcccggtgccaaactcccatcaagatgaagccaaatattgagcctcccgaaaacgtggagtggagcggtgccgaggcgtccatgtttcgagtcttgatcggcacctactacgataatttctgcgccatagctcggctgatcgggaccaaaacctgtagacaagtatacgagttcagggtaaaggagagcagtatcatagcgcctgcgccagcagaggacgttgatacaccaccgagaaaaaaaaaaagaaaacaccgcctttgggctgcccactgtagaaaaatacagttgaagaaagacggttccagtaaccacgtttataactatcagccatgtgaccatcctcggcaaccctgcgacagcagttgtccctgcgttatagcccagaacttctgtgaaaaattctgccagtgttcatcggaatgtcagaatcgcttccctggctgccgctgcaaagcacaatgcaatacaaaacagtgcccctgttatttggccgtccgggaatgtgatcctgacctatgtctcacctgcggtgccgccgatcactgggatagtaaaaacgtgtcatgcaagaactgttctatacaaaggggctccaaaaagcacttattattggctccttccgacgtggccggctggggcatcttcatcaaagatcctgtccagaaaaacgagtttatttcagagtactgcggcgaaattatttcgcaagacgaggcagaccggcgcggtaaggtgtacgataaatacatgtgcagtttcctcttcaatctgaacaatgattttgtggtcgatgcaacaagaaaaggcaacaagatccgcttcgcaaaccactctgtgaatcctaattgctatgcaaaggttatgatggtcaatggcgatcatcgaatcggaattttcgcgaagcgggcaatacagacgggcgaagagctgttctttgactatcggtacagtcaggctgacgcactgaagtatgtgggcattgagagggagatggaaatcccttag

SEQ ID NO: 186613 - DNA, 2241 bp, synthetic construct
  misc_feature 1..2241: note = Description of Artificial Sequence: Synthetic coding sequence
  source 1..2241: mol_type = other DNA
atgggccagaccggcaagaagagcgagaagggccccgtgtgctggagaaaaagagtgaagagcgagtatatgcggttgcgccagctgaaaagatttcggagagctgatgaagtgaagtctatgttcagcagtaaccggcagaaaatcctggaacgcactgaaattcttaaccaggagtggaagcaaagaaggatccagcccgttcacatcctgacgtccgtatccagcttgcgcggcacacgcgagtgtagtgtgacaagcgacctggacttcccaacacaagtcattcccctcaaaaccttaaatgcggtggcaagcgtgcccatcatgtacagctggagcccattgcagcagaatttcatggttgaggacgaaactgttctccacaatatcccctacatgggcgacgaggtcctggatcaagacggaacctttatagaggagttgattaaaaattatgacgggaaagtgcacggagatagggagtgcggatttattaatgacgagatctttgttgagctggtcaatgccctaggacagtacaacgatgatgatgacgacgacgacggagacgacccggaagagagggaagaaaagcagaaagatctggaggatcacagggatgataaggaatcccgacctccacgcaaatttccctctgacaagatttttgaagccatctcgagcatgtttccggataagggcaccgctgaggagctcaaagagaagtacaaggagcttacggagcagcagctgcctggcgctttacctccagaatgcactcctaacattgatggaccaaatgccaaatctgtacagcgggagcaaagcctgcacagcttccacacactcttttgcaggaggtgcttcaaatatgactgtttcctacatcctttccatgcgacacctaacacgtataagcggaagaataccgaaactgccctagacaataagccctgcgggccccagtgctaccaacacctcgagggcgcaaaagagttcgcagcagcattaaccgcggagagaatcaaaacaccaccaaagaggcccggaggacgcaggcgagggcggcttcctaacaactcatcaagaccctccaccccaacgatcaacgtgctggagtctaaagacaccgactcagacagggaggcaggtacggaaactggaggagagaataatgataaggaggaagaagagaaaaaggacgagacctctagcagctccgaagcaaatagtaggtgccagacaccaatcaagatgaagcctaacattgagcctcccgagaacgtcgagtggagtggagccgaggcatccatgtttcgtgtgcttatagggacctactatgacaatttttgcgctatcgccaggctgatcggcaccaaaacatgtagacaggtttatgaattcagagtgaaggagtccagtatcattgcgccagctccggccgaagatgtggacacgcccccgcggaaaaaaaaaaggaaacacaggctgtgggccgcccactgtaggaagatccagcttaaaaaggatggatccagcaaccacgtgtacaactaccaaccctgcgatcacccccggcagccatgcgattcctcatgcccctgcgttattgcccagaatttctgcgaaaagttctgtcagtgtagttcagagtgccaaaatcgcttcccaggatgccgatgcaaagcacagtgcaacactaagcagtgcccatgctaccttgcagtccgggaatgcgacccagacttgtgcctaacctgtggcgctgcagaccactgggactctaaaaacgtcagctgcaaaaattgttccatccaacggggctccaagaagcacctattgctcgccccttcagacgtcgccggctgggggatcttcattaaagatccagttcagaagaatgaattcatttcagagtactgtggagaaatcattagccaggatgaggccgaccggcgaggcaaggtatatgataagtatatgtgttcgtttctgtttaacctgaacaacgattttgtggtcgatgcgactagaaagggtaataaaattagattcgccaatcactccgtgaaccctaattgttacgccaaggtgatgatggttaatggggatcacaggattggaatctttgccaaaagggcaatacaaactggcgaggaactgttttttgattatagatactctcaggccgacgcccttaaatacgtgggcatcgaacgagagatggagataccatag

SEQ ID NO: 186614 - DNA, 678 bp, synthetic construct
  misc_feature 1..678: note = Description of Artificial Sequence: Synthetic coding sequence
  source 1..678: mol_type = other DNA
atgtacagctggagccccctgcagcagaacttcatggtggaggacgagaccgtgctccacaacatcccgtacatgggtgatgaggtgctggatcaggatggaacgttcattgaggagctcataaagaattacgacggaaaagtacatggcgaccgtgaatgtggattcatcaatgacgagatttttgtggaactcgtcaacgcactgggccaatacaatgatgacgacgatgacgatgacggggatgatcccgaggaaagggaagagaaacaaaaggatctggaggaccaccgggacgataaggagtcacgacccccccgcaagtttccgtctgacaagatttttgaagcgatctccagtatgtttccagataagggaactgcagaggagctcaaagaaaagtacaaggagttgacagagcagcagcttcccggggctcttcctcccgagtgcaccccaaacatcgacgggcccaatgccaagagcgtccaaagagaacagtcgttacattctttccacaccttgttctgtagacgctgcttcaagtatgactgtttcctgcaccctttccacgctacccccaatacctacaagcgcaagaacaccgaaaccgcactggacaataagccatgcggaccccagtgctaccagcatctgccgctgttacctcggaactag

SEQ ID NO: 186615 - DNA, 2088 bp, synthetic construct
  misc_feature 1..2088: note = Description of Artificial Sequence: Synthetic coding sequence
  source 1..2088: mol_type = other DNA
atgggccagaccggcaagaagagcgagaagggccccgtgtgctggcgaaaaagggtgaagagtgaatacatgagacttaggcaactgaaaaggtttcgcagagcggatgaggttaagtcgatgttttcgtctaatagacagaaaatcttggagagaaccgagatcctcaaccaggaatggaaacagaggcgtatccagccagtacacatcctgacatcgtgtagcgtgacctcagacctcgattttcctacccaggtgatccccttaaagacccttaacgccgtggctagtgttcctattatgtactcctggagccctcttcagcaaaattttatggtggaggatgagaccgtgctgcacaatatcccgtacatgggcgacgaggtgctggaccaggacggaaccttcatagaagaactgatcaagaactacgacgggaaggtgcacggtgaccgcgaatgtggatttatcaacgacgaaatctttgtggagctcgtgaatgccctgggacaatacaatgatgatgatgacgacgatgacggcgacgatccagaggagcgggaggaaaaacagaaagatcttgaagatcatcgcgacgataaggagtctcgccctcccaggaagttccccagcgataaaattttcgaggcaattagctcaatgttccccgataagggcacagctgaggagcttaaagagaagtacaaggagctcacagaacagcagctgccaggcgcactgccccctgagtgtacacccaatattgatggaccgaatgccaagtctgtgcagcgggagcaatctttacatagctttcacaccctcttctgccggcgctgcttcaaatatgattgcttccttcacccatttcatgccacacccaacacatacaagcgtaagaacaccgaaactgccttagacaacaagccctgtggccctcagtgctatcagcacctggagggtgcaaaggagttcgcagcggcactgaccgctgagagaatcaagaccccacctaagcgcccaggcggaagacggcgcggtagactgccaaacaacagctccagaccaagcacaccgacaatcaacgttctggaaagtaaggacaccgatagtgatcgagaagccgggacggagaccggaggggagaacaatgataaagaggaagaggagaaaaaggatgaaaccagctctagtagtgaagctaacagccggtgccagacccccataaagatgaagccaaacatcgaacctcccgaaaacgtcgagtggagcggcgccgaagctagcatgtttagggtgctgattggcacctactacgataatttctgcgcaatagcacggctcattggcaccaaaacctgcagacaggtgtatgagttcagagtgaaagagtcgtccatcatcgcccctgcaccagctgaggatgttgacaccccgccgagaaagaagaaacgaaagcatcggctttgggccgcccattgccgaaagatccagctgaagaagggtcaaaacagatttcccggatgtcgctgtaaagcacagtgtaacactaaacagtgtccctgttatttggctgtgagagagtgcgatcccgatctttgtctgacttgcggagcagctgatcactgggattcaaagaacgtctcttgtaaaaactgcagcatccagcgcggttcaaaaaaacatctcttgttggctccaagtgatgtcgcgggctgggggattttcattaaagatccggtgcagaagaatgagttcatctcggaatattgtggagaaattatctctcaggatgaagccgacagacgcgggaaggtatacgataaatacatgtgctccttcctgtttaacctaaataacgacttcgtggtcgacgccacccgtaagggcaataaaatccgattcgctaaccactcagtcaaccctaattgttatgcaaaagtgatgatggttaacggagaccaccggatcggcatcttcgctaagcgcgctatacagacaggggaggaacttttttttgattacaggtacagtcaagccgatgcactgaagtacgtgggaatagagcgcgaaatggaaatcccgtag

SEQ ID NO: 186616 - DNA, 2088 bp, synthetic construct
  misc_feature 1..2088: note = Description of Artificial Sequence: Synthetic coding sequence
  source 1..2088: mol_type = other DNA
atgggccagaccggcaagaagagcgagaagggccccgtgtgctggcgcaaaagagtgaaaagcgagtatatgagacttcggcagcttaagaggttcaggcgcgcggacgaggttaagtcaatgttctcttccaatcgtcaaaagattttggagagaaccgaaattctgaaccaagagtggaaacagcgcagaatccagccagttcatatcctgactagctgcagcgtcacatccgacttggacttcccgacccaggttattcccctgaaaaccctaaacgctgtggcttccgtaccaataatgtactcatggtcccctcttcagcaaaattttatggtggaagatgagactgtgctgcacaacatcccttacatgggggatgaagttttagaccaagatggaaccttcatcgaggagctgatcaaaaattatgatggaaaagtgcatggggaccgagaatgcgggtttattaacgatgaaatctttgtcgaactggtgaatgcattaggccagtacaacgatgacgatgacgacgacgacggggacgatcctgaagaaagggaagaaaagcaaaaggatctcgaagatcatcgtgacgataaagaatcacggccgcctcgtaagttcccctctgacaagatttttgaagcgatctcatcaatgttcccagacaaaggaacagccgaggaactgaaagaaaagtacaaggagctgactgagcagcaactgcccggtgccctgccgcccgaatgtacaccaaacattgatggcccaaacgcgaaatctgtccaacgcgagcaatccctgcactcatttcatacattgttctgtcgacggtgctttaagtatgattgcttcctgcatccatttcacgcgactcctaacacctacaagcgaaagaacaccgaaactgctctagacaataaaccctgcgggccccagtgctatcagcatttggaaggcgctaaagagtttgccgctgcactaacagcggagagaataaaaaccccgccaaagagaccaggaggtcgtcggcggggacggctgcctaacaactcgtcccggccatccacacctactatcaatgtcctcgagtccaaagatactgacagcgatcgggaggccgggactgagaccggtggcgaaaacaacgacaaagaggaggaggaaaagaaagacgaaacctcgtcatcttccgaagctaattcgcggtgccaaacccccataaagatgaaaccaaatatcgaaccccctgaaaatgtcgagtggtccggggcggaggccagtatgttccgcgtcctgatcggtacatattacgataatttttgcgccatcgcccgtctgatcggaaccaaaacatgtaggcaagtgtatgaattccgcgtgaaggagtcctcaattatcgccccagcaccagctgaggatgtagacactccccccaggaaaaaaaaaaggaaacatagactgtgggcggcccactgccgcaaaattcagctcaagaagggacagaacagatttcccggctgtcgctgcaaggcgcagtgcaatacaaaacagtgtccttgttatctggccgttcgggagtgcgaccccgatctttgcttgacatgtggtgccgcagatcactgggattcaaagaacgttagctgcaaaaactgctctatacaaagaggttcaaagaagcatcttttgcttgcccccagtgacgtggctgggtggggtatctttatcaaggatccagtacagaaaaacgagttcatttcggaatattgtggtgaaataatctcccaagacgaagctgacaggcgcggaaaggtctatgacaagtatatgtgctcttttctttttaatttgaataatgacttcgtggtggacgctacacgcaaaggcaacaagattaggttcgctaatcactctgtcaatcccaattgttacgccaaggtgatgatggtgaacggggatcacagaatcggcattttcgccaagcgtgcaatacagacaggagaagagctgtttttcgactaccggtacagccaggcagacgctcttaaatacgtcgggatcgagcgcgaaatggaaatcccctag

SEQ ID NO: 186617 - DNA, 2214 bp, synthetic construct
  misc_feature 1..2214: note = Description of Artificial Sequence: Synthetic coding sequence
  source 1..2214: mol_type = other DNA
atgggccagaccggcaagaagagcgagaagggccccgtgtgctggcgcaaacgagtcaagtcggagtatatgcgccttcgtcagttaaaaagatttcggagggccgatgaggtcaaaagcatgttttccagcaatagacagaagattctcgagcgcacagaaatcctcaatcaagaatggaagcagcgacggatccagcccgtgcacattcttacctcctgttcagtaacatccgatctcgactttcccactcaggtcatcccacttaagacactaaacgcagtcgcctcggtgcccattatgtacagctggagtcccctgcaacaaaacttcatggtggaggacgagactgtccttcataatataccctacatgggcgatgaagtccttgatcaagatggaaccttcattgaggaattgatcaagaactatgacggcaaggtacatggagaccgggaatgtggcttcatcaatgatgagatctttgttgaactcgttaatgcactgggacagtataatgacgacgacgacgacgatgacggggacgacccggaggaacgggaggagaagcagaaggatttagaggatcatcgcgacgacaaggaatctcgcccaccacggaagtttccatctgacaaaatcttcgaagctatctcctccatgttcccagataagggaaccgctgaagaattgaaagagaaatacaaggagctgacagagcaacaactgcccggggccctgcctcccgagtgtacgccaaacatcgatgggccgaacgctaaatccgtgcagagagaacagagcctgcattccttccataccctgttctgcagacgatgctttaaatatgactgcttcctgcacccctttcatgctacccccaacacgtacaagaggaagaacacagaaacagcactggacaacaagccgtgtgggccccaatgctatcagcatctcgaaggtgcgaaggagtttgctgccgctttgacagccgagcggataaagacaccacctaaacggcctggtggacggcgtagaggacgactgcccaacaactcaagccgcccctctactccaactatcaacgtgctagagtctaaggacaccgattcagatagggaggccggaaccgagacagggggcgagaataacgataaagaagaggaagaaaagaaagatgaaacaagttcgagcagcgaggcaaactctagatgtcaaacccccattaagatgaaaccaaacatcgaacctcccgagaacgtggagtggtcaggcgccgaggcctctatgttccgggttctaattgggacttactacgacaacttctgcgcaattgccagattgattggcactaagacctgtcgtcaggtttatgagttcagagtgaaagagtcctccataatcgctcctgcgcctgcggaagatgtggatactccacctcgtaaaaaaaagagaaagcatcgcctttgggcagcccattgcaggaaaattcaactgaagaaagacggcagcagcaatcacgtctacaattatcaaccatgtgaccaccctagacagccatgcgactccagctgcccctgtgtcattgctcagaatttctgcgagaagttttgccagtgcagttctgaatgccagaatcgtttcccaggatgtaggtgcaaagctcagtgtaacactaagcagtgtccatgttacctggcagttagggagtgcgacccagatctctgtctcacatgcggggctgcggatcattgggactccaagaacgttagctgtaagaactgctccattcagcgggggtcaaaaaagcatcttttactggccccatctgacgtggctggatggggtatctttatcaaggatcccgtgcagaaaaatgaatttatctctgagtactgtggcgagataatttcacaagatgaagcagaccggaggggtaaagtttacgataagtacatgtgcagctttttatttaatctcaacaacgatttcgtggttgatgctacccgaaaaggaaacaagattcgtttcgcaaaccattctgtgaaccccaactgctatgctaaagtgatgatggtgaacggggaccatcgcataggaatatttgcaaaacgcgctattcagacaggtgaagaactgtttttcgattatagatacagtcaagcagacgctctcaaatatgtaggcattgaaagagagatggagatcccctag

SEQ ID NO: 186618 - DNA, 939 bp, synthetic construct
  misc_feature 1..939: note = Description of Artificial Sequence: Synthetic coding sequence
  source 1..939: mol_type = other DNA
atggccgccctgtacgcctgcaccaagtgccaccagcggttcccctttgaagcgctctcccaagggcaacagctgtgtaaagagtgtaggatcgctcatccagtcgtcaagtgtacatattgtaggacagaataccaacaggagcggctggagtgcaatggaaccatttcggcccattgcaatctgcacctaccaggcagcagcgatagtcccgctagtagttccagggtagctggaattacagggatcaagacgaacactatttgtaaaaaatgcgcccagaacgtgcagttgtacggaacccccaagccctgccagtactgcaatattatagctgcattcatcggtaacaagtgccagcgctgtactaattcggagaagaaatacggccccccctactcttgcgagcagtgcaagcaacaatgcgcattcgacagaaaagatgatcgtaagaaagttgacgggaagctattgtgttggctttgtacactcagctacaagagggtcctgcagaagacaaaagaacagcgcaaacatctttccagcagcagccgtgccggacaccaggaaaaagaacaatattcacgcctgagcggcgggggtcattacaacagcttcagtccagacttggccttggacagccccggcacagatcatttcgtaattatagctcagttgaaggaagaagtcgccacactgaagaagatgctgcaccagaaagaccagatgattctagagaaggaaaaaaaaattacagagctgaaagctgacttccagtaccaagagtcccaaatgcgagccaagatgaatcaaatggaaaagacacataaggaggtaacagaacagctccaagcaaagaatagggagctactaaaacaagcggctgccttgtccaagagcaagaagtcagaaaaatctggtgcaatcacctctccatag

SEQ ID NO: 186619 - DNA, 861 bp, synthetic construct
  misc_feature 1..861: note = Description of Artificial Sequence: Synthetic coding sequence
  source 1..861: mol_type = other DNA
atggccgaggacggcgaggaggccgagttccacttcgccgccctgtatatatccggacagtggcctcggctccgggctgataccgatctccagcggctcggctctagcgctatggcgcctagccggaagttctttgtgggaggtaactggaagatgaacggcagaaaacagtctctcggtgaactgattggtaccctgaacgcagccaaggttcctgccgacacagaagtcgtatgtgccccaccaacagcttacattgatttcgctagacaaaagctcgatccgaaaattgccgtggctgcgcaaaactgctataaagtgaccaacggggcgttcacaggggaaatctcccccgggatgatcaaggattgtggagctacctgggtggtccttggccactccgagcgtcggcatgtttttggtgagagcgatgaactcatcgggcagaaggtcgcacatgctttagcagaggggctgggggtaatcgcctgcatcggagagaaactcgatgagcgggaagccggtatcacagagaaggtggtattcgagcaaaccaaggtgatcgccgacaatgtgaaggactggtccaaagtggtcctcgcctacgaaccagtgtgggcgatcggaacggggaaaacagctacccctcaacaagcccaggaggtgcatgagaagctgcgcggttggctaaaatctaacgtttctgacgcagtagcgcagtccacaagaataatttatgggggcagcgtaaccggcgctacctgtaaggagcttgcctcccagcccgatgtggacgggttcctcgttggcggcgcctcactcaaacccgaatttgttgatattattaatgccaaacagtag

SEQ ID NO: 186620 - DNA, 1305 bp, synthetic construct
  misc_feature 1..1305: note = Description of Artificial Sequence: Synthetic coding sequence
  source 1..1305: mol_type = other DNA
atgagcatcgagaagatctgggcccgggagatcctggacagccggggcaaccccactgtagaggttgacctgtacacggccaagggcctttttagggccgctgtgccttccggcgcctccaccggtatctacgaggctctggaactcagggacggtgataaacagagatatctgggaaaaggggtgctcaaagcggtggaccatatcaacagtaccatcgcccccgctttgattagttccgggctgagtgttgtcgaacaagagaagctggataatctgatgttagagctggatgggactgagaataaaagcaaatttggggcgaatgccattcttggggtttcattggccgtttgtaaagcaggggccgcagaaagggaactcccattatatcggcacattgcgcagctcgccggcaatagcgacctgatcctgccagtccccgcgttcaatgtgattaatggcggatcgcacgctggaaacaaactggcgatgcaggaattcatgattcttcccgtaggagccgaatccttcagggatgccatgcgtttaggagccgaggtctaccacacactgaagggcgttatcaaagataagtacggaaaggacgccacaaacgtgggtgacgaaggagggttcgctcccaatattctggaaaacagtgaggcactcgagttggtgaaagaagcaatagataaagccggctacaccgagaaaatcgtgattgggatggatgtcgcggcaagtgaattctaccgggatggtaaatatgatctcgactttaagtcacccacagacccctccaggtatatcaccggggatcagctgggagccttataccaagacttcgttcgcgactatcccgttgtatccatcgaggaccccttcgaccaggatgactgggccgcctggtctaaattcacagcaaacgtcggaatccagatcgtgggtgacgacctgacggtcactaatccgaagcgcatcgaacgcgctgtcgaagagaaagcctgcaattgtcttctcctgaaggtgaatcaaataggcagtgttactgaagccatccaagcttgcaaactcgcccaagaaaatggatggggagtgatggtgagtcaccgaagcggtgagaccgaggataccttcattgcagacttggtggtgggactgtgtacggggcaaatcaaaacgggggcaccgtgcagatccgaaagattagccaaatataatcagcttatgagaatagaggaggagttgggggatgaagctcgcttcgcaggtcataattttcgaaacccatctgtgctctag

SEQ ID NO: 186621 - DNA, 1176 bp, synthetic construct
  misc_feature 1..1176: note = Description of Artificial Sequence: Synthetic coding sequence
  source 1..1176: mol_type = other DNA
atgagcatcgagaagatctgggcccgggagatcctggacagccggggaaatccaacggtggaagttgacctctatacagccaaaggtctgtttcgcgccgctgtccccagtggagcttccaccggtatctatgaagccctcgaattgagggatggtgataaacaaaggtacctaggcaaagccaagtttggggctaatgcaatactcggcgtatctctggccgtgtgtaaggctggcgccgccgaacgcgaacttcccctgtacaggcacattgcccaactagccggcaacagtgatctcattctgcctgttccagcgtttaacgtcataaatggtgggagccacgccgggaataaacttgccatgcaagagtttatgatcttaccagtcggtgccgagtccttccgcgacgctatgaggcttggagcggaggtctaccatactttaaaaggagtgattaaggataagtacggcaaagacgcaaccaacgtaggcgatgaaggcgggttcgcccctaacattttggagaatagtgaagccctggagctggtcaaggaggctatcgataaagccggatatacagagaagattgtaataggtatggacgtggcagcctccgagttttaccgggacggtaagtacgacctcgactttaaaagccctaccgatcctagccggtacataacaggggaccaactgggtgccctgtaccaggattttgttcgtgactaccctgtcgtgagcatcgaagacccatttgaccaggatgactgggctgcatggagcaagttcaccgccaatgtgggtattcaaatcgtgggtgatgacctgaccgtcactaaccctaagcggatcgaaagggctgtggaagaaaaagcctgtaactgtctgctgctgaaagttaatcagatcggtagcgttacagaggctattcaggcatgcaaactggcccaggagaatggatggggtgtgatggtgtcgcaccgctcaggagaaacggaagatacattcattgccgatctggtagtcggcctgtgcaccgggcaaattaaaaccggcgcaccttgtcgatcagaacgacttgctaaatacaatcaactgatgaggatcgaagaagagctaggggatgaggcacggtttgcaggtcacaacttccgaaatccctcagttctctag

SEQ ID NO: 186622 - DNA, 1305 bp, synthetic construct
  misc_feature 1..1305: note = Description of Artificial Sequence: Synthetic coding sequence
  source 1..1305: mol_type = other DNA
atgagcatcgagaagatctgggcccgggagatcctggacagccgggggaacccgacagtggaggtggatctgtacaccgcgaaagggctattccgggccgccgttccttcgggcgcgtctactgggatctatgaagccttggaactaagagatggagacaagcaacggtacctcggcaaaggtgtgttgaaagccgtcgatcacataaactccaccattgcgcccgccctaatcagcagcggtctctcagtggtagaacaagagaagctcgataacctcatgctggagttggatggcaccgagaacaagtcaaagtttggggccaatgccatcctgggagtgtctctagccgtttgtaaggctggcgctgccgagcgtgagttgccgctgtacagacatattgcccagctagccgggaattcggaccttattcttcctgttccagcctttaacgtgataaacggaggatcgcacgccggtaacaaactagccatgcaggagtttatgatattacccgtgggagccgagtctttccgcgacgcaatgcgcctgggagccgaggtataccataccctcaaaggtgtgatcaaagataaatatggcaaagacgcgactaacgtgggcgacgaaggcggatttgcgcccaatatattggaaaacagtgaggcattggagctcgttaaggaagcgattgataaagccgggtacacagagaagatagtaattggaatggacgttgcggcctctgagttctatcgggatgggaaatatgatctggactttaagagccccacggatccttcacggtatatcaccggagaccagttgggcgcactgtatcaggactttgttagggattatccggtcgtgtccatcgaggaccctttcgatcaggacgactgggctgcctggagcaagttcacagccaacgtcggcattcagatcgttggtgacgaccttacagttaccaacccaaagaggatagaacgtgctgtcgaagaaaaggcttgtaattgccttctgcttaaggtgaatcagattggcagcgtcaccgaggccatccaggcgtgcaaattggcacaggagaacggttggggggtgatggtatcacacaggtctggagagactgaggatacctttatagccgatctagtggtcggactgtgtaccgggcagattaagacaggagccccgtgcaggagcgagaggctggctaaatacaaccaactgatgagaatcgaagaagagttgggcgatgaggcaaggtttgctgggcacaactttaggaacccttctgtcctttag

SEQ ID NO: 186623 - DNA, 1176 bp, synthetic construct
  misc_feature 1..1176: note = Description of Artificial Sequence: Synthetic coding sequence
  source 1..1176: mol_type = other DNA
atgagcatcgagaagatctgggcccgggagatcctggacagccgggggaaccccacggtggaggtggacctgtacactgcgaaaggtcttttccgcgctgcagtgccatccggcgcttcgaccggcatttacgaggccctagagctgagagacggagacaagcaacgatatctaggaaaggctaaattcggtgccaatgcgatactcggcgtctccctggcagtgtgtaaggccggggccgccgaacgtgaactccctctgtatcgccacatcgcccagctcgccggcaactcagatttgatactccctgtcccagcattcaacgtgataaatggcggcagccatgccgggaacaagctggccatgcaagagttcatgatcttacccgtcggggctgagagctttcgtgacgcaatgcgtctgggcgctgaggtgtaccacacactgaaaggtgtgatcaaggataaatacggtaaagacgcaaccaatgtgggtgacgaggggggatttgcaccaaatatcctggaaaacagcgaggctctggagctggtgaaggaggccattgataaagccggttacactgaaaagatcgtcattggcatggatgtcgctgcctcagagttttacagggacggcaagtatgatctggatttcaagagccctactgaccccagccggtacattacgggggatcagcttggggcactctaccaggacttcgtacgagattatcctgttgtgtcgattgaggaccccttcgaccaggacgactgggctgcttggtcaaaatttacagcgaacgtagggattcagattgtaggtgatgacctgactgttacaaaccccaagcgtatcgagagagctgttgaggagaaggcgtgtaactgcctgctgcttaaggtgaaccagatcggttccgtgacagaagcaatccaggcctgtaaactcgcacaagagaacgggtggggcgttatggtatcccatagaagcggggaaacagaagatactttcatcgccgacctcgtggtcggactgtgcaccggccaaatcaagaccggcgctccctgcagatcggaacggctggccaaatacaatcaacttatgcgaatcgaggaagaactgggtgacgaggccagattcgccggacacaacttcagaaacccttcggtcctgtag

SEQ ID NO: 186624 - DNA, 1176 bp, synthetic construct
  misc_feature 1..1176: note = Description of Artificial Sequence: Synthetic coding sequence
  source 1..1176: mol_type = other DNA
atggccatgcagaagatcttcgcccgggagatcctggacagccggggcaatccgacagtggaagtcgatctgcacacagcaaaagggcggttcagggcagctgttcctagcggggctagtaccgggatttacgaggccctggagctaagggatggggataagggcagatatcttggaaaggctaaatttggcgcgaatgcaatcctgggcgtgagtctggccgtgtgtaaagccggggcagctgaaaaaggagtccctctctatcgacatatagctgacctcgccgggaatcctgatctgattttacccgttccagcttttaatgttatcaatggcgggagtcacgctggcaacaaacttgctatgcaggaatttatgatcctgcccgtgggtgcctcctcattcaaggaggccatgcggataggagctgaagtctatcatcacttgaaaggtgtaataaaggcgaaatacggcaaagatgccaccaacgtcggagatgagggtggtttcgctccaaatatcctggaaaataatgaagcccttgagctcctgaagacagccatacaggccgctggataccctgacaaagtggttataggcatggacgtagcagcaagcgaattctatcgcaacggaaagtacgacctcgacttcaaaagccctgacgatcccgctaggcacatcacaggtgagaagttgggggagttatacaagagtttcataaaaaactatcccgtggtctcaatagaggatcctttcgaccaggatgactgggcaacttggacttcatttctgtctggcgtcaacatacaaattgtgggagatgatctgactgtgacaaacccaaagagaattgctcaggctgtcgagaagaaagcatgcaattgcctactcttaaaggtcaatcagatcggtagcgtcaccgagagcatccaggcctgtaagctcgcacaaagtaacggttggggtgtcatggtttcccacagatccggcgagaccgaagatacctttattgctgacctggttgtgggactgtgtacaggccaaatcaaaacgggagctccatgccgctccgaacgcctagctaaatacaaccagctgatgagaattgaggaagcccttggagacaaagctattttcgccggccgtaaatttaggaatcccaaggcaaagtag

SEQ ID NO: 186625 - DNA, 1305 bp, synthetic construct
  misc_feature 1..1305: note = Description of Artificial Sequence: Synthetic coding sequence
  source 1..1305: mol_type = other DNA
atggccatgcagaagatcttcgcccgggagatcctggacagccgggggaatccaaccgtggaggtagacttgcacaccgcgaaagggaggttccgggcggctgtgccctctggcgcatccactgggatatacgaggcccttgagctcagggacggggataagggccggtacttaggcaagggtgtcctgaaggctgtggagaacataaataatacactaggccccgctttactgcagaaaaaactgtcagtggtggatcaggaaaaggtcgacaaattcatgatagagttggacgggaccgagaacaagtccaaatttggcgctaacgctattctaggcgtatcactcgcagtgtgcaaggctggcgctgcagagaagggcgttccactgtatcgacatatagccgaccttgccggtaatccagacctgatccttcccgtcccggctttcaacgtcattaacggaggctcacacgctgggaacaagctggctatgcaagaattcatgatcctcccagtgggggccagctcctttaaagaagctatgcgtatcggtgcagaggtgtatcaccatctgaagggtgtgataaaagccaaatacggaaaggacgcaactaacgtcggcgatgaaggtgggttcgcccctaatatcctcgagaataatgaggcccttgagttgctcaagacagcaattcaggcagcaggctaccccgacaaagtggtgatcggtatggacgttgctgcgagcgagttctacagaaacggaaagtacgatctggattttaagtccccagacgaccccgccaggcacattacgggcgagaagttgggggaactgtacaagagctttatcaaaaattacccggtggtgtctatcgaagacccctttgatcaggacgactgggcaacctggaccagttttctgagcggcgtgaacatccagatcgtcggtgacgatttgaccgtgacaaaccctaagcgcatagcacaggccgtggagaagaaggcttgcaattgtctcctactgaaggtcaaccagatcggctctgttactgagagcatacaggcttgtaagctggcgcagtctaatggttggggcgtgatggtttcccaccgctcaggagagactgaagacaccttcatagcagacctcgtggtgggcctgtgtaccggtcaaattaaaactggagcaccctgcaggtccgaacgcttagccaagtataaccagctgatgcgcatcgaggaggctttgggcgataaagctatcttcgcgggacgcaagtttaggaatccaaaggccaagtag

SEQ ID NO: 186626 - DNA, 1305 bp, synthetic construct
  misc_feature 1..1305: note = Description of Artificial Sequence: Synthetic coding sequence
  source 1..1305: mol_type = other DNA
atggccatgcagaagatcttcgcccgggagatcctggacagccggggcaatcctaccgtagaagtggaccttcatacggcgaaggggaggttcagggcggccgtcccatctggtgcgtccacaggcatttacgaggccttggaactcagagatggggataaaggccgctatctgggcaagggtgtactgaaggccgtcgagaacatcaataataccctcgggcccgctttgttgcagaagaagctgtccgttgtggatcaggagaaagtggacaagtttatgatagagctggacgggacggagaacaaaagtaagtttggtgccaatgccattctaggcgtcagcctcgccgtatgcaaagccggcgcagctgaaaaaggggtgcctctgtatcggcatattgccgacctcgctgggaatccagatctaattttgccagtgcccgcattcaatgtgattaatggtgggtcccatgccggcaataaacttgccatgcaggagttcatgatcttgccagtcggcgcaagtagcttcaaggaggcgatgcggataggcgctgaggtgtaccaccacctcaaaggagtgatcaaggctaagtatggaaaggacgccaccaacgtcggcgatgaaggagggttcgcccctaacatattagagaataatgaggctctcgagctcctcaagacagccattcaggcggctggttacccagataaggttgttatcggcatggatgttgctgcttctgagttttatcgcaacggcaaatacgacctcgacttcaagagtcctgacgaccccgctagacacattactggggagaagctcggcgagctgtacaagagcttcataaaaaattacccggtggtatcaatcgaggatccttttgatcaggatgactgggccacctggacatcattcctgagcggcgtgaatattcagattgttggcgacgacctgacagtgacgaatcccaagaggatcgctcaggctgtggaaaagaaagcctgcaactgtttgctgctcaaggtaaatcaaatcggatcagtgacggaaagcatccaggcctgcaagttggcccagagcaacggctggggcgtcatggtgtcacatcgttcaggggaaaccgaggatacttttatagccgatttggtggtggggctgtgcacaggccaaataaagaccggtgcaccatgccggtctgagcggttggctaagtataaccagctgatgagaattgaggaggccctcggtgataaggccattttcgctggccgcaagttccggaaccctaaggcgaaatag

SEQ ID NO: 186627 - DNA, 852 bp, synthetic construct
  misc_feature 1..852: note = Description of Artificial Sequence: Synthetic coding sequence
  source 1..852: mol_type = other DNA
atggccatgcagaagatcttcgcccgggagatcctggacagccgggggaatccaactgttgaagtggacctgcacaccgcgaaggggagattcagagccgccgtccccagtggtgcctccacgggtatttacgaggcgctcgagttgcgcgatggcgacaaaggacggtacctgggcaaaggcgtgttaaaagccgtcgaaaatatcaacaacactctgggtcctgcattgctgcaaaagaagctgtctgtcgttgaccaggagaaggtggacaaattcatgatagagctcgacggaactgaaaataaatctaaatttggcgctaacgcaatcctgggcgtctccctggccgtatgcaaagccggcgctgccgaaaagggcgttcctctgtaccgccacatcgccgatttggcaggcaatcctgacctaatcctgcccgtccctgcctttaatgtgattaatggaggttcccatgcgggcaataagctcgctatgcaggaatttatgatcctgcccgtgggcgcttcctcatttaaggaagccatgaggattggagcagaagtctatcaccacttaaagggggttattaaagccaagtatggtaaagatgccacgaacgttggagatgagggagggtttgctcctaacatactcgagaacaacgaggctctggagttgctgaaaactgcaattcaggccgcaggttacccggacaaggtggtgatcgggatggacgtcgccgcttcagagttttacagaaatggaaagtacgacctggatttcaaaagtcccgacgatccggcgcgccacatcactggcgagaagctgggtgagctctacaaatcgttctag

SEQ ID NO: 186628 - DNA, 465 bp, synthetic construct
  misc_feature 1..465: note = Description of Artificial Sequence: Synthetic coding sequence
  source 1..465: mol_type = other DNA
atggccatgcagaagatcttcgcccgggagatcctggacagccgggggaaccccaccgtggaggtggatctccacacggctaaggggcgttttagggcggcagtcccatccggagcttcaaccggcatttacgaggccctggaattacgcgatggggataagggcaggtatctgggcaagggggtcctcaaggccgttgagaatattaataatacgctcggtcccgctctcttgcagaagaagctgtctgtggtggatcaggagaaagtggacaaattcatgatcgaactggacggcacagagaacaagagtaaatttggagctaacgccattctgggagtgagcttggccgtgtgtaaagccggtgcggctgagaaaggcgttcccttatacagacacatcgccgatttggccggcaatccggacctgattctgccggtgcctgccttcaatgtgattaattag

SEQ ID NO: 186629 - DNA, 447 bp, synthetic construct
  misc_feature 1..447: note = Description of Artificial Sequence: Synthetic coding sequence
  source 1..447: mol_type = other DNA
atggccatgcagaagatcttcgcccgggagatcctggacagccggggtaaccctacagtagaggtggacctccataccgcgaaagggcggttccgcgccgcagttcccagcggggccagcaccggcatctatgaggctttagaacttcgcgatggtgataaaggcaggtatctcggaaaaggtgtgctgaaagcagtcgagaacattaacaacactctgggccccgcgctgctacagaagaagctgtctgtggttgaccaggagaaggtcgacaagttcatgattgaactcgatggaacagagaacaaaagcaagtttggggcaaatgcaattctgggggtgagcctggcggtctgcaaggctggcgcagccgagaaaggggttcctttgtatcgtcacatcgcagatcttgccggaaatcccgatcttatactgccggttccttag

SEQ ID NO: 186630 - DNA, 1332 bp, synthetic construct
  misc_feature 1..1332: note = Description of Artificial Sequence: Synthetic coding sequence
  source 1..1332: mol_type = other DNA
atggtgcggggccggatcagccggctgagcgtgcgggacgtgcggttccccacatcactggggggtcacggtgccgacgctatgcacactgatcccgactacagcgccgcttacgtggttatcgagacagacgcagaagatgggataaaaggttgcggcattaccttcacccttggcaaaggaaccgaggtcgtcgtctgtgctgttaatgccctggctcaccatgttctcaacaaggatctgaaggatatcgtcggtgacttccgcgggttctataggcagttaacaagcgatggccagctgaggtggataggacctgagaagggggtggtgcatctcgccacagccgcagtgctgaatgccgtgtgggatctgtgggctaagcaggaaggcaagcccgtgtggaagcttttggtcgacatggacccccggatgttggtgtcgtgtatagatttccggtacattacggatgtgctcaccgaagaggatgcactggagatactacagaagggacagattgggaaaaaagaaagggagaaacaaatgttggcccaggggtatcccgcgtataccacctcttgcgcatggctgggatatagcgatgacactctcaagcagctgtgcgctcaggcgcttaaagacggttggaccaggtttaaggtcaaagtgggcgccgacctccaggacgacatgcgacggtgccaaattatcagggacatgataggtccagagaaaaccctgatgatggatgccaaccagagatgggacgttcccgaagccgtagaatggatgagcaagctggctaagtttaaaccgctgtggattgaggagccgaccagtcctgatgatatactcggacacgctactatcagcaaagccttagtgcccctcggcattgggatcgcaacaggagagcagtgccacaatcgcgttatatttaagcagctgctccaggccaaggctcttcaattcctgcagattgacagttgtcggctgggatccgttaacgagaatctgtcagttctcctgatggcaaaaaagttcgaaattccagtgtgcccccatgcaggcggagtgggactctgtgaactcgtccaacacctgatcatctttgattacatttctgtcagtgcatccctggagaaccgagtctgtgaatatgtagaccaccttcacgaacacttcaaatatccagtgatgatccaaagggcctcttatatgccaccaaaagaccctggctattcgaccgaaatgaaggaggagagcgtgaaaaaacatcagtatcccgacggggaggtgtggaaaaaattgctgccagcacaggaaaactag

SEQ ID NO: 186631 - DNA, 642 bp, synthetic construct
  misc_feature 1..642: note = Description of Artificial Sequence: Synthetic coding sequence
  source 1..642: mol_type = other DNA
atgcggcggtgccagatcatccgggacatgatcggccccgagaagaccctcatgatggacgccaaccagcgttgggatgtacccgaagcggtggaatggatgtccaaactcgctaagtttaagcccctctggatcgaagagcccacatcaccggatgacattctgggccacgctacaatatctaaggctcttgttccgctcgggataggtatcgcaacaggggagcagtgtcataatagggtaatcttcaaacagctactccaggccaaggcactgcaattcctgcagatcgactcctgtaggctcggctcagtcaacgagaatttaagcgtactgttaatggccaaaaagtttgaaatccccgtgtgtccgcatgccggaggtgtcggcctctgtgagctggtccagcatttaatcatatttgactatatatcagtaagcgcttcacttgagaacagggtgtgcgaatatgtcgaccatttgcatgaacactttaaatacccggtgatgattcaaagagcttcttacatgccacctaaagacccagggtattccactgaaatgaaagaagagagcgtgaagaagcaccagtatccagacggggaagtctggaagaagttactcccagctcaagagaattag

SEQ ID NO: 186632 - DNA, 1353 bp, synthetic construct
  misc_feature 1..1353: note = Description of Artificial Sequence: Synthetic coding sequence
  source 1..1353: mol_type = other DNA
atggtgagcgccgacgccatggtgagcgccgacgccatggtgagcgctgatgcaatggtctccgcggacgccatggtgtcggccgacgccatggtgtccgccgacgccatggtcagcgcagatgccatggtcagcgctgacgcgatgcatacagacccagactattccgccgcttatgtggtgattgaaactgatgccgaggacggcatcaagggatgtggaattactttcacattgggcaagggtacggaggtggtagtctgcgctgttaacgcattggcacatcacgtgctaaacaaggatctgaaagatatcgttggcgattttcggggcttttataggcagctgacctcagatggccaactcaggtggatcggccctgagaaaggtgtcgtgcatctggcgactgccgccgtccttaacgccgtttgggacttgtgggcaaagcaggagggtaagccagtctggaagctgcttgtcgacatggacccccgcatgctggtctcttgcatagatttcaggtacattacagatgtattgacagaagaggacgccctggaaattttgcaaaaggggcaaataggcaagaaggaacgtgagaagcagatgctcgcacagggataccctgcatacactacatcatgcgcctggctgggatacagcgacgacacactcaagcagctgtgtgcacaggctcttaaagatgggtggactcggttcaaggtgaaggtaggcgctgacctgcaagatgatatgaggcgatgccaaatcatccgggacatgattgggccggagaagacactcatgatggatgctaatcagcgctgggacgtgcctgaagctgtagagtggatgtccaaactggctaagtttaagcccttatggatagaggaacccaccagcccagatgacattttgggccatgctacaatctccaaatgtcacaacagagtcatttttaagcagctcttgcaggccaaagccctgcagtttctgcagattgatagctgcagactcggcagtgtaaatgaaaatttgagtgtcctgcttatggccaagaagtttgagatacccgtatgtcctcacgccggcggcgtggggctgtgcgagttggttcagcatctcatcattttcgactatatcagtgtgtctgcaagccttgaaaaccgcgtgtgcgagtacgttgaccacctgcacgagcatttcaagtaccctgtcatgatccaacgggcgtcttatatgcctcccaaagatcctggttatagtacagaaatgaaggaggagtccgtgaaaaaacatcagtatcccgacggcgaggtgtggaagaaactgctgcctgcccaggaaaactag

SEQ ID NO: 186633 - DNA, 1086 bp, synthetic construct
  misc_feature 1..1086: note = Description of Artificial Sequence: Synthetic coding sequence
  source 1..1086: mol_type = other DNA
atgcagaagatggagagccggggcgtggagctgcccagcctgtgggagaaggctttgaaactgatagggcccgagaaaggagtggtccatctagccactgctgccgttcttaatgctgtgtgggacctatgggccaagcaggaaggcaaaccagtttggaagctgcttgtggacatggaccctaggatgctcgtgtcctgtatagattttcgatacattaccgacgtcctgacagaagaggacgccctcgagatcctacagaaaggccagattgggaaaaaggagagggagaaacagatgctcgcccaggggtaccctgcatacactaccagttgtgcctggcttggatactccgatgatactctgaagcaactctgcgcccaggctctgaaagacggctggacaagattcaaagtcaaggtcggcgctgatctgcaggacgacatgcgcagatgtcagatcatccgggacatgatagggcccgaaaaaaccctgatgatggacgccaatcaacgatgggatgttcccgaagccgtcgagtggatgtctaagctggctaaatttaagcccctttggatcgaggagccaacatctcccgatgacatcctggggcatgctacaatctcaaaagcactcgtgccattgggtatcggcatcgcaactggcgagcagtgccacaaccgtgtgatcttcaagcagctgcttcaggcaaaggcacttcagtttctacagattgacagctgtcgactcgggtctgttaacgaaaacttgagtgtgctgctgatggctaagaagttcgaaattcccgtttgccctcatgctggcggtgtagggctatgtgaactagtgcagcacctgataatctttgattatatctctgtgtccgctagcctcgagaaccgggtctgcgagtatgtggatcatcttcacgagcactttaagtacccagtgatgatacagcgggcatcttatatgccccctaaggacccgggttacagcaccgagatgaaggaagagtcagttaagaaacaccaatatccagacggcgaggtgtggaagaagctattgccagcgcaagagaattag

SEQ ID NO: 186634 - DNA, 429 bp, synthetic construct
  misc_feature 1..429: note = Description of Artificial Sequence: Synthetic coding sequence
  source 1..429: mol_type = other DNA
atggtgcggggccggatcagccggctgagcgtgcgggacgtgcggtttccaacatccctgggggggcacggtgctgacgcaatgcatacagatcctgactacagcgcggcctacgtggttattgagactgacgcggaagacgggatcaaagggtgcgggattacctttactttaggcaagggtactgaggtcgtggtatgtgctgtaaatgccctggcgcatcacgtgctgaacaaggatctgaaagatatcgttggagatttcagaggtttctaccgccagctgacctcggacggtcagttgaggtggataggcccggaaaagggggtcgtgcatctcgcaacagctgccgtccttaacgcggtatgggacttgtgggcaaagcaggaggggaagcctgtttggaagttgttagtcgacatgggctag

SEQ ID NO: 186635 - DNA, 1392 bp, synthetic construct
  misc_feature 1..1392: note = Description of Artificial Sequence: Synthetic coding sequence
  source 1..1392: mol_type = other DNA
atggccaccgtgaccgccaccaccaaggtgcccgagatccgggacgtcacaaggattgaacgcatcggggcacatagtcatataagagggctgggccttgatgacgccctcgaacctagacaggctagccaggggatggttggccagctggccgccagacgtgcggcaggggtggttctggagatgatccgcgaaggcaagattgcaggcagggcagttcttattgcaggccaacctggaacgggtaagaccgccatcgccatgggaatggctcaagcactgggacccgacacccccttcactgctatcgccgggtctgagatcttctccctggagatgtctaagaccgaggcactaactcaagctttcagacggagtattggggtgaggattaaggaagagaccgaaattattgaaggcgaggttgtcgagattcagatcgatcggcctgctactggcaccggatcaaaggtaggcaagctaacccttaaaacgactgagatggaaacaatctatgatctgggaactaagatgatcgagagtcttacaaaagataaggtccaggcaggggatgttattaccattgataaagccacagggaaaatcagtaaactgggcagatcgtttactagggccagggattacgacgcgatggggagccagacaaagttcgtgcagtgccccgacggggagctgcaaaagcgcaaggaagtcgtccataccgtcagcctgcatgagatagacgtaattaacagccgtactcagggcttcctggcattattttctggggatactggagagatcaagtccgaggtgagggagcaaattaatgctaaggtcgctgagtggagagaagaaggaaaggcggaaattattcccggggtgctgttcatcgatgaggtgcacatgctcgatattgagtccttcagctttttaaacagggccctggagagcgatatggcccctgtgctcattatggctactaatcgcgggatcacccggatccgcggaacatcataccagtcaccacacggcattcccattgatttattggatcggctgcttatagtgtctacaaccccctactcagaaaaggacaccaaacagatccttcgtattcgctgcgaagaggaggacgttgagatgagcgaggatgcatacaccgtcctcacccgcataggtctggaaacctccttaagatacgccatccagctgataaccgcggcatctctggtgtgcagaaaacgaaaaggcactgaagtgcaagtcgatgacatcaaaagggtctatagcctctttctcgatgaaagtcgatctacccagtacatgaaggagtatcaggacgcattcctgttcaatgaactgaagggggaaactatggatacctcatag

SEQ ID NO: 186636 - DNA, 855 bp, synthetic construct
  misc_feature 1..855: note = Description of Artificial Sequence: Synthetic coding sequence
  source 1..855: mol_type = other DNA
atggccaagagcctgctgaagaccgccagcctgagcggccggaccaagcttctgcatcagactggcctgagcttgtattccacaagccacgggttttatgaggaagaggtgaaaaagacactgcaacagttccctggtgggtcgattgatctgcagaaagaagacaacgggattggtattcttactttaaacaacccgtcacggatgaatgctttttctggtgtgatgatgctacagctgctcgagaaagtcatcgaactggagaattggaccgagggtaaggggttaatcgtgcggggagcaaagaacaccttctcttctggctcggatctcaatgccgttaagtctctgggactgcagagacgactcccgctgatctctgttgctctggtgcaaggctgggccttgggagggggggccgagtttacgactgcctgtgacttccggttaatgactccagagtcgaaaattcgtttcgtgcacaaagagatggggattatcccctcatggggtggaaccacacgccttgtcgagattataggttcccgccaggcgctcaaggtcctgtcaggagcgttaaaacttgacagcaagaacgccttaaatattggaatggttgaagaggtgcttcagagctctgacgaaaccaagtctctggaagaagcacaggaatggttgaaacagttcatccagggcccccctgaggtgatccgcgcccttaaaaaaagtgtgtgcagcggcagggagttgtacctggaagaggccctacagaacgagcgcgacctacttggcacggtgtggggcggccctgccaatttggaggccatagcaaaaaaaggcaaatttaataaatag

SEQ ID NO: 186637 - DNA, 438 bp, synthetic construct
  misc_feature 1..438: note = Description of Artificial Sequence: Synthetic coding sequence
  source 1..438: mol_type = other DNA
atggccaagagcctgctgaagaccgccagcctgagcggccggaccaagcttctgcatcagacaggcttatcgctgtactcaacaagccatggcttttacgaggaggaggtgaagaaaacgttacaacagtttcccggaggctccatcgatctacagaaagaagataatggcatagggatactgaccttgaataatccatctcggatgaatgcgttctccggagtgatgatgctccagctgttggagaaagtgattgagctggaaaactggaccgaaggaaagggactgatcgttcggggtgcaaagaacacctttagctctggctccgatctgaatgccgtgaagtcgctcggtaccccagaaacgtcctttaataaatgttgcgcagggtcacgattgggcataggttggaggtctcgtatttactattccatgtag

SEQ ID NO: 186638 - DNA, 441 bp, synthetic construct
  misc_feature 1..441: note = Description of Artificial Sequence: Synthetic coding sequence
  source 1..441: mol_type = other DNA
atggccaagagcctgctgaagaccgccagcctgagcggccggaccaaacttctgcaccagacagggttgagcctctactccacaagccatgggttttatgaggaagaggttaaaaaaacattgcagcagttcccaggaggaagtatcgacctccagaaggaagacaacggtattggcatccttaccctaaacaatcccagtcgaatgaatgccttctcgggcgtcatgatgctgcagttactggagaaagtcatagaattggaaaactggaccgaaggaaaaggcttgattgtaaggggcgccaaaaacactttctcctctggatctgaccttaacgctgtgaagtcgttgggaacacctgaagagaccagcttcaacaaatgttgtgccggcagcaggctgggcattgggtggcgtagccgaatttactattccatgtag

SEQ ID NO: 186639 - DNA, 438 bp, synthetic construct
  misc_feature 1..438: note = Description of Artificial Sequence: Synthetic coding sequence
  source 1..438: mol_type = other DNA
atggccaagagcctgctgaagaccgccagcctgagcggccggaccaagcttctgcaccagactggcctctccttgtatagcactagtcacggattttacgaggaagaagttaagaagacgctgcagcagttccccgggggctctatcgatctgcagaaagaagacaatggtattggaatactgacactgaacaatccaagtagaatgaatgctttctccggtgtaatgatgctccagctgttggagaaagttatcgagttagagaactggacggaaggaaagggtctcattgttcgtggggcaaagaacacttttagttcgggttccgacctgaatgccgtaaagtctctggggacacccgaaacgagttttaacaagtgctgcgcgggaagcagacttgggattggttggcgatcacggatctattatagcatgtag

SEQ ID NO: 186640 - DNA, 642 bp, synthetic construct
  misc_feature 1..642: note = Description of Artificial Sequence: Synthetic coding sequence
  source 1..642: mol_type = other DNA
atgaacgccttcagcggcgtgatgatgctgcagctgctggagaaggtgattgaacttgaaaattggaccgagggaaaaggtctcatcgtgcgtggcgccaaaaacacgttttcctccggcagcgatctgaacgccgtgaagagcctcgggaccccagaagagtcctgcagatggaacacagagtttctgtacacccttcacccagtgagtccatttatcaatatcctgtacagctatggatggaacggtcgcatgcacgtccatgcaaaacacttaaataagatctacgaggtaaagaagcagcgaggtaaaatcctgctggggctgtcccgtctgcccctcatatcagtggcacttgtgcagggatgggccctgggaggcggagcagagtttacaacagcttgcgatttcagactcatgactcccgagagtaaaatcaggtttgtacacaaggaaatgggaatcatcccgtcctggggaggcactacccgccttgttgagatcattggctctcgtcaggccttaaaagtcctctccggcgctcttaaactcgattctaaaaacgcgctgaacattgggatggttgaggaggtgcttcagagctctgacgaaacaaaatcccttgaagaggcccaggagtag

SEQ ID NO: 186641 - DNA, 906 bp, synthetic construct
  misc_feature 1..906: note = Description of Artificial Sequence: Synthetic coding sequence
  source 1..906: mol_type = other DNA
atggccaagagcctgctgaagaccgccagcctgagcggccggaccaagctgctgcaccaaaccggcctatctttatactctacttcccacgggttttatgaagaggaagtgaaaaagacccttcagcagtttcccggtggctctattgacctgcaaaaagaggacaacggcattgggatcctaaccctgaacaatccttcccgcatgaacgcattctctggcgtgatgatgctgcagctgttggaaaaagtcatcgagctcgaaaactggactgagggaaaaggattaatagtcaggggcgccaagaataccttctccagcggcagcgacctcaacgcggtgaaaagccttggaactcccgaggacgggatggcagtctgtatgttcatgcagaacactctgacacgcttcatgaggctgccactaatctcagtggccttagttcagggatgggcgttgggcggaggagccgagtttactactgcatgtgacttcagactaatgactcctgagtcaaagatcagattcgttcacaaggaaatggggattattccgtcctggggaggcaccacccgactggtggagatcattggatcacgtcaagccttaaaggttctgtccggagcgttaaagttagacagcaagaacgctcttaatatcgggatggtggaggaggtgctgcaaagttcagacgagactaagagtctggaagaggcccaagagtggttaaagcaattcatccagggaccacctgaggtcatccgggcacttaagaaaagtgtgtgtagcggcagagaattgtacttagaggaggccctgcagaacgagcgcgatcttctgggaactgtgtgggggggccccgcaaatctagaagctatagctaagaaaggcaaattcaataagtag

SEQ ID NO: 186642 - DNA, 681 bp, synthetic construct
  misc_feature 1..681: note = Description of Artificial Sequence: Synthetic coding sequence
  source 1..681: mol_type = other DNA
atgatgctgcagctgctggagaaggtgatcgagctggagaactggacagagggtaaaggactgatcgtacggggagccaaaaacacatttagttcgggatccgacttgaatgcggttaagtcacttggaactcctgaagatgggatggcggtgtgcatgtttatgcagaatactctgacacgcttcatgaggctgcctctcatctccgttgccttggtccagggatgggcactagggggaggcgcagaatttactaccgcctgcgatttccggctcatgactcctgaaagtaagataagatttgttcacaaggaaatggggatcatcccctcttggggtgggacgaccagattggtcgagatcattggcagtcggcaggctctgaaagtcctctccggggctttaaaactagatagtaagaatgctctcaatatcggcatggttgaagaggtcctccagtcatcagacgagacaaagagtctggaggaagcccaggaatggctcaaacagttcattcagggaccccccgaagtgatacgggccctaaagaagtccgtgtgtagcgggcgtgagctttatctcgaggaggctctgcagaatgaaagagatctgctcggcacagtctgggggggtcctgccaacctggaagcaatagccaagaaagggaagtttaacaaatag

SEQ ID NO: 186643 - DNA, 906 bp, synthetic construct
  misc_feature 1..906: note = Description of Artificial Sequence: Synthetic coding sequence
  source 1..906: mol_type = other DNA
atggccaagagcctgctgaagaccgccagcctgagcggccggaccaaactactgcaccagacaggactatctttatattcgacctcccacggtttctacgaggaggaggtcaaaaagaccctgcaacagtttccaggaggctctatcgatttacagaaagaagacaacgggattggaatacttacgctaaataatcccagccgaatgaatgcattttccggcgtgatgatgctccagctactggagaaggtgatagagctggaaaactggaccgaaggtaaaggcctcattgtacgcggcgctaagaacacattctcaagcggctcagatctgaatgccgtgaagtcattaggtacccctgaggacggaatggcggtctgcatgttcatgcagaatacactgacacggttcatgcgccttccccttatcagcgtggccttggttcaaggatgggcccttggtgggggtgccgagtttactacagcatgcgacttccggctgatgacccctgagtctaagatccgatttgtgcacaaggagatgggtataatcccatcctggggaggtacaacgcgcttggtcgaaattattggaagccgacaagcactaaaggtgctcagtggagctctgaagctggatagtaagaacgcgcttaatattggcatggtggaagaagtactccagagttccgacgaaacaaagagcctggaagaggctcaggaatggcttaaacagttcattcagggtcctccggaggtgattcgggccctgaagaaaagcgtgtgttcaggccgggaactgtacctagaggaggcactccagaacgaaagggatctgttgggaaccgtctgggggggcccagctaacctggaagccattgctaaaaagggcaagttcaacaagtag

SEQ ID NO: 186644 - DNA, 906 bp, synthetic construct
  misc_feature 1..906: note = Description of Artificial Sequence: Synthetic coding sequence
  source 1..906: mol_type = other DNA
atggccaagagcctgctgaagaccgccagcctgagcggccggaccaagctgttgcaccagacgggcctgtctctgtactctacctcccacgggttctacgaggaggaagttaaaaagacactgcagcagtttcccgggggttccattgatctgcaaaaggaggacaacggtatcggcatcctcactctgaacaatccgagcagaatgaacgccttttccggagtgatgatgctccaactcctggagaaggtcatcgagctggagaattggacagagggcaagggcctcattgtgaggggggcaaaaaacacctttagcagtggcagtgacctcaatgcagtcaaatccctgggtacgcctgaggatggaatggcggtctgtatgtttatgcagaacacccttactaggttcatgcgcctgcctttaatttccgtcgcactcgtgcagggatgggcacttggtgggggtgccgagttcacaacagcttgcgattttaggctcatgacgcctgagtctaagattcggtttgttcataaggaaatgggcatcattccctcttgggggggcacaacccgcctggttgagatcatcggttcaagacaggctctgaaagtccttagtggagctttgaagctggattcaaaaaatgcactgaatatcggaatggtagaagaagtgctccagagcagcgacgaaactaagagcctcgaggaagcccaagagtggctcaaacaatttattcagggaccccctgaggtgattcgggccctgaagaagtccgtatgtagcggtcgagaattatacctcgaagaagcattgcagaatgagcgggacttgttgggcaccgtgtggggcggcccggccaatctcgaagcgattgctaagaagggcaagttcaataaatag

SEQ ID NO: 186645 - DNA, 408 bp, synthetic construct
  misc_feature 1..408: note = Description of Artificial Sequence: Synthetic coding sequence
  source 1..408: mol_type = other DNA
atggccaagagcctgctgaagaccgccagcctgagcggccggaccaaactactgcaccagacaggactctctctctattccacttctcatggcttctatgaggaagaagtgaagaagaccctccaacagtttcctggggggagtattgatctgcagaaagaagacaatggtatcggcatcctgactctcaacaacccctcgcgaatgaatgccttcagcggcgtcatgatgctccaactcctcgagaaagtgattgaattggagaattggactgagggaaaggggctaatcgtaagaggcgctaaaaatactttctcctctggctccgacctgaacgcagtcaaatcattaggcactcccgaggacggcatggcagtatgcatgtttatgcagaacactcttacctag

SEQ ID NO: 186646 - DNA, 924 bp, synthetic construct
  misc_feature 1..924: note = Description of Artificial Sequence: Synthetic coding sequence
  source 1..924: mol_type = other DNA
atggccctgaagcaggagatggccaagagcctgctgaagaccgcctctttgagcggtcgtacaaaactattacaccagaccggacttagtctatattctacatcccatggtttctacgaggaagaggtgaagaagaccctgcagcaatttcccggcgggtccatcgatttgcaaaaagaagacaatgggatcggcatactgaccctcaataaccccagcaggatgaacgctttcagcggagtcatgatgctccagctcctggaaaaggtgatcgaactagagaactggaccgaagggaagggcctgatcgtgaggggcgctaagaacaccttcagctctggaagtgacctcaatgcagtgaagtccctaggtactcccgaagatggcatggctgtatgtatgttcatgcagaatacgctgacccgattcatgcggctgcctttgattagtgtggcgcttgtccagggctgggctctgggcgggggcgcagagttcactaccgcttgtgactttaggctgatgacaccggaatcgaagattcgctttgtgcataaagaaatgggtatcataccatcttggggcggcaccacacggctcgttgagataattggctccagacaggctcttaaggttctgtctggtgccttgaagctcgactctaagaacgcccttaacatcggaatggtcgaggaggtccttcaaagctctgatgagaccaagagtctcgaggaggctcaggagtggctgaagcaattcattcagggaccacccgaggtgatccgggccctaaaaaagagcgtgtgttctggacgagagctctatctggaagaggcgcttcaaaatgagcgtgatttactagggacggtgtggggaggcccagcaaacctcgaagctattgccaagaaagggaaattcaataagtag

SEQ ID NO: 186647 - DNA, 456 bp, synthetic construct
  misc_feature 1..456: note = Description of Artificial Sequence: Synthetic coding sequence
  source 1..456: mol_type = other DNA
atggccaagagcctgctgaagaccgccagcctgagcggccggaccaagctgctccaccagacaggactctctctgtacagcacatcccacggtttctatgaggaggaagttaagaagaccctccagcagttccccggcggatcaatagacctgcaaaaggaagacaatggcatcggaatcctgacattaaacaatccctccaggatgaacgccttctccggcgtgatgatgctccaactcctggaaaaagtgatagagttggaaaactggaccgaaggtaaaggactgattgtccgcggcgccaagaacacattctcatcaggatctgacctgaatgccgtgaagtccttagggaccccagaggatggcatggctgtctgcatgttcatgcagaacacattgacaagattcatgcggttacctctgatcagtgtcgccctggtgcagggctggtag

SEQ ID NO: 186648 - DNA, 378 bp, synthetic construct
  misc_feature 1..378: note = Description of Artificial Sequence: Synthetic coding sequence
  source 1..378: mol_type = other DNA
atggccaagagcctgctgaagaccgccagcctgagcggccggaccaaactgctccaccaaactgggctcagcctttactccacctcacatggcttttatgaggaggaggttaaaaagacgctgcagcagttccctggcgggtccatcgatctccaaaaggaggacaatggcattggcatcttgactctgaataacccaagtcgtatgaacgcattctccggcgtgatgatgttgcagctgctggaaaaggtgatcgaattggagaattggacagagggtaaaggcttgatcgtccgaggggcaaagaacacgttctcctccggctccgatttaaatgccgtcaagtcccttggcacccccgaggccaattttctttag

SEQ ID NO: 186649 - DNA, 213 bp, synthetic construct
  misc_feature 1..213: note = Description of Artificial Sequence: Synthetic coding sequence
  source 1..213: mol_type = other DNA
atgatgctgcagctgctggagaaggtgatcgagctggagaactggactgaagggaaaggattgatcgttcgcggcgcgaaaaacaccttctcctcagggtccgacctgaacgctgtgaagtctttgggaacaccagaaacctcatttaacaagtgctgcgcaggttcaaggctgggcataggctggaggagccgcatatattattcgatgtag

SEQ ID NO: 186650 - DNA, 873 bp, synthetic construct
  misc_feature 1..873: note = Description of Artificial Sequence: Synthetic coding sequence
  source 1..873: mol_type = other DNA
atggccgccctgcgggtgctgctgagctgcgtgcggggccccctgcggccccccgttcgctgtcctgcctggcgccctttcgcatctggagcgaattttgagtacatcattgccgagaagcggggaaagaacaacacagtgggcctgattcagttgaatagacccaaggcgctgaatgccctctgtgatggactgattgatgagctgaaccaggcgcttaaaaccttcgaagaggatcccgctgttggagccattgtgctgactgggggggacaaggcatttgctgccggagccgacatcaaagaaatgcagaacctcagtttccaggattgttactcctccaaatttttgaagcactgggaccacctgactcaagtcaaaaagcctgtgatcgcagctgtgaacgggtacgcttttggtggcggctgcgagttggcaatgatgtgcgatatcatctatgctggcgagaaggcacagttcgcacagcctgaaatcctcattggtacaataccgggcgctggggggacgcaacggctcacacgggccgtgggcaagtcactggccatggagatggtcctaaccggcgatcgcatctccgcccaagatgccaagcaggcgggtctggtctctaaaatttgtcccgtggagaccttggtcgaggaggcgatccagtgtgctgaaaaaattgcctccaatagcaaaattgtggtcgcaatggccaaggagagcgttaatgcagctttcgagatgaccctgacagagggctccaagctcgagaaaaaactgttctattcgacgtttgcaacagatgatcgaaaggaagggatgaccgctttcgtggagaagagaaaagccaacttcaaagaccaatag

SEQ ID NO: 186651 - DNA, 2271 bp, synthetic construct
  misc_feature 1..2271: note = Description of Artificial Sequence: Synthetic coding sequence
  source 1..2271: mol_type = other DNA
atgagcttcgtggccggcgtgatccggcggctggacgagaccgtggtgaacagaatcgctgctggtgaggtcattcagaggcccgcaaatgccatcaaggaaatgatcgaaaactgtctggacgccaagtcaactagcattcaggtcattgtgaaagaggggggactcaaattgatacaaatccaggacaatgggactgggattcggaaagaggatctagacatcgtatgcgagcggtttaccacaagcaagcttcaaagcttcgaagatttggcgagcatttccacctacggcttcagaggggaagcactcgcatcaatctctcatgtggctcatgtcaccattaccaccaagaccgccgacggcaagtgtgcatatcgggccagctatagtgacggcaagctcaaagcgcctccaaagccatgcgcaggaaatcagggcacgcagatcactgttgaagatcttttctacaacatcgccaccagacgaaaggcactgaagaacccatccgaggaatacggcaaaatactggaagtggtcggcaggtactcagtacataatgccggcatttcgtttagcgtcaagaagcagggagaaactgtagctgatgtgcgaacccttccgaacgcctcaaccgtggacaatattaggtccatcttcgggaatgctgtctcccgggagctgatcgagattgggtgtgaagataagacgctagcgttcaaaatgaacggttacattagtaacgcaaactacagcgtgaaaaaatgcatattccttctgtttattaaccacagactggtcgagagtacctcgctgcggaaggccattgaaaccgtatacgccgcgtatctgcctaagaatacacatcctttcttgtacctgagtctggagatcagtccccagaacgttgacgttaacgtgcaccccacaaaacatgaggttcattttctccacgaagagtccatcctggaaagagttcagcaacacatcgagtcaaaattgctcggaagtaattcgagccggatgtacttcactcagaccctgttgcccgggcttgcaggacccagcggtgagatggtcaaatctacaacttcattaactagcagttcgacttcgggtagttctgacaaagtgtatgcgcaccagatggtgaggaccgattccagggaacagaaactagatgcgtttctgcagccactgtctaagcccttgtccagtcagccacaagcgatcgtaaccgaagacaagacggacattagtagcgggcgagcaaggcagcaggacgaggaaatgcttgaattgccagctcctgccgaggtggcggccaagaaccaaagcctcgagggcgacaccacaaaagggacctccgagatgagcgaaaaacgcgggccaaccagctcaaacccccgaaaaaggcacagggaggactcagacgttgagatggttgaggacgatagccgcaaggagatgacagccgcctgtactccacgtaggaggatcattaatctcacaagcgtgctatcgctgcaagaagagattaacgaacaaggacatgaggtactacgagagatgttgcacaaccacagctttgttggatgcgtaaatccacagtgggcgttagcccagcaccaaactaaattgtacctgctaaatactactaagctcagcgaggaactattttaccagattctgatctacgacttcgccaacttcggcgtgcttaggctgtccgagcccgcaccactcttcgatctggctatgctggccctggacagccccgaaagtggatggaccgaagaggacgggccaaaggagggcctggccgaatacattgtcgagtttctgaaaaagaaagcagagatgctagcagattacttttcgctcgagatagacgaggagggcaacctgatcggcttgcccctgttaattgataattatgttccacctttggaaggcctccccatctttattctgcgcctagccactgaagtgaattgggatgaggagaaggaatgcttcgagtctttgtcaaaagaatgcgctatgttttactcaatccgcaagcaatacatcagtgaggaatctaccctgtcagggcagcagtccgaggttcctggaagcatcccaaactcatggaagtggaccgttgaacatatcgtttataaggcactccggagccatattctaccacctaagcactttacagaagatggaaacatattacagctggcaaatttgccagacctgtataaagtttttgagcggtgctag

SEQ ID NO: 186652 - DNA, 1884 bp, synthetic construct
  misc_feature 1..1884: note = Description of Artificial Sequence: Synthetic coding sequence
  source 1..1884: mol_type = other DNA
atggccttcggcggcggcctggagctggccctgggctgccactacagaattgcacacgcagaggcccaagtgggcttaccagaggttactctgggccttctccctggagcacgaggcacccaactgctgccccgcctcacaggggtgccagccgccttagatctgattacttctgggcgtcgcattctggctgatgaggcgctgaagctgggaattctggataaggtcgtcaattcagatccggtagaagaggccatcagatttgcacagagagtctccgaccaacctcttgaatcaaggcgtctgtgtaacaaacctattcagtctctgcctaatatggactcaatcttttccgaagccttgctcaagatgagacggcagcatcctggatgtctggctcaggaggcatgtgtgcgagccgttcaagccgccgtccagtacccatatgaggtgggtattaaaaaagaagaagaactttttctctacctgttgcagtctggccaggcaagggccctccagtacgcgtttttcgcagagaggaaagctaataagtggtccacaccatccggggccagttggaaaacagcttcagcgaggcctgtgtcaagcgtgggcgtggttggcctgggcactatgggacgcggtattgtcatctctttcgctcgcgctcggatccccgtcatcgctgtagactctgataagaatcaactcgcgaccgcaaacaagatgatcacctctgttttagaaaaggaagcttctaagatgcaacagagcggccatccctggagcgggcccaaacctcgcctgaccagttcagtaaaggagctcggcggtgtcgacttagtgatcgaggctgttttcgaggagatgagcctgaagaagcaagtttttgccgagttgtccgccgtttgcaaacccgaggccttcctatgtaccaatacaagtgccctggatgtagatgagattgccagctctaccgaccggcctcatcttgtgatcggcacacattttttctcccccgcccatgtcatgaaattactagaggtgattccatcccagtattcgtcccctactaccatcgcgaccgtgatgaacttgagtaagaagattaagaagattggtgtggtggtaggaaattgcttcggatttgtcggcaacaggatgttgaacccctattacaatcaggcttattttctgctcgaagagggtagtaaacctgaggaggtcgatcaagtgctcgaggaatttggatttaagatggggcctttccgagtcagtgatctggcgggattggacgtgggctggaaatccaggaaggggcagggactgaccggtcccacacttctgccggggaccccagccaggaaacgcgggaacaggaggtactgtcccattcctgacgtcctgtgtgagcttggacggttcggacagaagacaggcaaaggctggtaccagtacgataaacctcttggccggattcataagcccgatccttggctgagcaagtttttgtcgcgttatcggaagactcatcacattgaaccaagaactatctcacaggatgaaatccttgaaaggtgcttatacagtctcatcaatgaagcctttaggattttaggggagggtatcgcagcctctcctgaacacatagatgttgtctatctacatgggtacggctggcctagacacaagggcgggcccatgttctacgcctctacagtcggcttgcctacagttctggagaaattgcaaaaatattatcgccagaatcctgacattccacaacttgagccatcagactatctgaaaaagcttgctagtcaaggcaaccctccactcaaggagtggcagagcctggccggaagcccatcctcgaagctttag

SEQ ID NO: 186653 - DNA, 1464 bp, synthetic construct
  misc_feature 1..1464: note = Description of Artificial Sequence: Synthetic coding sequence
  source 1..1464: mol_type = other DNA
atggccgagtacacccggctgcacaacgccctggccctgatccggctgcgcaatccccccgtcaacgccatcagcacgaccctcctgagggacattaaggaaggcctgcagaaagccgtcattgaccacacgatcaaggccatcgtaatctgtggggccgaaggcaagttttccgccggtgcagacatccgaggattttctgctccacgcaccttcgggctgacattaggtcatgtggtggacgagattcagcggaatgagaagcccgtggtggccgctattcaaggtatggccttcgggggcggcctggaattggcccttgggtgtcattaccggatagctcacgccgaggctcaggttggactgcccgaggtcactttaggactcctccccggcgctcgtggaacgcagctcttaccccgactcacaggggtccctgccgctctcgacctgatcacctcgggcagacggattctcgctgatgaagctctgaagctgggaatactggataaagtcgtgaactccgatccagttgaggaagctattaggtttgcgcagagagtgagcgaccaacccctggaatcccgaaggctgtgtaataagcccatacaatccctgcctaacatggacagcatcttcagtgaagctctgctaaaaatgcgacgccagcatcccggatgcctggctcaagaggcctgcgtccgcgccgtgcaggctgctgtccagtacccctacgaggtcgggatcaaaaaggaggaagagctgtttctgtacctgctgcagtcagggcaagcacgggccctgcaatacgccttctttgccgagcgcaaggccaataaatggtcaactccatctggggccagttggaagactgcttctgcaaggcctgtctcgtcggttggggtggtgggccttgggacaatgggaagggggatcgtgatctctttcgcaagagctaggatcccagtgatcgccgttgatagtgataaaaaccagcttgccactgcaaataagatgattactagcgtcctcgagaaagaggcttccaagatgcagcagagtggtcacccctggagtggacccaagccacggctaactagtagcgtgaaggagctcggcggggtggacctggttatcgaggcggtgtttgaggagatgtctctaaaaaagcaggtgttcgctgagctctccgccgtttgtaagcccgaggcatttttatgtacaaatacaagcgctctggatgtggacgaaattgcttcttcaactgatagaccccacctcgtaattgggacacattttttctcccctgcccatgtcatgaagttgctggaggtgatccctagccagtactccagtcctaccacaatcgccaccgttatgaacttgtctaagaagatcaaaaaaataggagtcgtggtaggcaactactctgtgagtaaaaaaaaaaagaaaaaaaaaaaatag

SEQ ID NO: 186654 - DNA, 6102 bp, synthetic construct
  misc_feature 1..6102: note = Description of Artificial Sequence: Synthetic coding sequence
  source 1..6102: mol_type = other DNA
atgttcaagggcctgagcaagggcagccagggcaagggcagccccaagggatcccctgctaaaggaagtccgaaaggcagtccaagccgccacagccgggctgccacccaggagctggccctactgatctccagaatgcaagccaatgctgatcaggtggagcgcgacatcctcgaaactcaaaagagactacagcaagatcggctcaattctgaacaaagccaagctctgcagcaccagcaggagacaggccgcagtctaaaggaagcagaagtgctgttgaaggacctctttttggacgtcgacaaggccagacgtctcaaacacccacaagctgaagagattgaaaaagatattaaacagctccatgaacgggtgacccaggaatgcgccgagtaccgggcactctacgaaaaaatggtgctgccacccgacgtgggaccacgcgtggactgggcgcgagtgctcgaacagaagcaaaagcaggtgtgtgctggacagtatggtcctgggatggctgagcttgagcaacagattgccgaacataatatcctccaaaaagagatcgatgcctatgggcagcagctgaggtcactcgtaggaccggatgccgctacaattcgctcacaatatcgggatctgttgaaggctgcaagctggaggggccagagtctagggtctctctacacacacttacaaggctgcacccgccagctttccgcactggctgaacagcagcggaggattctgcagcaggactggagcgatctgatggccgaccccgctggagtacgcagagagtacgagcatttcaagcagcacgaactgctcagccaggagcaatccgtaaatcagctcgaagacgacggtgagaggatggtagagctccgacatcccgcagtgggtccaatacaggcccaccaagaggcactcaagatggaatggcagaacttcctcaatctgtgtatttgtcaggagactcaacttcagcatgtggaagattacagacgctttcaggaggaagctgatagtgtgtctcagaccctggcaaagttgaattccaacctcgatgcgaaatacagcccagcccctgggggaccccccggagccccaactgagcttcttcaacaactggaagccgaagagaagcggctggccgtgacagagagggccaccggcgatttgcaacggagatctagagatgtggcaccccttccccagagaagaaaccctcctcaacagcccctccatgtggactccatttgcgactgggattccggcgaggtccagctgctccagggcgaacgatacaagctggtggacaacacagaccctcatgcatgggtcgtgcagggtccaggcggagagaccaagcgcgccccagctgcatgcttttgcatccccgcacctgaccccgacgccgttgcccgggcctcccgcctcgcctcggagctgcaggccctgaagcagaaactcgccacggtgcagtctcgacttaaggcaagcgcagtagagagtcttcgcccaagtcagcaagcacctagtggcagtgaccttgccaatccgcaggcccagaaattgctgacacagatgacacgtttggatggtgacctcggccagattgagcgacaggtcctggcttgggcacgagccccactgtcaagacccacgccactggaggacctggaggggcggattcattcacacgagggcaccgcacagagactgcagtccctgggtactgagaaagagacagctcagaaggagtgtgaagcatttctgtccaccagaccggtggggcccgccgccctccaattgcccgtggccctcaactcggtgaaaaataaattctctgacgtgcaggtgttatgttccctgtacggggagaaggccaaagcagctcttgatctggagcgccaaattcaggacgcggatcgtgtaatccgagggtttgaagccacactcgtgcaagaagccccaataccggcggaacctggggccctgcaggagcgagtctccgagttacagaggcagaggcgagaactcctggaacaacagacatgtgtgctgaggcttcacagagctctaaaggcctctgaacacgcctgtgctgctcttcaaaataacttccaagagttctgccaggatctgcctaggcaacagaggcaggtacgagctctcaccgataggtatcacgcggtgggtgaccaactggatctgagggaaaaagtagtccaggatgccgccctcacttaccaacagttcaaaaactgcaaagacaacctgtcctcctggttggagcatctcccaaggtctcaagtcaggccgagcgacggtccctcccagatagcctataagctccaggcacaaaaacggctcacccaggaaatccagagtcgagaacgtgacagggctaccgcaagtcatctttcacaggcactgcaggccgcactgcaggactatgagttgcaggctgacacttatcggtgcagcttagagcccacactagctgtgagcgcgcccaagcgaccgagggttgccccgctgcaggagtcaatacaagcccaggaaaaaaacctcgccaaggcatacaccgaggtggccgcggcccagcagcagctcctgcagcagctagaattcgctagaaagatgctggaaaaaaaagagttaagcgaggacatcagacgtacgcacgatgctaagcagggaagcgagtccccggcccaggccggacgtgaatctgaggcgctgaaagcccagctggaagaggagaggaagagagtggcccgcgtgcagcatgagctggaggctcagagaagtcaactactgcagcttaggactcagcggcccctggaacggttggaggaaaaggaagtagtcgaattttatagggacccacagttggagggctccctgtctcgagtcaaagcacaggtggaggaggagggaaagcggcgcgctggcctgcaggcggacctggaagtggcagcgcaaaaggttgtgcagttagagagcaagcgcaagaccatgcagcctcacctgctcacaaaggaagttacccaggtggagcgtgaccccgggctggattcacaggccgcgcaattacggatccagatccagcagctccgtggtgaagacgctgtgatttccgcccgcctggaaggcctcaaaaaggagctgttagccctggagaaaagggaagtggacgttaaggaaaaggtagtggtgaaagaagtagtaaaggtagagaaaaatctggagatggtgaaggcagcccaggccctccgattgcagatggaggaagacgccgcacgtcgtaaacaggcagaagaggcggtagccaagctacaggcgcgaatcgaggatctggagagagccatctccagcgtggaacctaaggtgatcgtcaaggaagtgaaaaaggtggaacaggaccctggcctgctacaggagagctctagactaagatccttgctggaggaggagcggaccaagaatgcaacgctggctcgtgagctcagtgatctgcactccaaatattccgtggtcgaaaaacagcgcccaaaggtgcaactccaagagagagtgcacgagatattccaggtcgaccctgaaacagaacaggagatcactcgccttaaagccaagctgcaagagatggctggtaagaggagcggggtagaaaaagaggttgagaaactgctgccggatctggaggtcttaagagcacagaagcccactgttgagtacaaagaggtgacccaagaggtcgtgaggcatgagcgtagcccggaagtccttcgggagatcgatcgcctgaaagcacagctgaatgagctggtcaacagccatggcaggtcacaggagcagctaatccgcctccagggggaacgcgatgaatggcgtcgcgaaagagccaaagtcgaaacaaagaccgtatccaaagaagtggtgagacatgaaaaggatccggttctcgaaaaggaggcggagaggctacgccaggaagttagggaggctgcgcagaagcggcgggccgctgaggacgccgtgtacgagctacaatctaaacgtctcctgctggagaggcggaagcctgaagagaaggtggtcgtccaggaggtagtcgtgactcagaaagaccccaagttacgggaggagcacagccgcttaagtgggagcttggatgaggaagtcggccggaggcgccagttagaacttgaggtccagcagttacgagccggggtggaggaacaggagggccttctctcgttccaggaggatcgttccaaaaaacttgcagtggaacgagagttgcgtcagctgaccctccgtatccaggaactggaaaaaaggccacccaccgtccaagaaaaaataattatggaggaagttgtgaaactggagaaagatcccgacctggaaaaaagtacggaagccctgcgatgggaccttgaccaggaaaagacccaggtgaccgaacttaatcgcgaatgtaaaaatctgcaggtgcaaattgacgttctgcaaaaggccaagtcccaggaaaagacaatctacaaagaggtcatccgggtgcagaaagatcgagtgttggaagatgagcgggcacgggtgtgggagatgctcaatagagaaagaaccgctcggcaggccagggaagaagaggcaagacgactacgagaaagaatcgaccgcgctgaaactcttggacgaacatggtcaagagaggaatccgaactgcaacgcgcgcgagaccaggccgaccaggagtgcggtcggctgcagcaggaactcagagctttagagcgtcagaagcaacaacaaacacttcagctccaggaagaatccaagctgcttagccagaagacagaatcagagagacagaaggccgcccagcggggccaggaactgtcaagattggaagccgccatcctgcgcgagaaggaccaaatatatgaaaaagagcggactcttagggatctgcatgctaaggtgtcccgagaggaattaagccaggaaacccagacccgcgaaactaacctcagcaccaagatctctattctagaaccggaaacaggtaaggacatgtccccgtatgaggcgtacaaacgcggcataatcgacagggggcagtatttacagctgcaggaactggaatgtgactgggaggaagtgactacaagcggtccgtgcggagaggagtcagtgttgttggataggaagtccgggaagcagtactccatcgaagctgccctgcgctgtcggcgcatttcaaaggaggaataccacctatacaaggacgggcacctgcctattagcgagtttgccttgttggttgccggggagacaaagcctagtagctctctttccatcggctccatcattagcaaaagcccattggcctcaccagcgcctcagagcacctctttctttagcccaagcttttcccttggcctgggtgatgactccttcccaatcgctgggatttatgataccacgacagacaataaatgttccatcaagaccgctgtcgccaagaacatgctggaccccatcacagggcagaagctcctggaggctcaggccgcaactggcggcattgtcgatttgttgagccgcgagagatatagtgtgcacaaagccatggaacgcggactgatcgagaatacgtcgacacagcgcttgttgaatgcacaaaaagcctttacaggcatcgaagatcctgtgaccaagaagagacttagtgtgggagaggcagttcagaagggatggatgccccgagagtctgttttaccccatctgcaggtgcagcatctcacgggtggcctcattgaccccaagcgaacgggacgcattcccattcagcaggcgctattgtccggtatgattagcgaggagctggcacagctgctccaggacgagtccagctacgaaaaggacctaacagatcctatctcgaaagagcgactctcctataaggaagcaatgggaagatgtagaaaggatcccctctcggggctcctgctgctccctgccgctctagaaggctatcgctgctaccgctcagcgtccccaactgtgccgagatcactgaggtag

SEQ ID NO: 186655 - DNA, 2061 bp, synthetic construct
  misc_feature 1..2061: note = Description of Artificial Sequence: Synthetic coding sequence
  source 1..2061: mol_type = other DNA
atgcagctgggcgagcagctgctggtgagcagcgtgaacctgcccggagcacatttctatcccctcgaatccgctcgtggaggcagtggcgggtccgcaggtcatctgcctagcgcggccccatccccacagaagctggacctcgacaaggccagcaaaaagttttctggatctttgagctgtgaggccgtatcgggagagcctgcggccgcgagcgcaggagcacccgcggcaatgctgtcagataccgatgccggcgatgctttcgcttccgcagccgcagtagccaaacccgggccccccgacggaaggaaaggcagtccttgtggcgaggaggagttgccgtcagctgcggccgctgccgccgcagctgcagccgcagctgcagccacagccagatacagcatggattccctctcttctgagcggtactacctgcaatcgccaggaccgcaggggagtgaactggccgctccttgctccttgttcccctaccaggcagcggcaggtgcccctcacggccccgtgtaccctgcccccaacggcgccaggtacccatatggatctatgctccctccaggtgggtttccagccgcggtgtgtccaccaggtcgagcccagtttggaccgggcgccggagccgggtccggggccgggggatcttctggggggggggggggacctggtacataccagtactcacagggcgcacccctgtatggcccctacccaggtgcggcagctgcgggaagctgcggaggcctgggcgggttgggcgttcctgggagcggtttcagagcacatgtctatctctgtaatagacccctgtggcttaaattccatagacatcagacagagatgatcatcacaaagcaaggtagacgcatgtttccgtttctgtccttcaatatcaacggccttaaccctactgctcattacaacgttttcgtcgaggtcgtactcgccgacccaaatcactggcgctttcagggaggcaagtgggtgacatgtggaaaggctgataacaatatgcagggaaacaaaatgtacgtgcatcccgagagccctaataccgggtctcactggatgaggcaggagatttcctttggtaagttgaagctgacgaacaataaaggcgccaacaataacaatactcaaatgattgtgttgcagtccctgcacaagtaccagcccagacttcacattgtcgaagtaaccgaagacggtgtggaggacctgaatgagccctccaaaactcaaacctttacattttccgaaacgcaattcatcgctgtcacggcctaccagaatacagacatcactcagctgaagatcgaccacaacccgtttgctaagggattccgagataactatgactcctctcaccagattgtgcctgggggacgatacggcgtgcagtctttttttcctgaaccttttgtcaataccttgcctcaggctaggtactataatggggagcggaccgtccctcaaacaaatggactgctgagcccacagcaaagcgaagaggtggctaaccccccacagcgctggctcgttacccccgtgcaacaaccggggacaaataaactggatatatcaagttacgagagcgaatatacatcatccacactgttgccctacggaatcaagtcactccctctgcagacctcccatgcgcttggctactatcctgaccccactttccccgccatggccgggtggggaggtcgtggctcttatcagaggaagatggctgctggcttgccatggacctctcggacctcccccacggtgttttctgaggatcaactgtccaaagaaaaggtcaaagaagaaataggatctagctggatcgagaccccaccctccatcaagtccctagacagcaatgattctggggtttacacctccgcttgcaagcgaagaaggctgtcgccatctaattcgtctaatgagaactcccccagcatcaaatgtgaggacatcaatgctgaagaatattccaaggacacttctaaggggatgggaggttattatgcgttttatacaacaccctag

SEQ ID NO: 186656 - DNA, 2118 bp, synthetic construct
  misc_feature 1..2118: note = Description of Artificial Sequence: Synthetic coding sequence
  source 1..2118: mol_type = other DNA
atgcagctgggcgagcagctgctggtgagcagcgtgaacctgcccggcgcacacttctaccctctggagagtgctagaggtggtagtgggggaagcgccggacacctcccaagcgcggctccctcaccacagaaactggacctcgacaaagcttccaagaagttctccggttctctgagctgcgaggccgtctccggtgaacctgccgccgcctctgccggggcacctgcggctatgttgtccgatactgacgctggcgacgcatttgcctcagctgcggcagtggccaaaccaggccctcctgatggccgcaaggggtccccttgcggtgaggaggagttaccctcagcagcagctgccgccgcagctgctgctgctgccgccgccgcaacggctcgttattctatggattctttatcatcagaacgctattatcttcagagtccaggtccccaagggtcagaactggccgctccttgcagcctcttcccctatcaggcagccgccggagcccctcacgggcccgtgtacccagcccctaacggtgccagatacccgtacgggtccatgttaccacccggcggatttcctgctgccgtttgtccccccggtcgggctcagttcggacccggagcgggggcagggtcgggcgctggcggcagctccggtggcggcgggggccccgggacttaccagtactctcagggtgcgccgctctacgggccctaccctggggcggctgcagccggttcctgtggtggtctggggggactgggtgtgccaggctccggatttcgcgcacatgtgtacctgtgcaacagaccgctgtggctaaagtttcacagacaccagaccgagatgatcatcacaaagcaaggcaggcggatgtttcctttcctaagcttcaatattaacgggctcaaccccactgcccattataacgtcttcgtagaggtagttttagcagatcccaatcactggcggtttcagggaggaaaatgggttacgtgcggcaaagcagacaacaacatgcagggcaataaaatgtacgtgcacccggagtcccctaacaccgggtcgcattggatgcgccaggaaatatcgttcggaaagcttaaattaaccaataataagggtgcaaataacaataatactcagatgatcgtccttcagtcacttcataaataccagcctaggctccacattgtcgaggtgacagaggacggggtcgaagacctgaatgaaccttcaaagacccaaacttttacatttagcgagactcagtttatcgcggtcacggcttaccagaatacagacattacacaattgaaaatagatcacaatccctttgcaaagggtttccgggacaattatgattctatgtacacagcctccgaaaacgaccgcctgacaccctcccccacggattccccgcggagccatcagattgtgccaggcggccggtacggtgtccagtcgttctttcccgagccattcgttaacaccctgccacaagcccgttactataatggggaacgaactgttccccaaaccaacggtttactgtcaccacagcagtcagaggaggtcgccaaccctcctcaacgctggctggtcacacctgtacagcagcctggcacaaacaaactcgatatcagcagctatgaaagcgagtacacaagcagcacactgctcccttacggcatcaagtctctgcccctgcagactagccatgctctaggatattaccccgacccaacatttccggctatggccggatgggggggccggggcagctatcagaggaagatggctgctggcctgccatggacctcaaggacatccccaactgtgttctcagaagaccagctgtcaaaggagaaagtgaaagaagagatcggttcatcttggattgagacacccccatcgattaaaagcctggactccaatgattctggcgtgtacacctccgcgtgtaagcgtcgcaggttgtcgccttctaatagctcaaatgaaaactccccctctattaaatgcgaggacatcaatgcggaggaatactccaaggatacttccaaaggcatgggcgggtattatgcattttacaccacaccttag

SEQ ID NO: 186657 - DNA, 1713 bp, synthetic construct
  misc_feature 1..1713: note = Description of Artificial Sequence: Synthetic coding sequence
  source 1..1713: mol_type = other DNA
atggacagcctgagcagcgagcggtactacctgcagagccccggcccacagggatccgaactggctgcaccttgcagcctgtttccttatcaagctgccgcaggcgctccacacggccccgtataccccgcccctaacggcgccaggtatccttacgggtccatgctgcctcctggcggcttcccagctgcggtctgtccccccgggagggctcagtttggacccggggctggcgcagggagtggagctggagggagttctggagggggtggcgggcccggaacctatcagtactcgcaaggtgcgcctctgtatggtccctaccctggtgccgccgccgctgggtcctgcggcggactcggagggctgggcgtaccaggctctgggttccgagctcacgtgtatctttgtaatcggccattatggctgaagtttcatcgccaccagacagagatgattattacaaagcaaggacgacgcatgttccccttcctctctttcaatataaatggcttgaacccaaccgcccactacaacgtcttcgtggaggtggtgctcgcagatcccaaccattggaggttccaaggaggaaagtgggtcacctgtggtaaggccgacaataatatgcagggaaataagatgtatgttcaccccgagtcaccaaacactggctcccattggatgcgacaggagatttcattcggaaagctcaaactgaccaataataaaggggcaaacaacaataacacacagatgatcgtgttacagagtttacataaataccagcctcggcttcacattgttgaggtgaccgaggacggcgtggaagatttgaacgagccctccaaaacccagactttcacgttctccgaaacccagttcatcgcggtgaccgcttaccaaaatacggacattacgcagctgaaaatagaccacaatccctttgcaaaaggctttagagataactacgacagtatgtatactgcatccgagaacgacaggctgacccccagcccaaccgactcccctagatcccatcaaattgtaccaggcgggagatatggcgtccagagctttttccctgaaccatttgttaataccttgccacaggccagatactacaacggagaacgtacagtcccgcagactaacgggctgctgtcacctcagcagtctgaggaggttgccaatcccccccagagatggctggttacacccgtccagcagccaggtacaaacaagctcgacattagtagctatgagtcagagtatactagttctaccctccttccctacggaatcaagagtcttccactacagaccagtcatgctctgggctattatccggatcctacctttcctgccatggcgggttggggaggccgcggttcttatcagcgcaagatggcggcaggtctgccatggacgagcaggacttcacccaccgtgttttcagaagaccagctgagtaaagaaaaggtcaaagaagaaattggttcctcgtggatagagactccccccagtattaaatccctcgattctaacgatagtggagtgtacacctcagcatgcaagcggaggaggctcagcccaagcaactcctctaacgagaacagtccctcaatcaaatgtgaggacataaacgccgaggaatactccaaggacacctcgaagggaatgggaggatactatgcattctatacaactccgtag

SEQ ID NO: 186658 - DNA, 1233 bp, synthetic construct
  misc_feature 1..1233: note = Description of Artificial Sequence: Synthetic coding sequence
  source 1..1233: mol_type = other DNA
atgttccccttcctgagcttcaacatcaacggcctgaaccccaccgcacactataatgtgttcgtggaggtggtgctagctgatcctaaccactggaggtttcaaggcggcaagtgggttacatgcggcaaggccgacaacaacatgcaagggaacaaaatgtatgtgcatccggagagtcctaataccgggagccattggatgcgtcaggagatatcattcggtaagttaaaattgaccaacaataaaggcgctaataataataacacccaaatgatcgtcctgcaatccctgcacaaatatcagccacggctgcacattgtggaggtgaccgaagatggagttgaggatttgaacgaaccctcaaagacgcaaacatttacctttagcgaaacacagtttatcgccgtcaccgcctaccagaatactgacatcacacagcttaagatcgatcataacccattcgcaaagggcttcagggataattatgactctatgtacaccgccagcgagaatgaccggctgacaccaagtcctacagatagtccacggtctcatcagatcgtccctggtgggcgatacggagtgcaatccttcttccctgaacccttcgtgaatacactgccccaagcgaggtattataacggagagcggacagtaccgcaaaccaacgggttgctgagccctcagcaaagtgaggaggtggccaaccccccacagaggtggcttgtgaccccagttcagcagcccgggaccaacaagcttgacatttcctcatacgagtcagaatatacctcctcgactttgctaccttatggaataaaatccttgccactgcagacgtcccatgccctcgggtattaccctgaccccacctttcctgctatggcaggatggggcgggagaggcagctatcagcgcaagatggcagccggattaccttggacgtccagaacaagcccaacggttttttccgaggatcagctctcgaaagagaaggtgaaggaagagattggaagcagctggatagaaacacccccaagtattaaaagtttagattccaacgactccggcgtgtatacctctgcttgcaaaagaagaaggctttcaccctccaacagctcgaatgagaactctccctccattaagtgcgaagacatcaatgccgaggagtatagcaaagatacatcgaaaggcatgggcgggtattacgccttctacacgactccctag

SEQ ID NO: 186659 - DNA, 1269 bp, synthetic construct
  misc_feature 1..1269: note = Description of Artificial Sequence: Synthetic coding sequence
  source 1..1269: mol_type = other DNA
atgggccaggccggctgcaagggcctgtgcctgagcctgttcgactataagacagagaaatacgtaattgcaaagaataaaaaagtagggctactgtatagactgttgcaggcctctattctggcttacttagtggtgtgggtctttcttatcaaaaaaggttatcaagatgtagacacaagtttacagtccgccgtaatcacaaaggtgaaaggagttgccttcactaacacttccgatttaggccagcggatctgggatgtggctgattacgtcattccggctcaaggggagaatgtgttcttcgtggtaaccaatctgatcgtgacacctaaccagcgtcaaaatgtatgcgcggaaaacgaaggcattccagatggcgcttgttccaaggattctgattgtcatgcgggtgaagccgtcaccgccgggaatggcgtgaaaactggacgttgcctcaggcgggagaatctcgcaagaggtacatgcgagatctttgcctggtgccctctggagacgagcagtcgccctgaagagcctttcctcaaagaggcagaagactttacgatcttcattaaaaaccacatcaggtttccgaagttcaactttagcaaatccaacgtcatggacgtgaaagaccgcagttttctgaagagctgccacttcgggcccaagaaccattattgtccaatttttcgactggggtccgtcatccgctgggcgggctctgattttcaggacattgctctcgaaggaggggtgattgggatcaacatcgaatggaactgtgaccttgacaaggcagcatccgagtgtcacccacactactccttctcacggttggataataaactgagcaagtcagtgtctagcggctacaacttcagatttgcaagatactaccgcgatgccgccggggtggagtttaggaccctgatgaaagcatatggcatcaggttcgatgttatggttaatggcaagggcgctttcttttgcgacctggttcttatttacctgattaagaagagggaattctatcgggacaaaaagtatgaggaagttcgtggcctggaagatagctcccaggaggccgaagatgaagcctccggtctcgggttgagcgagcaactcaccagcggccccggactgcttgggatgccagagcaacaggagctgcaagaacctccggaggcaaagcggggcagctcaagccaaaaagggaacggatcagtgtgtccccagctcctggagcctcatcggtctacatag

SEQ ID NO: 186660 - DNA, 564 bp, synthetic construct
  misc_feature 1..564: note = Description of Artificial Sequence: Synthetic coding sequence
  source 1..564: mol_type = other DNA
atgagcgagatggccgagctgagcgagctgtacgaggagagcagcgacctgcaaatggatgttatgcctggcgaaggcgatctcccacagatggaggtgggatcaggtagtagagaattgtccttgcgaccttctcgcagcggagctcagcagttggaggaggaggggccaatggaggaagaagaagcccagcctatggctgccccagagggtaagcggtcgctggctaacggcccgaacgccggcgagcaacctggacaggtagcaggagctgacttcgagagcgaagatgaaggcgaagagtttgatgactgggaggacgactacgactatccagaagaggaacagctcagcggagctgggtacagggtaagcgccgccctcgaggaagctgacaaaatgtttcttcgtaccagagagcctgcattggatggcggtttccagatgcactacgagaagacaccattcgaccagctggcctttatcgaagaactgtttagcctcatggtcgttaaccgtttaaccgaggaactgggctgcgatgaaatcatcgaccgcgagtag

SEQ ID NO: 186661 - DNA, 711 bp, synthetic construct
  misc_feature 1..711: note = Description of Artificial Sequence: Synthetic coding sequence
  source 1..711: mol_type = other DNA
atgagcaagctgcccgccgacagcagcgtgccccagaccggcgccgccaatggagatcgcgatgtgcctcaggctgaggtaggcagaggacgtagagagcctgcccccgcacaaccggaggaggccggagagggtgcgatggccgccgcccgcggagggcctgttccggctgctagagagggacgcatggctgctgctcgcgcagctcccgccgccgcggcaaggggcgcacctgtggcagccgcggcccttgcacgggccgcggctgccgggcgggagtctcctgctgctgctgcagcacgggaggcccgcatggcagaagttgcacggctcctcggagagccggttgacgaggagggcccagagggaaggccccggagccgccatggcaatggggggctcgccgctctgccctatcttcgcctccggcacccattatctgtgctggggataaattatcagcaatttctgcgtcactatctcgagaactaccccatcgcacccggtagaatccaagagttagaggagaggcggcggagattcgtggaagcatgcagggccagagaggccgcgtttgacgcagagtatcagagaaacccgcatagagtcgatttagacattttgacttttaccatagcgttgactgccagcgaggtaataaatccactgattgaggaattgggctgcgataaattcattaatcgggagtag

SEQ ID NO: 186662 - DNA, 564 bp, synthetic construct
  misc_feature 1..564: note = Description of Artificial Sequence: Synthetic coding sequence
  source 1..564: mol_type = other DNA
atgagcaagctgcccgccgacagcagcgtgccccagaccggcgccgctaacggtgaccgagatgtgccgcaggccgaggtcggtagaggcagacgagagcctgctccagcacaacccgaggaggctggggaaagccctgccgcggccgcagcccgcgaggcccgaatggctgaggtggcacggctgctgggggagcccgtggacgaagaaggccctgaaggtaggccccgcagccggcacgggaatggaggcctggcagcactaccctatttaagattgcggcaccccctcagcgttctgggcattaactatcagcagttccttcgccactacctcgagaattatcctattgcacccggaaggattcaagagcttgaggaaaggcgccgtcgctttgtcgaggcttgcagagcacgcgaggccgctttcgacgctgaatatcagagaaatcctcatcgggtggacctcgatatcctcacattcactatcgctctcaccgcttctgaagttatcaatcctctgatcgaggagcttggatgcgacaagttcatcaatcgcgagtag

SEQ ID NO: 186663 - DNA, 1002 bp, synthetic construct
  misc_feature 1..1002: note = Description of Artificial Sequence: Synthetic coding sequence
  source 1..1002: mol_type = other DNA
atgaagatggacgtgagcgtgcgggccgccggctgcagcgacgacctgtcttccggtgaggcagatgtagatccaaagctgctggagttaacagcggacgaagagaaatgcaggagcatcagacgacagtacaggcagttgatgtactgcgtccgccagaatcgggaggatatcgtgagctctgcgaacaactcattgaccgaggccctggaagaagccaatgtgctctttgacggagtcagccgcacaagagaagccgccctagacgcacgcttcctggttatggcgtccgacctcggcaaagaaaaggcaaaacagctgaattcagatatgaatttctttaaccaactggctttttgtgacttcctctttttgttcgtgggtctgaactggatggagggcgacccagataagctctctgattgtgacgactcaattgctctttccttctggaaagccattgaaaaggaggcaacaagctggatggttaaagccgagacctttcactttgtgttcggttcatttaaactggagcgatctgcgccaaaaccgaggctggagcaccagaaaaaggtacgtaagatggaggagaacggcaacatgccaacgaaactgcaaaagcttgatctgagctcatacccagaggcaacagaaaagaacgtcgagagaatattagggctgttgcagacctactttagaaagtacccagatacacctgtctcttattttgagtttgtgatcgacccaaacagcttctcacggacggtcgagaacattttttacgtctcgtttattgtgagggatggattcgctcgtattcgcttagatgaagacaggctgccgattctcgagccaatgaacgttaaccagatgggggagggaaatgacagttcatgtcatggacgcaagcagggtgtaattagtctaacccttcaggagtggaagaatatagtggcagcgtttgagatttcagaggccatgattacatactcctcatactag

SEQ ID NO: 186664 - DNA, 2931 bp, synthetic construct
  misc_feature 1..2931: note = Description of Artificial Sequence: Synthetic coding sequence
  source 1..2931: mol_type = other DNA
atggagcggcggtggcccctgggcctgggcctggtgctgctgctgtgcgctcctctcccccccggggctagggccaaggaggttacactgatggataccagtaaggcacaaggggagctgggctggctgttggacccacctaaagacggctggtcagaacaacagcagatcctgaacggaaccccgctgtatatgtaccaagactgtcctatgcaagggcgcagggataccgaccactggctgcgcagtaactggatctaccggggcgaagaggcatcacgggtgcacgtggagctgcagtttaccgtccgtgattgcaaatcatttcctggaggggctggaccgctcgggtgtaaagaaacatttaacctgttgtacatggagagcgatcaggacgttggaatccagctcaggcgcccattgtttcaaaaggttacgactgtcgccgccgaccagagctttactataagagaccttgtctcagggtctgtgaagctgaatgtggaaagatgcagcctggggcggctcacaagaaggggcctatatcttgcttttcacaatcctggcgcatgtgtcgcactcgtctccgtgcgggtcttttaccagagatgcccagaaactctcaacggactagcacagtttcccgacactctgcccggcccagccggtttagttgaggtggcgggcacatgtttgccccatgcaagggcctcccccagacccagcggggcccctcgtatgcattgcagtcctgacggggaatggctggtgccagtcggcaggtgtcactgtgaacctgggtatgaagagggcggcagtggtgaggcatgtgttgcttgcccatccggctcttaccggatggacatggatacaccacactgtttgacctgtccacaacagtccactgcagagagcgaaggggccactatctgtacgtgtgagagcggccactaccgcgcaccaggagagggcccccaggtcgcctgtaccggaccaccctctgctcctcgtaacttatctttttccgcaagcggaacccaactgtcactgcgctgggaacctccggccgataccggaggacgccaagatgtccgctacagtgttagatgctcccagtgtcaggggacggcacaggacggggggccatgtcaaccctgtggagtgggagtccatttctccccaggggccagagggttaacaactcccgcagtgcacgtgaacgggttggagccatacgccaattacaccttcaacgtggaagcacagaatggagtcagtggtctgggctcttctggacacgcatcaactagcgtgtctatttcaatggggcacgcggagtccctgtcaggactgtcactgcgactggtgaaaaaggagccccggcaacttgagttgacgtgggcagggagccgacctcggtcccccggcgctaacctgacctacgagctgcacgtgctgaatcaggacgaagaacgatatcagatggtgctggagcctcgcgttttgcttacagaactccagccggatactacatacatagtgcgcgtgcgcatgctgacaccactggggcccggtcccttctcccctgaccacgaatttcgcacctcacccccagtctccagaggactgacaggaggggagatcgtggctgtaattttcggcttattgctgggtgctgcactgctactgggaatacttgtcttccgctcccgtcgagcgcaacgacaacgtcagcagcgccagagggacagggccaccgacgtggaccgagaggacaagctgtggctgaagccctatgttgacctgcaggcctacgaggaccccgcacagggggccctagatttcaccagggaactggaccccgcctggctgatggtggacacagttattggagaaggagagttcggcgaggtctacagaggcacccttcgtctcccttcccaagattgtaaaacggttgccatcaagaccctgaaggatacatctccaggtggccagtggtggaacttcctgcgggaagcgactatcatggggcagttctcccacccccacattcttcacttggaaggtgtcgttactaagagaaagcctatcatgatcatcactgaattcatggaaaacggagccctggacgctttcctgcgggagcgagaggatcagcttgttcctggccagctggttgccatgttgcagggcatagcatctggtatgaactacttgtccaatcacaattacgtccaccgagacctagccgcacgaaacatcttggtcaaccagaatctgtgttgcaaagtctcggacttcggcctgacccgcctcctagatgacttcgatggaacatacgagacacagggtggcaagattcccattagatggaccgcccctgaggccatcgcccacaggattttcaccaccgccagcgacgtatggtcctttggtatagtaatgtgggaggttctgtcatttggtgataaaccttacggagagatgagcaatcaggaagtcatgaaatccattgaggacggatacaggttaccccccccagtcgattgccccgctcctttgtacgaactgatgaagaactgttgggcctacgatcgggctaggaggccgcacttccagaagctgcaggcccacttggaacagctgctggccaacccacactcgctgcgcacaatcgctaacttcgaccctcggatgacactcaggctgcccagcctgagcggatcagatggaattccgtaccgcacagtgtcagagtggcttgaaagcatcagaatgaaaaggtatatcctgcacttccattccgccgggttggatacgatggagtgtgtcctggaactcacagccgaggacttaacacagatgggaatcaccttgcctggtcaccagaagcgcatcctctgctccattcagggattcaaggactag

SEQ ID NO: 186665 - DNA, 888 bp, synthetic construct
  misc_feature 1..888: note = Description of Artificial Sequence: Synthetic coding sequence
  source 1..888: mol_type = other DNA
atggagacctgcgccggcccccaccccctgcggctgttcctgtgcagaatgcagctctgtctcgccctgttgctaggaccatggcgtcccggcaccgctgaggaagtgattctgttggattctaaagcctcacaggccgagcttgggtggactgctttgccctccaacggctgggaggaaatatctggggtggatgagcacgatagaccaatccggacctatcaggtgtgcaacgttctcgaacctaaccaagacaattggttgcagactggctggatctcaagaggcagaggccagagaatttttgtggaactgcaatttaccttgagggattgtagcagcattcccggcgcagccggtacgtgtaaggagacttttaacgtttactatctggaaacagaagctgatcttggccgcggacggcctcgccttggcggctctcgccctcgcaaaatagatactatcgcagccgacgaaagttttacccagggagacctgggtgagagaaagatgaagttgaacactgaggtaagagaaatcgggcctctcagtcgccgcggattccacctcgcttttcaagatgtgggcgcctgcgtagccctggtgagcgtcagagtttactacaagcagtgtagggccacagtgagagggttggccacatttcccgcaacagccgctgaaagtgcattctctacacttgtggaagtggccgggacatgcgtggcacactccgaaggcgagccagggtctcctcctcgcatgcattgtggagccgacggagaatggctggttcccgtgggtcgctgctcttgtagcgctgggttccaggagcgcggagacttttgcgagggcattcagctggcgggaggcaggggcgttggtgtgtag

SEQ ID NO: 186666 - DNA, 1632 bp, synthetic construct
  misc_feature 1..1632: note = Description of Artificial Sequence: Synthetic coding sequence
  source 1..1632: mol_type = other DNA
atggtgaagaccggcgcccccaccgtgaccgtgaccaacctgaagccagcgactcggtatgtctttcaaatcagggctgcatctcccggcccatcttgggaagctcagagcttcaaccccagcatcgaagttcagacgctgggggaggctgcttcaggcagccgcgaccagtctcctgctatcgtcgtgactgtcgtcactatttctgcattgctggtgctcggatcagttatgagcgttctcgcaatctggagaaggccatgctcctacgggaagggtgggggggatgcccacgacgaggaggagctttactttcatttcaaagtacccactcggagaacctttttggacccacaaagctgcggggatctgcttcaggccgtccatctttttgccaaggagctggacgcaaagagcgttactctggagcggagcttaggggggggccggttcggcgagttatgctgcggatgtctgcagctccctgggagacaggaactacttgttgctgtgcacatgctgagagacagcgctagcgattcccagaggttgggatttcttgctgaagcgctcaccttgggacagttcgaccacagtcacattgtccggctggaaggggtggtgacccgcgggtccacgctgatgatagtcaccgagtacatgtcccacggagcacttgacggatttctaaggcgtcacgagggtcagctggttgccggccagctaatggggctgctgcccgggctggcgagtgctatgaagtatttgagtgagatggggtacgttcaccgtggactagccgccagacacgttttagttagctcggacctggtgtgtaaaatcagtggcttcgggcggggccctcgggaccgttcagaagcagtgtatacaactatgtctggccgctctcccgcactttgggccgcacccgaaacactccaattcggtcacttcagttctgcttcagacgtctggtcgttcggaataatcatgtgggaggtcatggcctttggcgaaagaccttactgggacatgtccgggcaagatgttataaaggccgtggaggacggcttccgcctgccgcctcctcggaactgccctaatctccttcaccgcttgatgctggactgttggcagaaggatccaggagagcgaccaagattctcgcaaatccactccatattaagcaagatggtacaggacccagagccgccgaaatgcgctctgacaacctgtcccagaccaccgactcccttggccgatcgggcattttcaacctttcctagcttcggctccgtgggtgcttggttggaggcactggacctatgtcgatacaaggacagcttcgctgcagccgggtatgggagcttagaggcagtggccgaaatgacagctcaggatctcgtctctctcgggatctctttagcggagcatagggaggccctgctgtctggaatctccgccctgcaggcccgagttttgcagctgcaggggcaaggagtgcaggataacaagaatctcagtgtgatctggtgcttgtttgaatggcagttgctggatcactgcattgccggcgtggagggcctcctgccaccaagttcgcggacgggagtatctcggatttgcgtgtag

SEQ ID NO: 186667 - DNA, 3027 bp, synthetic construct
  misc_feature 1..3027: note = Description of Artificial Sequence: Synthetic coding sequence
  source 1..3027: mol_type = other DNA
atggagacctgcgccggcccccaccccctgcggctgttcctgtgccgcatgcagctatgtctggctcttctattggggccttggcgccccggtacagccgaagaggttatcctcctcgatagtaaggcaagtcaagccgagctgggttggacagcgctcccatccaatggctgggaagaaatcagtggggtcgatgaacacgaccggccgattagaacatatcaggtgtgtaacgttctcgagcccaaccaggacaactggctgcagactgggtggatttcccggggcagaggtcagcggattttcgtcgagctgcaatttacactgagagattgcagttcaatacccggcgcagccggaacgtgcaaggagactttcaacgtgtactatctcgaaactgaagccgatctgggacggggccgtcctaggctcggcggatctcgccctcgaaaaattgatactatcgccgcagatgagtcctttacccagggggacctgggtgaacggaagatgaagttgaataccgaggtgcgggagattggtcccctcagccgtcgtggatttcatttagcttttcaggatgtgggtgcttgtgtcgcgctggttagcgtgcgagtctattataaacagtgccgggcgactgtccgtggcctcgccacttttcccgcaaccgccgctgagtcagcgttttcaaccctcgtcgaggtcgctggaacttgcgtggcccactccgagggcgaaccagggtcccccccaaggatgcactgcggcgccgacggagagtggttggtacccgttgggcgctgtagctgttcagccggcttccaggagcgaggagacttctgtgaggcatgcccccctggattttataaagtgagcccacggcgccctctgtgcagcccatgcccagaacactcaagggccctcgagaacgcaagcacgttctgtgtctgccaagattcctatgcccgctcgcccaccgaccctcctagcgcatcctgcacacgccccccctctgcccctcgggacctgcaatatagtctcagccggtctccactggttctgcgactgaggtggctgccacctgcggactccggtgggcggtctgatgtaacctatagcctgttgtgcctgaggtgcgggcgcgagggccctgccggtgcatgtgaaccctgtggccctcgcgttgcattccttcctcggcaggccggcctccgcgagagagccgctacgctgctccacctgcgcccgggggctcggtatacagttagagttgccgctctgaatggggtgtcgggcccagcagccgctgcggggacgacgtacgctcaggttacagtgagtacaggtcctggcgccccctgggaagaagatgagatccgcagggaccgcgtagaacctcaatctgtgagcctctcttggagagaaccaatcccggctggcgcccctggggcaaatgacacagagtacgaaattcgatattacgaaaagggacagtccgagcagacttattctatggtgaaaaccggcgcccccacggtgaccgtcacaaatctgaaaccagccaccaggtatgtgttccaaatccgcgccgcttctcccggcccttcctgggaggctcagagctttaatcccagtattgaagtgcagaccctgggcgaagcagcttctgggtctcgcgatcaaagccccgccatagtagttactgtggtgaccatctctgcgctgctggtcctgggtagtgttatgtccgttttagcaatttggagaaggccatgtagctacgggaaggggggcggtgatgcccatgatgaagaggaactgtattttcacttcaaggttcccactagacgcacattcctggatcctcagtcatgtggtgacttactgcaagcggtgcacctgttcgcgaaggagctggatgcaaaaagcgtaacgcttgaaaggtctctcggaggaggtcggttcggagagttatgctgcggctgtcttcagctgccgggtagacaggaacttctcgtggcagttcacatgctccgggattcagccagcgattcccagagactgggctttttggctgaagctcttacgctcggacagtttgaccacagccacatagtacgcctggaaggggtggtaacacggggtagcactctgatgatcgtcacggaatacatgtcacacggcgcgctagatggtttcctccggcggcacgagggacagctggtcgccggccagctgatgggactcttgcccggtctggcctctgccatgaaatacctatccgagatgggatacgtccaccggggcttggccgcgcgccacgtgctcgtgtcttccgacctcgtttgtaagatcagcggttttggacgaggacctcgtgatcgatctgaggccgtgtacactactatgagtggaagaagtcccgccttatgggcagccccagagacacttcaatttggtcatttttcttccgcaagcgatgtatggagcttcggcattatcatgtgggaagttatggcatttggagaacggccttactgggacatgtcaggccaggacgtcatcaaggctgtggaggacggatttagactcccaccaccaaggaactgccccaacttactgcaccggctcatgctcgactgctggcagaaggacccaggtgagagacctagattttcccagattcatagtatcctgagcaagatggttcaggaccctgagccacctaagtgcgctttgactacgtgcccccggccccctactcccctggccgatagggccttttccactttcccatcattcggctccgtcggcgcatggctcgaggccttggatctttgtaggtataaagactcctttgcagcagccgggtacggctctttggaggccgtcgctgagatgaccgcgcaggacctggtatctctggggatttcgctcgccgaacatcgcgaggccttgctgtccgggattagcgcactgcaggcccgcgtcttgcaactacagggacaaggcgtccaggtatag

SEQ ID NO: 186668 - DNA, 3045 bp, synthetic construct
  misc_feature 1..3045: note = Description of Artificial Sequence: Synthetic coding sequence
  source 1..3045: mol_type = other DNA
atggagacctgcgccggcccccaccccctgcggctgttcctgtgccggatgcagctctgcctggctctgttactgggtccgtggagaccgggaaccgctgaagaagtgatcctgttggatagcaaggccagccaggcagaactaggttggacagccctgcccagcaatggttgggaggagatttccggggtcgatgaacacgatcggccaatccgcacataccaggtttgtaacgtgctcgagcctaatcaggataactggctgcagactggatggatatcaagagggagaggccagcgaattttcgtagaactgcagttcacactgagggactgcagtagtatccccggcgcggccgggacctgcaaggagactttcaatgtgtactatttagagacagaggccgatctgggcaggggacgtccccggcttggcgggagccggccaaggaagattgataccattgccgcagatgagtccttcactcaaggagacctcggcgagaggaagatgaaacttaacacagaggtacgggagatcgggcctttgagccggcggggattccacctcgctttccaagatgtgggtgcatgtgtggccctggtgtctgtccgtgtgtactataagcagtgccgcgccacagtaagaggcctggctacctttccagccaccgcggcagagtctgcttttagcaccctcgtcgaggtggccggaacctgcgtggcccactccgagggcgagccaggatcgcccccccgtatgcactgtggagcggatggcgagtggctcgtgccagtcggacgctgttcctgtagtgcaggcttccaggagcggggagacttttgcgaagcttgtccccccgggttttacaaggtgtcccccagacggcccctttgtagtccatgccccgagcattctagagctctggaaaacgctagcaccttttgcgtgtgccaagattcctatgcccgttcaccaactgacccaccaagcgcatcttgcacccgcccccccagcgctccccgagatcttcagtattctctgtccagatctcctctggtgctgcgtctccgatggcttccacccgccgatagtggcggacgctcggacgttacttattccctgctgtgtttacgctgcggcagggagggccctgccggcgcgtgcgagccctgcggacctcgggtcgctttcctacccagacaggcgggactccgggagcgggcagccaccctgctgcacctgaggcccggcgcccgatacaccgtgcgagttgccgccctgaacggtgttagcggacccgcggccgccgctggaaccacctacgcgcaggttactgtgtcaactgggcccggggccccgtgggaagaggatgaaatccgaagagacagggtagagccacagtctgtctccttgagctggcgggagcctattcccgccggagcgcccggcgccaatgacacggagtacgagatcagatactatgagaaaggccagtcagaacagacatatagtatggtcaagaccggtgcccccacagttactgtgacaaacttaaaaccggctactaggtacgtgtttcagattcgggccgcttcgcctggtccgtcctgggaggcacaatccttcaatccttcaatcgaggttcagacattaggggaggccgcgagtggctccagggaccagagccccgcgattgtcgtcaccgtcgtcactattagtgccctgctggtgttgggatctgtcatgtcggttctcgcgatttggcgcaggccctgctcatatggaaagggcggcggagacgcccacgatgaagaggagctctacttccactttaaagtgccgacccgaaggaccttcttagatccccagagctgtggtgacctgttgcaagctgtgcatctcttcgcaaaagagctcgacgccaagagtgtcaccctagaaaggtcacttgggggcggacggtttggagaactgtgttgtgggtgcctgcaactgccgggccggcaggagctgctggtggcagttcatatgctgagggattcagcgagcgattctcaacggctcggcttcctagccgaagctctcaccctgggacagtttgatcactcacatatagtccggcttgaaggcgtggtcacgcgggggtctacactcatgatagtaactgagtacatgtcgcacggcgcgttagacgggttcctcaggagacacgaaggccagctggtggcaggtcagttgatgggcctgcttcccgggttagccagcgcaatgaagtatctttccgaaatgggttacgtccatcgcgggctggccgcacgccacgtcctggtcagctccgatctggtttgcaagatcagcggatttggccggggacctagggatagatcggaggccgtctacactacgatgagcgggcggtccccagccttgtgggccgctcctgagacactgcaatttggtcatttctcttctgccagtgatgtttggagcttcggaattattatgtgggaggtaatggcctttggcgaacggccgtattgggatatgtcgggccaggatgttattaaggccgtggaagatggcttccggctgcctccccctcggaattgtcccaacttactccacaggctcatgctggactgctggcagaaagaccccggagaaagaccacgattctcacagatacactccatcctctcgaaaatggtccaggatccagaacccccaaagtgcgctctgacaacctgccctcgcccgcccacccccctcgccgatagagccttctctacatttcccagttttggaagtgtaggcgcttggctggaggccctcgacctgtgtcgttacaaggattcctttgcagcggcgggatacggctctctggaggcggtcgccgagatgactgcacaggacctggtgagcctgggcatttctctagctgaacatcgagaggccctgctgagcggaatctccgcactgcaggcccgcgtcttacaactccagggccaaggagtgcaggtcatcattaagacctgcctctag

SEQ ID NO: 186669 - DNA, 468 bp, synthetic construct
  misc_feature 1..468: note = Description of Artificial Sequence: Synthetic coding sequence
  source 1..468: mol_type = other DNA
atggtgaagaccggcgcccccaccgtgaccgtgaccaacctgaagccagcgaccaggtatgttttccaaattcgggcagcatcaccaggcccaagctgggaagcgcagtctttcaatccgtccattgaggtgcaaacactgggggaagcagcctccggaagtagggaccagtctcccgcgatagtagtgacggtggtgactatcagtgctctcttggtcctcggcagtgtgatgtccgtcttagccatctggcgccgcccatgtagctacggcaagggagggggagacgctcatgacgaggaagagctgtacttccactttaaagtccctacacgacgtaccttcttggatccacaaagttgtggcgacctccttcaggcggtacacctgttcgccaaggaactggacgccaagtctgttaccctcgagcgttccctcggcggcggacttgagacctcccctcattag

SEQ ID NO: 186670 - DNA, 2931 bp, synthetic construct
  misc_feature 1..2931: note = Description of Artificial Sequence: Synthetic coding sequence
  source 1..2931: mol_type = other DNA
atggagctgcaggccgcccgggcctgcttcgccctgctgtggggctgcgctctcgctgcagcagctgcagcccaaggaaaggaggtggtgctgctcgatttcgcggctgctggtggcgaactaggatggctgacccacccctacggcaagggttgggatctcatgcagaatatcatgaatgacatgccaatttatatgtattcagtatgcaatgtgatgagtggcgaccaggataactggctacggaccaattgggtttaccgaggcgaagccgaacgtatcttcattgaactgaaattcaccgtgagagattgtaattccttccccggaggagccagctcatgtaaggagacatttaatctttactacgccgaatcagaccttgactatggtactaacttccaaaagaggctgttcaccaaaattgataccatcgcccctgatgagattaccgtgtcttccgatttcgaagccaggcatgtcaagctgaacgtggaggaaaggtcggtcggacctttgaccaggaaaggcttttacctggcattccaggatatcggcgcttgcgtggctctgctgtctgtgcgcgtctactataaaaagtgcccagagttgcttcaaggcctcgctcactttccggaaactattgctggctctgatgcaccatccctggccacggtagctgggacctgcgtggaccacgcggtcgttcctcctggaggtgaggagcctcgtatgcactgtgccgtggacggagagtggttggtccctattggacagtgcctctgccaggccggctacgaaaaggtggaagatgcttgccaggcttgctcccctgggtttttcaagtttgaagcatccgaatctccctgcctggagtgccccgagcatactctgcccagcccagagggcgccacctcatgtgaatgtgaggagggatttttccgagctcctcaagaccctgcgtcaatgccctgcaccagacccccttccgccccgcattacctgacagccgtcggaatgggagcaaaagtcgaacttcggtggacccctccccaggacagcggtggtcgcgaagatattgtctactctgtaacatgtgagcagtgttggccagagagcggtgaatgcggtccttgcgaggcctccgtccgctactctgaacccccacatgggctgaccagaacttctgtcaccgtgagtgatttggagccccatatgaactacacatttaccgtggaagccaggaacggcgtatccgggctggtcaccagcagaagcttcaggactgcctctgtctcaataaaccaaactgaacccccaaaagttaggttagaagggaggtctaccactagtctctcagtgagctggtctatcccacctccacagcagtcgcgagtttggaagtacgaggttacgtaccgcaaaaagggagattcgaatagttataatgtccgtcgcacagaagggtttagcgtgacattagacgacctagcaccagatactacttatttggtgcaagtccaggctctgacccaggagggccaaggtgctgggagtaaggtccacgaatttcagactctgagccccgagggttctggaaacttggcagtaatagggggggtggccgtgggcgtggtactgctgttggtgttggctggagtgggtttctttatccatagaaggcgcaaaaaccagcgcgctaggcagagtccagaagacgtttactttagtaaatccgagcagctgaagcccttaaaaacgtatgtagacccgcatacgtacgaggacccaaaccaggcagtcctgaaatttactacggagattcacccttcctgcgtgactaggcaaaaggtcataggagcaggagagttcggagaggtgtacaaaggcatgctgaaaacatcgtccggtaaaaaagaggtaccagtggctattaagacgctgaaggctggctacaccgaaaagcagcgcgtagacttcctcggggaggctgggatcatggggcagttcagccaccacaatattatccgactggagggcgtgatttcgaaatataagccgatgatgatcatcacagagtatatggagaacggtgctctggacaaattcttgagggaaaaagacggggagttctccgttttgcaactggttggcatgctgcggggaattgccgccggcatgaagtacttagcaaacatgaattacgtgcatcgagacctggccgcccgcaacatcctggtcaactccaatcttgtctgcaaggtttctgatttcggtctgtctcgggttcttgaggacgacccagaagccacctatactacaagcggcggcaagatacccatcagatggaccgcccccgaggccatttcataccgcaaatttacaagcgcaagtgatgtgtggtcctttggcatcgttatgtgggaggtaatgacctacggggaacgcccctattgggaactcagtaaccatgaggtgatgaaggcaattaatgacggttttaggcttcccacccctatggattgtccgtcagccatctaccaacttatgatgcagtgctggcaacaagaaagagcccgaaggcctaaatttgcggacattgttagcatcctagacaaactcattagggccccagactctctgaagactttggcagacttcgatccacgggtgtcgattagacttccaagtaccagtgggagcgagggggtgcccttcagaactgtgtccgaatggttagagtccattaagatgcagcagtacacagagcattttatggccgctggctacacagccatagaaaaagtcgtgcagatgaccaatgacgacataaagcggataggtgtacggctccccggacaccaaaagcgcatagcctactccctgttaggcttaaaagatcaggttaacaccgtggggattcccatctag

SEQ ID NO: 186671 - DNA, 2952 bp, synthetic construct
  misc_feature 1..2952: note = Description of Artificial Sequence: Synthetic coding sequence
  source 1..2952: mol_type = other DNA
atggactgccagctgagcatcctgctgctgctgagctgcagcgtgctcgacagctttggagagctgatcccccagccctctaacgaagtcaatctcctcgatagtaagactattcagggcgagctgggctggatcagttacccaagccatggctgggaggaaatcagcggggtggacgagcattatacacctatacgcacataccaggtatgcaatgtgatggaccactctcagaataattggttgaggactaactgggtaccgaggaactccgcccagaagatctatgtcgagttgaaattcacccttcgagattgcaatagcatccccctcgtgctcggcacttgtaaggagacattcaacctctactacatggagagtgatgacgaccacggcgttaagttcagagagcaccagttcaccaaaattgacacgatcgcggctgatgagtcctttacgcagatggacttaggtgatcgaatcctgaaactgaataccgagatacgtgaggtgggccccgttaataagaaaggcttctatctggcgtttcaagacgtcggcgcttgcgttgctttggtgtcagtgagagtttactttaagaagtgccctttcaccgtgaagaacctagccatgtttccagacacagttcctatggatagtcagtcactggtcgaagtgaggggctcttgcgtaaacaatagcaaggaggaggaccccccccgcatgtattgttccactgagggtgagtggctcgtaccgataggcaagtgttcatgtaacgcaggatacgaggagcggggctttatgtgtcaagcatgccgcccaggcttttacaaagcactcgatgggaatatgaaatgtgctaagtgcccgcctcattcctcgacgcaggaggacgggtctatgaattgcaggtgcgaaaacaactacttccgcgccgacaaggaccctccatcaatggcatgtacccgaccccctagttcgcctcggaatgtaatcagcaacataaatgaaaccagtgtaatcctggattggagctggccattggacactggaggcaggaaggatgttacctttaatattatatgcaagaaatgcggatggaatatcaaacagtgcgaaccttgttcacctaatgtgcgcttcctccccagacagttcgggctgacaaacaccaccgttacggtcactgacttgttggctcatacaaattacactttcgagattgacgctgtgaacggggtatcagaactctcatcgcctcctcgtcaattcgctgccgtgtccataacaaccaaccaggctgcgccttcgcctgtgctaaccatcaaaaaagaccgtacatctaggaacagcatttccctctcctggcaggagcccgagcatcctaatggcattattctcgattatgaagttaagtactacgaaaaacaagaacaggaaacatcctatacaatactgagagctcgcggtaccaatgtgaccattagctcccttaaaccagatactatctacgttttccagatccgcgccagaacagccgccgggtacggaactaattctaggaaattcgaattcgagacaagcccggatagtttcagcatctccggagagtccagccaggtggtcatgatcgccatatccgcagcagtagccataattttgctcacagttgtgatctacgtgctgatcggccggttttgtggttataagagtaagcatggggctgatgagaaacggttgcatttcggtaatggccacctgaagctacctggcctcagaacctatgttgatccccacacgtatgaggatcctacacaggccgtgcacgaatttgcgaaagagttagacgccacaaacatttctatagataaggtggtgggtgcaggtgagtttggagaagtgtgcagcggcaggctgaagctgccttcaaagaaggagatctctgtagctattaaaacattaaaggtgggttacaccgaaaaacagaggagagacttcctgggcgaagctagcatcatgggtcagtttgatcatcccaacattatccgcctggagggggtggtgacaaaaagcaaacctgtgatgatcgttactgagtatatggagaacggctctctcgatagctttctgcgcaagcacgatgctcaatttaccgtgatccaacttgtcggcatgttgagagggattgcatcagggatgaagtacctctccgacatggggtatgtgcaccgtgatttagcggctcggaacatcctaataaactctaaccttgtttgtaaggtatcagactttggcctctctagagtgctggaagatgacccggaggctgcatacacgacccgcggtggcaagattcctattcgatggacttcaccagaggcaattgcctaccgcaagttcacatctgcatccgacgtgtggtcctatggcatagtactttgggaggtcatgtcatatggcgaacgaccttactgggaaatgagcaatcaggatgtgattaaggcagtggatgaagggtacagacttcccccacccatggattgccccgctgccctctatcagctaatgcttgactgttggcaaaaggaccgaaacaaccggccgaaattcgagcagatcgtgtccatccttgataagctaattaggaaccccggctcactgaaaatcatcacatcagccgctgctagaccatccaacctgctcctggatcagtctaacgtcgacattactacgtttagaaccaccggagattggctgaacggggtctggactgcacattgcaaagaaatctttaccggcgtcgaatattctagctgcgacaccatcgccaaaatctcgacagacgacatgaagaaggttggcgtaacagtggtcggcccccagaagaaaattatctcctctataaaagccctagaaacacagtccaagaacggcccagtccccgtttag

SEQ ID NO: 186672 - DNA, 1620 bp, synthetic construct
  misc_feature 1..1620: note = Description of Artificial Sequence: Synthetic coding sequence
  source 1..1620: mol_type = other DNA
atggactgccagctgagcatcctgctgctgctgagctgcagcgtgttagactcctttggagagctcatcccacagccgtcgaatgaagtcaaccttttagatagcaaaactatccagggtgaacttggatggatatcttatccatcccatggttgggaggagatcagcggcgtggacgagcactatacgcccattcggacttaccaggtgtgcaacgtaatggaccatagccagaacaattggctgcggacaaactgggttccacggaattcagcccaaaagatttatgtggaactgaagtttacattgagagactgcaatagcattccacttgtactcggcacttgcaaggagactttcaatctctactacatggaaagtgacgatgatcacggggttaaattcagagaacaccagttcactaaaattgatacgattgcagctgacgagtccttcacacagatggacctgggagatcgaattctcaaactgaatacagaaatcagagaagtggggcctgtgaataagaaaggattctatcttgctttccaagacgtcggggcatgcgtggctctcgttagtgtccgtgtgtattttaaaaaatgtcccttcaccgtgaagaacttagctatgttccctgatacagtgcccatggactcccagagcctggtcgaagtccgggggtcctgtgtaaacaattccaaggaggaggacccccccaggatgtactgcagcacggaaggcgaatggctcgttccgattggcaaatgctcttgtaatgcgggatatgaagagcgcggcttcatgtgccaggcttgtcggccgggattctacaaggccctggacggcaatatgaagtgtgccaagtgtcctccccacagctccacacaggaggacggttccatgaactgtcggtgtgaaaataattactttcgcgcggataaggatcccccaagtatggcatgcactcgcccaccttcttccccccgcaacgtgatctccaacattaacgagacaagtgtgatcttggactggtcatggccattagatactggtggtagaaaagacgtgacattcaacatcatttgtaaaaaatgcgggtggaatattaaacagtgtgagccatgctcacccaatgtacggttcctgcctcgccagttcggtcttacaaataccaccgtgacagtgactgacctgctcgcccacacaaactatactttcgagatagatgcggtcaacggtgtcagcgagctgagttcccctcccagacaattcgcggccgtgagtattacaactaaccaggcggcgccttctcctgtactgaccattaaaaaggacagaacaagtcgcaactcaatatcgctgtcctggcaggagccggagcaccctaatgggattatactggattacgaggtaaagtactacgagaaacaggagcaggaaacctcttatacaatactgcgcgctaggggcacaaacgtcactatttccagtctcaagccagataccatctacgtcttccaaattcgcgcacgcacagcagccggctacggcactaattccaggaagtttgaatttgagacatccccggattgcatgtactatttcaatgctgtgtag

SEQ ID NO: 186673 - DNA, 3114 bp, synthetic construct
  misc_feature 1..3114: note = Description of Artificial Sequence: Synthetic coding sequence
  source 1..3114: mol_type = other DNA
atgcggggcagcggcccccggggcgccggccggcggcggccccccagcgggggaggtgacacccccatcactccagcctctctggccgggtgttactcagcccccagacgcgcgcccttgtggacttgcctgctgctgtgtgccgcgcttcgtaccttgctcgcctctccaagtaatgaagtaaatctgttagatagccgcacggtgatgggggatcttggctggattgcattccccaaaaacggttgggaggaaatcggggaagtggacgagaactatgcacctattcatacctatcaggtgtgtaaggtcatggagcaaaatcagaacaactggctgttaacaagctggatttccaatgagggggcctctagaatcttcatcgagctcaagttcacacttagggactgtaactctttgcctggcgggcttggaacatgtaaagaaaccttcaacatgtattactttgagtccgacgatcaaaacgggcgtaatatcaaggagaatcaatacattaagatagacaccattgcagcagacgagtccttcaccgaattggatctgggggatagagtcatgaaactgaatactgaagtcagggacgtagggccactgtcaaagaaaggcttttatttggccttccaagacgtgggtgcatgcatcgccctggtatccgtaagggtttactacaaaaagtgtccgtctgttgttagacacctcgccgtatttcctgatacaatcaccggggcggactcatctcagctcctggaggtctcaggctcgtgcgtgaaccactctgttacagacgaaccacccaagatgcactgctcagcagaaggggaatggctcgtcccaataggaaaatgcatgtgcaaggcaggatacgaggaaaaaaacggaacttgccaggtgtgtcgtcccggattctttaaggctagcccccatatacagagctgcggaaagtgtccaccccattcttacactcacgaggaagcatctacgtcctgtgtgtgtgaaaaagactatttccgccgggaatccgaccctccaacgatggcatgtacaaggccaccttcggccccacggaacgccatcagtaacgtgaatgagacctctgtcttcctggagtggatcccaccagcagacactggcgggcgcaaagatgtctcctactacatcgcttgtaagaaatgcaactcccacgccggcgtctgcgaagaatgtggcggacacgtcaggtacttaccccgccagtccggcctcaaaaacacatctgtcatgatggttgatctgttagcccatactaattacaccttcgagattgaggctgtaaacggcgtgagcgacctgtcccctggcgcacgccagtatgtcagcgtgaatgtgaccacgaatcaagcagcaccctcgcccgttaccaatgttaaaaaagggaagatagctaaaaactctatctccctaagctggcaggaacccgaccgacctaacggtataatcttggaatatgaaattaagtactttgagaaggatcaggagacatcatacactatcatcaaatctaaagaaactacaattactgctgagggattgaaacccgcatctgtgtacgtttttcagatacgtgctagaactgcagcggggtatggagtgtttagtaggcgtttcgaatttgagaccacccctgttttcgctgcaagttcagaccagagtcaaataccagtcattgctgtctcagttacagtgggggtgatcctcttggctgtggttattggggtgctgctcagcggctcatgctgcgaatgtggctgtggccgtgctagctcactgtgtgctgtggcgcatccatcgttgatctggcgctgtggctatagcaaagctaaacaagaccccgaggaggaaaagatgcacttccacaatggacacattaagctgccgggagtgaggacatacatcgacccccacacatatgaggacccaaaccaggcagtccatgagtttgcaaaggaaattgaagccagctgcattacgattgagcgcgtgattggggcaggtgaatttggtgaagtgtgtagtggtaggctgaaactccctggcaagcgggagctgcctgtcgccattaagacactgaaagtcgggtacacagagaaacagagacgggacttcctcggggaagctagtattatgggccaattcgatcacccgaatattatacacctggagggtgtagtgactaaaagcaaacccgtgatgatagtgactgaatacatggagaacggcagcctcgacacatttctgaaaaagaacgacggtcagttcaccgtcatccaattggttggcatgttgagagggatctccgctggaatgaagtatctttcggacatgggttatgtccatcgcgacctggcagccaggaacatcctcatcaatagtaacctggtctgtaaagtgtcagatttcgggctgtcacgagtgttagaggatgaccctgaagccgcttacactactcgtggtggaaagatccccattcgctggacagccccagaggcaattgcgttccgcaaattcacctccgcgagcgacgtctggtcctatggcatcgtcatgtgggaggtggtcagctacggtgagagaccatattgggagatgactaaccaggacgttatcaaggcagtggaggaggggtacagactgccatcgccaatggattgtcctgcagccttgtatcagctaatgcttgattgctggcaaaaagagaggaattctcgacccaaatttgacgaaatcgtgaacatgttggacaagctgattcggaacccaagctcgctgaaaaccctggtaaatgcgtcgtgcagggtttctaacctgctggccgagcacagcccccttggatctggcgcctaccgttctgttggtgagtggttagaagctatcaagatggggagatacaccgaaatatttatggagaacggctactcaagcatggacgctgtcgcgcaggtgacgttggaggacctacggcgtctgggagtgacattggttggccatcagaaaaaaattatgaatagcttacaagagatgaaagtccaactcgtgaacggcatggttcctctgtag

SEQ ID NO: 186674 - DNA, 3048 bp, synthetic construct
  misc_feature 1..3048: note = Description of Artificial Sequence: Synthetic coding sequence
  source 1..3048: mol_type = other DNA
atgcggggcagcggcccccggggcgccggccggcggcggcccccctcaggcggcggagatacacctatcacccccgcctcactggcaggttgttactccgctccacgaagggcacctctgtggacatgcctgctgctgtgcgctgcgctacgcacgctgctggcctctccttccaacgaggtgaacctgctggacagcaggaccgtgatgggcgacttgggatggatagctttccccaagaacggctgggaagagattggcgaggtggatgagaactatgcgccgatccatacctaccaggtgtgcaaggttatggagcagaatcagaacaactggctgctgacttcctggattagtaacgagggagcttctcgtattttcattgaacttaagttcaccctgagagattgcaactccctacccggagggctcggcacttgcaaggaaactttcaacatgtattatttcgaaagcgacgatcaaaacggcaggaatataaaagaaaaccagtatatcaagatcgacaccattgccgctgacgaaagcttcacagagctggaccttggggacagagtcatgaaactcaatactgaggttagggacgtgggccccctgtctaaaaagggcttttatctggcgtttcaagacgttggggcatgcatcgctctggtgagcgtgcgcgtgtactacaaaaagtgcccctccgtggttcgccaccttgccgtgtttcccgacacaataactggggccgattcatcgcagttgcttgaggtgtctggatcctgcgtgaatcactccgtcactgacgaacccccaaagatgcactgcagtgctgaaggagaatggctggttcctatcggcaagtgcatgtgtaaggcagggtatgaggaaaaaaacggcacctgtcaggtgtgtcgtccaggcttttttaaggcgagcccgcacatccagtcctgcgggaagtgtcccccacatagctatacacacgaggaggcctctacatcctgtgtgtgtgaaaaagattacttcagacgcgagtcagatccacctacaatggcctgcactagaccgccctccgcacctcgaaatgccataagcaacgtcaacgaaacaagtgtcttcctcgagtggataccaccggccgataccggtgggaggaaggatgtgtcttattatattgcctgtaaaaagtgtaatagccatgccggagtgtgtgaagagtgcggaggacacgtccggtacttgccacggcaatctggcctgaagaacacctctgtgatgatggtagacttgctagcccacacaaattacacattcgagatagaggccgtgaatggggtgtccgatctcagcccaggggcgcgccagtacgtttcagtgaatgtcacaaccaaccaggcagctccgtcacctgttaccaacgtcaagaagggtaagatcgctaagaacagcatttccctgtcttggcaggagccggacagacccaatgggataatactggaatatgagatcaaatactttgaaaaggatcaagaaaccagctacacaatcatcaaatccaaagagaccacaatcaccgcggaaggccttaagccagctagtgtttatgtgttccagatccgtgctcgtacagccgccggatatggagtgttctcccgaaggttcgaattcgagaccacacctgtattcgccgcaagctcagatcagagtcagatccctgtcatagccgtttcagtaaccgtgggcgtgatcttgctggctgtggtcattggcgtgttactgtctggccgccgttgtggatattcgaaagcaaagcaggaccctgaggaggagaagatgcattttcacaatggtcacattaaactgcccggagttcggacctatatagatcctcatacgtacgaggaccccaatcaggccgtgcacgaattcgctaaagagatcgaggcgagctgcatcactatcgaacgggtgataggggcaggagagtttggagaagtctgctcagggagactgaagctgcccggaaagcgtgaactgccagtggctataaagactttaaaggtgggttacaccgagaaacagagacgtgatttcttgggagaagccagcattatgggccagttcgaccatcccaatattattcacctggagggtgtggtgacaaagtccaagccagtgatgattgttaccgaatatatggaaaacgggagcctcgacacatttctgaaaaagaacgatgggcaattcacagtcattcagctcgtcggcatgttacgggggatcagcgctggaatgaagtatctgtcagacatgggctacgtgcacagggacttggctgcacgtaacatcctgattaatagtaatctggtgtgtaaagtctccgatttcggactttctcgagttctagaggacgatcctgaggccgcttacacaacgcggggaggcaaaatccctatccggtggacagcaccagaggccatcgcatttagaaaattcaccagcgcaagcgacgtgtggtcatacggcatcgtgatgtgggaggtagtgtcttatggcgagaggccatattgggagatgaccaaccaggacgtcatcaaggccgtcgaggagggatatcggcttccttcaccgatggattgtcccgccgcactgtatcagctgatgctggactgctggcagaaggagcgcaactctagacctaagtttgatgaaatagtcaacatgctcgacaaactgatccgaaacccttcttctctgaaaacactcgtaaacgcctcttgcagggtgtctaaccttctggccgaacattctccccttggaagcggggcttacaggtccgtcggcgagtggctagaagccatcaagatggggagatacacagagatcttcatggagaacggctactccagtatggacgccgtggcccaagtgaccctagaagacctgcgaaggctaggggtgacattggtagggcatcagaagaaaataatgaattcattacaggaaatgaaagtccagctggtcaacggcatggtccccctctag

SEQ ID NO: 186675 - DNA, 3015 bp, synthetic construct
  misc_feature 1..3015: note = Description of Artificial Sequence: Synthetic coding sequence
  source 1..3015: mol_type = other DNA
atgcggggcagcggcccccggggcgccggccggcggcggcccccctccgggggaggcgacactccaattacccctgctagcctagctgggtgctattctgctcccaggcgggcgcccctttggacctgcttattgctgtgtgcagcactccgaaccctacttgcgagtccaagcaacgaggtcaacctcctggacagcagaacagtaatgggagatttggggtggattgcttttcctaaaaacggttgggaggaaatcggcgaagtggacgaaaattacgcacccatccacacataccaggtctgcaaggtaatggagcagaaccagaataattggcttctgacttcttggatttccaacgagggcgcaagcaggatttttattgaactcaagtttacccttagggactgtaacagtttacctggaggtctgggaacatgcaaggagacattcaacatgtactattttgagtccgacgatcagaacggccgtaatatcaaggagaaccaatacataaaaattgatacaatcgccgccgatgagtcgttcacagaactggaccttggtgacagagtcatgaagctcaacaccgaagtccgggacgtcggccctctgagcaagaagggtttctatctggcgtttcaggatgtgggcgcttgtattgcactggtttccgtgcgggtctattataagaaatgcccttctgtggtcagacatttagccgtgtttcctgataccatcacaggcgcggatagctctcagttgctcgaagtgtctggtagctgtgtcaaccatagcgtgacggatgaacccccaaagatgcactgcagtgctgagggggaatggctggtgcccatcggtaaatgcatgtgcaaagcggggtatgaagaaaaaaacggaacttgtcaggtctgcagaccaggcttctttaaagcctcgccccacattcagagttgcggcaagtgcccaccacactcctatactcatgaagaggccagtacctcctgtgtttgcgaaaaggattattttcggagggaaagcgatcctccgactatggcctgtacccgtccacctagtgcccccaggaacgcaatctccaatgtgaatgaaacatccgtgtttctggaatggatcccgcccgctgacacaggcggacgaaaagatgtttcctattacattgcttgcaaaaagtgtaactcgcacgcgggcgtgtgcgaggagtgtggggggcatgtacggtaccttcctcgacagagcggcctgaagaatacttccgtgatgatggtggacttgctcgcgcacacaaactacactttcgaaattgaggcagtcaatggcgtgtccgacctttcgccaggagcacgccagtacgtttctgtcaacgtaacaaccaaccaggccgctccatccccagtgaccaacgtgaaaaaaggtaagatagccaaaaacagcatttcattgtcctggcaggagcccgatagacctaacgggatcattcttgaatacgagattaaatatttcgaaaaggaccaggagacgagttatacaatcattaaatctaaggagacgacaatcaccgcagaaggtctcaaacctgcctctgtgtacgttttccagattagggccaggacagcagctggttatggtgtattctccaggcgctttgaatttgagacgacgccggtgtctgtcgccgcatcaagtgaccagtcgcagattcccgtgattgcggtcagcgtgactgtgggcgtcattttgctggccgttgtgattggagtgctcctgtctggctcgtgttgtgaatgtggctgcggccgcgcaagttccctttgcgcagttgctcatccttccctgatttggagatgtggttacagcaaggcaaagcaagatccggaagaggagaaaatgcatttccacaacggacatattaagctgcccggtgttagaacatatatcgatccacacacctatgaagatccaaaccaagcggtacatgagttcgctaaagagatcgaagctagttgtatcacaattgagcgggtgattggcgccggtgagttcggagaagtgtgttccgggcgcttgaaacttccaggcaaaagagagctccctgtggcaataaagactttaaaagttgggtacactgagaaacagcgacgcgacttcctgggtgaggcatctataatgggtcagttcgaccacccaaatatcattcacctggaaggggtcgtaacaaagagtaagcctgtgatgatcgtcactgaatacatggaaaacggatccttggacacctttctcaaaaaaaatgatggacagttcaccgtgattcagttagttggaatgctgcgtgggataagcgcaggcatgaagtacctcagcgacatgggatacgtccatagggatttggcagcaaggaacattttaatcaatagcaacctggtatgcaaagtctcagacttcggactgtcacgcgtgctggaggacgatccagaagccgcgtacactacacgcggtggtaagatacccatccgttggacagcccctgaggcaatcgcttttcggaagttcacatcggcaagcgacgtttggtcctacggcattgtgatgtgggaggtcgtgtcttacggggaaaggccctactgggaaatgacaaaccaagatgtgattaaagcagtagaagaaggttatcgactgccatcacccatggactgccccgccgctctttaccaactgatgctcgattgctggcaaaaagaaaggaatagcagaccaaaatttgatgaaattgttaacatgctggacaagctcattaggaatccttcctcactgaagacgctggtgaacgcttcttgccgcgttagcaacctgcttgcggagcacagcccccttggatcaggtgcataccgttctgtgggagaatggctggaggcaatcaaaatggggaggtacactgagatcttcatggagaatggttactcgtcaatggacgcagtggctcaggtgactctggagtag

SEQ ID NO: 186676 - DNA, 3018 bp, synthetic construct
  misc_feature 1..3018: note = Description of Artificial Sequence: Synthetic coding sequence
  source 1..3018: mol_type = other DNA
atggcccccgcccggggccggctgccccccgccctgtgggtggtgacagccgcagccgctgccgccacttgtgtcagcgcagctcggggcgaggtgaacctcctcgatacatcaaccatacatggggattgggggtggctgacctatcccgctcatggctgggacagtatcaatgaggtcgatgagagctttcagcctattcacacctaccaggtgtgtaatgttatgagcccaaatcagaataattggctgcgcaccagttgggtgcctcgcgatggcgcccgccgagtctacgctgaaatcaaatttaccctgagggattgcaatagtatgccaggtgtgctcgggacttgtaaggaaacctttaacctgtactacctggagtccgatagggatttgggcgcctcaacgcaagagtcgcagtttctgaaaatagacaccatcgcagcagatgaaagttttacaggagccgacttaggcgtcagacggctgaaactgaacacagaggttaggtcagttgggcccctctcaaaacgggggttctatctggcgtttcaggatattggggcttgcctagccatcctgagtcttagaatctattataagaaatgcccagccatggttcgcaatctggcggcattcagtgaggccgtcacgggtgcagatagcagcagcctagtggaagtgcgcgggcagtgcgtccgccacagtgaggagagggacaccccgaagatgtactgcagcgctgagggggagtggctagtgccgatcggaaaatgtgtgtgctcggcagggtatgaggaaaggagagatgcctgtgttgcctgcgaactggggttttataaatctgcaccaggcgaccagctctgcgcgcgttgtccaccccacagccatagtgctgccccggcggcccaggcttgtcactgcgatctttcctactatagagccgctttagacccgccaagttccgcctgtactcggcccccgtctgcacctgtgaacctgatctcttctgtcaacgggaccagtgtgactctggaatgggctccgcctcttgatcccgggggacgatctgatataacctataacgctgtttgtcgcagatgtccatgggcactatctaggtgtgaggcatgcggcagcgggactaggttcgtgccacaacagacctcgctggtgcaagcctcactactcgtggctaatctattggcacacatgaactacagcttctggatcgaagccgtgaacggagtgagtgacctgtctccagaaccacggagggctgccgttgtgaatataacaacaaaccaggctgctccaagtcaagtggtggtgatccgccaggaaagggcggggcagacatccgttagcctgctctggcaagaaccagagcaacccaatggcattatcttagagtatgagataaaatattacgaaaaggataaagagatgcagtcttattcaacgctaaaagctgtgaccactagagccaccgtgtccggcctcaaaccgggaacacggtacgttttccaggtgcgcgcacgcactagtgccggctgtggtcgcttttctcaggctatggaggtagaaaccggaaaaccaaggcccagatatgatacgcgcacgatcgtttggatctgccttaccctcatcacaggactggttgtcctgttgctgttattgatctgcaaaaaaagacactgtggctatagcaaggctttccaggacagtgatgaagagaagatgcactatcagaacggtcaggcccctcccccagttttcctgccactgcaccacccccccgggaagctgcccgaaccacagttctacgcggagccacacacctacgaggagcctggccgcgctgggaggtcattcactagagagattgaagccagccgcatccatatagagaagatcataggctccggcgacagtggagaggtctgctacggccgtctccgcgttcctggacagcgagacgttccggtagcaattaaagcactcaaagctggatacacagagcggcagcgccgcgattttctgagtgaagcctccattatggggcaattcgaccacccgaacattatacggctggaaggcgtagtcaccaggggacgactagctatgatcgtgacagagtacatggaaaacggatccctcgatacctttctccggactcacgatgggcagttcaccatcatgcagcttgtgggcatgctgcgtggcgtaggcgctggcatgcggtatctctctgaccttggctatgtgcaccgggacctagctgcccgcaatgtgctggtggatagtaatctggtttgcaaagtgagcgattttggactgtcccgcgtccttgaggatgaccccgacgccgcttacactactaccggagggaagattccgattagatggaccgcccctgaggcaatcgcctttcgtacattttcctctgcttcggacgtctggagtttcggcgtggttatgtgggaagtgttggcctacggggagagaccatactggaatatgacaaatagagacgttatctccagtgttgaagagggatatcggctcccagcaccgatgggatgtccccacgcccttcatcagctcatgctggattgttggcacaaggaccgggcacaacgccctagattctcgcagatcgtcagcgtgcttgacgcccttatcaggtcacctgagtctctgcgggcaactgctacggtgtccagatgccccccccctgcatttgtaagatcctgctttgacctcaggggtggtagcgggggaggcggcgggttaaccgtgggggattggctcgactctataaggatgggacgctatagagatcacttcgccgcgggcggctactcctcccttggaatggttctccggatgaacgcacaagacgtgcgtgccctgggtatcaccctgatggggcaccaaaagaagattctgggatccatacaaactatgcgagctcagttgacctcaactcagggacctcgcaggcacctgtag

SEQ ID NO: 186677 - DNA, 1488 bp, synthetic construct
  misc_feature 1..1488: note = Description of Artificial Sequence: Synthetic coding sequence
  source 1..1488: mol_type = other DNA
atggcccccgcccggggccggctgccccccgccctgtgggtggtgaccgcagcagccgcggccgcgacatgcgtgtctgccgcaagaggggaagtaaaccttctggacacatcaacaatacatggcgactggggatggctgacctatcccgcccacgggtgggattccataaatgaggtggatgagtccttccaacctatccacacttaccaagtgtgcaacgtgatgtcgcccaaccagaataactggctcagaacttcatgggtcccacgtgatggcgccagaagagtgtacgcggagatcaaattcaccttaagggactgcaatagtatgcccggagtgcttggcacctgcaaggagacatttaatctctactatttggaaagcgatagggatctgggcgcttctactcaggagtcacagttcttgaagattgataccatcgctgccgacgagtcgttcacaggcgccgacctgggagtcagacggcttaagctgaatactgaagtgcggtctgttggtcccctctctaaaagaggcttctacttggcctttcaagatattggtgcctgtctggctattctgtcactgcggatttactataagaagtgtcccgcgatggttaggaacctcgccgccttcagtgaagctgtcaccggtgcggatagcagtagcctggtcgaagtgcgcggccagtgcgtgaggcacagcgaggaacgcgatacacccaaaatgtattgtagtgcggagggggagtggttggtgcctattggcaagtgtgtatgcagcgcaggttacgaggagagacgtgatgcctgtgttgcatgcgagcttgggttttataagtcggccccaggggatcagctttgcgccaggtgcccccctcactctcactcagccgctccagcggcacaagcctgtcattgtgacctgtcatactaccgcgcggccttggacccgccaagcagcgcgtgtaccaggccaccctctgctcctgtgaacttgattagcagcgtgaacgggacctcagtaactctggagtgggctcctccccttgatcccggcggacgatctgatattacttataacgccgtatgtaggaggtgcccgtgggctctgtctcgatgtgaggcctgtggttccggcacaaggtttgtgccccagcaaacaagcttggtccaggcatccctcctggtagcgaacttgttggctcacatgaactactcattctggattgaagccgtgaacggcgttagcgatttgagccccgagccccgacgggccgctgtggtcaacataaccactaatcaagctggccgcaggcgcaattcagtcccacaacggcccgggccacccgcatcgccagctagtgacccaagcagagaccagtcctccgcgggtgacgtcctgtgggcgttccgccaggtgccactttggccctgcgctccccaccaagaccccgagctcgaagcccttcattgtctgtag

SEQ ID NO: 186678 - DNA, 1488 bp, synthetic construct
  misc_feature 1..1488: note = Description of Artificial Sequence: Synthetic coding sequence
  source 1..1488: mol_type = other DNA
atggcccccgcccggggccggctgccccccgccctgtgggtggtgaccgccgccgctgccgccgccacatgtgtgtcagctgcaaggggagaggtgaatctcttggatacatccactatccacggagattggggatggttgacatatccggcccatggctgggatagcatcaatgaagtggacgagtcctttcagcctatccacacgtaccaggtgtgtaatgtgatgtcccccaaccagaacaactggctgagaactagctgggtacccagggacggggcacgcagagtgtatgccgaaatcaaattcactctccgggactgcaattcaatgccaggcgtgttaggcacatgtaaagagactttcaatttgtactaccttgagagcgatagggatctgggtgcatcgacccaggaatcgcagttcttaaaaatcgacaccatcgccgccgatgaatcctttaccggggccgacctgggcgtgcggagactcaagctcaacaccgaggtgcgctctgtggggccgttgagcaagagaggcttttaccttgcttttcaggatatcggcgcatgtcttgccatcctctctctccgcatatactataaaaaatgtcccgccatggtccgcaacctggcagctttctcagaagctgtgactggggccgactcatcaagtttggtggaggtacgaggccagtgtgtgagacatagtgaggagcgagatacccccaagatgtactgttctgccgaaggagaatggctggtgccaatcgggaagtgtgtctgttcagctggttacgaagaaaggcgcgatgcatgcgtagcctgcgagttgggcttctataagtcagcgcccggggaccagctttgtgcccgatgtcctcctcacagtcattccgcagcccctgcagcccaggcctgtcactgcgacctcagctactaccgcgccgccctggatcccccctctagcgcctgcacacggccacctagcgctcccgtcaaccttataagctcagtgaacggtacatcggtgaccctggaatgggctccaccgctggacccgggggggcggtctgacattacatacaacgcagtgtgtcgacggtgcccctgggccctctctcgctgtgaggcatgcgggagtgggactaggtttgtgcctcagcagacctccttggtgcaggcctctcttcttgtggctaatctgctagcacatatgaactacagtttctggattgaagccgtgaacggggtaagtgatctgtctcccgaacctcgaagggccgcggtggtaaacatcactaccaaccaggctggaaggcggcggaattctgtgccccagcgacctgggccccctgcttcacctgcgtccgacccctcccgcgaccagagctcggccggcgacgtgctgtgggcattcagacaagtgcccctttggccctgcgcccctcatcaggatcctgagttggaagcactgcactgtctgtag

SEQ ID NO: 186679 - DNA, 2955 bp, synthetic construct
  misc_feature 1..2955: note = Description of Artificial Sequence: Synthetic coding sequence
  source 1..2955: mol_type = other DNA
atggccctggactacctgctgctgctgctgctggccagcgccgtggccgctatggaggaaaccctaatggatacacggactgccactgcagagctggggtggactgcgaatcctgcctcaggttgggaggaggtctctggttacgacgaaaacctgaatactattagaacctaccaagtttgtaatgtcttcgagccgaatcagaacaactggttattgaccacctttattaaccgcagaggcgcacaccgaatatatactgagatgcgatttactgtgcgagactgctctagcttgcccaatgtcccagggtcatgcaaggagacctttaacctctactactatgagactgacagcgtaatcgccaccaagaagtctgctttctggagcgaggcgccctaccttaaggtggatacaatcgccgccgatgagtcttttagccaggtggattttggcggaaggctgatgaaagtgaatacagaggtccgcagctttggcccattgacacgaaatgggttttatctggcttttcaagattacggggcctgcatgtctttattgtctgtgagggtcttttttaaaaagtgtccatcaatcgtccagaacttcgctgtgtttccagagacaatgacaggcgccgagagcaccagccttgtgatagccaggggtacatgcattccaaacgcggaggaagtggatgtcccaatcaaactctactgtaacggtgatggtgagtggatggtgcctatcggtcgatgcacctgtaaaccgggttacgagccagagaactccgtggcctgcaaagcctgcccagctgggacttttaaggcttcacaagaagccgaggggtgtagccactgcccatccaactctcgctctccagctgaagcgtcccccatttgtacatgtcggactggctactacagagctgactttgacccccccgaggtcgcgtgcacaagcgtgccatccgggccacggaacgtaatctccatcgttaatgaaactagcatcattctggagtggcacccaccacgggaaacaggtgggcgcgatgatgtcacctacaacataatctgcaaaaagtgccgggctgaccggcgcagctgttccagatgcgacgataacgtagagtttgtgccaaggcagcttggtctaacagagtgccgagtgtccatctccagtctgtgggcccatactccgtacacatttgatattcaagccataaacggagtatcaagcaagagcccctttcctccgcagcatgtatccgtgaacatcaccacgaaccaagccgcacccagtaccgttccaatcatgcatcaggtttccgctacaatgagaagtatcactctctcatggccccaaccagagcagccaaacgggatcattctggactacgagatccgctactatgaaaaagagcacaatgagttcaacagttctatggcgaggagccagacgaacacagctaggatcgacgggctgcgcccaggcatggtatatgtggttcaggtacgcgcccgaaccgtagccgggtatgggaagttttcgggtaagatgtgctttcagaccttgaccgacgacgattacaagagtgaattacgtgagcagctccccctgatcgcagggtctgctgcagccggagttgtgttcgtcgtctccctggtggcaatcagtattgtctgcagtcggaaaagggcctacagtaaggaggcggtttatagtgacaaactgcagcactattctacaggaagggggtctcccggaatgaagatctatatcgaccccttcacctatgaggatcccaatgaagccgtccgcgaatttgccaaagaaatcgatgtttcgtttgtgaaaatcgaggaggtgataggcgccggagagtttggcgaggtctataagggtcgactgaagcttcctgggaagcgagagatctacgtggccatcaaaaccttgaaggccggctatagcgagaagcaacggagggacttcctgtccgaagcctctataatgggccaattcgaccaccccaatattataaggcttgagggagtggtgactaagtctaggccggttatgatcattactgaatttatggagaacggggcactggattcattcctgcgtcagaacgatggtcaatttactgttatccagctagttggtatgctcaggggtattgctgcaggaatgaaatacctcgcggaaatgaactacgtccatcgggacctcgctgccagaaacatcctggtgaatagcaacctggtgtgtaaggtcagcgattttggtctctcccgctatctgcaggatgacactagcgacccgacttacacgagtagccttggcgggaagattcctgtccggtggacagccccagaggccatcgcctaccgcaagtttacaagtgccagcgacgtatggagttacggcatcgtcatgtgggaggtcatgtcattcggcgagcgtccttactgggacatgagcaatcaagacgtcatcaacgctattgaacaggactatcggctacctccacctatggactgtcccgccgcgctgcatcagttgatgctggactgttggcagaaggatagaaattccagaccccgtttcgctgagatagtgaacaccctagacaagatgataagaaacccagctagtctgaagactgtggcgaccatcacggcagtgccctctcaacccctgttagaccgttccatcccagatttcactgcattcactaccgttgacgactggttgagtgccattaaaatggtgcagtaccgggacagtttccttaccgcgggattcacctcattgcagctcgtgactcaaatgacgtctgaggatctgctgcgaattggcataaccctagctgggcaccagaagaaaatcttgaatagtatccattcaatgcgggtccagatctctcagagtccaactgctatggcttag

SEQ ID NO: 186680 - DNA, 1638 bp, synthetic construct
  misc_feature 1..1638: note = Description of Artificial Sequence: Synthetic coding sequence
  source 1..1638: mol_type = other DNA
atgcaccaggtgagcgccaccatgcggagcatcaccctgagctggccgcaacctgaacaaccaaacgggatcatacttgactacgaaattcgatattatgaaaaggagcacaacgagttcaacagctccatggcccggtcccagactaacaccgcccgcattgatggccttagaccgggtatggtttatgtagtgcaggtccgggcaaggaccgtcgcaggatacggcaagttttcagggaagatgtgttttcagacgctcaccgatgatgattacaagtccgaactgcgggaacagctccctcttatcgccggctctgctgccgctggtgtggtgttcgtggtgtcattggtggcgatttccatagtgtgcagcagaaagcgagcatactccaaggaggcagtctattctgacaaactgcaacactattccacaggccgtgggtctccaggcatgaaaatctacatcgatcctttcacctatgaggaccccaacgaagctgttcgtgagttcgctaaagagattgacgtttcatttgtgaagattgaagaggtcattggcgcgggcgaattcggcgaagtgtacaaagggaggctgaaattgcccgggaagcgtgaaatctacgtggccatcaaaaccctgaaagccgggtatagtgagaagcaacggagggacttcctgtcggaggccagcataatggggcagtttgaccatcctaacattattagacttgagggcgtagtcactaaatcacgtcctgttatgatcattacagagttcatggagaatggagcacttgactcttttctgaggcagaatgacggtcagttcactgtgattcagctggtgggaatgctgagaggtatcgctgcaggaatgaagtatcttgccgagatgaattacgtgcacagggatctggccgctagaaacatcctagtgaattctaatctggtgtgtaaagtatccgactttgggcttagtcgctatctgcaagatgacacaagtgaccccacgtacactagctccctgggcgggaaaattcccgtgcgttggacagcgcccgaggcaatcgcttaccgcaagtttacatccgcctcagacgtgtggagctacggcatcgtgatgtgggaggtgatgagcttcggtgagcggccttattgggatatgagtaatcaggatgtgattaacgccatcgagcaagactatagattgccacctccaatggattgtcccgcagcactgcaccagttgatgcttgactgctggcagaaggaccggaatagtcgtcccagatttgctgagatcgttaataccctcgacaaaatgattcggaaccctgccagcctcaagacagttgcgaccatcacagctgtccctagccagcccctactcgaccgtagtatacctgatttcacggcatttaccactgtggatgattggctgtccgcgatcaagatggtgcaatacagagatagctttctgacagctgggttcacctccttgcagcttgtcacacaaatgacctccgaagacctgctccgcatcggcatcaccctggctggtcaccaaaagaaaattctcaatagtattcactcaatgcgagtccaaattagtcagtcccctacagcaatggcatag

SEQ ID NO: 186681 - DNA, 2997 bp, synthetic construct
  misc_feature 1..2997: note = Description of Artificial Sequence: Synthetic coding sequence
  source 1..2997: mol_type = other DNA
atggcccgggcccggcccccccccccccccagccccccccccggcctgcttcctctgcttccaccactgttactcctgcccctcctgctactgcctgctggctgtagggctctcgaagagaccctcatggacacaaagtgggttaccagcgagcttgcttggacatctcatcctgagagcggttgggaggaggtttcgggatacgacgaggccatgaacccgatcagaacctaccaggtctgcaacgtgcgcgagtcaagtcagaacaactggttgcgcactgggtttatctggagaagggatgtccagagggtgtacgtggaattgaagtttaccgtccgggattgtaactctataccaaatatccccggtagctgcaaggaaacttttaacttgttttattacgaggcggacagtgacgttgcctcggcgagcagtcccttctggatggagaatccttatgtgaaagtggacaccatagctccggatgagtccttctcccgattggacgcaggccgggtcaacacaaaagttagaagtttcggcccactctctaaggccggattctatttggcatttcaagatcaaggggcttgcatgtcattgatttcagtgcgcgctttctataaaaagtgcgccagcaccactgcaggcttcgcactattcccagagacacttactggcgccgaacctacatcactcgttattgcacctggaacatgtattccaaatgccgtggaggtgagcgttccactcaagctctattgtaacggcgatggggagtggatggtcccagttggagcgtgtacctgcgctaccggccacgaacctgccgctaaggaaagccagtgtaggccttgccctcccgggtcgtataaagcaaagcagggggaggggccctgtcttccatgccctccaaatagtaggactacctcgcctgctgcctcaatttgcacttgtcataataatttctatcgggccgacagtgactccgccgactctgcctgtaccaccgtgccctctccgccccgcggcgtgatttcaaacgtcaacgagacttcactgattctcgagtggagcgagcctagagacttgggaggaagggacgatctgctgtacaatgtgatatgcaagaaatgccacggagctggcggcgcctcggcatgttccaggtgcgacgacaacgtcgagtttgtgcccagacaactgggattaaccgaacgcagggtccatatttcacacctgttggcgcataccagatacacatttgaggtgcaagctgtgaatggcgtgtcaggcaaatcacctctgcccccacgctatgccgccgtgaatatcaccacaaaccaggcagccccctccgaagtccccactcttaggctgcattcttccagtggctccagtctgactctgagctgggcacctcccgagaggcccaacggcgtgattttagactatgagatgaaatatttcgagaagagtgagggaatcgcttcaaccgttacttcacagatgaacagcgtgcaattggatggcttacggcctgacgcccggtatgtggtacaagtacgggctcggactgtggctggttacggccagtattcaaggcccgccgagttcgaaacaacgtcagagaggggctcgggtgctcagcagctccaagaacagctgcctctgatcgtcggtagtgccacggcgggacttgtgttcgttgtggccgtggtggttatcgccatcgtgtgcttgagaaagcaacggcacggttccgacagcgagtacactgagaagttgcagcaatatatagccccggggatgaaagtttacatcgatccattcacttatgaggatcccaacgaggcagtcagggagtttgcgaaggagattgacgttagctgcgtgaaaatagaagaggtgatcggggcaggagagtttggagaggtgtgtcgtggcagacttaaacagccgggcagacgggaagtgttcgtggccataaaaaccctcaaggttggttacactgagcgccaacgccgtgatttcctgtccgaggcaagtattatgggccagttcgaccaccccaatatcataaggctggaaggagtggtgactaaaagccggccggtgatgatccttacagagttcatggaaaattgtgctttggactcattcctccggttaaacgatggtcaattcacggtcatccagttggtgggcatgctgcgcggcattgccgccggcatgaagtatctgagcgagatgaattatgtccatcgtgatcttgctgcccgtaacattcttgtgaatagcaatctagtgtgtaaggtgagcgatttcggactttccagattcttagaggacgatccttccgaccctacctatacttcatcactgggcggcaagatcccaatcagatggactgctccagaggccattgcttaccgcaagttcacttcagcgagcgacgtgtggtcttatgggatcgtgatgtgggaggtgatgtcttacggtgagcgaccttactgggatatgtccaaccaggacgtgatcaatgcagtcgagcaggattaccgattaccacccccaatggattgccccaccgctctgcaccaacttatgctcgactgctgggttagggatcggaatttgcgccccaaattctcccaaattgtaaataccttagataagctgattagaaatgccgcttcactgaaggtcatagcatccgcacagtccgggatgtctcagcccttattagataggaccgtcccagattacaccacctttacaaccgtaggagactggctggatgcaatcaagatgggccgttacaaagaaagctttgtgtccgctggcttcgcctcctttgacttagtcgcccaaatgaccgccgaggatcttctgcggatcggggttactctggccgggcatcagaaaaagatcctgtcctcaatccaggatatgagattgcagatgaatcagactcttccagtacaggtgtag

SEQ ID NO: 186682 - DNA, 3066 bp, synthetic construct
  misc_feature 1..3066: note = Description of Artificial Sequence: Synthetic coding sequence
  source 1..3066: mol_type = other DNA
atggccaccgagggcgccgcccagctgggcaaccgggtggccggcatggtctgtagtctgtgggtacttttacttgtgagtagcgtcctggccttggaagaagtcctgcttgatactaccggggaaacaagcgagattgggtggctcacctacccacctgggggatgggatgaagtgtctgttctcgacgaccaacgccggttgactcgcacttttgaagcttgccacgtggcgggtgctcctcctggcactggacaggacaactggctgcagactcacttcgtggagagaaggggggcacagagggcgcacatacggctgcacttcagtgttcgggcttgcagctctctcggagtatcaggcggcacatgcagagaaaccttcacgctgtactacagacaagccgaggaacccgacagcccagacagcgtcagctcttggcacctgaagagatggactaaggtagataccatcgcagctgatgagtcattcccatcatcttcatcatcatctagctctagtagcagcgctgcgtgggccgtcgggcctcatggtgccgggcagagggctggccttcaactgaacgtaaaggagcggtccttcggacctctgacgcagcgtggcttctatgtggcttttcaggacacaggagcatgtctcgccctcgttgctgtgcgcctcttttcctacacttgtcctgcggtacttcgcagcttcgcatcattccccgagacacaagccagtggcgcaggcggcgcctcgctggtagccgcagtgggcacatgcgtggctcatgccgaacccgaggaggatggtgtgggaggccaagcagggggttctccgccaaggctgcactgcaacggtgagggaaaatggatggtggccgttggcgggtgtcgttgccagccgggatatcaaccggccagaggcgacaaggcatgtcaggcctgccccagaggactgtacaaatctagcgctggcaatgctccctgcagcccatgcccggcaagatctcacgcacctaacccagctgcacctgtatgcccctgcctggagggattctaccgcgccagcagcgacccccccgaagccccatgtacagggccaccctcagctccccaagaactctggttcgaggtacagggaagtgcgctcatgctgcactggagactcccgagagaattaggcggaaggggggacctcctattcaatgttgtttgtaaggagtgtgaaggtcgccaggagccagcctctggtgggggcggaacatgccacaggtgcagagatgaggtgcacttcgaccctcgccagcgaggactgacagagagtagggttttggtgggcggactgagagctcacgtcccttatatcctcgaggtgcaagcagtcaacggcgtcagcgagctgtcacctgacccccctcaggccgccgctataaacgtctcgacctcccatgaggtgccaagtgcagtgccggttgtacatcaagtcagccgcgcttctaattcaatcacagtgagctggcctcagcctgatcagacaaatggcaacatcctcgattatcagctccgctactacgaccaggctgaagacgaatctcacagcttcaccctgacaagcgagactaatacagccaccgtaacccaactgtcccccggccacatttacggttttcaggttcgagctcggaccgcggccggccacggtccctatggggggaaggtgtacttccaaacgctgccgcagggcgagctgagctcacagctccccgagagactgtccttggtgatcggcagtatactgggcgctctggcattcctgctgctcgcagcaattaccgtgctggccgtggtgttccagaggaaacggagagggaccgggtatactgaacagctccagcagtattccagcccaggactgggtgtgaagtactacattgacccaagcacctacgaggatccgtgccaggctatacgggagttggcgagggaggttgatccggcatatataaaaatagaggaagtgatcggcacaggctcattcggcgaggttcgccaaggaaggctgcagcctaggggccggcgggaacaaacagtggcaatacaagctctgtgggccggaggcgccgagtctctgcagatgacttttcttggtcgggcggccgtcctgggccagttccagcatcctaacattttgcggctggagggggttgttactaaaagtagacctctaatggtgctgactgagttcatggaactggggccccttgatagtttcctgcggcagcgcgaaggccaattcagctccctgcagctagttgctatgcagcgcggtgttgcagccgccatgcaatacctcagtagtttcgctttcgtacaccggagcctttccgcacactcggtgttggtcaactcgcatctggtttgtaaagtcgcccggttaggacattctcctcaggggcctagctgtctgcttcgatgggccgctcccgaggtgattgcacatggtaagcacacaaccagttccgacgtttggtcctttggcattttaatgtgggaggtcatgtcttacggggagagaccatattgggatatgtctgagcaggaggtgctgaatgccattgaacaggagtttcggcttccgccacctcctggatgccctcctgggcttcacctgttgatgctcgacacctggcaaaaggaccgcgcccggagacctcattttgaccagctggtcgctgcctttgacaaaatgatcaggaagcccgatacactgcaggccgggggtgacccgggagagagaccttctcaggctctgctgacccccgtagccctggatttcccatgcctggactccccccaggcatggttaagcgccatagggttggagtgttaccaagacaacttctctaagtttgggttgtgtacattctctgacgtcgcccagctgtccctggaagatctgcctgctctgggcataaccctagctggccaccagaagaagctgcttcaccatattcagctcctgcaacaacacctccggcaacagggctccgtggaggtctag

SEQ ID NO: 186683 - DNA, 2235 bp, synthetic construct
  misc_feature 1..2235: note = Description of Artificial Sequence: Synthetic coding sequence
  source 1..2235: mol_type = other DNA
atggccaccgagggcgccgcccagctgggcaaccgggtggccggcatggtatcagtcgggggctgcagatgccagcccggttatcagcccgcaagaggcgataaggcatgtcaggcatgcccccgcggactttataagagttccgctggcaatgctccgtgttccccatgtcctgctagatcccacgctccaaatcccgccgcgcctgtgtgcccctgtctcgaagggttctatagagcttcaagtgatccacccgaggctccatgcacaggccccccttctgcgcctcaagagctatggtttgaggttcagggcagcgctttaatgctccattggagactgccacgggagctcggtggtcgcggtgacttacttttcaacgttgtgtgcaaggagtgcgagggccgtcaggaacccgctagcggaggggggggcacttgtcacagatgtagggacgaagtgcacttcgacccccgccaacgcggcttgaccgagtcccgggttctagtcgggggcctgcgagcccacgtgccttacattcttgaagtccaggccgtcaacggagtctctgaattgtcccccgaccccccacaggccgctgccattaacgtgtcaacatctcacgaggttcccagcgctgtgccagtggtgcatcaggtgtccagggcatccaactccatcactgtcagctggccgcagccagatcagactaacggaaatattttggactaccagctacgatactatgatcaagccgaagacgaatcgcactcttttaccctgacttctgagaccaataccgcgaccgtgacccaattgtctcccgggcatatctacggttttcaggtccgggccaggaccgccgccggccacgggccatatgggggcaaggtctactttcagacattaccgcaaggagaattgagctctcaattgcctgaacgactgtcattagtaatcggatctatcctgggggccctggcattcttgctcttggctgccattacggtcctggccgttgtttttcaacgcaagcgccgaggtactgggtacacagagcagctgcagcagtacagttcccccgggctcggagttaagtactatatcgatccttccacgtatgaagatccttgtcaagccattagagagctcgctagagaggttgatcctgcctatattaaaatagaggaggtgattggcacaggctcgtttggcgaggttagacagggacgcctccagccacgcggaaggagggagcagaccgtagctatccaggctttgtgggccggcggagccgagagcctccagatgaccttccttggccgggctgccgttctggggcagtttcagcaccccaacattctccggctcgaaggagtggtgacaaaaagcagacctctgatggtgttaacagagttcatggaactcgggccgctggactcttttttgagacagcgggaggggcagtttagcagcctacaactcgtggccatgcagcgcggggtggccgcggctatgcagtatctttcaagcttcgctttcgtccaccgctctcttagcgcccactctgtattagtgaacagccatctcgtctgcaaggtcgcccgtctgggccattcgccacagggtccctcttgtttgctgagatgggcagcaccggaggttatagcgcatgggaagcacaccacatcttctgatgtgtggagcttcggcattttgatgtgggaggtcatgagttatggggagcggccatactgggatatgagcgaacaggaggtcttaaacgcaatcgagcaggagtttagactcccgccgccgccagggtgtcccccagggcttcaccttttaatgctagatacttggcagaaggaccgggcccgccgtcctcacttcgaccagctcgtggctgcattcgacaagatgatcaggaaacccgataccctccaggccggcggggatcccggggaaagaccgtcacaagcgctcctgactccagtggctcttgacttcccctgtcttgacagcccccaagcttggctgtccgctattggtctcgagtgttaccaagataatttttccaagtttgggctctgcaccttcagcgatgtcgctcagttgtcattggaggatttaccagctcttggaataactctggccgggcatcagaagaagctgctccatcacatccagctgctccagcagcatttaaggcaacagggctcagttgaagtgtag

SEQ ID NO: 186684 - DNA, 3066 bp, synthetic construct
  misc_feature 1..3066: note = Description of Artificial Sequence: Synthetic coding sequence
  source 1..3066: mol_type = other DNA
atggccaccgagggcgccgcccagctgggcaaccgggtggccggcatggtgtgtagcctctgggttctcctgctcgtctcatccgtactggcacttgaggaagtgctcctggacacaacaggtgagacctctgagattgggtggctgacctatccgcctgggggttgggatgaagtcagtgtgctagatgatcaacggcgattgactagaacttttgaggcctgtcacgtagcgggagcacctcccggcactgggcaggataactggctgcagacgcactttgttgagcgcagaggggcccagagagctcatattcgcctccacttctcagtacgggcttgcagcagtctgggcgtttctggcggcacctgtcgggagactttcacactatattacagacaagcggaggagcccgactctccggacagtgtttcatcatggcacctaaagagatggactaaggttgacactatcgccgccgatgagtcgttcccctccagcagttctagcagcagttcatcttcatcggccgcctgggccgtggggccgcacggggccggccaaagagcaggtctccaacttaacgtgaaggagcggagcttcggccctctgactcaacggggcttttatgttgcttttcaagatactggggcctgccttgccctcgtagccgttcggttgttctcctatacttgtccagccgtgctgagaagcttcgctagctttcctgagacacaagccagcggtgctggtggggcctcacttgttgccgccgtggggacatgtgtggcgcatgccgagcctgaggaagatggagtcggtggtcaggctggtggatctcccccgcgactgcactgtaacggcgagggcaagtggatggttgcagttggggggtgccggtgtcaacccggataccagccagcccgcggcgataaagcatgtcaggcgtgtccccggggactgtacaagagctccgccggcaatgcaccatgctctccctgccctgcccgcagccacgcccccaatcctgccgccccggtgtgtccttgtctggaagggttttacagagcctcctccgacccgcctgaggcgccatgcaccggtcctccctccgctccccaggagctgtggtttgaggtgcagggatcagctctcatgctgcattggagattgccccgggagctgggtggcagaggtgacctgcttttcaatgtcgtgtgcaaggagtgcgagggacgccaggagccagcctccggcggaggaggaacatgtcatagatgccgggacgaagtgcatttcgatccacggcagagaggattaactgagtctagagttctggtcggcgggctgcgggcacacgtaccctatatcttggaggttcaggcagtgaatggagtcagcgagttgagtccggatccaccccaggccgccgccatcaatgtctccacttcccacgaagtaccgagtgccgtaccagtggtgcaccaggtgagcagggcaagcaacagcatcactgtgagctggccacagccagaccagactaacggaaacatactcgactaccagttgaggtactacgatcaggcagaggacgagagtcacagttttactcttaccagcgaaaccaacacggccacagtgacacagctgtcccccggacacatatacggcttccaggtgcgggctagaaccgccgcaggacatggcccctatggaggcaaggtgtactttcaaacactgcctcagggcgagttgtcttctcaactacctgaaagactgagtcttgtgatcggctctattctgggagctctagccttcctgctgttagcagcgatcacagtgcttgccgtcgtattccaaagaaagcgaaggggaacaggatatacagagcagcttcagcagtactcctcacccgggcttggcgtgaagtactacatagacccatctacctacgaagatccctgtcaggccatccgcgagcttgccagggaagtggacccggcctacattaagatcgaagaagtcattggaaccggctcattcggagaagtcagacaaggtaggctgcagccacgcggacgaagagagcaaactgtggcgattcaggcgctgtgggccggcggggccgagtctctgcagatgacttttctggggcgggctgcagtattagggcagtttcagcatcccaatattcttagacttgagggagtggtcaccaaatcacgccctctcatggtattaacagagttcatggaactgggtcctttagacagctttctgcgacagagagagggccagttcagttcacttcagctggttgctatgcagcggggagtagccgcagccatgcagtatttaagttccttcgcatttgtgcataggtctctgagcgcccactctgttctcgtgaactcccatctggtgtgcaaagtggccaggctcggccactctcctcagggcccttcctgccttctaaggtgggccgccccagaggtcatcgcccacggtaaacataccacctcaagtgatgtctggtcttttgggattctgatgtgggaggtaatgagttacggggaacgcccatactgggatatgagcgaacaggaggtgctcaatgccatcgaacaggagttccgattacctccaccccccgggtgtcccccaggactgcatctgttgatgctcgacacttggcagaaggacagagcaaggaggccccattttgaccagctggtagcagctttcgacaagatgattcgtaaacctgatactcttcaagcggggggcgatcccggcgaaagaccctcccaggccctgctgacacctgtggccctggatttcccgtgtctggacagtcctcaggcatggctgtcagccattgggctggagtgctaccaagataacttctccaaatttggtctgtgcacattcagtgacgtggcccagttgtctctagaggatctgccagcgctcggcatcactctcgctggccaccaaaagaaactgcttcatcatatacagctactgcagcagcatttaaggcagcaggggagcgtggaggtgtag

SEQ ID NO: 186685 - DNA, 654 bp, synthetic construct
  misc_feature 1..654: note = Description of Artificial Sequence: Synthetic coding sequence
  source 1..654: mol_type = other DNA
atggccggccggaccgtgcgggccgagacccggagccgggccaaggacgatatcaagaaggtaatggccaccatcgagaaggtccggaggtgggagaagagatgggtgaccgtaggagacacaagcctgcggatctttaaatgggtgcctgtcgtggatccccaggaggaagaaagaagaagagccggtggcggcgcagagaggagcaggggacgcgaaaggagagggaggggggcaagcccccggggcggtggcccgctgatccttctcgacttaaacgatgaaaactccaatcaatcatttcactccgagggttccctgcagaaagggacagagccttcccccggcggaacaccacagcccagcaggcctgtcagcccagccggccctccagaaggggtgcctgaggaagcccaaccccctaggcttggccaggagagagacccagggggaattaccgccggttctacagatgagccacctatgttaaccaaggaagagccagtgcccgagctgctcgaagccgaagctcctgaagcgtatcccgtatttgagcctgtgccaccagtgccggaggcagcacagggcgatactgaggattctgagggtgcgccacctctgaagcgcatatgccctaatgcccctgatccatag

SEQ ID NO: 186686 - DNA, 717 bp, synthetic construct
  misc_feature 1..717: note = Description of Artificial Sequence: Synthetic coding sequence
  source 1..717: mol_type = other DNA
atggccgccgcccccctgctgctgctgctgctgctggtgcccgtgcctctgctgcctctgttggcacagggacccggaggagccctgggaaacaggcatgcagtctactggaatagctcgaaccagcacctccgccgagagggctatacggtgcaggtgaatgtaaacgactatctggacatctactgcccccattacaacagtagcggcgtgggccccggggcgggcccaggacctggcggtggagccgagcagtacgtgttatatatggttagtcgaaacggctacagaacgtgtaacgcttctcaggggttcaaacggtgggagtgtaatcggccccacgcaccccattcccctatcaagttcagtgaaaagttccagagatattcagcctttagcctaggctatgaattccatgccggtcacgagtattattacatctcaacccccacccacaatctccactggaagtgcctgaggatgaaagtgtttgtctgctgtgcgtcaacgagtcacagtggggagaagcctgtgccaaccctccctcagttcacgatgggccccaacgttaagattaacgtcctagaggacttcgagggggagaatccccaggtccccaagctagagaaatccattagcggaacttcacccaaacgcgagcatctgccgctggcagtgggtatcgcgttctttctgatgacattcctagcgtcctag

SEQ ID NO: 186687 - DNA, 639 bp, synthetic construct
  misc_feature 1..639: note = Description of Artificial Sequence: Synthetic coding sequence
  source 1..639: mol_type = other DNA
atggccgccgcccccctgctgctgctgctgctgctggtgcccgtgccactgctgccactcctggcccagggaccaggcggagccctgggaaacaggcacgctgtttactggaattccagcaaccaacatcttaggcgggagggctacaccgtgcaagtgaacgtgaacgattaccttgatatctactgtcctcactacaactcttctggtgtgggcccaggcgccggaccaggacccggaggcggagcagaacagtacgttctgtacatggtatctcggaatgggtacaggacttgtaatgcctcacagggatttaagaggtgggagtgcaatcggccccacgccccccattcgcccatcaaatttagcgaaaagtttcagcgctacagcgcattcagtctgggatatgagttccacgcaggtcatgagtactattacatctccacgccaacccacaacctccattggaagtgcctgcgaatgaaggtcttcgtttgctgcgcatcgaaagattttgagggcgagaatcctcaggtgcctaaactagaaaaatcaatcagtgggaccagccctaaaagagagcacctgccgttggccgtgggcatagcattcttcttaatgacttttctggcctcatag

SEQ ID NO: 186688 - DNA, 702 bp, synthetic construct
  misc_feature 1..702: note = Description of Artificial Sequence: Synthetic coding sequence
  source 1..702: mol_type = other DNA
atgcggctgctgcccctgctgcggaccgtgctgtgggccgccttcctgggctctcctttgcggggaggttccagcctgcgtcacgttgtgtactggaacagcagtaacccatccctcaggagagagggttataccgtacaggttaatgttaatgactacttagatatctattgcccgcattataacagcagcggagtggggcccggagcgggcccaggccccggaggtggcgccgaacagtacgtgttgtacatggtgtcccgcaacggctaccgcacttgtaatgccagccaggggtttaaaagatgggagtgtaataggcctcatgcacctcattctcctatcaaattttccgaaaagttccagaggtactccgccttttccttgggatacgaatttcacgctgggcatgaatattactatataagcactcccacacataatttacactggaagtgcttacggatgaaagtattcgtgtgctgtgcctcaacctcacactccggcgaaaaaccagtacccaccctgccccagtttacaatggggcctaacgttaaaattaacgtgctcgaggacttcgagggtgagaacccacaggtccctaagctagagaaaagcatttctggcaccagtccaaagcgggaacacctgcctctcgctgtaggaatcgcctttttcttgatgacttttcttgcctcctag

SEQ ID NO: 186689 - DNA, 582 bp, synthetic construct
  misc_feature 1..582: note = Description of Artificial Sequence: Synthetic coding sequence
  source 1..582: mol_type = other DNA
atgcggctgctgcccctgctgcggaccgtgctgtgggccgccttcctgggttctccccttagaggaggatcaagtctgcgacacgtcgtgtattggaactcatctaaccctcgattgctgagaggagatgccgtcgttgaactggggcttaacgactacctagatattgtctgtccccactacgaagggcctggtcctccggaaggtcctgagactttcgcactgtatatggttgactggccaggctacgaatcttgccaagccgagggcccgagagcatataagcgttgggtgtgctccttacctttcggccatgtgcagttctctgaaaaaattcagaggtttactccgttcagcttaggatttgaattcctccccggtgaaacttactattatatctcggtgcccacacccgagtcgagcgggcagtgcctgcggctccaggtcagcgtgtgctgcaaggagaggaacttgcctagccacccgaaggagcctgagtcgtcccaggacccactagaggaggaaggttcactgctccctgcccttggggtcccaattcagaccgataaaatggagcactag

SEQ ID NO: 186690 - DNA, 606 bp, synthetic construct
  misc_feature 1..606: note = Description of Artificial Sequence: Synthetic coding sequence
  source 1..606: mol_type = other DNA
atgcggctgctgcccctgctgcggaccgtgctgtgggccgccttccttggttcaccactccggggaggaagtagtctgagacatgtggtgtattggaattccagcaatccccgcctcctcaggggtgatgctgtggttgagttgggcctgaatgattacctcgacattgtctgtccgcactatgaggggcccggccccccagagggccctgagacctttgctctgtacatggttgactggccgggatacgagagctgccaggcggaagggcccagagcgtataagagatgggtctgcagtctgccattcggacacgtgcaattctcagagaagattcagaggttcacccctttttcgctgggatttgagtttctgcccggggaaacatactattacatctccgtgcctacacccgagagttcaggccagtgtctgagacttcaggtgtccgtatgctgcaaggagagaaagagtgagtccgcacaccctgtgggcagcccgggcgaaagcggcactagcggttggagaggcggcgatacccccagccctttgtgtctcttgttgctcttgctgttgctaattctgagactgctgcgaatcctctag

SEQ ID NO: 186691 - DNA, 624 bp, synthetic construct
  misc_feature 1..624: note = Description of Artificial Sequence: Synthetic coding sequence
  source 1..624: mol_type = other DNA
atgcggctgctgcccctgctgcggaccgtgctgtgggccgccttccttggatctcccctccgtggcggctcaagcctgcgacacgtggtgtattggaactctagcaaccctcgtttactgcggggggatgccgttgtggagcttggcttgaatgactatttggacatcgtctgccctcattacgaaggccctggcccaccagaaggtccagaaaccttcgcactatatatggtggattggcccggctatgaatcttgccaggcagagggcccaagggcatacaagcgttgggtctgtagcctgccattcggtcacgtccagttttccgaaaaaatccagagatttaccccctttagccttggctttgagtttctccccggagagacctattattacatctcagtacctactcctgagagctccggtcagtgtctgagattacaggttagtgtctgctgcaaggagcgaagggcgcgtgtcctgccacggagtccagggggtggcggtattcctgcggcttgtactggcggtgccaacagtgatcggcaggatggtgccttaatgggagagatcagagggtccgaggtcacccttgccggtgcatgcccactgatcactgggtag

SEQ ID NO: 186692 - DNA, 1083 bp, synthetic construct
  misc_feature 1..1083: note = Description of Artificial Sequence: Synthetic coding sequence
  source 1..1083: mol_type = other DNA
atgagcgacagcaaggagccccggctgcagcagctgggcctgctggtaagtaaagtgcctagctctatctcccaagagcagtccagacaggatgctatttatcagaacctcacgcaactgaaggcagctgtgggtgagttatcagaaaaatcaaagcttcaggagatctaccaggagttaacccagttaaaggccgccgtgggggagttgccagagaagagtaagcttcaggagatatatcaggagttgacacgcctaaaggccgccgtcggagagctaccagaaaagagcaagttgcaggagatatatcaggaactaacgtggctgaaggccgcggtcggcgaactgccggagaagtccaaaatgcaagagatttaccaggagctcacacggcttaaggccgcggtaggtgagctgcccgagaagtcaaagcagcaagaaatctaccaggaactcacccggctcaaagccgctgttggggagttgcctgaaaaatcgaagcagcaagaaatttaccaagaactgacccgactcaaggccgcagtcggggagctaccagagaagtctaagcaacaggaaatttaccaggagctcacccagctcaaagctgctgtggaacggctgtgccacccttgtccttgggagtggactttctttcaaggtaactgctacttcatgagcaattctcagcgtaattggcacgacagtataaccgcctgtaaggaggtcggggcccagttggttgttattaaaagtgccgaggagcagaacttccttcagttacagagcagcaggagcaatagattcacttggatggggctctctgacttgaaccaggagggtacttggcagtgggtggacggaagtcctttactgccaagtttcaaacagtactggaatagaggggaaccaaataacgttggcgaggaagattgcgccgagttttctggcaatggttggaatgatgacaagtgtaacctcgctaagttctggatctgtaagaagagcgccgcttcttgctctcgggatgaggagcagtttttaagcccggctcccgccactccgaatcctccgcccgcctag

SEQ ID NO: 186693 - DNA, 888 bp, synthetic construct
  misc_feature 1..888: note = Description of Artificial Sequence: Synthetic coding sequence
  source 1..888: mol_type = other DNA
atggagaagatgagccggcccctgcccctgaaccccaccttcatcccacccccctatggcgtgctgcgctctctcctagagaacccactaaaactaccgttgcaccacgaggatgcttttagtaaagataaagataaagagaagaagctagacgacgagtccaacagccctaccgtgccgcaatccgcgttcctcgggcccacactgtgggacaaaacactcccctatgacggcgacacctttcagctggagtatatggatctggaagagttcctttctgagaatggaattcctccaagccctagtcaacacgatcacagtcctcatcctccgggcctgcagcctgcatcttcagccgccccaagcgtcatggatttgtcttccagagcgtccgcccctctccatcctggcattccaagccctaactgtatgcagtcgcctatcagacccggccagcttctgcctgctaatagaaatactcccagtccgatcgatcccgacacaatccaggtgcccgttgggtacgagcctgaccctgctgaccttgccttgtcctctatcccaggccaggaaatgtttgaccctcgaaaacgaaagttctctgaagaggaactgaagccgcagccaatgatcaagaaggctcgaaaagtcttcatacccgacgacctgaaagacgacaagtattgggcgcggcggcgcaagaacaacatggcggctaagcggtcacgagacgctagacggctcaaggagaatcaaatcgccatccgggcctctttcctggagaaggagaattccgctctccgccaggaggtcgcagacttacggaaggaacttggtaaatgtaagaatattttagctaagtacgaggccagacatggccccctgtag

SEQ ID NO: 186694 - DNA, 780 bp, synthetic construct
  misc_feature 1..780: note = Description of Artificial Sequence: Synthetic coding sequence
  source 1..780: mol_type = other DNA
atggccgccgccgcccagctgagcctgacccagctgagcagcggcaaccccgtctacgaaaaatattaccgtcaggtggataccggcaacaccggtcgggtcttagctagcgatgcagctgcgttcctcaaaaaaagtgggctgccagaccttatactggggaagatctgggacttggcagatactgatggcaagggcattctcaacaagcaggaattttttgtggctctacgtctggtggcctgtgcacagaatggccttgaggtgtcactctccagcctgaatctcgcggtacctccgccccgattccatgatacttccagtccccttctgatctctggcaccagcgcggcagaactcccttgggccgtgaaacctgaagataaggccaaatacgatgcaatatttgacagcctatcccccgtgaatgggtttttgtctggagataaagtcaagcccgttctgctgaactccaagctgcctgtcgacattctgggacgcgtgtgggagctgagtgatatcgatcatgatggcatgttggatagagatgagttcgccgtgacggaatctcattctgtaacgcaagctggtgtacagtggcgagacctttcttcgctgcagccgagacctcccggatttaaactgttctttcacctgagtctgctccggagttgggattatcgccatgctcccccacccccagccaacttctatatattctcccgagattcagtaagcccttgtctgcccgattggagtcgagcccctgacaataggtag

SEQ ID NO: 186695 - DNA, 2289 bp, synthetic construct
  misc_feature 1..2289: note = Description of Artificial Sequence: Synthetic coding sequence
  source 1..2289: mol_type = other DNA
atggccgccgccgcccagctgagcctgacccagctgagcagcggcaaccctgtatacgagaaatattaccggcaggttgacaccggcaatactggtcgggtgttggcctctgatgctgccgctttcctgaagaaatctggactgcccgacctaatcctcgggaagatttgggatcttgccgataccgacggaaaaggcatactcaacaaacaggaatttttcgttgccctccggctcgtggcttgcgcccagaacggcctggaagtttccctgtctagcctgaatctggctgtccctccaccacggtttcatgacacaagtagccctcttcttatcagcgggacttctgcagcagagctcccttgggcagtgaaacctgaggacaaagcgaaatatgacgccatttttgattccctgagtcccgttaacgggttcctgtcgggtgacaaggttaaacccgtcctcctcaacagtaagttaccagttgacatactggggagagtctgggaacttagcgacatcgaccacgacggaatgttggatagggacgagttcgccgtggccatgttcctcgtatattgcgccctcgagaaggagccagtacccatgagcctgccccccgccctagtcccgcctagcaaaagaaagacgtgggtagtctctccagccgagaaagctaagtatgacgagatatttctcaaaaccgataaggatatggatgggttcgtatccgggctggaggtacgggaaatttttctcaaaaccggtctgccgtccactttgctggcgcacatatggtctttatgtgacacaaaggattgcggaaaactttccaaagaccagtttgcactcgcctttcatctgatctctcaaaagttgatcaaaggcatcgatcctccgcatgtactgacacccgaaatgataccccctagtgacagagcctctctccagaagaatatcattggatcaagtcctgtggctgatttcagcgcgattaaagaactcgatacacttaataacgaaatagtggatctgcagagagagaaaaataatgtcgaacaggatctcaaagagaaagaagacactatcaaacagaggaccagtgaggtccaggatttgcaggacgaggtccagcgagagaatactaacctgcagaaactccaagcgcagaaacaacaagtccaagagttgctggacgagctcgacgaacaaaaggcacagcttgaagagcagttgaaggaagttaggaaaaagtgtgccgaagaagcccagttagcccgcagttcgccagaactgctcccttctggggtgaccgatgaaaacgaggttacgaccgctgtgaccgagaaagtctgctctgaactggacaacaatcgtcatagcaaggaagaggaccccttcaatgtggactcttctagcctcacagggcccgtggcagacaccaatctggacttcttccagtctgaccccttcgtgggcagcgatcccttcaaggacgacccgtttggtaagattgacccgtttgggggcgatcccttcaaggggtcggatccgttcgctagcgattgctttttcagacagtccaccgatcccttcgcaacctcatccacagacccattctctgctgccaataatagttctattacgtccgtggagaccctcaagcacaacgacccattcgcccccggaggaacagtagttgccgcaagcgactcagcgaccgaccccttcgcctccgtgttcggcaacgaatcgtttggcgggggcttcgcagacttctccacactgagcaaagtcaacaacgaagatcccttccgctctgccacgtcctcttctgttagcaacgtggtaatcaccaagaacgtattcgaggaaacttctgttaaatctgaagatgaaccacctgccctccccccaaaaatcggcacacctactagaccatgtcctctgccccctggaaagcgcagcatcaacaagctcgacagccctgatccattcaaactcaatgacccatttcagccttttcccgggaacgattcacctaaagagaaagatccagagattttttgcgacccattcacaagtgccaccacaaccaccaataaagaggctgacccctccaacttcgccaacttctctgcatacccaagcgaagaagacatgatcgagtgggccaagcgtgagtccgagcgagaagaggaacaaagactcgctcgcctcaatcagcaggaacaagaagacctggaattggctattgcccttagtaagagtgagatatcagaggcatag

SEQ ID NO: 186696 - DNA, 2691 bp, synthetic construct
  misc_feature 1..2691: note = Description of Artificial Sequence: Synthetic coding sequence
  source 1..2691: mol_type = other DNA
atggccgccgccgcccagctgagcctgacccagctgagcagcggcaatccagtctatgagaaatactacaggcaggtcgacactggaaacacagggcgcgtgcttgccagcgatgccgcggccttcctgaagaagtccggtctgcccgacctgatcctgggcaaaatttgggatcttgcagatactgatggcaagggtatcctcaataaacaggagttctttgtggcgttacgactcgttgcatgcgcacagaacggcctggaggtatcactgtcctctctcaatctcgcggtccctcccccccgcttccatgataccagcagccctctgttaatctccggcacatccgcagctgaactgccctgggcagtgaaacccgaggataaagccaagtacgacgccatctttgactcccttagtcctgtcaacggtttcctgagcggagacaaggttaaaccagtgttgctcaactccaaactgcctgtggatatcctgggacgggtgtgggagctctctgacattgatcacgacggcatgttagatagagatgaatttgctgtggctatgtttctggtatactgcgctttggaaaaggaacctgtcccaatgtccctaccacccgccctggtacctccatccaagcggaagacttgggttgtatccccagccgaaaaagctaagtacgatgagattttcctgaagaccgacaaggacatggacggctttgtgagtggtttggaagtgcgcgaaatctttcttaaaacaggcctgcctagcacgcttttggcacacatttggtccttgtgcgatacaaaggactgtgggaagctcagtaaggaccagttcgccctggccttccacctgattagccaaaaactgatcaaaggcatcgacccgccccatgtgcttactcccgagatgattccccctagcgatagggcttcactccagaagaatatcatcggcagctccccagttgctgatttcagtgctattaaagaactcgacactctgaataatgagatcgtggatctccagagagagaaaaataacgtggagcaggatttgaaggaaaaggaagacacaatcaagcagcgtacctcagaagtccaggatctgcaggacgaggtgcagagagaaaatacgaatctccagaagctccaggcccagaagcaacaagttcaggaattgctggacgagctggacgaacaaaaggctcagctggaagaacagctgaaagaggttaggaagaaatgcgccgaagaggctcagttgatttcctctctgaaagccgaactgactagtcaggaatctcaaatcagcacttacgaagaagagctggcgaaggctagagaagaattgagccgactgcagcaggagacagccgaactggaggagtccgtggagagtggaaaagcacagctggaacctttgcagcagcatctacaggacagccagcaagaaatttctagcatgcagatgaaattaatggaaatgaaggatctggaaaatcataacagccagcttaactggtgctcctcaccccattctattctggtgaacggagcgacagattactgttctttaagcacctcttccagcgagacagctaacctcaacgagcatgttgaaggacagagtaatcttgaatcggaaccaatacaccaggagtcgcccgctagaagctcccctgaactccttccgagcggcgttacggacgagaatgaagtgaccacagctgttacagagaaagtatgcagtgaattggacaataacaggcatagcaaggaggaggatcccttcaacgtggactcttccagcctcacaggacctgtggctgatactaatttggatttttttcagtccgatcctttcgtgggaagtgatccctttaaggacgacccatttggcaagatcgacccattcggtggcgatccttttaaaggatccgatcccttcgctagtgattgcttttttcggcaatctaccgatcccttcgccaccagctctacagatcccttctcagcagctaacaactcatctattacgtctgtagaaacgttgaaacataacgacccattcgcacccgggggaaccgtagtggctgcctcagatagtgctactgaccccttcgcgtctgtgttcggcaatgagtcttttggtgggggctttgccgatttttctactctctcaaaggttaacaatgaagatcctttcaggtccgccacctccagcagcgtctctaatgttgtgatcacaaagaatgtgtttgaggaaactagcgtcaaatctgaggatgagccccctgcactcccacctaaaatcgggactccaaccagaccatgcccgctgccacctgggaaacgctccataaataagcttgatagtcctgaccccttcaagctgaacgacccgttccagcccttcccagggaacgattcccctaaagagaaagacccagaaatcttttgcgacccgtttacatccgcgactactactaccaataaggaggctgaccctagtaactttgccaattttagtgcctatccttccgaggaggatatgatcgagtgggctaaaagagagtctgaacgcgaggaagagcagcgcttggcccggctaaatcagcaggaacaagaggatcttgaattggcaatcgctctatctaagagtgagattagcgaggcatag

SEQ ID NO: 186697 - DNA, 1722 bp, synthetic construct
  misc_feature 1..1722: note = Description of Artificial Sequence: Synthetic coding sequence
  source 1..1722: mol_type = other DNA
atgatcctgatggtgcgggactgcctgaagagccagcaccgggaccctcactgcgacccctccgataagagagaaaaaaataatgtagaacaggaccttaaagagaaggaagataccatcaagcagagaacctccgaagtgcaggatctccaggacgaagttcagcgggagaacactaatctgcaaaaactccaagctcagaagcagcaggtacaggaactactggacgagttggatgagcagaaggcacagttggaggaacagttgaaggaggtccggaagaagtgcgcagaggaagcccagctaatttcgtctctcaaggccgaactaacatcacaggagagccagatctcaacatacgaggaagagctggcgaaggcccgtgaggagctctcaagactgcagcaagagaccgccgaactcgaggagtcagttgaaagcggaaaggcacagctggagcccctccagcagcatctgcaggactcccagcaggagatcagttctatgcaaatgaagctgatggagatgaaggacctagaaaaccataactcccagcttaactggtgctcatctccccacagcatccttgttaatggagcaacagattactgcagcctgtctacgtctagctcagagaccgctaacttaaatgaacacgtagaaggccagtctaacctggagagtgagcctatccatcaggaatcccctgctagaagctcacctgaacttctgccctctggcgtcaccgatgaaaacgaggtgaccacggctgttactgagaaggtttgcagcgagctggacaacaacaggcacagcaaggaggaggacccttttaatgttgactcctcatcactaacaggcccggtggccgatactaacctcgatttctttcagagtgatccattcgtagggtctgatcccttcaaagacgacccattcggaaaaattgatccttttggcggcgaccccttcaagggctcagacccttttgcgtctgactgcttttttaggcaatcaaccgatccattcgcaactagtagcaccgatccattcagcgctgctaataactcctccattacctccgtggaaacactgaaacataatgatccttttgcaccgggaggcaccgtggttgcggccagcgactctgccactgacccctttgcgagtgtgtttggaaatgaatcgttcggcggaggcttcgcagatttctccaccctgtccaaagttaataacgaagacccatttagatccgcgaccagctctagcgtttccaacgtcgtgatcacaaagaatgtgttcgaggaaacgtccgtcaagtcagaggatgagcctcccgcccttcccccaaagatagggacccccaccagaccctgtccgctccctccgggcaagcggtcaattaacaagttggacagcccggatcccttcaaactgaatgacccattccagcccttcccagggaacgatagccctaaggagaaggaccccgaaatattctgcgatccatttacctccgccaccacaacaacgaacaaggaagctgatccttcaaacttcgcgaattttagcgcatatccttctgaggaagatatgattgagtgggccaaacgggaatcagagcgcgaggaggagcagcgactggcgagactgaaccagcaggagcaggaggacctggagttggcaattgccctttcgaagtccgagatctcagaggcgtag

SEQ ID NO: 186698 - DNA, 2469 bp, synthetic construct
  misc_feature 1..2469: note = Description of Artificial Sequence: Synthetic coding sequence
  source 1..2469: mol_type = other DNA
atgaacggccacatcagcaaccaccccagcagcttcggcatgtacccgtcccagatgaatggatacggatcatcccccaccttcagccagacagaccgagaacacggatctaagacttcagcaaaggcactctatgagcaaagaaagaattacgcccgggactccgtgagttccgtgtcagatatctcacagtatagggttgagcatctgaccacctttgttctggatcggaaggacgctatgattacagttgatgatggcatccgaaaactgaagctcttagacgcaaaaggcaaagtttggactcaggacatgatcttacaggtggacgaccgtgccgtctctctaatcgatctggagagcaaaaatgaactggaaaatttccctctgaacacaatacagcactgccaagcagtgatgcactcctgtagttatgactccgtactggcgctggtctgcaaggagcccacccagaacaaacctgacctacatctgtttcaatgtgatgaggtgaaagcaaacctgattagtgaagatatagagtcggccatttctgacagcaaaggcggcaagcagaagcgccgacctgacgccctcaggatgatctccaatgctgatccctcaattccgccaccgccaagagctcccgcacccgcacctccagggaccgtcacacaggttgatgttagaagccgcgtcgctgcatggtccgcctgggccgcagaccaaggcgacttcgagaagccacggcagtatcacgagcaggaagagactccagagatgatggctgctagaatcgacagagacgtgcagatcctgaatcatatcctagacgacatcgagttttttatcacaaagctccagaaggccgctgaggctttttccgagctgtccaaacggaaaaagaacaagaaaggcaaacgcaaaggaccaggggaaggagtgctcacactacgagcgaaaccccctccccctgatgaattcctcgattgcttccaaaagtttaaacacgggttcaatctgctcgccaagttaaagagtcacatccagaacccaagcgccgctgacctcgtccattttctcttcacgcccctgaacatggtggtgcaggcgacaggtggtccggaactcgctagtagtgtgctgagccctctgctgaataaggatactatcgattttctcaattacaccgtgaacggggacgagcggcagctgtggatgagtctgggggggacctggatgaaagctcgcgccgagtggccgaaggaacaatttatacccccttacgtaccccggttcagaaacgggtgggagcctcccatgctcaattttatgggcgctactatggagcaggatctttatcagcttgccgagtccgtggccaatgtcgccgagcatcagcgcaaacaggagatcaagcgcctctcaacggagcacagctcagtctccgagtatcatcctgccgatggttatgcattcagttccaacatttatactcggggatcccacctagatcagggggaggctgcagtggccttcaagcctacttcaaaccgtcatatcgatcgaaattatgagccactcaagacacaacccaaaaaatatgctaaatccaagtatgatttcgtcgccaggaacaatagcgagctgagcgtactgaaggacgacatcctggagattctggatgatcgcaaacagtggtggaaggtccgtaacgccagcggtgactcagggtttgtgcctaataatatcctcgatatagtgaggcctcctgagagtggactaggcagggccgaccccccctacacgcacacaatccaaaagcagaggatggagtacgggcccaggccagctgataccccaccagctccatccccacctcctaccccggcgcctgtgcccgtgcctctacctcccagcacacccgctccagttcccgtttccaaggtcccagcaaatattacgcggcagaactcctcaagctctgactctggaggtagcatcgttcgggactcccagaggcacaaacagctgcccgtagatagaaggaagtcacaaatggaggaggtccaagacgagctgatccacagactgacaatcgggcggagtgcagcccagaaaaaatttcacgtgccaagacagaatgtgcctgtcataaatattacgtacgactcgaccccggaggacgtaaaaacctggcttcagtccaaggggttcaacccggtcactgtgaactccctcggtgtgctgaatggcgcacaactattcagcctgaataaggatgagctcagaacagtctgtccagaaggagctagagtgtattctcaaataacagtgcagaaggccgctcttgaagactcttctggatcctcagagctccaggagatcatgaggagaaggcaggagaagattagcgctgcagcttctgactctggagtggagtctttcgacgagggctccagccattag

SEQ ID NO: 186699 - DNA, 366 bp, synthetic construct
  misc_feature 1..366: note = Description of Artificial Sequence: Synthetic coding sequence
  source 1..366: mol_type = other DNA
atgaacggccacatcagcaaccaccccagcagcttcggcatgtaccccagtcagatgaatggctatggtagctcccccactttttctcagactgatcgagaacatgggtcaaaaactagcgcaaaggccctgtatgagcagagaaagaactacgcccgggattccgtgagcagtgtttctgatatttcacagtatagagtggagcacctcacgacgttcgtgctcgatcggaaagacgcaatgatcacagtggacgacggaatccgcaaactaaagctgctcgacgctaagggcaaagtgtggacacaagacatgattctccaagtcgacgaccgagccgtgtccttgattgacctggaatcatag

SEQ ID NO: 186700 - DNA, 207 bp, synthetic construct
  misc_feature 1..207: note = Description of Artificial Sequence: Synthetic coding sequence
  source 1..207: mol_type = other DNA
atgaacggccacatcagcaaccaccccagcagcttcggcatgtacccttcccagatgaacggatacggtagttccccaaccttttcccagactgaccgcgagcatggaagcaaaacaagcgctaaagccttgtatgagcaaaggaaaaactacgcccgggattctgtgagctctgtgagcgatatctctcagtacagggtggagtag

SEQ ID NO: 186701 - DNA, 1689 bp, synthetic construct
  misc_feature 1..1689: note = Description of Artificial Sequence: Synthetic coding sequence
  source 1..1689: mol_type = other DNA
atgatggccgcccggatcgaccgggacgtgcagatcctgaaccacatcctcgatgatattgagttctttatcacaaagctacagaaagctgctgaagctttcagtgagctttctaagaggaaaaaaaataagaagggcaagcggaagggccccggcgagggagttctcacccttagagccaagccccccccacccgacgagtttctggattgcttccaaaagtttaagcacggtttcaatcttttagcgaagttaaagtctcatattcaaaaccctagtgccgccgatctcgtgcactttctgttcactccactcaacatggtagttcaagcaaccgggggtcccgagttggcttctagcgtgctgtctcccctcctgaataaagataccatcgacttcctgaattacactgtcaatggagacgagcgccaactttggatgtctttaggcggaacatggatgaaggcccgcgccgagtggccaaaggaacaattcataccgccctatgtcccacgatttagaaatgggtgggaacctcccatgctaaatttcatgggtgccaccatggagcaagatctgtaccaactcgcagaaagtgttgccaacgttgctgaacatcagagaaaacaggagattaaacgcttatcaaccgagcactcctctgtctcagagtatcatccagcagacggatacgctttttctagcaacatatatactagaggttctcacctcgaccagggtgaagccgccgtcgcttttaagccgacgagtaatcgccatatcgaccgaaactacgaaccattgaagactcagccaaaaaagtacgctaagtcaaaatacgactttgttgctcgtaataactctgagctatccgtactcaaggacgatattctggaaatattggacgataggaagcaatggtggaaggtaagaaacgcctccggggacagtggttttgttcccaataatattttagacattgtgcgccctccagagtcaggacttggacgagctgatcccccttacacacatactatccagaaacagagaatggagtacgggccgagaccagctgatacaccacccgctcctagcccacctcccacaccagccccggtcccagtccccctgcccccctccacccccgctccggtcccagtaagcaaggtgcccgccaacataactcgacagaactccagctcatcagactcaggcggctcaatcgtgcgagactctcagcggcataaacagctgcccgtggacaggaggaagagccaaatggaagaagtccaagatgagttaatccaccgtctcacgatcggcagatctgctgctcaaaaaaaatttcatgtgccaagacagaacgtccccgtgatcaacattacatacgacagcacccccgaggatgtgaaaacgtggctccagtccaagggcttcaacccggtgacggtgaatagcctcggagtgctcaacggggcacaactttttagtctaaataaagatgagctgaggaccgtttgccctgaaggagccagagtctattctcagataacagtccagaaggccgctcttgaggacagttcaggatcctctgagctgcaggagatcatgcgaagacggcaagaaaaaatatcagcagccgcatccgacagcggagtagagtcattcgatgaaggcagcagccattag

SEQ ID NO: 186702 - DNA, 1689 bp, synthetic construct
  misc_feature 1..1689: note = Description of Artificial Sequence: Synthetic coding sequence
  source 1..1689: mol_type = other DNA
atgatggccgcccggatcgaccgggacgtgcagatcctgaaccacatcttggatgacattgaattctttatcaccaaacttcaaaaggcagccgaggcattttcggagctgtcaaagcgaaaaaagaataaaaagggtaaaagaaagggaccaggagagggcgtcctaaccctgagagccaaaccacctcctcccgatgagttcctcgattgcttccagaaattcaaacatggattcaacctgcttgcaaagctgaagtctcatattcagaacccgtctgccgcagatctagtgcatttcctgttcacacctctgaacatggtggtgcaggctactggtggccctgaattggcctccagcgtgttatcaccactactgaataaagatactatcgactttctcaactacaccgtaaatggagacgagcggcagctgtggatgagtctcggagggacttggatgaaagcccgagctgagtggcccaaggagcagttcattccaccatacgtccctaggttcagaaatggctgggaaccaccaatgctgaacttcatgggagctaccatggagcaagatctataccagctggcagagagtgtcgcgaacgtcgccgagcaccagagaaaacaggagatcaagaggcttagcactgaacactcaagcgtgagtgagtatcatccagcagacggctacgcatttagcagcaatatttatacgcgcgggagccatctcgaccaaggtgaagcagcggtcgcattcaaaccgacgtctaaccgccacatcgatagaaactacgagcctctgaagacacagcccaagaaatatgccaaaagtaaatacgactttgtagctcggaacaatagcgagttgtctgtcctcaaggatgatattctggagattctggatgaccggaagcagtggtggaaagtgcgcaacgccagcggtgacagcggctttgttcccaacaacattctggatattgttcgtccgcctgagtctggtctaggtagggccgaccccccttacactcacaccatccagaagcagagaatggagtacggcccaaggcctgccgatacaccaccggcgccctctcctcctccaactccagcgcccgttcccgtccccctgcccccatccacacctgccccagttcctgtgagcaaggtcccagcgaatattacccggcagaatagttctagctctgacagcgggggctccattgtacgagacagccagcggcataagcagcttcccgtcgataggcgaaagagccagatggaggaggttcaagatgagttgatccatcgattgactattggaagaagtgccgctcagaaaaaattccatgtcccacggcagaatgtgccggtgatcaatattacttatgacagtacaccggaagatgtgaagacttggctccagagtaagggattcaatccagttacagtgaattccttgggcgtgctgaatggggcccagttgttttctctgaacaaagatgagctgcggaccgtatgccctgagggggcccgtgtctatagtcaaataacggtgcagaaggctgctttagaagacagttctgggagctccgagcttcaggagatcatgcgcaggagacaggagaaaatttccgcagccgcatctgacagtggagtggagtcatttgatgagggaagtagccactag

SEQ ID NO: 186703 - DNA, 2076 bp, synthetic construct
  misc_feature 1..2076: note = Description of Artificial Sequence: Synthetic coding sequence
  source 1..2076: mol_type = other DNA
atgaacggccacatcagcaaccaccccagcagcttcggcatgtacccatcacaaatgaacggttatggctcaagccccaccttctcacagaccgacagagaacacggctcgaaaacctccgccaaagctctgtacgagcaacggaaaaactacgcacgagactcggttagcagtgtatcagatatctctcagtatagggtggaacacttgaccactttcgttctggataggaaggatgcgatgatcacagtagatgatggcatacgcaagctcaaacttctagatgctaagggcaaagtttggacacaggatatgatcctgcaggttgatgaccgtgccgtatctcttatcgaccttgagtccaaaaacgaactcgagaatttccctctgaacacaatccagcactgtcaggcagtgatgcattcttgttcatatgacagtgtgcttgctctcgtttgcaaagagcctactcagaataaaccagatctgcacctgtttcagtgtgatgaggtcaaagctaacctcatatctgaagatatcgaaagcgcaatcagcgacagcaaaggcggcaaacaaaagaggaggccagacgccctaagaatgataagcaacgcggaccccagtatccccccaccccctcgcgcgcccgccccggccccccctggcacggtcacccaggttgacgtcagaagccgcgttgcagcatggagcgcttgggctgcggaccagggggacttcgagaaacccagacaatatcacgaacaggaagagacgcccgaaatgatggctgctcgaattgacagggacgtgcaaatactaaatcacatcctcgatgacatcgagttctttatcacaaagctgcagaaagccgcagaagccttcagcgaactcagtaagagaaaaaaaaacaaaaagggaaagcgcaagggtcctggcgagggggttctgacattgcgggctaagccacctcctccagatgagtttctggattgttttcagaagttcaaacacgggtttaatctgctggccaaactgaaatcccacattcagaatccctctgccgccgacttggttcattttctgtttaccccactaaatatggtcgtccaggccacaggtggacctgagctggcaagctctgtgctgagcccactgcttaacaaggataccattgactttctcaattatacagtcaacggggatgagaggcagctttggatgagcctcggtggaacgtggatgaaagctcgtgccgagtggcctaaggagcagttcatccccccgtacgtccctcgctttcgtaatggatgggaaccaccaatgctcaacttcatgggggcaactatggaacaagatctgtatcagctggccgagtcggtggctaatgtggctgaacaccagagaaagcaggaaattaaaaggttgtcaactgagcactccagtgttagcgagtaccacccagccgatgggtacgccttcagctctaatatttatactagggggtctcacttagaccagggtgaggcagccgtggcattcaaacccacctctaaccggcacattgatagaaattatgaaccactaaaaacccaacctaagaagtacgcaaagtccaaatatgactttgttgcccgcaataattccgaactttcagtgttaaaggacgatattctcgagatcctggacgatcggaagcagtggtggaaagtaaggaacgcaagtggcgatagcggatttgtcccgaacaacattttggatatagtcagacccccagagagcggtctgggcagagctgatcctccctatacccataccattcaaaagcagagaatggaatatggacctcgtcccgccgacacaccccccgcacccagtcccccaccaaccccagcccccgttcctgtcccgctacctccctccacacctgccccagtacccgtctccaaagtgccagctaacattactagacagaattcctcttctagcgactccgggggaagcatcgtccgagattctcagcgacacaagacctccgggggccctaaagaaattagtgacggagggtcagccaggtag

SEQ ID NO: 186704 - DNA, 207 bp, synthetic construct
  misc_feature 1..207: note = Description of Artificial Sequence: Synthetic coding sequence
  source 1..207: mol_type = other DNA
atgaacggccacatcagcaaccaccccagcagcttcggcatgtacccaagccagatgaatggctacggaagctctcccacttttagtcagacagatcgggagcacggcagcaaaacgtccgcaaaggctctgtatgagcagcgcaagaattacgcacgggactcagtgagtagcgtcagcgacatctcccagtatcgggtggagtag

SEQ ID NO: 186705 - DNA, 2469 bp, synthetic construct
  misc_feature 1..2469: note = Description of Artificial Sequence: Synthetic coding sequence
  source 1..2469: mol_type = other DNA
atgaacggccacatcagcaaccaccccagcagcttcggcatgtaccccagccagatgaatggttacggcagctctccgacttttagccaaacagaccgcgaacacgggtcaaaaacgtccgcaaaggccttgtacgagcagaggaaaaattacgcacgggattcagtctcttctgttagtgacatcagtcagtatagagtggagcacttgacaacttttgtcctggatagaaaagacgcaatgatcaccgtcgatgatggtattaggaaattaaagctactagacgcgaagggtaaagtgtggactcaggatatgatcctgcaggtggacgaccgagccgtgtccttgatcgatctagagtcaaagaacgagctcgaaaatttccccctcaataccatccagcactgccaagctgtcatgcattcttgcagttacgattctgtcctggccctggtttgcaaggagcccacgcaaaacaagcctgatctgcacctgttccagtgcgacgaggtcaaagccaacctgatttcagaggacattgagagcgcaatctctgactcaaagggcggaaagcagaagcgcaggccggatgctttgcgaatgatctccaatgctgatccttcaattcctccccccccacgggccccagccccagccccacctggaacagtgacccaggttgatgtcaggagccgcgtcgccgcttggtctgcatgggctgccgaccaaggggatttcgagaagccaagacagtaccacgagcaagaggaaacgcccgagatgatggctgcacggatcgaccgagacgttcagatccttaatcatatccttgatgacatcgagtttttcatcaccaaactccagaaggcagcagaggctttctccgagctgtctaagcggaaaaagaacaagaaaggcaaacgcaagggacctggcgagggcgtgttgactttacgcgcaaaacctcctcctccagatgaatttctagactgcttccagaaattcaagcatgggttcaacctgctggccaaattaaagagtcacattcaaaacccctccgcagctgatctggtgcatttcctttttactccccttaacatggttgttcaggccaccggcggccctgagcttgcctcctctgtgttatcccccttattaaacaaagacactattgattttctgaattacactgtgaatggcgatgagagacagctctggatgtctctgggaggaacctggatgaaggcccgtgccgaatggccgaaggaacaattcatccccccctacgtcccacggtttcgcaatgggtgggaacctcctatgttgaactttatgggagctacaatggaacaggacttataccagttagctgagtccgttgccaatgtcgccgaacaccagcgaaagcaagagatcaaacgactgagcaccgagcactctagtgtgagtgagtatcaccccgccgacggttacgctttcagctctaatatttacactcggggatcacacctagatcagggcgaggcggcggtggccttcaaacctacatcaaaccggcatattgatcgtaattacgaacctctcaagacacagcctaaaaagtacgctaaaagcaaatacgactttgtggcaagaaataactctgagctgagcgtgttgaaggacgacatcctggaaatccttgacgatcgcaagcagtggtggaaggtgcgaaacgcttcaggcgattctggctttgtgcccaacaatattctcgatatcgtgcggcccccagaatctggcctcggacgcgcagatcctccatatactcataccattcaaaagcagcgcatggagtacgggcctcgacctgcggacactccgccggctccatccccccctcccacacctgcccctgtccctgtgccactgccaccatcgactcctgcccctgttcccgtcagtaaggtgccagctaatataactcggcagaacagctcgtcgtctgactctggcgggtccatagtccgagacagtcagcgccacaaacagttgcccgtggaccggaggaagtcacaaatggaggaggttcaagatgagctgattcacagactcactattggcaggtcggccgcccaaaagaaatttcacgttccccgtcaaaatgtccctgtaataaacatcacttatgactctactccagaagacgtgaaaacgtggctgcaaagcaagggcttcaacccggtgaccgtcaatagcttaggtgtcctaaacggagctcaattattctccctgaacaaagatgaattgagaaccgtctgcccggaaggcgcaagggtatacagccagatcaccgtccagaaagctgctttagaagattcctcaggtagcagcgagctccaggagatcatgcgtagaaggcaggagaagatctccgccgccgccagcgacagcggagtcgagagctttgacgaaggatccagccattag

SEQ ID NO: 186706 - DNA, 2469 bp, synthetic construct
  misc_feature 1..2469: note = Description of Artificial Sequence: Synthetic coding sequence
  source 1..2469: mol_type = other DNA
atgaacggccacatcagcaaccaccccagcagcttcggcatgtacccctcccagatgaatggttacggcagcagccccacattcagtcaaacagatcgtgaacacggctcaaagacctccgccaaggccctctacgaacagagaaagaactacgcccgggattcagtttcctccgtgtccgacatcagtcaataccgggtcgaacacctgactacattcgtgctcgatagaaaggacgctatgattaccgtggacgacggcatccgaaagctgaaactgctggacgcaaagggaaaagtctggacccaggatatgatcctgcaagtcgatgaccgcgcggtcagtctcattgacttggagtcaaaaaatgaactagaaaattttccactcaacacgatccaacactgtcaggctgtgatgcattcttgtagctatgattcggtccttgccctggtctgcaaggagcccacgcaaaacaaacctgacctccatctgttccagtgtgacgaggtcaaggccaacctgatatccgaggatatcgagtcggccatcagcgactctaagggcggcaagcaaaagaggcgtcctgatgcactgagaatgatctccaacgccgacccctcaattccaccgccacctcgcgccccagcgcctgccccacctggcactgtgactcaggtggacgtgcggtctagagtggctgcctggagtgcctgggccgccgaccaaggtgacttcgaaaagccaagacagtaccacgagcaggaagagactccagagatgatggccgctcgaatcgacagggatgtgcagatcttgaatcacatcctagatgacatcgagttcttcattactaagttgcagaaagccgctgaagcttttagtgagcttagcaagcggaagaaaaataagaagggcaagcgcaaggggccaggagaaggcgtgctcaccctgcgtgctaaaccgccaccacctgacgagtttcttgactgttttcagaaattcaagcatggatttaatctgttagccaaacttaagagccacatccaaaatccatccgcagcggatctggtccactttttgttcacgcctctgaacatggtggtccaggctaccggaggcccagaacttgctagctcggtgttgagcccattgctgaacaaggataccattgactttttgaattataccgttaatggggatgagcggcagttgtggatgagtctgggaggcacatggatgaaggcccgggctgaatggcccaaggaacagtttattcccccttacgtccctcgcttccgtaacggctgggagcctcccatgcttaactttatgggtgcgactatggagcaggatttatatcagttggcggagtccgtggctaatgtggcagaacaccagagaaagcaggaaattaaacggctttctaccgaacactcctccgtatctgaatatcacccagccgacgggtatgccttttcatcaaacatttatacacgcggaagtcacctggaccagggagaagccgctgtggccttcaagccaacgtccaatcggcatatcgatcgaaactacgaacctctgaagacacaacctaagaagtatgccaaatccaaatacgattttgtggcgcggaacaactctgaactgtctgttctgaaggacgatattctggagatcttggacgatagaaagcagtggtggaaggtcaggaatgcctctggcgactctggtttcgtgccaaacaatatactggacattgtacgtcctccagaaagcggtttgggaagagctgacccaccatacacacataccatccaaaagcagcgcatggagtacgggccacggccagctgatactccacccgccccgagtccgcctcctacacctgcccctgtacccgtgccgctacctccctccaccccagccccagttccagtgtcaaaggtgcctgcgaatataacgcggcagaatagttcttctagcgactctggcggctctatcgttagagatagtcagagacataagcagctgcctgtggacagacggaaaagccaaatggaggaggtacaagatgagctgatccataggcttactatcggcagaagcgccgctcagaaaaaattccatgtgccccgtcagaacgtgccagtgatcaatattacttacgattcaacacccgaggacgtgaagacgtggctgcagagcaagggtttcaatccagtgactgttaattcactgggggtcctcaacggagcgcaactgttctcgttaaacaaagacgagctccggaccgtgtgcccagagggtgcaagagtctatagccagatcaccgtgcagaaagctgcccttgaggatagctcgggaagctcagaattgcaagaaatcatgaggcgtcggcaggagaaaatctccgcagcggcatctgacagtggcgtggaatcctttgatgaaggtagctcccattag

SEQ ID NO: 186707 - DNA, 204 bp, synthetic construct
  misc_feature 1..204: note = Description of Artificial Sequence: Synthetic coding sequence
  source 1..204: mol_type = other DNA
atgaacggccacatcagcaaccaccccagcagcttcggcatgtacccttcccaaatgaacgggtacggcagctctcccaccttcagtcagactgaccgggagcacggatcgaagaccagcgccaaggccctttacgagcaacgcaagaattatgcgagagactccgtttccagcgtgagcgatataagtcagtatagagtttag

SEQ ID NO: 186708 - DNA, 387 bp, synthetic construct
  misc_feature 1..387: note = Description of Artificial Sequence: Synthetic coding sequence
  source 1..387: mol_type = other DNA
atgaacggccacatcagcaaccaccccagcagcttcggcatgtacccctctcagatgaacggttatggcagtagccccactttctcccaaacagacagagaacatggcagcaagacttcagcaaaagctctgtatgagcagcggaaaaactacgcgagagacagcgtatctagtgtttctgacattagccagtaccgtgtcgagcacctgaccaccttcgtgctggaccggaaggacgctatgataaccgtggatgacggcatccggaagctgaaacttctggacgccaagggcaaggtgtggacacaggacatgatccttcaggtggatgatcgggcagtgtctctcattgatctggagtccaaaaatgagctcgagaatttttag

SEQ ID NO: 186709 - DNA, 996 bp, synthetic construct
  misc_feature 1..996: note = Description of Artificial Sequence: Synthetic coding sequence
  source 1..996: mol_type = other DNA
atgcggttccggttcggcgtggtggtgccccccgccgtggccggcgcacggcccgagctactcgtcgtgggctcgaggcctgagctgggccgctgggaaccccggggagctgttcgcctgagacccgcaggtaccgcggccggagatggtgccctggccctgcaggaacccggactctggctgggcgaggtggagctcgctgctgaagaagctgctcaggacggcgctgagattggagctacacctaagttaccaagtactattttcccttggttcgtcctgcgccagggtcttatcctcggcaatggaccacaccatgaccgatgctgtacttataacgaaaataatttggtggacggtgtctactgtctccctattgggcactggattgaggccacgggacacaccaacgagatgaagcataccaccgatttctacttcaatatagccggacatcaagcaatgcactactcacgcatcctgccaaatatttggctcggatcgtgtccgaggcaagtcgagcacgtgactatcaagttgaagcacgagctgggaattaccgctgtgatgaatttccaaaccgaatgggacattgttcaaaactcatcaggatgcaaccgctatccagaacctatgacacccgataccatgatcaaattgtaccgcgaggaaggactggcctacatctggatgccgacacccgacatgtctaccgaaggtcgtgtccagatgctcccgcaagcggtatgcctcctccatgccctgctggaaaaagggcacatcgtatacgtccattgcaacgctggtgtgggcaggagcactgctgccgtgtgtggctggctgcagtatgtaatgggctggaatctgcggaaagtacagtattttctaatggccaagcgccccgccgtttatatcgatgaagaggcacttgccagggcgcaggaggacttctttcagaagtttggaaaagtgaggagtagcgtgtgctcgctgtag

SEQ ID NO: 186710 - DNA, 996 bp, synthetic construct
  misc_feature 1..996: note = Description of Artificial Sequence: Synthetic coding sequence
  source 1..996: mol_type = other DNA
atgcggttccggttcggcgtggtggtgccccccgccgtggccggcgccaggcccgaactgctggtagtgggcagtagaccagaactggggagatgggagccgcgaggcgccgtccgactcaggcccgcagggaccgcagctggagacggggcccttgctctccaggagccgggactgtggctgggggaggttgaactggctgctgaggaggctgcccaggacggggctgagccaggcagagtggacacgttctggtataaattcctcaaacgggagccaggtggagagctgtcttgggagggcaacggaccccatcacgataggtgctgcacatacaatgaaaataatctggtagatggcgtgtattgcctaccgatcggacattggatcgaagcaaccgggcacactaacgagatgaagcataccacggatttctacttcaatatcgcggggcaccaggctatgcattacagtcggatcttgccaaacatatggctcggcagttgcccgcgccaagtcgagcacgtgactatcaagctgaaacacgagctgggcatcaccgccgtaatgaactttcaaactgagtgggacattgtacaaaattcaagtggctgtaaccggtacccagaacccatgacccccgatactatgatcaaactgtaccgggaggaaggtctcgcatatatttggatgcctactcccgatatgtcaaccgaaggccgggttcagatgcttccacaggctgtgtgccttctccacgctctgttggaaaagggtcacatcgtctatgtgcattgtaacgctggagtggggcgctcaacagcagccgtctgtgggtggttgcagtacgtgatgggatggaacttgcgcaaggtccagtactttctgatggctaaaagacccgccgtgtacattgacgaggaggcgctggcccgggcacaagaagacttcttccaaaagtttggaaaggtgaggtcaagtgtctgttctctctag

SEQ ID NO: 186711 - DNA, 954 bp, synthetic construct
  misc_feature 1..954: note = Description of Artificial Sequence: Synthetic coding sequence
  source 1..954: mol_type = other DNA
atgcggttccggttcggcgtggtggtgccccccgccgtggccggcgcccgacccgagcttcttgtggtcgggagtcgccctgaattaggccgatgggagcctagaggtgccgtaagacttagacctgccggcaccgctgcgggggatggagcgctggccctgcaggaacccgggttgtggttaggcgaagtggaactcgctgccgaagaagccgctcaggacggcgctgagcccgggcgggtggacaccttctggtacaagtttctaaaacgagagccggggggagagctctcttgggagggcaatgggccacaccacgaccggtgttgtacctataacgaaaacaacctggttgacggcgtgtactgtcttcccatcggccactggatagaagccactgggcatacgaatgaaatgaagcacaccaccgatttttattttaacatcgcgggacaccaggcgatgcattattctcggatcctgccaaacatttggctcggatcatgcccccgacaggtcgagcatgtgacaatcaagctgaagcacgaactaggtatcacagcagttatgaacttccagactgagtgggacattgtacagaattcatccggatgtaatcggtacccggaacccatgacccccgatacaatgatcaagctgtacagagaagagggactggcttacatttggatgcccacgcccgatatgtcaacagaaggcagggttcaaatgctgccccaggctgtgtgtctcctgcacgcattgttagagaaaggtcatatagtgtacgtccattgcaatgcgggcgtggggaggagcacagccgccgtgtgcgggtggctacagtacgtgatggggtggaacttgcgtaaggtacagtatttcctgatggctaagcgtcctgcagtctacatcgacgaggaggccgcttcccaggacacctttcctctctag

SEQ ID NO: 186712 - DNA, 714 bp, synthetic construct
  misc_feature 1..714: note = Description of Artificial Sequence: Synthetic coding sequence
  source 1..714: mol_type = other DNA
tgagacaccttctggtacaagttcctgaagcgggagcccggcggcgagctttcttgggagggaaatggaccccaccatgacagatgctgcacttacaacgaaaacaacctcgtcgacggcgtctactgtctgcctattggccattggattgaggcaactggccatacaaatgagatgaagcatacaaccgacttctacttcaatatcgcagggcaccaggccatgcactacagtcgcatcctgccaaatatctggctgggatcctgccccagacaggtcgaacacgtgactattaaactcaagcatgagctcggaataacagcagtgatgaacttccagactgaatgggatattgtccagaattcgtcaggctgtaatcgctaccccgagcctatgactcctgataccatgataaaactgtaccgcgaggaagggcttgcctacatttggatgcctacccccgacatgagtacggaagggcgagtgcagatgctgccgcaggcagtgtgcttgctccatgccctcctggagaagggccacatcgtttatgtgcactgcaatgcgggtgtggggaggagtactgcagccgtctgcgggtggctgcagtatgtcatgggatggaacctccgcaaagtgcagtatttcctgatggccaagaggccagccgtatacattgatgaagaggctgcttctcaagatactttccctctttag

SEQ ID NO: 186713 - DNA, 513 bp, synthetic construct
  misc_feature 1..513: note = Description of Artificial Sequence: Synthetic coding sequence
  source 1..513: mol_type = other DNA
tgaaacggcccccaccacgaccggtgctgcacctacaacgagaacaatctggttgatggggtatactgcctgcccatcggccattggatcgaagccaccggacacacaaatgaaatgaaacacacaacagacttttactttaatatcgcgggccaccaagccatgcactattcccgtatcctccccaacatctggttaggaagctgccctcgtcaggtcgagcatgttacaataaaactcaaacatgaacttggtatcactgcagtgatgaactttcagacagaatgggacattgtgcaaaattcatcgggatgtaatagataccccgagcctatgacgcctgacaccatgatcaaattgtacagggaagagggcctggcatacatctggatgcctacaccggacatgtcaacggaggatgagaaaagaacagccgacatgtgttgttcaggaatgtgggaggagaccgcggacttcgggctgggtattctggattacctcaagcagaagtag

SEQ ID NO: 186714 - DNA, 813 bp, synthetic construct
  misc_feature 1..813: note = Description of Artificial Sequence: Synthetic coding sequence
  source 1..813: mol_type = other DNA
atgcggttccggttcggcgtggtggtgccccccgccgtggccggcgcacggcccgaattgctggttgttggctcgcgaccagaactgggacgatgggaaccacgaggcgccgttcggttgaggcctgcgggcacggccgccggcgacggggcactggctctgcaggagcccggactttggctgggcgaggtggagttggccgctgaggaggcggcacaagatggggcagaacccggacgcgtcgataccttctggtacaaatttttaaagcgagaacctggaggggaactcagctgggaaggcaatggaccccaccatgaccggtgttgcacatacaatgagaataatctggtggatggcgtgtattgcctccctataggccactggatagaggccacaggccacacgaacgaaatgaaacataccacggacttctatttcaatatagccggacatcaggcaatgcactactcccggattctgcctaacatttggctggggtcgtgtcctcgccaggtggaacacgtgaccatcaaactgaaacacgaactgggaataacagcggtgatgaattttcaaactgagtgggacattgtgcagaacagttccggatgcaatcggtaccccgagcctatgaccccagacaccatgatcaagttatacagggaagaaggtctcgcatatatttggatgcccaccccagacatgagcactgaggatgagaaaaggaccgcagacatgtgctgctccggtatgtgggaggagactgcagacttcggacttggcatacttgactatctgaagcaaaagtag

SEQ ID NO: 186715 - DNA, 945 bp, synthetic construct
  misc_feature 1..945: note = Description of Artificial Sequence: Synthetic coding sequence
  source 1..945: mol_type = other DNA
atggcccccccccaggtgctggccttcggcctgctgctggccgccgctacagcaacctttgcggccgcacaggaggaatgcgtctgtgagaattacaagctggcagtgaattgtttcgtcaacaataatcgccaatgtcagtgtacctccgtaggcgctcaaaacaccgttatctgcagtaagcttgccgccaaatgtctggtgatgaaagccgagatgaatggctccaagttggggcgtcgggccaaaccagagggcgctctccagaacaacgacggcttgtatgatccagactgcgatgagtctgggctttttaaggcgaagcaatgtaacggcaccagcatgtgctggtgtgtgaacaccgccggcgtccggagaactgataaggatactgagataacatgcagtgagagggtgaggacctactggatcattatagagctgaagcataaggcgcgggagaagccatacgacagcaagtcactgcgcactgccttacagaaggagattacaacccggtatcagctggacccaaagtttatcacctctatcctgtacgaaaacaacgtaattaccatcgatctggtacaaaacagcagccaaaagacccaaaatgacgtcgatatcgcagacgtggcgtactatttcgagaaggatgtgaaaggtgagagcctgttccacagtaagaagatggacctcaccgtcaacggcgagcaactcgacctggatccgggtcagaccttgatctattatgttgatgaaaaagcccctgagttctccatgcaggggctgaaggccggcgtgatagctgtgatcgtcgtggtggtgattgctgttgtcgccggcatagttgtattggtgatctcaaggaaaaaacgcatggcaaaatatgaaaaggcagagataaaggaaatgggagaaatgcaccgggaactgaacgcctag

SEQ ID NO: 186716 - DNA, 474 bp, synthetic construct
  misc_feature 1..474: note = Description of Artificial Sequence: Synthetic coding sequence
  source 1..474: mol_type = other DNA
atgctggtgctgctggccggcatcttcgtggtgcacatcgccaccgtcatcatgctctttgtttctactattgccaacgtttggttggtgtcaaacaccgtggatgcttccgtcggcctttggaagaattgcactaacatctcatgctccgacagcctctcctacgcatcagaggatgctctgaaaacagtgcaggcgttcatgattctgtccatcattttctgtgttattgcgttgctggtgtttgtttttcagctgttcacgatggagaaaggcaatcgattcttcctctcaggagccacgactcttgtctgttggctgtgtatcctggtgggtgtaagcatttatacaagccattacgcaaatcgtgacggcacccagtaccatcatggatattcctacatcctaggctggatctgcttttgcttcagtttcatcattggcgttttgtatcttgttttgagaaaaaagtag

SEQ ID NO: 186717 - DNA, 426 bp, synthetic construct
  misc_feature 1..426: note = Description of Artificial Sequence: Synthetic coding sequence
  source 1..426: mol_type = other DNA
atgctggtgctgctggccggcatcttcgtggtgcacatcgccaccgtcatcatgttgttcgtgagcaccatcgcaaacgtctggttggtttcgaataccgtggacgccagtgttggcctctggaagaattgcaccaacatatcatgtagcgattcactgtcttatgctagcgaagatgcactaaagactgtccaagcttttatgattttatctatcatattctgcgtgattgcactgttggttttcgtttttcagctattcactatggagaaaggtaacaggttctttctgtctggcgccacaacgctggtttgctttataatgagaatcgtgatggagcgctcaattacaacggccatccccaccagctgggccggaagcgccagtgcaagcgccagctcatcagccttctctatttggagctag

SEQ ID NO: 186718 - DNA, 12 bp, synthetic construct
  misc_feature 1..12: note = Description of Artificial Sequence: Synthetic coding sequence
  source 1..12: mol_type = other DNA
atgctggtgtag

SEQ ID NO: 186719 - DNA, 504 bp, synthetic construct
  misc_feature 1..504: note = Description of Artificial Sequence: Synthetic coding sequence
  source 1..504: mol_type = other DNA
atgctggtgctgctggccttcatcatcgccttccacatcaccagcgccgcacttttgttcattgctaccgtcgacaacgcatggtgggtgggagacgaattcttcgcggatgtgtggagaatttgcaccaacaacaccaattgcacggtaatcaacgattcgttccaggagtacagcaccttgcaggcagtacaggctaccatgatcctctctaccattctatgttgcatcgccttctttattttcgtgctgcaactctttaggttgaaacagggtgagaggttcgttttgacctcaatcatacagttaatgtcttgcctctgtgttatgattgccgctagtatttatacagaccgtagagaagacattcacgataaaaacgctaagttttatccagttactcgggaagggagttacggttactcttatattttggcatgggtcgccttcgcatgtacgtttatctctggcatgatgtacctgatactgcgcaagagaaagtag

SEQ ID NO: 186720 - DNA, 504 bp, synthetic construct
  misc_feature 1..504: note = Description of Artificial Sequence: Synthetic coding sequence
  source 1..504: mol_type = other DNA
atgctggtgctgctggccttcatcatcgccttccacatcaccagcgctgcactgctttttatcgcaaccgtcgacaatgcatggtgggtgggagacgaattctttgcagatgtatggcgtatatgtactaataacactaactgcacagtcatcaatgacagctttcaggagtactccactcttcaggctgtgcaggctaccatgatcctgtccacaatcctgtgctgcatcgcgttttttatttttgtgctgcagctgtttaggctgaaacagggcgaaagattcgtcctgacatccataatccagttgatgtcttgtctttgcgttatgatcgcagccagcatctataccgataggcgtgaagacatccatgacaaaaacgccaagttttaccctgtcacccgcgaaggaagttacggctattcctacatcctggcctgggtggccttcgcttgtacgtttatttcaggcatgatgtacctgattcttcgtaaacgtaaatag

SEQ ID NO: 186721 - DNA, 492 bp, synthetic construct
  misc_feature 1..492: note = Description of Artificial Sequence: Synthetic coding sequence
  source 1..492: mol_type = other DNA
atgagcctgctgctgctggtggtgagcgccctgcacatcctgatcctcatcctgctgttcgtagccacactggataaatcctggtggaccctccctggcaaagaatctcttaacctgtggtacgattgtacatggaacaacgacaccaaaacatgggcttgctctaacgtgagcgagaatggttggctgaaggccgttcaggtgttaatggttctgagcttaattctctgctgtctttctttcatattgtttatgttccagctgtatactatgcggagggggggcctgttttatgccaccgggctttgtcagttgtgtacttctgtggcggtctttaccggcgcactgatttacgcaatccacgctgaagagatcttggaaaaacatcctagaggtggaagctttggatactgcttcgccttagcatgggttgcttttccactcgctttggtgtccggaatcatctacatccatctccgaaagcgtgaatag

SEQ ID NO: 186722 - DNA, 2034 bp, synthetic construct
  misc_feature 1..2034: note = Description of Artificial Sequence: Synthetic coding sequence
  source 1..2034: mol_type = other DNA
atgaccgccagccccgactacctggtggtgctgttcggcatcaccgccggtgcgacaggggctaaactcggatcagatgagaaagaacttattctcctattctggaaggtggtggacttggctaataagaaggtgggtcagctgcacgaagtgctcgtgaggccagaccaattggaacttaccgaagactgcaaggaagagaccaagatcgatgttgagagcctcagttccgccagccaactggatcaggccctgagacagttcaatcagtctgtcagtaacgaactgaatatcggggtagggacttcattctgcctgtgcactgatggtcaactgcacgtgcgccagatcctccatcccgaggcatctaaaaaaaatgtgcttcttcctgagtgtttctactcattcttcgacctcagaaaggagtttaagaaatgttgcccagggtcccccgacatcgataaactcgacgtcgcaacaatgaccgagtacttaaacttcgaaaagtctagttcagtgtccagatacggggccagccaggtggaggacatgggaaacattattctagccatgattagtgagccatacaatcacaggttctccgacccagagagggtcaattataaatttgaatccgggacatgttccaagatggaattaatagatgataacaccgtcgtgcgagcaagagggttgccatggcagtcctccgatcaagatatcgcgcggttcttcaaggggttaaatattgccaaagggggtgctgcactgtgcctcaatgctcaaggcaggcggaacggagaggcattggtgaggttcgtgtccgaagaacacagggatctggcgttgcagcggcataagcatcatatgggaacccggtatatagaggtgtacaaagccaccggtgaggatttcctgaagattgctggaggaacaagcaatgaggtagctcagtttttgtcaaaagagaaccaggttattgtacgaatgagaggcctcccctttaccgctactgccgaggaggtcgtggcattcttcggacaacactgccctatcactggtgggaaagaaggtatcctgttcgtgacctatccagacgggagacctacaggagacgcgtttgtactctttgcatgtgaagagtacgcccagaacgcactgaggaagcacaaggatctgttaggcaagagatacatagagctgttccgcagtaccgctgcagaggtccaacaggtcctgaataggttcagctccgccccgttaatccctctgccaacacctccaataatacctgtgttgccacagcagtttgtacctcccactaacgtgagagactgtatcagacttcgtggactcccttacgccgcaacgatagaggatattcttgatttccttggagagttcgccaccgatattcggactcatggcgtccatatggtgctcaatcatcagggtcgacccagcggcgacgccttcatccagatgaaaagcgccgacagggccttcatggctgcccagaagtgtcacaaaaagaatatgaaggaccgttacgttgaagtcttccagtgctctgcagaagagatgaactttgtgttgatgggcggcaccctcaatcgcaacggactatcccccccaccatgcctttcccccccaagctatacctttccggctcccgcagccgtaatccctacggaggccgcaatataccaacctagcgtgattttgaatccccgagccctgcagccatccacggcatattatccagctgggacccagctcttcatgaattacacggcttactatccaagcccacccgggagccccaatagccttggctatttccctaccgcggccaatctgagcggagtgccaccacagcccgggaccgtcgtgaggatgcaggggcttgcatacaatacgggtgtcaaggaaatattgaacttcttccaggggtaccagtatgcaaccgaggacgggctcatccatactaacgaccaggcccggactcttcccaaagagtgggtctgtatctag

SEQ ID NO: 186723 - DNA, 1980 bp, synthetic construct
  misc_feature 1..1980: note = Description of Artificial Sequence: Synthetic coding sequence
  source 1..1980: mol_type = other DNA
atgaccgccagccccgactacctggtggtgctgttcggcatcaccgccggcgcgacaggcgcaaaactgggctccgacgagaaggagctgatcctgctgttctggaaagtcgtggacctggccaataagaaggtgggtcaactgcacgaagtgcttgtgcgaccagatcagctcgagctgacagaggattgcaaggaagaaaccaaaattgatgttgaaagtctgagtagcgcatctcagcttgatcaggccctgagacagtttaatcagtcagtttcaaacgagttgaacatcggcgttggtactagcttttgtttatgtaccgatgggcaacttcatgtaaggcaaatattgcaccccgaggcgtcgaagaaaaacgtgttattaccagaatgtttctacagtttcttcgatctgaggaaagagttcaaaaagtgctgcccaggttcgccagacatagacaagctggatgttgccactatgacagagtacctcaacttcgaaaaatcaagcagcgtatctcggtacggtgcctcccaagtggaagatatgggtaacattatcctggccatgatcagtgagccttacaatcatagattttctgatcctgaacgtgtcaattataagtttgaatctgggacttgtagcaaaatggaactgattgacgataacacggtggtccgcgcgagaggcctcccctggcagtcttcagaccaggatatcgcccgattcttcaaaggcctcaatatcgcaaaggggggcgccgcactctgtctcaacgcccaaggacgcagaaacggcgaagcgcttgttcgttttgttagcgaggagcatcgtgacctagcccttcagcgacataagcatcacatggggacgcgatacattgaggtctataaggccacgggagaggatttcctgaaaatcgcaggcgggacaagcaatgaggtggcccaattcctgtccaaagagaatcaggtaattgtgaggatgagaggccttccattcactgcaacagcggaggaggttgtcgccttcttcggacagcactgtcctataacgggaggaaaggaagggattctgtttgtcacataccctgatggtaggccgactggagacgccttcgtgctgttcgcctgcgaggaatacgcccagaatgcactcaggaaacataaagacttgctgggcaagcgttacattgagctctttcgctcaactgcagcagaggtgcagcaagtcctcaatcgattctcttccgccccactaatccccctacccactcctccgattatcccagtgctaccccaacaatttgttcctccgaccaacgtgagggattgtattcgactacgggggctcccgtatgccgccacgatcgaagatatcttggacttcctaggcgagtttgccaccgatataagaacacatggtgttcacatggtgctcaaccatcaggggaggccctcaggggacgctttcattcagatgaaaagtgccgaccgcgcattcatggccgcgcagaaatgccacaagaaaaacatgaaagaccgatatgtggaggtgtttcagtgtagtgccgaggagatgaactttgtgcttatgggtggaactctaaaccggaacggcctctcccctcccccctgtttgagtcctccttcctacaccttccccgcacctgcagctgtaatacccacggaagctgccatttatcagccaagcgtaattctaaatccacgggcactccagccttctaccgcttattaccctgctggcacacaattattcatgaactataccgcttattacccttctccccccggaagtcccaactctctagggtacttccctaccgcggccaatctttccggagtccctccccagcccggcaccgtcgtgcgcatgcagggcctggcatacaacaccggcgtcaaggagattctgaattttttccagggctatcaatgcctcaaggacgtctggtag

SEQ ID NO: 186724 - DNA, 2046 bp, synthetic construct
  misc_feature 1..2046: note = Description of Artificial Sequence: Synthetic coding sequence
  source 1..2046: mol_type = other DNA
atgaccgccagccccgactacctggtggtgctgttcggcatcaccgccggcgccactggggcaaaacttggatcagacgagaaagaacttattctgctgttttggaaagttgtggatctcgccaataagaaagtagggcaactgcatgaggtcctggtgagacctgatcagttggagctcacggaggactgtaaagaggaaaccaagatagacgtcgaaagcctctcctcggcaagtcagctggatcaggccctccggcagttcaatcagtccgtgtccaacgagctaaatataggcgtcggaacgagcttttgcttgtgtactgatggccagctgcacgtcaggcagatcctccacccagaggctagcaagaaaaacgtgttgctgcccgagtgcttctacagcttctttgacctgcgcaaggagtttaaaaagtgctgtccaggcagccccgatatagataagctggatgtagccaccatgacggaatatctgaactttgagaaaagttctagtgtaagcaggtatggagcatcccaagtcgaagacatgggcaacatcatattggccatgatcagcgaaccatacaaccacagattctcagatcctgagcgtgttaactacaaatttgaaagtggcacctgtagtaaaatggagctcatagatgacaataccgtagtgagagccagagggctgccctggcagtccagtgatcaggacattgctagattctttaaagggttaaatatcgccaagggcggggctgcactgtgtttaaacgcccaggggcggcgcaacggcgaggccctggtgcggtttgtcagcgaggagcatcgcgatctcgctctgcagcgacataagcaccacatgggcacccgttatattgaggtatataaggctactggtgaggacttcttgaaaattgcaggcggtaccagtaatgaagtggctcagttcctttccaaagagaaccaggtaattgtcagaatgcgcggactgccatttaccgccactgcagaggaagtggtggccttttttgggcaacattgtccaattactggcggcaaggaagggattctctttgtgacatatccggacggtcggccaacaggcgacgccttcgtcctgtttgcttgtgaagagtacgcgcaaaatgccctgcgaaagcacaaggacctgctgggcaaacggtatatcgaactctttcggtccaccgctgccgaagtgcagcaggtcttaaatcgcttctctagcgccccactcatacctctcccaaccccccctattattcccgtgttgccacagcaattcgtcccaccgactaatgttcgcgactgcattcgattacgaggactcccatatgcggctaccatagaggatattctcgacttcttaggcgaattcgctacagacattaggacacatggggtgcacatggtgttaaaccaccaaggtcggccatccggagacgccttcatccagatgaaatctgcagatcgagctttcatggctgcacagaagtgccataaaaaaaatatgaaggatagatacgtggaagtctttcagtgtagcgccgaggagatgaatttcgttttaatgggggggacactaaaccgaaatggtctaagcccaccgccatgcaagctgccgtgtctctctcctcctagctataccttccctgctccggccgcggtgatccctactgaagccgcgatctatcagccttccgttatcctgaatccccgagctctacagccgagcacggcatattacccagccgggacacagttattcatgaactacaccgcatactacccaagcccccctggtagtcctaatagcctgggatacttccccactgccgctaacctttccggcgtgccaccacaaccaggcaccgttgtgcgcatgcagggcctcgcctataatacaggtgtcaaggagattcttaatttttttcaggggtaccaatacgcaactgaggacggattaatccatacaaatgaccaagcacgtacgcttccaaaagagtgggtctgtatctag

SEQ ID NO: 186725 - DNA, 1827 bp, synthetic construct
  misc_feature 1..1827: note = Description of Artificial Sequence: Synthetic coding sequence
  source 1..1827: mol_type = other DNA
atgaccgccagccccgactacctggtggtgctgttcggcatcaccgccggcgccaccggcgcgaaactcggttctgatgagaaggaactgatacttttattctggaaggtggtggacctggccaacaagaaagtgggtcagttacacgaggtcctggtgcggcctgaccagctggaactcactgaagactgtaaggaagagaccaagattgatgttgaatccctgagctctgcttcccagctggaccaggcactgcgccaatttaaccaatcagtatctaatgagctcaacataggagttggcacatctttctgcctgtgtacagacgggcagttgcatgtccgccaaattttgcacccagaggcttccaaaaagaatgtcctgcttcccgaatgcttctatagcttcttcgaccttcgaaaggagtttaaaaaatgctgccctgggagtccggacatcgataagctggatgtggcgacgatgactgaatacctgaactttgagaaatccagttcagtttctaggtatggtgcttcacaggtagaggatatgggtaatattatactcgccatgatctctgaaccatataaccaccggtttagtgatcctgaacgagtgaactataaattcgaatccggaacctgttcaaaaatggagctgatagacgacaacactgtagttagggcacgaggcctaccatggcagtctagtgatcaggatatcgccaggttttttaaaggactgaatatcgcaaaaggcggagctgcgctgtgtcttaacgctcagggtagaagaaatggcgaagccctggttcggttcgtgagcgaggaacatagggatcttgccctgcagcgccacaagcaccacatgggtacacgatacatcgaggtctataaagccaccggagaggactttctgaaaatagcgggagggacgtcaaatgaggtggcccagttcctctccaaggagaaccaagtgattgttcgaatgcgagggctcccattcactgccacggcagaagaagtagtggcattcttcggtcagcattgccccattacaggcggcaaagagggaatcctgtttgtcacataccccgatgggcggccaactggcgatgcctttgttttattcgcatgcgaggagtacgcgcagaatgctctgcgaaagcataaagatctccttggcaagcggtacatcgagctcttcagatcgacagccgctgaggtgcagcaggtactcaaccgcttttcaagtgcaccattgattccactgcccacacctccaatcatccccgtgctgcctcagcaattcgtgccacccactaatgtccgggactgtatcagattgcgaggcctgccatatgctgccacaattgaagatatcctggattttctgggggagtttgccaccgatattcgcacacacggcgtgcacatggttctgaatcaccaggggagaccctccggggatgccttcatccagatgaagtccgcagatagggctttcatggcggcccagaaatgccataaaaaaaatatgaaggaccgttatgtagaggtttttcagtgctccgcggaagagatgaatttcgtgctcatgggaggaaccctgaaccgcaacgggctgagtccccccccctgcaagctcccatgtctatcccccccgtcttatacttttccggcccccgccgctgttattcctactgaagcagctatttatcaaccctcagtcatcctgaatcccagggccttacagcctagcactgcctactaccccgccggcacgcagctgtttatgaactacactgcctattaccctagtgtctag

SEQ ID NO: 186726 - DNA, 2154 bp, synthetic construct
  misc_feature 1..2154: note = Description of Artificial Sequence: Synthetic coding sequence
  source 1..2154: mol_type = other DNA
atgacccccccccccccccccccccccccccccggccccgaccccgccgccgatcctgccgcagatccatgcccttggcccggcagcctcgtcgtgttgtttggagccaccgccggcgcgctggggagggacctcggcagtgacgaaacggaccttattttgttggtttggcaggtggtagaaccccgctctagacaggttggtactctgcataagagcctcgttcgagctgaggccgctgcactctcaacccagtgccgagaagcctcgggcctgtcagccgatagcctcgccagagctgaacctctggataaagtgttgcaacagttcagccagttagtaaacggggatgttgccttgttggggggcggcccctacatgctctgcactgatggacaacagctgctgcgacaggtactccatcccgaggcatctagaaagaacctggtgctgcccgacatgtttttctcattctatgacctgagaagggagtttcacatgcagcatcctagcacgtgtccagcgcgtgacctgacagtggcaacaatggcccagggacttggtctagaaaccgacgctaccgaggatgattttggggtttgggaagtgaagaccatggtggcagttattctgcatcttctgaaggagcctagcagccagctgtttagcaaaccagaagtcattaagcaaaagtatgaaactggtccctgttctaaagccgacgtggttgactcagagacagtcgtgagagcacggggcttgccttggcagagttcggaccaagatgtggccaggttctttaaaggcctgaatgttgcccggggcggggtggcactctgcctcaacgctcagggcagacgcaacggggaggctcttattaggtttgtcgactcggaacagcgggatctggctctacaaaggcataagcatcatatgggtgtgaggtacattgaggtatataaggctaccggcgaggaattcgtgaaaattgccggagggacatctttagaagtggcacgcttcctttcccgcgaggaccaagtgattctacggcttcgcggcctccccttcagcgccggaccaacagacgtcttggggtttcttggccctgaatgtccggtgaccggaggcaccgagggacttctcttcgtgcggcatccagacggcaggccaactggagatgcattcgctctgtttgcctgcgaggaactggctcaagcggcgcttagaaggcacaaaggaatgctagggaaaaggtacatcgaactgtttagatccacagcagcagaggttcagcaggtcctcaatcgatacgcatcaggcccactgttgcccacgctgacggcgccacttctccccatcccgtttcccctagctccaggcaccggaagggactgcgtgagacttagggggttgccgtacactgcaacgattgaagatattctttcctttctgggcgaggctgctgccgacatccggcctcatggggttcacatggtgctcaatcagcaggggcggccatctggcgacgccttcatccaaatgaccagcgcagagagagctctcgccgcagcccagaggtgtcacaaaaaggtgatgaaagagagatatgttgaggtggttccatgttcgacggaggagatgagccgagtactcatgggggggactttagggcgatcaggcatgtctccaccgccctgtaagctgccctgcctgtctccaccaacgtacaccacctttcaagcaacgcccaccttgatccctaccgagaccgccgccctctatccttcttccgcgctcctgcccgccgcgcgcgtgcccgccgcgccgacaccagttgcgtactaccctggaccagcaacgcagctgtatttgaactatacggcctattacccaagtccccctgtgtcacccacaactgtgggttatttgaccacacctaccgcagctctggccagcgccccaacgagcgtgttgtcccagtctggggcactggtgcgtatgcagggtgtcccatacactgccggcatgaaagatctgttgtctgtcttccaggcgtatcagctcccggccgatgactacacctcgctgatgcccgtgggagatccgcctcgaaccgtgctccaggcaccgaaagagtgggtgtgcctgtag

SEQ ID NO: 186727 - DNA, 924 bp, synthetic construct
  misc_feature 1..924: note = Description of Artificial Sequence: Synthetic coding sequence
  source 1..924: mol_type = other DNA
atgaacacccggaaccgggtggtgaacagcggcctgggcgccagccccgccagcaggcctaccagagacccacaggatcctagcggcagacagggcgaactgtcacccgtcgaggatcagagggagggtcttgaagcagccccgaaaggacctagccgtgagtcagtggtgcacgcaggccagaggcgcacaagcgcatacaccctgatagcccctaacataaatagacgcaacgagatacagaggatcgcggagcaggaactcgcaaatctggaaaagtggaaggagcagaacagagccaagcctgttcatctggtgccaagacggctgggcgggtcacagagcgagaccgaagttaggcagaaacagcaactccagctaatgcaatccaagtataaacagaaactgaagagggaagagtctgtccggattaaaaaagaagccgaggaggcagagttgcagaagatgaaagcaatccagagagaaaaatctaacaagctggaagagaagaagcgactgcaggaaaatctcagacgagaagcttttcgcgagcatcagcagtataaaactgctgaattcctttctaagctgaataccgaaagtcctgatagatctgcctgccagtcggctgtgtgtggtccccagtcgagcacctgggcgagaagctgggcctaccgtgacagcctaaaagcggaggaaaatcggaaattacaaaaaatgaaagacgaacagcaccagaagagtgagctgctcgagttgaaacgccagcagcaggagcaggaacgggccaaaattcaccagaccgaacacagaagagtgaacaacgcatttcttgatcgtctgcagggaaaatcacagccaggtggcctcgagcagagtggaggatgctggaatatgaactctggaaatagttgggggatctag

SEQ ID NO: 186728 - DNA, 1233 bp, synthetic construct
  misc_feature 1..1233: note = Description of Artificial Sequence: Synthetic coding sequence
  source 1..1233: mol_type = other DNA
atgaacacccggaaccgggtggtgaacagcggcctgggcgccagccccgcgtcaaggcctactagggacccacaggacccctctgggcggcagggcgaactgagcccggtggaagatcagagagaggggttagaggctgcacccaaagggccatcccgggaatcagtggtccacgctgggcagagacggacttcagcctataccctgatcgctccaaacattaacaggcgcaatgagatacagaggatcgccgaacaggagctggcaaatcttgaaaaatggaaagaacagaaccgcgccaagcctgtgcacctcgttcctcgtagactcggaggttcacagtcagaaacagaagttaggcagaagcagcagcttcagctgatgcaatctaagtacaagcaaaagctgaaaagggaagagagcgtccgcatcaaaaaggaggccgaagaggctgaactgcaaaagatgaaggcgatccaaagggaaaaatctaacaaactggaggagaagaaaaggctccaagaaaatttgcgacgagaagcatttcgcgaacatcagcaatataagacagccgaattcctttcaaaattaaacactgagagccctgaccggagtgcatgtcaaagtgcagtttgcgggccccaatcctcgacttggaagctgcccatcctgccaagggaccatagttgggcacgaagctgggcttaccgggactcattaaaagccgaggaaaatcgaaaactgcagaaaatgaaagatgagcagcaccagaagagcgaattgctggaactaaagcggcaacagcaggagcaggagagagccaagatccaccagaccgagcacagaagggttaacaatgctttccttgatcgtctgcaaggcaagagtcagcccggcggccttgagcagtctgggggatgctggaatatgaacagtggcaattcttggggctccctcctggtatttagccgacacctgcgtgtgtacgagaagattcttacaccaatatggccctcttccaccgatcttgaaaaaccccacgagatgctgttcctgaatgtgattctcttctcgcttacagtgtttaccttaatctctaccgcacacacattggatcgtgccgtaagaagcgattggctcctcctggtgctgatttacgcatgccttgaagaactcatcccagagttaatattcaatctgtactgccagggcaatgccaccctgttcttctag

SEQ ID NO: 186729 - DNA, 1368 bp, synthetic construct
  misc_feature 1..1368: note = Description of Artificial Sequence: Synthetic coding sequence
  source 1..1368: mol_type = other DNA
atgtggctggagatcctgctgaccagcgtgctgggcttcgccatctactggttcatcagtcgggacaaggaggaaactttaccgctggaagatggctggtggggacctggcacaagatctgccgctcgcgaggacgactctatcagaccgttcaaagttgaaacctctgatgaggagatccacgatttacaccagcgcatcgacaagttccggtttaccccccccctcgaggactcttgcttccactacggctttaattccaactatcttaaaaaagtaatcagctattggaggaatgagttcgactggaaaaagcaagtcgagattctgaacagatatccccactttaagactaaaatcgagggactggatatacacttcatccatgtcaagccccctcaattacctgccgggcacacaccaaaacccctactgatggtgcacgggtggccaggatccttttatgaattctacaagattatccccctcctgactgacccgaaaaatcacggcctgagtgacgaacatgtgttcgaggtcatatgtccctccattcccggttacggattttctgaagcctcatctaagaagggcttcaattccgttgccactgctaggattttctacaagctgatgttgaggctagggtttcaagagttctacatacaggggggagattgggggtcactgatctgcactaatatggcccaattggtgccctcgcacgtgaagggtctgcacctaaacatggctctggtgctatcaaacttttctactctcaccctgctcttaggccaacggtttggccgtttcctcgggctgacggaacgcgacgtcgagctcttgtatcccgtcaaggagaaagtgttctattcacttatgagagaatccgggtatatgcatattcagtgtactaaacctgacacagttggctccgcgctgaacgactcacccgtggggctagcagcctatatcctggagaaatttagcacctggactaatacagaatttcgatacttggaggacgggggattggaacgaaagttttccctggatgatcttcttacaaatgtcatgctctactggaccacaggtaccatcattagctcgcaacgattctataaggagaacttgggacaggggtggatgacacagaagcacgaacgcatgaaagtctacgtgcctaccggatttagcgcctttcctttcgaactactgcacacgccggaaaagtgggttcgatttaagtaccctaagctgatctcatattcttacatggtgcgtggcggacattttgccgcctttgaggaacctgaactgctggcccaagatattagaaagtttctgagcgtgctggaacgacagtag

SEQ ID NO: 186730 - DNA, 1368 bp, synthetic construct
  misc_feature 1..1368: note = Description of Artificial Sequence: Synthetic coding sequence
  source 1..1368: mol_type = other DNA
atgtggctggagatcctgctgaccagcgtgctgggcttcgccatctactggttcatctccagagacaaagaagagactcttcccctggaagatggttggtggggcccaggcacaaggtccgccgcacgcgaggacgactccatcaggccattcaaagtggagacgtcagatgaagaaatccatgacctacatcagcgaatagataagtttcggttcacgcccccactggaagactcatgttttcattacgggtttaactcaaattatttgaagaaggtcattagttattggcgaaacgaatttgattggaagaagcaggtggaaatcctgaaccggtatcctcatttcaagactaaaatagaagggctggatatacactttattcacgtcaaaccacctcagctgccagcagggcacacccctaagcctctgctaatggtgcatggatggccagggtcgttctacgaattctacaagatcatccccctgttgacagatcccaagaatcacggcttatccgacgaacacgtgtttgaggtaatctgcccaagcatccccggttacggcttctccgaggcaagcagcaagaaagggtttaactctgtggctaccgctcggatattctataagctgatgctccggttaggatttcaggagttctatatccaggggggcgattggggtagcctaatttgtacaaatatggcacagctggttccttctcatgtgaaggggcttcacctcaatatggctctggttctgtccaacttcagcacattgacgcttcttctaggacagaggtttggcagattccttggcttgacagaacgtgatgtggagctactttacccagtcaaggagaaagtgttttacagcttgatgagggaatccggatatatgcatatccaatgcactaagccggacacggtgggctcagcgctgaatgattctcccgttgggctcgccgcctacatcctcgagaaattcagtacctggacaaacacagagtttcgctatttggaggacgggggactggaacggaagtttagtctggacgacctgttgactaacgtgatgctttattggaccactggaactattatctcctcccagcgcttctacaaggagaacctgggtcagggctggatgacccagaagcacgagagaatgaaggtgtatgtgcctacagggttttccgcgtttccctttgagctccttcatacacctgagaaatgggtaagattcaagtatccaaagctaatcagttactcctatatggttcggggcggccattttgccgcttttgaggaaccggagctcctggcacaggacatacggaaatttctgtccgtgcttgagcgtcagtag

SEQ ID NO: 186731 - DNA, 486 bp, synthetic construct
  misc_feature 1..486: note = Description of Artificial Sequence: Synthetic coding sequence
  source 1..486: mol_type = other DNA
atgtggctggagatcctgctgaccagcgtgctgggcttcgccatctactggtttatcagcagggataaggaagagactttacctctagaggacggatggtggggcccaggaacacggtcagcggcacgtgaggatgactcaattaggccatttaaagtggaaacttccgacgaggaaatacatgatctgcatcagcggattgataagtttaggttcactcctccccttgaggacagctgctttcactacggttttaacagcaactaccttaagaaggtaatcagttactggagaaacgagttcgattggaaaaagcaggtcgaaatcttaaatcggtatccacatttcaagacaaagattgaagggctcgatatccatttcatccacgtaaagccaccgcaattacccgcggggcacacccctaaaccacttcttatggtacacggctggcccggcagcttctatgaattttacaagataatatag

SEQ ID NO: 186732 - DNA, 411 bp, synthetic construct
  misc_feature 1..411: note = Description of Artificial Sequence: Synthetic coding sequence
  source 1..411: mol_type = other DNA
atgtggctggagatcctgctgaccagcgtgctgggcttcgccatctattggtttatttcccgagataaagaggaaacattgcctctggaggacggctggtggggccctggtactcggtccgcggcgagggaggatgatagtattaggccatttaaggtggaaacatccgatgaagaaattcatgatttgcaccaacgaattgacaagtttagatttaccccacccctcgaagattcttgctttcattatggtttcaattccaactacctgaagaaagtcatctcttattggcgaaacgaattcgactggaagaaacaggtggagattctcaacagatacccccactttaagacgaagatcgagggtctcgatatccatttcattcatgtcaaacccccccaactgccgtag

SEQ ID NO: 186733 - DNA, 1509 bp, synthetic construct
  misc_feature 1..1509: note = Description of Artificial Sequence: Synthetic coding sequence
  source 1..1509: mol_type = other DNA
atgaagggcgagatcaccctgagccagtggatccccctgatggaggaaaattgtcgcaaatgctctgaaactgcaaaagtctgcctgccgaagaacttcagcataaaggaaatctttgacaaagctatctctgctcgaaagattaaccgaccaatgttgcaggcagccctaatgctaaggaagaagggattcacgacagccattctgaccaacacctggctggacgaccgagctgaacgggacgggctcgctcaactgatgtgcgagctgaaaatgcatttcgatttcctgattgagagttgtcaagttggtatggtcaaaccagaaccacagatctacaagttcctcttggacaccttgaaagcctctcccagtgaggttgtcttcctggatgatataggtgccaatcttaaacccgctcgagaccttgggatggtcaccatattagtgcaggacacagacacggctttgaaagaactcgagaaggtcacaggaattcaactgctgaacaccccggcccctttacccacatcctgcaacccgtctgatatgtcccatggatacgtcaccgtcaaaccacgcgtgagactgcatttcgtcgaattaggaagtggacctgcggtgtgcctttgccatgggtttccagagtcttggtactcctggaggtatcagatccctgccttagcccaggcggggtatcgcgtgcttgcgatggacatgaaagggtatggcgagagcagcgcaccacctgaaatcgaggaatattgcatggaggtgttgtgtaaagagatggtgacattccttgacaagcttggattatcacaggctgtgttcattggccatgattggggtggcatgctggtgtggtacatggcgctgttctatcccgagcgggtaagggccgtcgcctcgctgaacacacccttcattccagctaacccaaatatgtcccctctggaatccattaaggcaaaccctgtatttgattatcaactgtactttcaggagccaggggtggctgaagccgagttggagcagaatctctctcgcacatttaagagcctcttccgcgcaagtgacgaaagcgtgttgagtatgcataaggtgtgtgaggctgggggcctttttgttaactctccggaggagccttcgctgagtaggatggtgaccgaggaggaaatccagttctatgtccagcaatttaagaagagtggatttaggggaccgctcaattggtatcgcaacatggagcgaaattggaagtgggcgtgtaaatcactcggtcggaaaattctcatccctgcactgatggtaacagccgagaaggacttcgtgcttgtcccccagatgtcccaacacatggaagactggatcccgcatttgaaaagagggcatatagaggattgtggacactggacacagatggataaaccaacggaagttaatcaaatcctgatcaagtggctggacagcgacgcgagaaatccccctgtcgtgtctaagatgtag

SEQ ID NO: 186734 - DNA, 1470 bp, synthetic construct
  misc_feature 1..1470: note = Description of Artificial Sequence: Synthetic coding sequence
  source 1..1470: mol_type = other DNA
atggaggagaactgccggaagtgcagcgagaccgccaaggtgtgcctccctaagaacttctcaattaaagagattttcgacaaggcaatttccgcccgcaaaatcaaccggcccatgctccaagcagcactgatgttgcggaagaagggattcaccacggcaatccttaccaacacctggcttgatgaccgcgcagaacgcgacgggctggcccagcttatgtgtgagctcaaaatgcactttgacttcctgatagagtcttgccaggtgggaatggttaaaccagaaccacagatctataaattcctcctggacacactgaaggcgagcccatctgaggtggtgttcctagatgatattggcgctaaccttaaacctgcgcgggatctcggcatggtaactatccttgttcaagatacagatactgcactcaaagaattggagaaagtcacaggcatacagctcctgaacaccccagctcctttgcccacttcttgtaatccatccgatatgtctcatggctacgtgactgttaagccgcgtgtgaggttacatttcgtggaactgggaagcggcccagctgtgtgtttgtgccacggcttcccagaatcttggtatagctggcgttaccagatacctgcattagcacaggcaggctaccgggtgctggccatggatatgaaggggtacggcgagagcagtgcacctccagagattgaagaatactgtatggaggtgttgtgcaaagagatggtgactttcctcgacaaattgggcctgtcacaggcagttttcatagggcatgactggggaggcatgctggtgtggtatatggcactgttctacccggagagagtacgtgccgttgcatcgctgaataccccatttattcctgccaaccccaatatgtcacccctggaaagcattaaagcaaacccggttttcgactaccagttatactttcaggagccaggggttgccgaggccgagttagaacagaacctgagccgcacatttaagtctctctttcgtgcttctgacgagtccgtgttaagcatgcataaggtgtgtgaggccggaggcctctttgtcaatagtccagaggaaccatcgctcagccggatggtcacagaggaggaaattcaattttatgttcaacaatttaagaaatctggctttagaggaccactgaactggtaccggaacatggagcgaaactggaagtgggcatgtaagagcttggggaggaaaatcctgattcccgccctcatggttaccgccgagaaggacttcgtgctggttccacagatgtcccaacacatggaagactggattccacacctgaaacgcggacacatcgaggactgcggtcactggacccagatggacaaacctactgaggtaaaccagattcttatcaaatggttggattcagatgccagaaaccctcctgtcgtgtcaaagatgtag

SEQ ID NO: 186735 - DNA, 1509 bp, synthetic construct
  misc_feature 1..1509: note = Description of Artificial Sequence: Synthetic coding sequence
  source 1..1509: mol_type = other DNA
atgaccctgcgggccgccgtgttcgacctggacggcgtgctggcccttccagccgtgttcggtgttctaggtagaacggaggaagctcttgctctaccccgaggcttactcaacgatgccttccagaagggcggccctgaaggcgcgacaacaagactgatgaagggcgaaatcacactgtcgcagtggatccccctgatggaagagaattgtagaaaatgttccgaaacggcaaaggtatgcctccccaaaaacttctccatcaaagagatcttcgacaaagcgataagcgcaaggaagatcaatagaccaatgttacaggctgccctgatgctgaggaaaaaagcattctgtagcggctttaccaccgccatcctgaccaacacctggctcgacgatagagccgaacgcgacggactcgcgcagctcatgtgtgaactcaagatgcacttcgactttctcatagagagttgccaggtgggtatggtcaagccggaaccacagatttataaattccttttagacactctgaaagcctctcctagcgaagtggtgttcctcgatgacattggcgctaatcttaagcctgcgcgggacctaggcatggtcaccatacttgtgcaggataccgatacagctctcaaggagctcgagaaagtcacagggatccagctgctgaatactccagcccccctgcccacgtcctgtaaccccagcgatatgtcacatggatacgtcaccgtcaaaccccgagtgagactgcactttgtcgagttgggtagcgggcctgcagtgtgcctctgtcatggattccctgaatcttggtactcttggcgttaccagattccagcactggcccaagccggttacagagtgttggctatggatatgaaaggatacggtgagtcaagtgctccaccagaaattgaagagtactgtatggaagtgctttgtaaggagtccattaaggccaatcccgtatttgattaccagctctactttcaggagccgggggttgcagaagctgaactggagcagaatctgagtcggacattcaaatccctattccgtgcatcagacgagtctgtgctcagcatgcacaaggtgtgtgaggcgggcggactcttcgttaactctcctgaggagccctccctatcccgtatggtcaccgaagaggagattcagttttacgtgcagcaattcaagaagtccgggtttagaggccctctgaactggtatcgcaatatggagcgcaattggaaatgggcttgtaagtccctcggaagaaaaatcctcatccccgccctgatggtgaccgccgaaaaagacttcgtcctggtgcctcagatgtcacaacatatggaagattggattccccatttaaaacggggccacatcgaagactgtggccactggacccagatggacaaaccaaccgaagtgaaccaaatcctaatcaaatggctggacagcgacgcacgtaacccccccgtggtgtccaagatgtag

SEQ ID NO: 186736 - DNA, 1668 bp, synthetic construct
  misc_feature 1..1668: note = Description of Artificial Sequence: Synthetic coding sequence
  source 1..1668: mol_type = other DNA
atgaccctgcgggccgccgtgttcgacctggacggcgtgctggccctgcccgccgtgttcggcgtgctggggcggaccgaagaggccctggcacttccgagaggtttgctgaatgatgcttttcagaagggggggcctgagggtgcaacaacacgactcatgaaaggggaaattacactgtcacagtggatcccactgatggaggagaactgccgaaaatgcagtgagacagcaaaggtttgtttaccgaagaatttcagtattaaggaaatatttgacaaagcgatcagtgcacgaaagataaatagacccatgcttcaagcagcactcatgctgcgtaagaagggatttacgacagctattttaacgaacacttggcttgatgatagggccgagcgggacggcctcgcccaactgatgtgcgaactgaagatgcactttgatttcctgatcgaatcatgtcaagtgggtatggtgaagcccgagcctcaaatctacaaattcctcctcgacacgctgaaggccagcccttcagaggtagtttttctggacgatataggggctaatcttaagcctgcccgcgacctgggtatggtgacgatcttggtccaggatacagacaccgccctgaaagagctcgaaaaggtaacaggtattcagttgctcaatactcccgccccactgcccacatcctgtaacccatctgatatgtcacatgggtatgtaaccgtcaagccccgagtgagattgcatttcgttgagctcggttcgggacctgctgtgtgcctctgccacggcttccccgaaagctggtacagctggcgatatcaaatcccggccttagcccaagccggttaccgagtgctggcgatggatatgaaaggctacggcgagtcctcagcaccccccgaaattgaagaatattgcatggaggtcttgtgtaaagaaatggtaacttttctagacaagctgggacttagccaggctgtgttcattggccacgattggggcggcatgctcgtttggtacatggctctgttctatcccgaacgcgttcgcgccgttgcctcactcaatactccattcatcccggcaaaccccaacatgtctccccttgagagcattaaagccaatcctgtgttcgattatcagctctattttcaggaacccggcgtggctgaagcggagctggagcagaatctgtcccggactttcaaatccctgtttcgtgcgtcagacgaatctgttctttctatgcacaaagtttgtgaggctggtggcctttttgtcaacagccctgaagagccatccttgtctcgcatggtgaccgaggaggagattcagttctacgtccagcaattcaaaaagtctgggtttaggggccctctgaattggtatcgcaatatggaacgcaattggaagtgggcctgtaaaagtctcggacggaagatcctcatccccgccctgatggttaccgccgagaaggatttcgtccttgtaccccagatgtctcaacacatggaagactggattccccacctcaagaggggccatatcgaggactgcggacactggactcagatggataaacctactgaggtcaatcagatcctcatcaaatggctggatagcgatgccaggaaccctcctgttgtttcaaagatgtag

SEQ ID NO: 186737 - DNA, 1653 bp, synthetic construct
  misc_feature 1..1653: note = Description of Artificial Sequence: Synthetic coding sequence
  source 1..1653: mol_type = other DNA
atgagcaccagcagcctgcggcggcagatgaagaacatcgtgcacaattatagtgaagctgagatcaaagtccgggaagctacatctaatgacccttggggtccttcgtcttctctgatgagtgagatcgccgacctgacctacaacgttgtagctttctccgaaatcatgtctatgatatggaaaagactgaacgaccatggtaagaattggcggcatgtctataaagcaatgactctaatggaatacctgattaagacaggcagcgaacgagtgtcacaacagtgtaaagaaaatatgtacgcggtgcagacactgaaagacttccagtacgtcgatagggatgggaaggatcaaggagtcaacgtgagggagaaggcaaagcagctggtcgctctcctacgcgatgaggatcgcctccgtgaggagcgtgcccatgccctgaaaacgaaagagaagcttgcccaaacagccaccgcctcgtctgcagctgtggggtccggccccccaccagaggccgagcaagcctggccccagagttccggtgaagaggagctccagttgcagctggcactggccatgagtaaggaggaagcggatcaggaagagagaatcaggcgcggggatgatctgaggctccagatggcgattgaggagagcaagcgggaaactgggggaaaggaagagtcttctctgatggacttagcagatgtgtttactgcgcccgctcccgcccctactacagatccatggggggggcctgccccaatggccgcggcggtgcctacggcggccccaacatccgatccatggggtgggccgcctgtgccaccagccgccgatccttggggaggacccgcaccgaccccagccagtggagacccttggaggcccgctgcaccagccgggccatccgtagacccttggggcgggacgcccgctccagcagcaggggagggaccgacccccgatccctggggttcctctgatggcggagtgcccgttagcggccccagtgcctcggacccctggactcctgcacccgctttctcagatccctgggggggttcgcccgctaagccctcaacgaatggtaccacggccggtggcttcgatactgagcccgatgaattttccgattttgataggctgaggacagcgttacccacctctggctcatctgcaggcgagctggaactgttagccggggaggtaccagccagatccccgggagcgtttgatatgagtggcgtccgcggctcgctcgcagaagcggtgggttcacccccacccgcagctacccctacgcccacaccacccactagaaagactcctgagagtttcctaggacccaacgctgcactcgtggatttggacagccttgtaagccgccccgggcctacccctcctggcgcaaaggcctctaacccttttctgcctgggggaggtcctgccaccgggccaagcgttacgaatccctttcagcccgctcctcccgccaccttgactttgaaccagctccggctgagccctgtcccgcctgtacccggtgcccccccgacctatatcagccccctcggggggggtcctgggctgccaccaatgatgccaccaggccctccagcccccaatactaatccattcctcttgtag

SEQ ID NO: 186738 - DNA, 1731 bp, synthetic construct
  misc_feature 1..1731: note = Description of Artificial Sequence: Synthetic coding sequence
  source 1..1731: mol_type = other DNA
atgagcaccagcagcctgcggcggcagatgaagaacatcgtgcacaattactccgaagctgagataaaggtgcgggaagccactagtaacgacccttggggaccgtcaagctcgctgatgtccgaaatcgccgacctcacttataacgtggtggccttcagtgaaattatgtcaatgatttggaagaggctgaacgaccacgggaaaaattggcgccatgtatataaggcgatgactctgatggaatatttgattaaaacagggtccgaacgcgtcagtcagcaatgcaaggagaatatgtacgctgtccagaccctcaaggatttccaatatgtagatcgcgacggcaaggaccagggcgtgaacgtgcgcgagaaggccaaacaactcgtcgctctgctcagggacgaggatcggttgagagaggagcgggcacacgccctcaaaacaaaggagaaactcgcacagacagccacagcttcatctgctgccgtgggcagtggtcctccacctgaagcagaacaggcttggccacagtccagcggggaggaggagctgcagcttcaacttgctctggcaatgtctaaagaggaggccgatcagccgcctagctgtggaccggaagacgacgcgcagttacagctggcgcttagccttagcagggaagaacacgacaaagaggagcggatccgaagaggggacgacctgcgcctacagatggcaatcgaagagtctaaaagagaaaccggtgggaaggaggagagctctctgatggacctagccgatgtctttaccgccccggcgcctgcccccaccacagatccctggggcggacccgcccccatggccgccgccgtacccaccgccgctcctactagcgatccctggggaggcccccctgtcccccccgctgccgacccttggggggggccggctcctacccccgcctccggagacccctggagaccagctgcacctgccgggccatccgtcgacccttggggcggtacacctgctccagctgccggtgagggtcccacccccgacccttggggcagctccgatgggggtgttcccgtgagcggaccctcagcctctgatccatggactcccgctcccgcattttccgatccctggggcggaagtcctgcgaaacctagcacaaatggaactacagccgcggggggattcgacaccgagcctgacgagttttctgactttgaccggctgcgcacagcactgcccacttctgggagctctgctggagagctcgaactgttggccggggaggtccctgccagatcccctggtgcgtttgacatgtccggcgtgcgagggtcactcgccgaggctgtgggtagcccgcctcctgccgccacgccaacaccaacccctcccacacggaagaccccggaatcttttctgggacccaatgccgcactggttgacctggacagtctggtttctcgccccggaccgacgccacccggcgccaaggctagcaacccatttctgccgggaggagggcctgctacaggaccttccgtgaccaatccattccagccagcaccaccagctacgctgaccctgaaccagctcagactttccccggtgccacctgtacccggcgctcctccgacatatatctcccccctgggcgggggaccagggctgccccccatgatgccccccggccctcctgccccgaatactaaccctttcctcctctag

SEQ ID NO: 186739 - DNA, 1989 bp, synthetic construct
  misc_feature 1..1989: note = Description of Artificial Sequence: Synthetic coding sequence
  source 1..1989: mol_type = other DNA
atgggcgaccagagctggctgtggaaccaggccgcccccggcgtgagaagcccggtttttgcatgctcagtggagaagggtaacgtcccgctcgtcctcagcgagcacctggcccatagcagagatccggggagcggcgcagtccgctttctgatcagtccagaaccatgggcctctgccatactgggtacctcgggactgctcgcttcccccgtgctgccagccgcattggatgccgtcacttgccagcacctaccccagccctccagtggctctagaccgatttcgcccaggattggggctctgtgccctctcctgctgcagcctggaacaatgtctacatcttctttgcgccgccagatgaaaaacatcgtccataactacagtgaggccgagataaaggtcagagaggctaccagcaacgatccttggggcccatcaagttctttgatgtcagagatagcggacttgacctataatgtggtagcctttagcgaaattatgagtatgatctggaaaaggctcaacgatcacggcaagaactggcggcacgtgtacaaagcaatgacactgatggaatacttgatcaaaactggctccgaacgggtgtcacagcagtgtaaggaaaatatgtacgcagtccagactctgaaagacttccagtacgtggatcgtgacggtaaagaccagggggtaaacgtcagagagaaggctaaacagctcgtggcccttttgcgagacgaggaccgattacgggaagagcgcgctcacgccttgaaaactaaggagaagctggcccaaactgcgaccgcgtcttcagctgccgtcggaagcggccccccccctgaggctgagcaggcatggccccaaagctctggtgaagaggagctccagttacagcttgctctcgccatgagcaaggaagaggcagatcaggaagagaggattagacgcggtgatgacctgagactccagatggccattgaagagagcaaacgcgaaaccggagggaaagaggaatcatctctgatggatctggctgatgtctttaccgctcctgccccagctcccacgacggatccttggggtggccccgctcctatggcagctgcagtgccgaccgccgcccccacatccgacccctggggtggccctcctgttcccccagccgccgacccatggggcggaccagctccaacacctgcgtcaggggatccctggaggccagcggctcccgccggcccctccgtggatccctggggtgggaccccagcccccgccgcgggtgaggggccgactcccgatccatgggggtctagtgacggtggggtgcctgtgagtggcccctctgcctccgacccttggaccccagctcccgcattcagcgacccatggggcgggtcccctgctaagccctctacaaatgggacaaccgcagccggcggatttgacactgaaccagacgaattttccgactttgatcgactgcgtacagcccttcccaccagcggatctagcgccggcgagttagagctactcgccggggaggtaccagcaagatctcccggcgcctttgacatgtccggagtgaggggttccctcgctgaggctgtaggctctccaccgcccgccgccactcccacgcctactccccccactcggaagacacctgaatctttcctggggcctaacgcagcgcttgtggatctggactcactggtgagtcgcccaggtcccactccccctggcgccaaagcaagcaacccatttctacccgggggaggccctgcaaccgggccctccgtcaccaaccccttccagcctgcgcctccagccaccctgaccctgaatcagctacgtttatcaccggtgccccccgtcccaggcgccccccccacttatattagcccactgggaggcgggcctggcctcccccccatgatgccccctgggcctcccgccccgaataccaacccattccttctatag

SEQ ID NO: 186740 - DNA, 1611 bp, synthetic construct
  misc_feature 1..1611: note = Description of Artificial Sequence: Synthetic coding sequence
  source 1..1611: mol_type = other DNA
atgagcgagatcgccgacctgacctacaacgtggtggccttcagcgagatcatgtccatgatctggaagaggctgaacgatcacggcaagaactggaggcacgtttacaaagccatgacattgatggagtatttgatcaagacaggatccgagcgtgtgagccagcagtgcaaggagaacatgtatgcggttcaaaccctcaaagatttccagtacgtcgacagagacgggaaggatcagggtgtgaacgtgcgagaaaaagctaaacagctggtggcgctgctccgggacgaagatagactcagagaggaaagggcccatgccttgaagactaaggagaagctggcacagaccgctacggccagctctgctgccgtgggcagcggccctccccctgaggcagagcaggcttggcctcagtccagtggagaggaggagctacaattacaattggcgctggcaatgagtaaagaggaggcagaccagccaccttcgtgtggacctgaagacgatgcacagttgcagttggctctctccttgtctcgagaggagcatgacaaggaagaaaggatccgcagaggagatgatctgagactgcagatggcaatagaagagtctaagcgggagaccggaggcaaagaggagtcgagcctcatggatctggcagacgttttcacggctccagcccccgcacccacaactgacccatgggggggacctgcccccatggctgccgccgtgccaactgcagcccctacttctgatccgtggggtggaccccctgttcccccagcggcagacccgtggggaggccccgctccgacacctgcgtcgggcgatccatggcggccagctgctccggccggcccaagtgtggatccatggggaggaacaccagctcctgctgcaggcgaaggtccgacacctgatccctggggttcttcagacggcggagttccagtctctggcccctcagcatccgatccttggacgcctgctccagcgttttccgatccgtggggaggatcccctgccaagcccagcacgaatggaacaaccgcaggtggctttgataccgagccggatgaattctccgacttcgatcggttgcgcacagccttgccgacctctgggagctctgccggagaactcgagctgctggcgggcgaagtgccagcccgaagcccaggtgcctttgacatgtctggggttagaggcagcctggcagaggctgtcgggagccctcctccagcggctactcccacccctaccccaccaactcgaaaaacccccgagtcttttctcgggcccaatgccgcgctcgtggatcttgattctcttgtatcccgaccagggcccacccccccaggggcaaaagcttctaatccctttctgccaggaggcggaccggccaccgggccgtcagtgactaacccgttccagccagccccccccgcgacacttactctaaatcaactgcgcctgtctccagtgccccccgttcctggggcgcccccaacatacattagccctctcggcggtggtcctggcttaccgccaatgatgccccccggcccgccggcaccgaacactaacccatttttgctgtag

SEQ ID NO: 186741 - DNA, 1926 bp, synthetic construct
  misc_feature 1..1926: note = Description of Artificial Sequence: Synthetic coding sequence
  source 1..1926: mol_type = other DNA
atgaccaccagcagcatccggcggcagatgaagaacatcgtgaacaattactccgaagcagagatcaaagtgcgagaagccacttccaacgacccctggggcccctctagctccttaatgaccgagatcgcggacctgacatacaatgtcgttgcattttctgagatcatgagcatggtgtggaagaggttaaacgaccacggaaagaactggcggcacgtttataaggccttaactttgcttgactatctgattaaaactggaagcgagcgcgtggctcaacagtgccgcgaaaacatattcgctattcaaaccctgaaagactttcagtatattgacagagatggtaaggaccagggcatcaacgttagagagaaaagtaaacagcttgtggctcttctcaaggatgaggaacggctcaaggctgaacgggcccaggccctgaagacaaaagagaggatggcacaggtagccacaggtatgggctccaatcagatcacgtttgggagagggagctcacagcctaatctttcaacttcccattctgagcaggagtacggaaaagctggcggttcccctgcgagttaccatggctctccagaagcctccctgtgcccccagcatcggaccggtgcgccccttggacaatcagaggagctgcagccgcttagccagcgacacccattcctaccacacttgggactagctagccggcccaacggcgattggtctcagccatgtcttacctgcgatcgagccgcccgtgccacatctccgcgagtttcatctgaactggaacaggcgcgcccccagacctccggagaagaggaacttcaacttcaactagctcttgccatgagcagggaagtagctgaacaagaggagaggctgcggaggggcgacgacctgagactgcagatggcactcgaagagtctcgacgcgacactgtgaagatacccaagaaaaaagagcacgggagtctgccacaacagaccactctgctcgatctgatggacgccctgccgtccagcggccccgcagcgcagaaggccgaaccgtggggaccttcggcttccactaaccagacaaatccatggggcgggccagctgcgcccgcatctaccagtgacccatggccatcctttggtacgaaaccagccgcctcgattgacccttggggcgtccctactggggccaccgtacagagcgtgcccaaaaatagcgacccttgggccgccagtcagcaaccggcctcctccgccgggaagcgtgcttctgacgcctggggagctgtatcaacaactaagccagtatctgtgtcggggagcttcgaactcttcagtaacctgaatgggacaattaaagatgattttagcgagtttgacaacctacgcacaagtaagaaaacagctgagtccgtgacttccctgcccagtcaaaacaatgggaccacatcccccgacccattcgagtctcagcctcttaccgtggccagcagcaagcccagtagtgcacgaaagactcccgaatcctttttaggtcctaacgctgctctcgtcaacctcgactcactggtgaccagaccagcgccacctgctcaatcgctcaacccttttctggccccaggagctccagcaaccagtgcacccgtcaaccccttccaggtaaatcagccccaacccctaacactgaatcagctgagaggaagtcccgttttgggcacctcaaccagcttcggtcctggacccggcgtggaatcgatggcagtggccagtatgaccagcgccgcaccccagccagctctgggcgcaaccggcagttctctgactcccctcggaccagccatgatgaatatggtagggtcggttggtatccccccatctgctgcccaagccacggggaccacaaacccattcctgttgtag

SEQ ID NO: 186742 - DNA, 1755 bp, synthetic construct
  misc_feature 1..1755: note = Description of Artificial Sequence: Synthetic coding sequence
  source 1..1755: mol_type = other DNA
atgaccaccagcagcatccggcggcagatgaagaacatcgtgaacaattacagcgaagccgagattaaagtcagggaggctacatctaatgacccttggggcccatctagctctttgatgactgagattgctgacctgacctataatgtagtagcttttagcgagattatgagcatggtctggaagcggttaaatgatcacggaaaaaattggcggcatgtgtacaaagccctgaccttgctagactacctcatcaagaccggatctgaaagagtggctcagcaatgcagggaaaatatttttgcgatccagaccctaaaggactttcagtacatagaccgcgacggcaaagaccaagggatcaatgtgagagagaagagtaaacaactggtcgcgctgctaaaggacgaagagcgcctgaaagccgaaagggcgcaagcactgaagaccaaagagcggatggcccaggtggccaccggcatgggatccaatcagatcaccttcggtcgggggtcctcgcagccgaacctgagtacctcccacagcgaacaagaatatggcaaggcaggcgggtctcctgccagttaccacggctcaaccagtccacgagtgtctagcgagctggagcaggctaggccccaaacaagtggggaggaggaactgcagctccagttggctctcgctatgagtcgcgaagtggctgaacaagaggagcgattgcgacgcggcgatgatttacgtctgcaaatggctctggaggagtccagaagagatactgttaagatccctaagaagaaagagcatggctctctgcctcagcagaccacactcttagatctgatggatgccttaccctcaagtgggcccgcagcccagaaggcagagccctgggggccatccgcctctacaaatcaaactaacccatggggcggcccggccgcccccgcttccacatccgacccgtggccatccttcggtaccaagcccgccgcgtctattgacccttggggcgtgcctactggagccacagttcagtcagttcctaagaattccgacccctgggctgccagccagcagccagcgagttctgctggcaaaagagcgagcgatgcttggggcgcagtctctacaactaagcctgtgtccgtatctgggtcctttgaactgttcagtaacttgaatgggacaattaaagacgatttctccgaatttgacaatctgcggactagcaaaaaaactgccgaatccgtaacctccctgcccagccaaaacaatgggacaacaagccctgacccctttgagtctcagcctttgactgtcgcatccagcaaaccatcatccgcccgtaaaacgccagaaagtttcctgggtcctaacgccgccttagtaaacctggattcccttgtgaccagacccgcacctcccgctcagtctctaaaccctttcctggccccaggcgctcccgcgactagcgcaccggtgaatccctttcaggttaaccagccgcaacccttgactctaaaccagctccggggatcaccagtactggggaccagtacctctttcggcccaggcccaggtgtcgagagcatggctgtagcatcaatgaccagcgcagcgcctcaaccggctctcggagcaactggtagctctttaacgccattgggcccggctatgatgaacatggtcggcagcgtcggcattcccccatctgcagcacaggctacaggaaccaccaacccatttctcctttag

SEQ ID NO: 186743 - DNA, 1071 bp, synthetic construct
  misc_feature 1..1071: note = Description of Artificial Sequence: Synthetic coding sequence
  source 1..1071: mol_type = other DNA
atgagccgggaggtggccgagcaggaggagcggctgcggcggggcgatgacctacgtctccagatggctctcgaggaaagtcgcagggatacagttaagatacccaaaaagaaggagcacggttccttaccccagcaaacaacactgttggacctgatggacgctttgccaagttctgggcctgctgcccagaaggctgagccttgggggcctagcgcctctactaatcagacgaatccatggggtggaccagcagctcccgccagcacatctgatccctggccatctttcggcaccaagcctgctgcgagcatagatccctggggtgtccccaccggagctaccgttcaatccgtccctaagaactcagacccatgggcggctagtcagcaacccgcctcatcagcaggaaagagggcatcagacgcatggggcgcggtgagcacaactaaaccggtgtccgtctctggcagttttgagcttttttctaatctaaatggtaccattaaagacgatttcagtgagttcgataatctgcgaaccagcaagaaaactgccgagagcgtcacctccttaccctcccagaataatggaaccacatcccccgatccgttcgaaagccagccactgaccgtggctagctctaagccgtccagcgcacgcaaaactcccgagtcgttcctgggacctaacgcggcacttgtgaaccttgactccttggtgactcgtcctgcaccccctgcccagagcctcaacccttttttggctccaggagcgcccgcgacaagtgcccccgtgaatccgttccaggtaaatcagccacagcccctgactctgaatcaacttcgcgggtcaccggttctgggcaccagcacttcattcggcccaggtcccggggtggagtcaatggccgtggccagcatgactagcgcagctccccagcctgcactgggggctaccggtagctctctgactccactcgggccagccatgatgaatatggtgggatcagttggaatcccgccatccgccgctcaggcgacgggcacgactaatccttttctcttgtag

SEQ ID NO: 186744 - DNA, 1755 bp, synthetic construct
  misc_feature 1..1755: note = Description of Artificial Sequence: Synthetic coding sequence
  source 1..1755: mol_type = other DNA
atgaccaccagcagcatccggcggcagatgaagaacatcgtgaacaactattctgaagccgagattaaagttagggaggcaaccagtaacgacccctggggacccagtagttcacttatgacggaaattgcagatcttacctataacgttgtagctttctcagaaattatgtcaatggtgtggaaacgattaaatgaccacggcaaaaattggcggcacgtttacaaggcgctaacattgctcgattatctcatcaagaccggctctgagagagtggcacagcagtgtcgggaaaacatttttgctatccaaacactgaaggacttccagtacatcgacagagatggtaaggaccagggtattaacgtccgggagaagtctaagcaactggtcgccttgcttaaggacgaagagcgcctcaaggcagagagagctcaagctttgaagaccaaggagaggatggcacaggtggcaaccggcatggggagtaaccagattacattcggtaggggcagctcgcagccaaacttgtctacctctcacagcgaacaggagtacggaaaggcaggtgggagcccagcgtcttatcatgggtccacctccccacgggtatcctccgagctcgagcaggcccggccccagactagcggggaggaagagttgcagctccagctggctctggctatgtcacgcgaggtcgcagagcaggaagaaagacttcgccggggagacgatctgcggctccagatggccctggaggaatcgcggagagacacagtcaaaatccctaaaaagaaggaacacggctcgctgcctcagcagactaccttactcgatcttatggacgccctcccatctagtgggccagccgcacagaaggcggagccatgggggccaagcgccagcactaatcagaccaatccatgggggggccccgccgctccggcatctacatcagatccctggccaagctttgggacaaaaccagctgcatctatcgacccatggggagtgccgactggggctaccgtccagagtgtaccgaagaactcagacccgtgggccgcatcccagcaacctgcatcgtctgcaggcaagcgggcctccgatgcctggggcgctgtgagtacgacgaaacctgtttcagtgtccgggtcatttgaattgttcagcaacctgaatggaaccatcaaggatgacttttcagagtttgacaacctccgcacgagcaaaaagacagctgagagcgtcacatccttgcccagccaaaataatggaacaacctcccccgatccgttcgagtctcaacctttaactgttgcatcttctaaacccagtagcgctcggaagacccccgagtctttcctcggtccgaatgctgcattggtgaatctcgattctctggtgacgaggccagccccccctgcccagagcctgaacccattcctcgcgcctggagcacccgcaacttctgccccagtgaacccttttcaggtcaatcagccacagcctctgaccttgaatcagctgcgcggttccccggtcctgggcacctccactagctttggaccagggccaggtgtggaaagtatggcagtggctagcatgacatcagccgcaccccaacctgcactgggcgcaactggaagctctttgacccctcttggcccagcgatgatgaacatggtcggttcagttggtattcccccgagtgccgctcaggctactggcaccaccaacccatttttgctttag

SEQ ID NO: 186745 - DNA, 1455 bp, synthetic construct
  misc_feature 1..1455: note = Description of Artificial Sequence: Synthetic coding sequence
  source 1..1455: mol_type = other DNA
atgaccaccagcagcatccggcggcagatgaagaacatcgtgaacaactattcggaagcagagatcaaggtacgcgaagcaactagcaacgatccctggggaccaagctcatctctgatgacagagatagcagaccttacatataacgtagtggctttttcagagattatgagcatggtgtggaaacggttaaacgatcacggtaagaactggcgtcacgtatataaggccctgactctactagattacttgatcaaaactggctccgagcgcgtcgcccagcagtgtcgggagaacatctttgccatacagaccctgaaagactttcagtacatcgatagagatgggaaggatcagggtatcaatgttagggaaaagagtaaacaactggtggcactgcttaaggatgaggaacgactaaaggcagagcgcgcacaggcactgaaaacaaaggagagaatggcccaggtcgctacaggtatgggctcaaatcagatcacctttggccgggggtcatcccagcctaatctgtcaactagtcactctgagcaagagtatgggaaggcagggggaagcccagcatcctaccacggatcgccggaagcctccctgtgtccacagcatcggacaggggcacccctcgggcagagtgaggagctgcagcccttgagccagcgccacccttttcttcctcacctcggtctcgcgtctcggcctaatggcgattggagccagccatgcttgacatgcgatcgcgctgccagggccacctccccgcgtgtgtccagtgaacttgagcaggctagaccccaaaccagtggagaggaggaattacagctacaactggccctggcgatgtcccgcgaggtggcagaacaggaagagagacttagaagaggcgatgatcttcgcctgcagatggccctagaagagtctcggcgcgatacagtgaaaattcctaaaaaaaaagagcacggatcattaccacaacagactacactgcttgatctcatggatgccctgcctagcagcggtccagccgctcagaaagcagagccgtggggcccttcagcaagcacaaatcaaacgaacccatggggaggacctgctgctcccgcgtccacctcagacccctggccaagcttcggtacaaagccagccgcttcaatcgatccgtggggtgtgcctacaggcgctaccgttcagtccgtccccaagaactcagacccctgggctgcatcccaacagccagcttcttcggccggaaagcgcgcttctgatgcctggggggcggtctctactaccaaacccgtttctgtgtcaggatctttcgaattattctccaatttgaatggcactatcaaagatgatttctcagaatttgacaacttgcggacctcaaagaaaaccggaatgcaaggccttaccgggctgctgtttaccatggagatatag

SEQ ID NO: 186746 - DNA, 1500 bp, synthetic construct
  misc_feature 1..1500: note = Description of Artificial Sequence: Synthetic coding sequence
  source 1..1500: mol_type = other DNA
atgaccaccagcagcatccggcggcagatgaagaacatcgtgaacaattactcggaggctgagattaaagttagagaggcaactagcaatgacccatggggtccaagctcatcactcatgacagagatcgccgatctcacttataatgtggttgcctttagcgagattatgtccatggtttggaagcggttgaacgaccacggaaaaaactggcggcatgtttataaagctctgacactgctcgactaccttataaagaccggctcagagagagtggcacagcaatgtcgggagaatatctttgcaattcagacattaaaggattttcagtatatcgatcgggacggtaaagatcaaggcatcaacgtgagagagaaatctaaacagctagtcgctttgctgaaggatgaagaaaggttgaaggccgaaagggcccaagcactcaagaccaaggaacgtatggcacaggtggcgacagggatgggctccaatcagatcacttttggacgagggtcaagtcaacctaatctgagcacatctcattctgagcaagaatatggaaaggccggaggctcaccagcaagctaccatggaagtacaagcccacgtgtttcgtcagagcttgagcaggcccggccacagactagtggagaggaggagctgcagctacagctggccctggcaatgtcaagggaggttgctgagcaggaagagcggttgaggcggggcgatgacctgcgactgcagatggccctggaggaatctcgccgtgatacagttaagatccccaaaaaaaaagagcacggatccctgcctcagcagacaacactgctggatttaatggatgctctacccagctccggaccagccgcccagaaggccgaaccgtggggccctagtgcttctaccaatcagacaaacccgtgggggggaccggcagctccagccagcacaagcgatccttggcccagctttggaaccaaaccagctgccagtatcgacccgtggggcgtgcctacaggcgcaacggttcaaagcgtgccaaagaattccgacccatgggcagcgtctcagcagcccgctagctctgccggcaagcgggcctccgatgcctggggcgccgttagtaccacaaagcctgtatctgttagcgggtcctttgagcttttttcaaacctcaatggaacaataaaagacgacttttctgaatttgacaacctacgcacctcaaagaagacggcggagtctgtgacttccttaccctcccagaataacggaaccacttcaccggacccttttgaatcacaaccgctgacagttgccagcagtaaaccgagctctgctcgtaaaactccagaatccttcttgggtccaaacgctgcccttgtaaacctggattcactcgtgacacgacccgctcctcctgcccagtctctgaacccgtttttggctcctggcatgcagggactcaccggactgctcttcactatggagatctag

SEQ ID NO: 186747 - DNA, 1899 bp, synthetic construct
  misc_feature 1..1899: note = Description of Artificial Sequence: Synthetic coding sequence
  source 1..1899: mol_type = other DNA
atgaccaccagcgccctgcggcggcaggtgaagaacatcgtgcacaactatagcgaggctgagattaaggtgcgtgaagctacatctaacgacccgtggggacctccgtcctccctgatgtcagaaattgcggatttgacctttaacacggtggcctttaccgaggtgatgggcatgctttggcggcgcctcaacgacagtggtaaaaactggcgccatgtgtacaaggctcttactctgctcgattacttactcaagaccggaagcgaacgcgtggcacaccaatgccgagagaatttgtacacaatccaaacactgaaagacttccagtatattgacagggacggtaaagatcagggggttaacgtgagggaaaaagtaaagcaagtaatggcgctgcttaaagacgaggagcgtctgcggcaggaaagaacacatgccctgaagactaaggaacggatggccttggagggtattggcattggcagcggccaactgggattctcaaggagatacggcgaggactactctcggagccggggctcacctagctcatacaactcctccagctcctccccaaggtacacgagcgacctggagcaagcccgcccccagacctcaggcgaagaggagctgcagctccagttagccctggccatgagtcgtgaggaagctgagaaacctgtcccacctgccagccatagagacgaggacttacagctgcagctagcactcaggctcagccgtcaggagcacgagaaggaggtgcgttcttggcagggcgacggttcccccatggccaacggcgctggcgccgtcgtacaccatcaacgcgatagagagccggaacgagaggaaagaaaagaagaagagaaactgaagacaagtcagtctagcatactggaccttgcagacatttttgttcccgcactagccccaccctcaacccactgtagcgccgatccgtgggacattccaggattcagaccaaacactgaagcctctggatcctcctggggaccaagcgccgatccttggtcccctattccctccggaaccgttctaagccgctctcagccttgggatcttactccaatgctctcatcttctgagccctggggaagaactcctgtgttaccagccgggccccctaccaccgacccctgggccctcaatagcccccaccataaactcccctctactggagcagacccctggggtgctagcctcgagacctccgatactcccggcggggcgtctacattcgacccgtttgccaagccaccagagagcacggagacaaaggaagggcttgagcaagcccttccgtctgggaaaccaagctctcccgtcgaattggatctttttggggacccttcacctagttcaaagcaaaacggaactaaagagcctgacgccttagacctgggcatccttggtgaagcgctgacccagccaagtaaggaagcccgcgcgtgtcgcactcccgaatcatttctgggcccatcagcctcttccctggtcaacctggattccttggtgaaggccccccaggtggccaagactcggaacccttttctaactgggctgagcgccccatctccaacaaacccatttggagcaggggagcctggacgcccaaccctcaatcaaatgaggactgggtccccggcattgggcctggcgggagggccggtgggcgcccctttaggtagcatgacatactcggcttctttaccccttcctctaagcagtgtgcccgctggcctgacacttcccgctagtgtgagcgtgtttccccaagctggggccttcgcccctcagccactgttacctactccatcttctgcaggacccaggccgccaccacctcagacgggtacaaaccctttcctgtag

SEQ ID NO: 186748 - DNA, 957 bp, synthetic construct
  misc_feature 1..957: note = Description of Artificial Sequence: Synthetic coding sequence
  source 1..957: mol_type = other DNA
atgaccaccagcgccctgcggcggcaggtgaagaacatcgtgcacaattattccgaggctgaaatcaaagtgagagaagctacatcgaacgacccatgggggccgcccagcagcctgatgtctgagatcgccgatctcactttcaatacggtggcctttactgaggtgatggggatgctctggagacgacttaacgattcaggtaaaaactggcggcacgtctacaaggccctgactctgctggattacctgcttaagacgggctcagaaagagttgcccaccaatgccgagagaatctgtatacaattcagacacttaaggactttcagtacattgaccgtgatgggaaggaccagggcgtcaacgttcgggagaaagtaaagcaagtcatggccctgctgaaagacgaagagaggctgcggcaggagaggacacacgccttaaaaaccaaagaacgcatggccctggaaggaatcggcattggcagcggacaacttggctttagccggcgctacggtgaggactattcccgatcaaggggttcccctagcagctacaactcttccagttcttctccaaggtatacatccgacttggaacaggcacggccacagacatctggcgaggaagaacttcagctccaattagcactcgctatgagccgcgaagaagctgaaaagcccgtccctcccgcaagtcatcgcgacgaggatcttcaactccaactcgctctgcgcctgtctaggcaagaacacgagaaagaagtgcgctcatggcagggagacggctcccctatggcaaacggcgctggtgccgttgttcaccaccagcgggacagggagcccgagcgagaggagcggaaagaggaagaaaaactgaaaacttctcaggccccaccaacatctgaaccaagacttcctctgcccagcaccgttttgcatccagggctaggatag

SEQ ID NO: 186749 - DNA, 1725 bp, synthetic construct
  misc_feature 1..1725: note = Description of Artificial Sequence: Synthetic coding sequence
  source 1..1725: mol_type = other DNA
atggccctggagaccctgccccggctgtgccggcccgccgccgcccaggtcgggggctctccacaacggctcttgggcttgggtctgggccccagagagcctgcccttgagccgcatgttgaaccgaaagacgcagcggcattgctgactagacagccaatattacaggattgcgatctggccacagtcgcactgagccccccacctccagccggagccagagctactcatctgcaggtaagttctcatgatgatctcaggacacccgcccccggcgaagaacaccgtgcacagctccttcgagggcggaaccaggtggccttcacagaggtcatgggaatgttgtggaggagactgaacgatagcggaaaaaactggaggcatgtttacaaagccctcacactcctggattatctcttgaagaccggctcagagcgagtcgcgcatcagtgtagggaaaacttatacacgatacagacactaaaagatttccagtatattgaccgcgacggtaaagaccaaggcgtgaacgtccgcgagaaagttaagcaggtcatggccctgttgaaagatgaagagagactcagacaggagcggacgcacgccctaaagaccaaggaacgcatggctctggaagggataggcatcggtagtggacaactgggcttttcacgcagatacggcgaagactacagtcggagtagaggaagcccctcaagctataacagcagctcttcgagtccccgctacacctctgaccttgagcaggcccgcccacagacgtctggggaagaggaactccaactgcagttagcactggctatgagccgggaagaggccgagaaggaagttagaagttggcagggggatggcagtccaatggcaaacggagcaggggccgtcgtgcaccaccaaagggacagagaaccagagcgcgaagaacggaaagaggaggaaaaactcaagacaagtcagtcgtcaatccttgatctggcggacatcttcgtccccgctttagcccccccaagtacccactgttccgcggatccctgggatatcccaggtttccgcccaaatacagaggccagtggaagttcctgggggccttcagctgacccctggtcgccgattccaagtggtaccgtgctatcaaggtctcagccttgggacttgacccctatgctgtctagttccgaaccctggggcaggacaccagtcttgccggccggacctcccacgaccgatccatgggccctgaactctccccatcacaagttgccttcaaccggcgctgatccttggggagctagcctggagacatcggacactcccggaggagcttccacattcgatccctttgctaaacctcctgaaagtactgaaacaaaggaagggctggaacaggccctgcccagtggcaagccatcaagccctgtggaacttgatttattcggggatccctcgcccagtagcaagcagaacggcactaaagagccagacgctttagacctcggcatactcggggaagccctgacccaaccttcgaaggaggctagagcttgtcggacgcccgaatcctttttggggcccagcgcatccagccttgttaatctggacagcctcgtgaaagcgccgcaggtggccaagactcgtaacccattccttacagggctaagcgcccccccccgtttgcgcactcgcggctgggccggtaggcgatgttag

SEQ ID NO: 186750 - DNA, 507 bp, synthetic construct
  misc_feature 1..507: note = Description of Artificial Sequence: Synthetic coding sequence
  source 1..507: mol_type = other DNA
atgaccaccagcgccctgcggcggcaggtgaagaacatcgtgcacaactatagtgaagcagagatcaaggtaagagaagctacaagcaacgacccatggggtccacccagtagtctcatgtctgagatagcagatttgacatttaataccgtggcattcactgaggttatgggtatgctgtggagacgactgaacgattcaggcaagaactggcgccacgtatacaaggcactgaccctcctggattacctgttgaaaaccggatcagaacgggtcgcgcatcagtgtagagagaatttatataccattcagaccctgaaagattttcagtatatcgacagagacggtaaggaccagggcgtaaacgtgcgggagaaggttaaacaggtgatggccctgctgaaagacgaagaacgactgagacaagagagaactcacgctttaaaaaccaaggagagaatggccctggagggaatcggtattgggagcggacagcttggtttttag

SEQ ID NO: 186751 - DNA, 36 bp, synthetic construct; identical to SEQ ID NO: 151353
  misc_feature 1..36: note = Description of Artificial Sequence: Synthetic coding sequence
  source 1..36: mol_type = other DNA

SEQ ID NO: 186752 - DNA, 411 bp, synthetic construct
  misc_feature 1..411: note = Description of Artificial Sequence: Synthetic coding sequence
  source 1..411: mol_type = other DNA
atgaccaccagcgccctgcggcggcaggtgaagaacatcgtgcacaactactctgaagcggagatcaaggttagggaagccaccagcaatgacccttggggcccgccttcaagcctcatgagtgagattgcggacctgacattcaataccgtggccttcaccgaagtgatggggatgctttggaggcgcctgaatgattccggcaaaaactggcggcatgtgtacaaggccctcaccctcctggattatcttctcaaaacggggagcgaacgtgtggctcaccagtgcagggaaaacctgtatacgatccaaactctgaaagatttccagtacatcgacagagatgggaaagatcagggagttaacgttcgcgagaaagtcaagcaggttatggcactcctaaaggattag

SEQ ID NO: 186753 - DNA, 156 bp, synthetic construct
  misc_feature 1..156: note = Description of Artificial Sequence: Synthetic coding sequence
  source 1..156: mol_type = other DNA
atgaccaccagcgccctgcggcggcaggtgaagaacatcgtgcacaattattcagaggcggagatcaaggttcgggaggctacctcaaatgatccctgggggccacccagcagcctcatgtctgagattgcagatttgacattcaacaccgtttag

SEQ ID NO: 186754 - DNA, 327 bp, synthetic construct
  misc_feature 1..327: note = Description of Artificial Sequence: Synthetic coding sequence
  source 1..327: mol_type = other DNA
atgaccaccagcgccctgcggcggcaggtgaagaacatcgtgcacaactactccgaggccgaaattaaggttagggaagctacatctaacgacccctgggggcccccctcttcattgatgtctgagattgcagacctgaccttcaacaccgtggccttcactgaagtgatgggcatgctgtggaggagacttaacgactctggaaaaaactggcgtcacgtgtataaggcgctcaccctcctggattatcttctgaagactggctccgagcgtgtggcgcaccaatgtagagagaacctctataccatccagaccctaaaggactag

SEQ ID NO: 186755 - DNA, 1983 bp, synthetic construct
  misc_feature 1..1983: note = Description of Artificial Sequence: Synthetic coding sequence
  source 1..1983: mol_type = other DNA
atggccctggagaccctgccccggctgtgccggcccgccgccgcccaagtgggcggatccccacaaaggttgctgggcctgggcctggggcctcgcgaaccagctctggaacctcacgtcgagccaaaagacgctgctgccttgcttacacgccagccaatcctacaggactgcgatctggcgaccgtggctcttagtccgccgccccctgccggcgctagggctacacatctgcaggtttccagccacgacgatcttagaacgccggccccaggagaggaacacagagcccagctacttcgcggcagaaatcaggttgcgttcacggaagtgatgggcatgttatggaggaggctgaacgattctggaaaaaattggcgtcacgtgtacaaagccttaaccctgttggactatttactgaagacaggcagcgagcgtgtagcccatcagtgcagagagaacttatacacaatacagaccctaaaagattttcagtacatagatagagatggcaaagaccagggggtgaacgtccgggaaaaggtcaaacaggtaatggcccttctgaaagacgaggagcgtctccgccaagaacgcacacacgccctgaagaccaaagaaaggatggccctggagggcatcggaattggctctggacaactcggtttctctaggaggtatggagaggactattcgcggtctcgtggttccccaagctcctacaactcaagctcgtcctctccgaggtatacttctgacctggaacaagccagaccccagacctctggagaggaggagctccaactgcagctcgctctagcgatgagccgggaggaagctgaaaaagaagtcaggagttggcaaggtgatggcagccctatggccaatggcgctggcgcggtggtccatcaccagagggatagggagcctgaaagggaagagaggaaagaagaggagaaactgaagacaagtcagtccagtatactggaccttgcggatatcttcgtgccagccttggccccccctagtacccattgctccgcggatccctgggatatcccaggattccggcccaacacagaagcctccggaagttcatggggcccctctgccgatccctggtctccaataccctccggcacagtactgagtaggtcgcagccctgggacctgacccctatgttgtcgtcatctgagccttgggggcggacacctgtacttcctgccggcccccccaccactgatccttgggccctcaactcaccccaccacaaattacctagtaccggtgccgacccttggggggctagcctagaaaccagcgatacaccgggaggggcttcaacatttgatccttttgctaaacctccggaatcgacagagaccaaggagggacttgagcaggctctaccctcaggtaaaccatcttctccagtagagttggaccttttcggcgatccatcgccttcctcaaaacagaacggcaccaaggagcccgatgccttggatttaggaatcctgggtgaggccttgacccagccatctaaggaggcacgagcctgcaggactccagagtcctttcttgggccctctgcaagcagtctcgtgaatttagattctctggtgaaggctccacaggtggcaaagactaggaacccctttttgactggcttgtcggcccccagtccaaccaacccgtttggcgccggggaaccgggaaggcccactctgaatcaaatgagaacaggttctccagccctagggctggcaggggggcctgtgggcgcccccttggggtccatgacgtattccgcaagcctgcccctaccactgtccagcgtgccggctggactgaccctgcccgcaagcgtgtccgttttcccccaagccggcgcctttgcccctcagcctctgctccccacaccttcttcagctggtccgcgcccgcctcctccccagactgggactaatccgtttctgtag

SEQ ID NO: 186756 - DNA, 753 bp, synthetic construct
  misc_feature 1..753: note = Description of Artificial Sequence: Synthetic coding sequence
  source 1..753: mol_type = other DNA
atgggcatgctgtggcggcggctgaacgacagcggcaagaactggagacatgtgtacaaagccctcacgttattagactatctgctgaagacaggtagtgagagggtggctcaccagtgcagagagaacctctacacgattcagactctaaaagatttccagtacatcgatagggatggcaaagatcagggagtgaacgtaagagaaaaggtgaagcaggtaatggccctcctaaaggacgaagagcgactgaggcaggaacgtacacatgccctcaagaccaaggagagaatggcactggagggcatagggataggctctggccagctcggtttctcgaggaggtacggggaggattattcccggtcgcgcggtagcccttccagctacaactctagttcctctagcccacggtatacctcggatctcgaacaagcgagaccccagacctccggagaggaggagctacaattgcaacttgccttagctatgtctagagaggaagccgagaaggaggtgcgatcgtggcagggggatgggtctcccatggcgaacggcgcgggcgctgttgtgcaccatcagcgcgatcgggaacctgagagggaagaaaggaaggaagaggagaaactgaaaacctcacaggtgctcggcaggactcaacggcccgtggacccacccggcggcctgttgcaaactcccggcctgaggagcccgcaagagccgagctgccctgaggcatccccaggaatttag

SEQ ID NO: 186757 - DNA, 429 bp, synthetic construct
  misc_feature 1..429: note = Description of Artificial Sequence: Synthetic coding sequence
  source 1..429: mol_type = other DNA
atgagcctgctgcccgtgccctacaccgaggccgccagcctgagcaccggcagtacggtcaccataaaaggacgccctctggcttgtttccttaacgagccttatctgcaagtagacttccacacggagatgaaagaagagtctgacatagtgtttcatttccaggtgtgttttgggcgtcgcgttgtgatgaactctcgcgagtacggagcctggaaacagcaggttgagagcaagaatatgccattccaggacgggcaggagttcgagctttccatatccgttcttcccgacaagtatcaggtcatggtaaatggacagtcatcctatacctttgatcatcgaattaaacccgaggccgtgaaaatggtgcaggtgtggcgggacatcagtctgactaaattcaatgtgtcctatctgaagcgatag

SEQ ID NO: 186758 - DNA, 828 bp, synthetic construct
  misc_feature 1..828: note = Description of Artificial Sequence: Synthetic coding sequence
  source 1..828: mol_type = other DNA
atgaacatgacccaggcccgggtgctggtggccgccgtggtgggcctggtggccgttctactctatgccagcatccacaaaatcgaggagggacaccttgccgtatattatcgaggtggcgccctcttaacttcacccagcgggccaggttaccatattatgctacccttcatcacgacattcagatcagtgcagaccacgctgcagactgatgaggtaaaaaatgtcccttgtggaactagtgggggtgttatgatctacatagaccgcattgaagtggtgaatatgttggccccgtacgcggtgttcgacatcgtcagaaattacacagctgattacgacaagacactcatattcaataagatccatcacgagttgaatcaattctgttccgcccatactttgcaggaggtctatattgaattgttcgatcaaatcgatgagaacttgaaacaagcgcttcagaaggatctcaaccttatggcccctgggctgaccatccaggcagtcagggtcacaaagcccaagatcccggaagccatacggcgaaactttgaactcatggaagccgaaaagactaaactactgatcgcagcccaaaagcaaaaagtcgttgagaaagaggccgagaccgagcgcaagaaagccgtcatcgaggccgagaagatcgctcaggtggccaaaatccgctttcagcagaaagtgatggaaaaggaaaccgaaaagcggatcagcgagattgaagatgcagctttcttggctagagagaaggcgaaagctgatgccgagtactatgctgctcacaaatacgcaacatctaataaatag

SEQ ID NO: 186759 - DNA, 699 bp, synthetic construct
  misc_feature 1..699: note = Description of Artificial Sequence: Synthetic coding sequence
  source 1..699: mol_type = other DNA
atgatctacatcgaccggatcgaggtggtgaacatgctggccccctacgcagtatttgacatcgtgaggaattataccgccgattatgacaagacactgatcttcaataaaatccatcatgaactgaatcagttctgcagtgcacatactctccaggaagtctacattgagttgttcgatcaaatagacgaaaacctgaagcaggccctgcaaaaggacctcaacttgatggcacccggcctgacgatccaggctgtgagagtaactaagccaaaaatcccggaagcgatccgacgcaatttcgaactgatggaggcggagaaaaccaagttgcttattgccgcacagaagcaaaaggttgtggagaaggaggccgagacagagcggaagaaggcggtcatcgaagccgagaagattgctcaagtggcgaagattcggtttcagcagaaggttatggagaaggaaacagagaagcgaatctccgagatcgaagacgctgcgtttctggctcgcgaaaaggcaaaagccgatgctgaatactacgccgcccacaaatatgctacctctaataaacacaaactgacacctgagtatttagaactcaaaaaataccaggcaatcgcttctaattcaaaaatctattttgggtctaacattccaaatatgttctccatcagtcgctgtggcccaagaggttag

SEQ ID NO: 186760 - DNA, 1047 bp, synthetic construct
  misc_feature 1..1047: note = Description of Artificial Sequence: Synthetic coding sequence
  source 1..1047: mol_type = other DNA
atgaacatgacccaggcccgggtgctggtggccgccgtggtgggcctagtggcggtactgttatatgcttctattcacaaaattgaagaaggacatctggcggtgtattaccgcggtggcgccctgttgacctccccaagcggccctgggtaccacattatgctgccattcattacaaccttcagatctgtgcagacaacattgcagaccgacgaggtaaagaacgtaccctgtggcacatctggcggggtgatgatctatattgatcggatcgaagtggtgaatatgttggctccatacgccgtgttcgatatagtgcgcaactatactgcggattacgataagacgcttatcttcaacaagatccaccacgaactcaaccaattctgttcagcgcatacacttcaggaggtctacatcgaactgttcgatcagatcgacgaaaacctgaaacaggctctgcaaaaggacctcaacctgatggcgccaggactgaccattcaggccgtgagagttacgaagccaaaaattcccgaggctatcaggcgcaacttcgaactgatggaagcagagaagacaaaactcctgatcgcagctcagaagcaaaaggtggttgagaaagaagccgagactgagcgcaaaaaagcagtgattgaggccgagaagattgcccaggtcgcaaaaatccggtttcagcagaaggtgatggaaaaggagacagaaaaacgcattagcgagattgaggatgccgccttcttggccagagaaaaggctaaggccgacgctgagtattatgcagcccacaaatatgctacatcaaacaaacacaaactgacacccgaatacctggaactgaaaaagtatcaggctatcgctagcaattccaaaatttacttcgggtccaatattccaaacatgttcgtcgacagttcctgtgcgctcaagtattctgacatcagaactgggcgcgagtcttcactcccatccaaggaggccctggaaccatcaggcgaaaacgtgatacagaataaagaatccacaggctag

SEQ ID NO: 186761 - DNA, 1047 bp, synthetic construct
  misc_feature 1..1047: note = Description of Artificial Sequence: Synthetic coding sequence
  source 1..1047: mol_type = other DNA
atgaacatgacccaggcccgggtgctggtggccgccgtggtgggcctcgtggccgttcttctttatgcgtccattcataaaattgaggaaggacacctggccgtctattacagaggcggagcgctgcttacaagtccgtcgggcccagggtatcacataatgctcccttttattactaccttccggtccgtccagactacccttcagactgatgaggtaaagaacgtgccctgcggaaccagcggcggcgtcatgatttatattgaccgcattgaagtcgtcaatatgctggccccgtacgccgtctttgacattgtcagaaattataccgccgattatgacaaaacattaatcttcaacaaaatccatcacgagctgaaccagttctgctccgctcatactctgcaagaggtatacattgagctgtttgaccagatcgatgaaaatctcaaacaggctcttcagaaggatttaaatctgatggcaccagggttgacgattcaggcagtgagggtgacgaaacccaagatccctgaggccattaggaggaatttcgaattgatggaggccgaaaagaccaagttattaatcgcggcgcagaagcagaaagtggtggagaaagaggcggaaaccgagcgaaagaaagccgtgatcgaggccgagaagattgctcaagtggccaagatccgttttcagcagaaagttatggaaaaggaaaccgagaagcgaatcagtgagatagaagacgccgcctttctcgctcgggaaaaggccaaagccgatgccgagtattatgcagctcacaagtatgccacctccaataagcataagttaactcccgagtatttggaattaaaaaagtatcaggccattgcatctaacagtaagatctattttggaagtaatatccccaacatgttcgtcgactcctcttgcgcgttaaagtatagcgatatccgtacaggccgtgagtctagtctgccttccaaagaagccttggaaccaagtggcgagaatgtgatccagaacaaagagagcactggctag

SEQ ID NO: 186762 - DNA, 1020 bp, synthetic construct
  misc_feature 1..1020: note = Description of Artificial Sequence: Synthetic coding sequence
  source 1..1020: mol_type = other DNA
atggcccagctgggcgccgtggtggccgtggccagcagcttcttctgtgcatccttattttctgctgtgcacaaaatcgaggaaggtcacatcggagtttattatagaggcggagctttgctgacaagtacctcagggccagggtttcacctaatgctaccattcattactagctacaagagcgtgcagaccactctgcaaaccgacgaagtgaagaacgtgccatgcgggacaagtggcggagtaatgatttattttgataggatcgaggtggtgaatttcctcgtgccgaatgccgtgtacgatattgtaaaaaattacaccgccgactacgacaaagctctgatatttaataaaattcaccacgagcttaatcaattttgctccgtccacaccttacaggaggtgtacatcgaattgttcgaccagatcgacgagaatcttaaattagcccttcaacaagacctcacctcaatggcccccgggctggtaatacaggcagtcagagtgactaaacccaacattccagaggcaataaggcgcaattatgagctgatggaaagcgaaaagacaaaattgctgatcgcagcccagaagcagaaagtagttgaaaaggaagcggagactgaaagaaaaaaagctctgatagaggcagaaaaagtcgctcaagtggcagaaatcacttacggccagaaagtgatggagaaggagaccgaaaaaaagatatccgagatagaagacgctgccttcttggcaagggagaaggctaaggccgatgccgagtgctacaccgccatgaagatcgcagaggcaaacaagcttaagcttactcccgagtacttgcagctcatgaagtataaggccattgcctctaactccaagatctactttggaaaagacatccccaatatgtttatggacagtgcaggttctgtgtctaaacagtttgaagggctggctgataagctatctttcggactagaggacgagccattagagacagcaacaaaggagaattag

SEQ ID NO: 186763 - DNA, 459 bp, synthetic construct
  misc_feature 1..459: note = Description of Artificial Sequence: Synthetic coding sequence
  source 1..459: mol_type = other DNA
atggcccagctgggcgccgtggtggccgtggccagcagcttcttctgtgccagtctgttttcagctgtccataagatcgaggaaggccacattggggtctactaccgcggcggggctcttctgacttcaacttctggccctggctttcacctgatgctccccttcatcacaagctataagtctgtccagactaccctccaaacagacgaggtgaagaacgtcccctgtggtacaagcggtggtgtgatgatttacttcgaccggattgaggtggtcaacttcttggtacctaacgcggtgtacgatatcgtcaaaaactacactgccgactacgataaagccctgatcttcaataaaatccaccatgagcttaaccagttctgctcagttcacaccctccaggaggtgtacattgagttgttcggtctggaaaatgatttttctcaggaatcgagctag

SEQ ID NO: 186764 - DNA, 1020 bp, synthetic construct
  misc_feature 1..1020: note = Description of Artificial Sequence: Synthetic coding sequence
  source 1..1020: mol_type = other DNA
atggcccagctgggcgccgtggtggccgtggccagcagcttcttctgtgcctcactgtttagcgctgtgcacaagattgaggagggccacatcggtgtgtactaccgcggcggtgcattattaaccagtactagcggcccagggttccaccttatgctgccctttattacctcttacaagagtgttcaaacaacgcttcagactgacgaggttaaaaacgtgccatgcggaacttctggaggcgtgatgatttattttgaccgaatcgaagttgtcaactttctcgtgcccaacgctgtctacgatatagtgaagaactatactgctgactacgacaaggccctgatcttcaataaaatccatcacgagctgaatcagttctgtagcgttcatacactgcaggaggtgtatatcgagttatttgaccagattgatgagaatttgaagctggctttacaacaggatctgacctcaatggcccccggcttagtgatacaggctgtgcgtgtgaccaaacccaatatcccggaagccattaggcggaattacgaattgatggagtctgaaaaaaccaaactactcatcgctgcccagaagcagaaggtggtagagaaagaggccgaaaccgagagaaaaaaggcactcatcgaagccgagaaggtggctcaggtggctgagattacttacggtcagaaggtcatggagaaagaaaccgaaaagaagatctccgaaatagaagatgcagcattcctcgccagggaaaaggctaaagctgacgcagagtgttataccgccatgaagatagccgaggcgaacaaattgaagttgaccccggaatatctccagctaatgaagtacaaggcaattgccagcaactcaaagatttactttggtaaggacataccgaacatgtttatggatagtgctggctcagtatcaaagcaattcgaaggcctagccgacaaactgtctttcggccttgaggatgaacccctcgaaaccgcaaccaaagaaaactag

SEQ ID NO: 186765 - DNA, 621 bp, synthetic construct
  misc_feature 1..621: note = Description of Artificial Sequence: Synthetic coding sequence
  source 1..621: mol_type = other DNA
atggcccagctgggcgccgtggtggccgtggccagcagcttcttctgcgcctcccttttcagtgcggttcacaaaatcgaggagggacatatcggagtgtattatcgcgggggagccctactgacgtcgacctccggtcctggctttcatctgatgctgccttttatcacgtcctacaagtccgttcaaactacattacagacagacgaagttaagaacgttccatgtggaactagcggcggcgtcatgatttactttgatagaatcgaagtcgttaactttcttgttcctaacgccgtctacgacatagtcaagaattacaccgccgactacgacaaggccttgatatttaataaaatacatcacgagcttaaccagttttgttcagtgcacaccctacaggaagtgtatatagaattattcggtaaaaaggttagccccgagcatgcggtcctgaagcaaggaagctggaatccggcatctctgcattgccttaagcccggatgcttacagggagtaatggtcacttatgggcaggaaatgctgaaaaacttggtgctccgttcctggtcacaacggagctcatggaggatgttgattgcaatgcagcaggacccgtag

SEQ ID NO: 186766 - DNA, 459 bp, synthetic construct
  misc_feature 1..459: note = Description of Artificial Sequence: Synthetic coding sequence
  source 1..459: mol_type = other DNA
atggcccagctgggcgccgtggtggccgtggccagcagcttcttctgtgcatctctgttcagcgctgttcataaaattgaagagggtcacatcggcgtgtactaccgaggaggcgcactgttgacatccacctctgggcctggctttcatctaatgttaccattcataaccagctacaagtccgtgcagacgacgttacagactgacgaagtaaaaaacgtcccctgtggcacatccggaggagttatgatctacttcgatcggatcgaagtcgttaattttttggttcccaacgcagtgtacgacatcgtgaagaattataccgctgactacgataaagcgctgatctttaataaaatccatcacgagctcaaccaattctgtagtgtccatacactgcaggaggtgtatatcgaactgtttgggctcgaaaatgacttttctcaggaaagtagttag

SEQ ID NO: 186767 - DNA, 4239 bp, synthetic construct
  misc_feature 1..4239: note = Description of Artificial Sequence: Synthetic coding sequence
  source 1..4239: mol_type = other DNA
atgaccaccaagcggagcctgttcgtgcggctggtgccctgccggtgcctgaggggggaggaggagacggtaactactctggactattctcactgcagccttgaacaagtgcccaaggagattttcacatttgagaagacactggaagaactgtacctggatgccaaccagatcgaggaacttccaaaacaactgtttaactgccagagcctgcacaaactttccttgcccgacaatgacctgacaactctgcccgcaagcatcgccaatttgatcaacctgagggaattggacgtctccaagaacggaatccaggaattcccagaaaacatcaaaaactgcaaggtcctgaccatagtagaagcctctgtcaaccctatcagcaaactgccggatggcttctcacaacttttgaacttaactcagttgtacctgaatgacgcatttctagagttcctcccggctaattttggtagactgacaaaactccagatcttggagcttcgtgaaaaccagctgaagatgctcccaaagactatgaaccggctgacccagcttgaacgtctggaccttggtagcaacgaatttacagaagtgcccgaagtcctggagcaactttccggcctgaaagagttctggatggatgctaatcgtcttacgtttataccgggattcattgggtccctgaagcagttgacctatttggatgtgtcaaagaacaatatcgagatggtagaggagggaatatctacatgcgaaaacctgcaagatcttctgcttagctcaaatagtctgcaacaactgcctgaaaccattggttctttgaaaaatatcactactcttaaaatcgatgaaaaccagctcatgtatctgccggacagcattgggggtcttattagtgttgaagagttggactgcagtttcaatgaggtcgaggctttgccttcctcgattggccaacttacaaacttacggaccttcgcagcagatcacaattacctacaacaactcccacctgagattggttcttggaagaatatcactgtgttgtttctccacagtaataaattggaaacactgcctgaggaaatgggggacatgcagaagctgaaggtcatcaacctcagcgataatcgactgaaaaatctccccttttcattcacaaaactgcagcagctgactgctatgtggctaagtgataatcagtccaagcccctcatacctctccagaaagaaacagattcagaaacacagaagatggttctgactaattacatgttcccccagcagcctaggaccgaggacgttatgttcatctctgacaatgagtcattcaaccccagtttatgggaggagcagagaaaacaacgggcccaggtggccttcgagtgcgacgaggataaggacgaacgggaagcaccaccccgggagggcaatttgaagaggtaccccacaccctatcccgacgagctgaaaaacatggtcaaaaccgtacaaactatcgttcacagactgaaagacgaggagaccaacgaagacagtggcagggacctgaagccccacgaagatcagcaggacattaataaggatgtcggcgtcaagactagcgaaagcactaccacggtgaagtctaaggtagacgaaagggaaaaatacatgatcggtaacagcgtgcagaagatctctgagcccgaagctgagatctctccggggtcactgccagtgactgcgaacatgaaggcctctgaaaacctgaagcacattgtcaaccacgatgacgtgttcgaagagtcagaagaactgtctagcgatgaggaaatgaagatggcagaaatgcggccacccttaatcgagacttcgattaaccagcccaaggttgttgccctgtcgaataataagaaggacgatactaaggagactgattcactgagcgatgaggtaactcacaactcaaatcagaacaactcgaattgcagcagcccttcgcggatgtcggacagcgtgagtttaaatactgactccagccaagacacctctctgtgcagcccagtgaaacagactcacatcgacatcaattccaaaattcggcaggaggacgagaattttaactcattgctgcagaatggtgatattctgaacagtagtactgaagagaagttcaaagctcatgacaagaaagattttaacctacctgaatacgacctcaatgtggaagaaaggctcgtacttatcgagaagtcggtcgactcgacagcgactgcggatgatacccacaagttggaccacattaatatgaaccttaataaactcatcacgaacgatactttccagcccgaaattatggaaagatcaaagactcaggacattgtattgggcacttccttcctgtctataaactccaaagaagaaacggagcacctggagaacggtaacaaatacccaaatctcgagagcgtcaataaagtaaatggccactcggaggagacctctcagtctcccaaccggactgagcctcacgattccgactgtagcgtggatctggggatttctaagagcaccgaagacctatcccctcagaaatcgggccctgttggctctgtggtgaagtcgcacagtataactaatatggaaatcggcgggcttaaaatctatgacattctgtcagacaacggtccacagcagcctagcacaactgttaaaattacatcagctgtggacggcaaaaacattgttcggtcaaaaagtgctacgctgctctacgatcagccactgcaggtctttacgggatccagtagctcgtctgacctcatcagcggaaccaaagcgattttcaaattcgactctaaccataatccggaggaacctaacatcatccggggaccgactagcggaccacagtccgcccctcagatttacgggcctccacagtataatattcagtactccagtagtgctgcagtcaaggatacgctgtggcattctaagcagaaccctcagatagaccatgccagtttccctccgcagttacttccaaggtcagagtccactgagaaccaatcttacgctaaacactcagccaacatgaacttttccaaccataacaacgtcagagccaatacagcataccacctacatcagcggctggggcccgccagacacggcgaaatgtgggcgatttctccaaacgatcgtctgattcccgcggtgacgagaagcaccattcaaaggcagtcctcagtgtcctctaccgcctccgttaatttgggggatccagggtctacacgacgagctcagatacctgaaggcgactacctctcctaccgcgaatttcatagtgccggacgaaccccgcccatgatgcccggttcacagagacctctgtccgcccggacctattccatcgatggtcccaatgcgagtcgcccgcagtctgctaggcctagcatcaacgagataccagaacgcaccatgagtgtgtcagacttcaactactctcgcacaagcccttctaaacggccaaacgcgagagtaggctctgagcatagcctgctggaccctcctggaaaaagcaaggttccacgcgactggagagagcaggtcttgcgacacattgaggcaaagaagcttgaaaagaagcatccgcagactagctcctccggagacccctgtcaggacggaattttcattagtggacagcaaaattactcttcagcgactctgtcccacaaagacgtccctcccgactccctcatgaagatgcctttaagcaacggtcagatgggccaacccttgagaccccaggccaactacagccagattcaccaccctccacaggcatcggtggctcggcatcccagtcgggagcaactgattgactacctgatgttaaaagtcgcacaccaaccgccctacacccagccccactgcagcccacgccaggggcatgaactggccaagcaggagataagagtccgggtagaaaaggaccctgagctgggattcagtatttcaggtggcgttggaggacgagggaatccattccggccagatgatgatggcatcttcgtcacccgcgtgcagccagaggggcctgcctctaagctcctccagccaggcgataagattattcaagcaaatggctattcttttatcaatatcgaacacggacaggcggtgtctctactgaagactttccagaacacggtcgagttgatcatagtgcgcgaagtctcaagttag

SEQ ID NO: 186768 - DNA, 3909 bp, synthetic construct
  misc_feature 1..3909: note = Description of Artificial Sequence: Synthetic coding sequence
  source 1..3909: mol_type = other DNA
atgaccaccaagcggagcctgttcgtgcggctggtgccctgccggtgcctccgaggcgaagaagaaaccgttaccacattggactattcccattgttcactcgagcaggtgcccaaagaaatcttcaccttcgagaagacactcgaggagctgtacctggatgccaaccagattgaggaactgccgaaacagcttttcaattgtcagagcctgcataaactgtcgctgccagataatgacctgactaccttgcccgcaagcattgccaacctgattaacctcagggagctcgacgtgagtaagaatgggattcaggaatttcctgagaatatcaagaactgcaaagtgctgacgattgtcgaggcttctgttaatccaatttcaaagctccccgacggtttcagccagcttttgaatttaacccagctctacttgaacgatgctttcctagaatttctgcctgccaatttcggacggctgaccaagctgcagattcttgaattaagggagaatcagctcaaaatgctgcctaaaactatgaatcggctgactcaactggaacgcttggatctgggaagcaacgaattcaccgaggtgcctgaggttctggaacagctaagtggattaaaagagttctggatggatgccaatcgcctgaccttcattcctgggttcattgggtcactgaagcagctgacctacttagacgtgtcaaaaaacaatatcgagatggtcgaggagggtatatccacttgtgagaaccttcaggatttactactcagctccaattccttacagcagttgcccgagactatcggctccctgaagaatatcaccacgctgaagatcgatgaaaaccagctcatgtaccttccggatagcatcggtggactaatatctgtagaggaactggattgctcctttaacgaggtggaggccttgccgagctcaatcgggcaactgaccaatctccgtacctttgctgcagatcataactacctgcagcagctgcctccagaaatcggctcctggaaaaacatcaccgtactctttttacactctaataagctggaaacgctccctgaagagatgggagatatgcagaagctgaaggtaatcaacttatctgataataggctcaagaacctgcccttctcttttacgaagctccaacagctgacagccatgtggctttcagataatcaaagtaagcccctgattcccctgcagaaggaaaccgattccgagactcagaagatggtccttaccaattacatgttcccacagcagccaagaaccgaggatgtgatgttcatttctgacaacgagagttttaatccgagcctttgggaggagcagaggaaacaacgtgctcaagttgcattcgaatgtgacgaggataaggatgaacgggaagcacctccccgagaggggaatttgaaacgctatccaacaccatatccggatgaattgaagaacatggttaagaccgtccagacaatcgtgcatcggctcaaagacgaagagaccaatgaggattcaggacgtgatctaaaaccacatgaggatcagcaggacatcaataaagacgtgggggtgaagaccagcgaaagtactacaacagtgaaatctaaagtggatgagagggaaaagtatatgattggtaattccgtgcagaagatctccgagccagaagcagagatcagccctggaagcctccctgtaactgccaacatgaaggcgtcggagaatctgaaacatatcgttaatcatgatgacgtttttgaagagtctgaggaactctctagtgacgaggaaatgaagatggcggagatgaggcctccactgattgagacaagcattaaccaacccaaggtggtcgccctctctaataacaaaaaggacgatacgaaggaaacagactctttatctgatgaagtcacacacaattctaaccagaataacagcaactgttcttcaccctctaggatgtctgactcagtgtcgctgaatactgacagtagccaggacactagcctttgcagccctgttaaacagacccacatcgacataaattctaagataaggcaggaagatgaaaattttaactctctccttcagaatggcgatattcttaattcttccactgaagagaagtttaaagcccacgataagaaggacttcaacctcccggagtacgacctgaacgtggaggaacggctggtcctcatagagaaatccgtggactctacagccaccgctgacgacacccataaactggaccatatcaacatgaaccttaacaaactgataactaatgacacctttcagcccgaaataatggaaaggagcaaaacgcaggacatcgtgctcggcaccagtttcctgtcgatcaatagcaaagaggaaaccgaacatttggagaatgggaacaagtacccgaatctggagtccgttaacaaggtcaatggccattcggaggagacatctcagtcccctaacagaacggaaccccacgattccgactgctccgtggacctggggatatcgaagagcaccgaggatctgtctcctcaaaaatcaggacccgtcggaagcgtggtgaagtctcattccatcactaatatggaaattggaggcttgaagatctacgatattctgagcgataacgggccacagcaacccagcactactgtaaagatcacttctgctgttgacggaaagaacatagtgagatcaaaaagcgccaccctgttgtatgatcagccattgcaggtcttcaccggtagttccagttcttcggacctgattagcgggactaaggccatatttaagttcgacagcaaccacaaccctgaggagcctaacattataagagggcctacttccggaccccagtctgctccacaaatctatggtccgcctcagtataatatccagtatagctcctccgcagctgtaaaagacacactatggcattctaagcagaatccacaaatcgatcacgccagcttcccaccccaacttctgcctcgaagtgaatcaacagagaaccagtcctatgccaaacattccgccaatatgaatttttcaaaccataacaacgtgcgcgccaatacagcataccacctgcaccagaggttaggcccagccaggcatggggagatgtgggcaatctcacctaacgacagattaatccctgccgtcacaagaagcacaatacagcgacaatcttctgtctccagcacagcgtcagtgaaccttggggatcctggatcgacgcgcagagcccaaattcccgagggtgattacttgtcttatagagagttccattctgccgggcgcacaccccccatgatgccagggtcacagcggccactcagcgctcgcacctatagcattgatggacccaacgctagtcgcccacagagcgctcgaccttccatcaacgagatacctgaaaggaccatgagtgtgagtgactttaactactctcgtacaagcccatccaagaggccaaacgccagagtaggctccgagcatagcttgctcgacccccccggcaagagtaaggtcccccgggattggcgggaacaggtactccgtcatatcgaggccaaaaagctcgaaaagattagggtgcgtgttgagaaagacccagaattgggattctcgatctccgggggagtgggtggacggggtaaccccttccgcccggacgacgatggaatcttcgtgacgcgcgtgcagcctgagggccctgccagtaagctgctccagcctggtgataagattatccaggccaatggatacagtttcattaatatcgaacatggccaggccgtaagtcttcttaaaacttttcaaaacactgtcgagttgataatcgtccgcgaagtgtcaagctag

SEQ ID NO: 186769 - DNA, 4023 bp, synthetic construct
  misc_feature 1..4023: note = Description of Artificial Sequence: Synthetic coding sequence
  source 1..4023: mol_type = other DNA
atgaccaccaagcggagcctgttcgtgcggctggtgccctgccggtgtttacggggcgaggaagaaacagttacaaccctcgattatagtcactgctcactggagcaagtacctaaggagatattcacgtttgagaagaccttggaagaactgtaccttgatgccaatcagatcgaggagctgcccaagcagctgttcaattgccaatcactgcacaaactgtccctacctgacaatgatctgaccacattgcctgcctcaatcgccaacctgatcaaccttcgcgaactggatgtgagcaaaaatggtatacaagaattccccgagaacatcaagaattgcaaagtccttactatcgtcgaggcaagcgtcaaccccataagtaaattacccgacggattttctcagctgttaaatctaacccaattatatctgaacgatgcctttctcgagttcctcccagctaatttcggccggttgaccaagcttcagattctggagctgagggagaaccagttgaagatgctgcccaagactatgaatcgactcacccagttagagagattggatctgggcagcaacgagttcactgaagttcctgaagtgctcgaacaactgagcgggctgaaagagttttggatggacgctaacagactgacctttattcccggcttcattgggtccttaaagcagctgacctatcttgatgtatccaagaataatatagagatggtggaggagggaattagtacctgcgagaatctgcaggaccttttgttgagctccaatagcctgcagcagctaccagaaaccattggaagcctgaaaaatataacgactctgaagatagatgaaaaccaattgatgtatctgcccgacagcattggtgggttaatcagcgtggaggagctggactgcagttttaacgaagtggaggcactcccatcatcgattgggcagcttaccaatctacgcacgtttgccgcagaccacaattatctgcagcagctgccccccgaaatcggctcttggaagaatattaccgttttatttctgcattccaataagctggagactctccccgaagagatgggcgacatgcagaaattaaaggtaatcaacctgtcagacaatcggctcaaaaatttgcccttttcgttcactaagttacagcagctgacggcgatgtggctgtcagacaatcagagtaaacccctcatccccttacagaaggagactgacagtgaaacccagaaaatggtgctaacaaactatatgttcccgcagcaacctcgaactgaggacgttatgttcatctcagacaacgagtcttttaacccttccctgtgggaggagcaaagaaagcagcgcgcacaggtggcgtttgagtgtgacgaggacaaggacgagagggaggcccccccacgcgaaggcaatctcaagagatacccaacgccctatcctgatgaacttaaaaacatggtgaagactgtgcagactatcgtgcatcgcctgaaggacgaagagaccaacgaagactccgggcgggaccttaaaccccacgaggatcaacaagatattaacaaagacgtgggtgtgaagaccagtgaatccactaccaccgtgaaatctaaggtggacgaacgcgagaaatatatgatcggaaactctgttcaaaagatatcagagcccgaagctgagatctcccccggctcactccccgtcacagccaatatgaaggcttcagaaaatcttaaacatatagtcaatcatgatgacgtatttgaggaatccgaggagctgtccagcgacgaggaaatgaagatggccgagatgagaccacccttgatcgagaccagcatcaatcaaccaaaggtggtggccctctccaataataagaaagacgacacaaaggaaacagactcactgagtgacgaggtgacccacaatagcaaccagaataactcaaattgctctagcccaagtagaatgtctgactctgtatctctgaacaccgattctagccaggatacctctctttgtagccccgtcaagcaaacacacatagatattaactcaaagatccgccaggaggacgagaacttcaattctttactgcagaacggagatattttgaactcctcaaccgaggagaaattcaaggcacacgataaaaaagactttaacctacctgagtacgacctcaatgtggaggagaggttggtgctcatagagaaatctgtggattccaccgctaccgctgacgacacccataaactcgatcacattaacatgaacctaaacaaactcataaccaacgatactttccagcccgagatcatggagcggagcaaaacccaagatatcgtcctgggcacgtctttcctctccattaactccaaagaggaaactgagcatcttgaaaacgggaataaatatccgaatctggagagcgtcaacaaagtgaacgggcatagtgaggagacctcacagagccccaatcgcacagagccacacgactctgactgctccgtggatttgggcatctcgaaaagtaccgaagacctgagtccacagaagagtggccctgttggctccgtcgttaaatcccactctatcacgaacatggagatcgggggcttgaaaatctacgacatactttccgataatggcccacaacagccgtctaccacagtgaagatcacctctgcagttgacgggaaaaacatcgtgaggtccaagagtgccaccctgttgtatgaccaacccctgcaggtgtttactggctcaagttcatcctcggacctgatctctggcacaaaagctatttttaagtttgattcaaaccataatcctgaagagcccaacattataagggggcccactagtggcccacagtccgctccccagatctatggccctcctcagtataacatccaatactcttcctccgctgcagtgaaagacaccctctggcacagtaaacagaacccacaaatcgaccacgcctcttttccacctcagttgctgcccaggagcgagtcaaccgaaaaccaatcctacgccaaacattcggccaacatgaatttcagcaaccataataatgtccgcgcaaacacagcttaccatttgcaccagagactcggacctgcaagacacggggagatgtgggccataagcccaaacgacaggctcatcccagctgtcactaggtctaccattcaaaggcaatcctccgtatcatccacggcttccgttaacttaggtgaccccgggtctaccagacgggctcagattcccgagggagactacctgtcttatcgggagttccattctgcagggcggacacccccgatgatgccaggatcgcagaggccattgagtgctcgaacttacagtattgatggcccaaacgcatccagaccccaatccgcccgcccctctatcaacgagattcccgagaggaccatgtccgtctccgacttcaattactctcgtacaagcccctccaagcgcccgaacgccagggtgggctccgagcactctctactggaccctcccggtaagagtaaggttcccagggattggcgcgagcaggtgctgagacacatagaggctaagaagttggaaaagatgccactctctaacggacagatgggacagccgttaaggccccaggctaactactcgcagatacaccatccaccccaagcaagtgtcgctagacatccgtcccgtgagcaattaatcgattatctgatgctgaaagtggcccaccagccgccatacacccagccccattgttcacccagacaaggccatgaattggccaagcaagaggggatttttgttacccgcgtgcagcctgagggccccgcaagcaaactcctgcaacccggcgataagataatacaagctaacggctactcttttattaatatcgaacatggccaggctgtgagcctgttgaaaactttccagaacactgtcgagctgataatcgtaagagaagtgtccagttag

SEQ ID NO: 186770 - DNA, 4041 bp, synthetic construct
  misc_feature 1..4041: note = Description of Artificial Sequence: Synthetic coding sequence
  source 1..4041: mol_type = other DNA
atgaccaccaagcggagcctgttcgtgcggctggtgccctgccggtgcctgcgtggggaagaggaaacagtaactactttggattatagtcattgttccctggaacaggttccgaaggagatctttaccttcgagaaaacactagaggaactctatctagatgccaaccagatcgaagagctgcctaagcagctgttcaactgtcagtccctgcacaagttaagccttccggataacgaccttactacgctgcccgcaagtatagcaaacctgattaacctgagggagctggacgtgagtaagaatggtattcaggagttcccagaaaacataaagaattgtaaggtgctgacaatcgttgaggccagtgtgaatcccatttctaagttgcctgatgggtttagtcaactgctcaatctcacacagctctaccttaatgacgcattcttggagttcctacctgcaaattttggtaggttgacgaagctgcagattctggaacttcgcgaaaaccagctgaagatgctgcccaaaaccatgaatagattaacccaactggagagactggatctgggttctaatgagttcacagaggtgcccgaggttctggaacaactgtccggcctgaaggagttctggatggacgcaaatcgcctcacctttattcctggctttatcggatcactgaagcaactcacctatctcgacgtgtcaaaaaataatattgaaatggtcgaggagggcatctctacatgcgaaaatctgcaagatctgttgctgagtagtaattctctgcagcagctaccggaaacgatcggaagcctgaagaacattacgactctgaagattgatgaaaaccagctgatgtacctcccggatagcattggcggactgatttccgtagaagagctggactgcagcttcaatgaggtagaggcactgccgagttctataggtcagcttaccaacttacggacattcgccgccgatcataactatcttcagcagctaccccctgaaatcggcagctggaaaaatatcacagtgttatttcttcattctaataaactagagacactgccagaggagatgggagacatgcagaagttgaaggtgattaaccttagcgacaacagacttaagaatctgcccttttcgtttactaaactgcagcagctgaccgccatgtggctgtccgataaccaaagtaaaccactgattccgctccaaaaagaaactgactcagaaacacagaagatggtgttgacgaattatatgttcccccagcagcctcgcaccgaggacgtgatgttcatctctgacaatgagagctttaaccctagtctatgggaagagcagagaaagcagcgtgcccaagtcgccttcgaatgcgacgaggataaggatgagagggaagcccccccaagggaaggtaatctgaagcgctaccctacaccctatccggacgagctgaaaaatatggtgaaaactgttcagactatcgtgcataggctgaaggatgaagagacaaacgaggattcagggcgcgacctaaaacctcatgaggatcagcaggacatcaataaggacgtgggcgtgaaaacttcagagtccacaacgacagtcaagagtaaggtggacgaaagagagaaatatatgattgggaattcagtgcaaaagatctctgagcccgaggcagaaatatcacctggaagtttgccagtgaccgcaaatatgaaggccagcgagaacctcaaacacatcgttaatcacgatgacgtgtttgaggagtctgaggaactgtcgtctgatgaggaaatgaaaatggcagaaatgcgccctccactgattgagactagcataaaccaacccaaggttgtggctctgagtaacaacaaaaaggacgataccaaagaaacggattcattgagtgatgaggtgacgcacaacagcaaccagaacaacagcaactgcagcagccctagtagaatgtctgattctgtctctctgaatacggactcctctcaggatacctcactttgctcccccgtcaaacagacccacatcgacatcaacagtaagatccggcaggaggatgaaaactttaactcgctgcttcagaatggcgatattctcaatagttctacagaggagaaattcaaagcccatgacaagaaggattttaacttacccgagtacgatctgaacgtcgaggagagactcgtattgattgagaagtctgtcgatagcacagccactgctgacgatacgcacaagcttgaccatatcaacatgaacttaaacaaactcataaccaacgataccttccagcccgaaattatggagaggtccaaaactcaagatattgtgctagggacatcgtttctgtctattaactcaaaagaagagacagaacatttagagaacggcaacaagtaccccaatctggagtcagtgaacaaggtaaacggccacagcgaagaaacttctcaatcgcctaatcggacagagccgcacgacagcgactgctccgtcgacctgggcatttcaaaaagcacagaagacctaagcccacaaaagtcgggccctgttggcagtgtcgtgaaaagccatagcatcacaaatatggagatcggtggcctgaaaatctacgatatcttgtcggacaatggtcctcagcagccctccacgaccgtgaaaatcacctcagcggtcgacgggaaaaacatcgttcggagcaagagtgcaaccttactgtacgaccagccattgcaagtatttactggctccagcagcagcagcgacctgatctccggtacaaaagccattttcaagttcgacagtaaccataacccagaggagccaaatattatacgcgggcccacttccggcccgcagtccgctcctcagatctacggcccccctcagtataatattcagtacagcagctccgccgccgtgaaagacaccctttggcatagcaagcagaacccccagatcgaccatgcttccttcccaccacagctgcttccacggagtgagtcgacagagaatcagtcttatgccaagcactctgctaatatgaatttctcaaaccataacaacgtgcgggcaaataccgcctaccacctccatcagcgcctgggcccagcgcgacacggtgagatgtgggccatttcccctaacgaccgccttattcccgccgtgacaagatccacaattcagcggcagagcagtgtctcaagtaccgcttccgttaacttgggtgaccctggatcaactcgccgagcccagattcctgaaggcgattatctttcctatagggagttccactctgccggaaggacgcccccaatgatgcctggctcacagagacccctctctgctagaacctatagcatagacggacccaacgcctcgaggcctcagtccgctaggccctccatcaatgagatccccgagcggacgatgagtgtgagtgacttcaactacagtcgcacgtcgccgtcaaaaagacctaacgctcgggtggggagcgaacatagcctcctggaccctccgggtaagagtaaagtgcccagagactggcgcgagcaggttctccgtcacatagaggccaaaaaactggaaaagatgccactgtctaacggccagatgggtcagccgctacgcccacaggccaactacagtcaaatacaccatccccctcaggcttctgtggcccggcacccctccagagagcaactgatagactatttaatgttgaaagtggcccaccagccaccttatactcaacctcactgtagccctaggcagggacatgagctggcaaagcaggaaatccgcgtgcgggttgagaaggaccctgagctgggcttttctataagcggaggtgtcggcgggcggggcaacccattcagacccgacgacgatgcaaatggatatagtttcatcaacatcgagcatggtcaagccgtgagcctcctcaaaacattccaaaacacagtggagctgattattgtgagagaagtatcttcttag

SEQ ID NO: 186771 - DNA, 4083 bp, synthetic construct
  misc_feature 1..4083: note = Description of Artificial Sequence: Synthetic coding sequence
  source 1..4083: mol_type = other DNA
atgaccaccaagcggagcctgttcgtgcggctggtgccctgccggtgccttaggggcgaagaagaaacagtgacaactctggactattctcattgctccttagaacaggtgcctaaagagatttttacttttgagaaaaccctggaggagctgtatctagatgctaaccagattgaagaacttcccaaacaattgtttaactgtcagtccctgcataagctaagcctccctgacaacgaccttacgaccctgccggcttccattgccaacctcatcaacctgagagaattggatgtttccaaaaacgggatccaggaatttcccgaaaatataaaaaattgtaaggtgctaacaatcgtagaagcaagcgttaatccaatctcaaagctgcccgatgggttttctcagctgctcaacctgacccagctgtacctgaacgacgctttccttgaatttttacccgcgaattttggaaggctgactaagctccagatattggagcttagagagaatcagttaaagatgttacctaagactatgaatagactgactcagctcgagagattagacctgggctccaatgaatttacagaagttccagaggtgctggaacagctgtccggcctgaaggagttctggatggacgccaacaggctaacttttatacccggcttcattggctccctcaagcagctgacatacttagacgtgtctaagaataacatcgagatggtggaggagggtatctctacttgtgaaaatctgcaagacctcctcctcagctctaatagcctgcagcagctccctgagacaattggatccctcaagaacatcacaacacttaaaatcgacgaaaaccagctgatgtacctgcccgattccatcggtggcctcatctcagttgaggagctggattgctctttcaatgaagtcgaggccctcccgtcatcaatcggacagctcacaaacctcaggaccttcgctgcggaccacaattacctgcagcagctccctcccgagattggcagctggaagaacataactgtgctgttcttacattcaaataaactggagacattgcctgaagaaatgggcgacatgcagaaactcaaggtcattaatctgagcgataatagactcaaaaatctcccattttctttcacaaaactgcagcaactgacggccatgtggctcagcgacaaccagagcaagcccctcatccctctgcagaaagaaaccgactccgagacacaaaaaatggtgttgaccaattacatgtttcctcagcagccaaggactgaggacgtcatgttcatcagcgataatgaatcgtttaatccttctctctgggaggaacagaggaagcagagggctcaggtagcatttgagtgcgatgaagataaggatgaaagggaagcacctccacgggagggtaaccttaagcggtatcccacaccctatccggacgagctgaagaacatggtcaagactgtgcagaccatagtccatcgcctgaaagatgaggagaccaatgaggattccggccgtgatctgaaaccccatgaagatcagcaagacattaataaggacgtcggcgtgaaaacttctgagtcaaccaccactgttaagagtaaagttgacgagagggagaagtacatgataggtaacagcgttcagaagatttcggagccggaggcggagatcagtcccggtagtctccccgtgactgctaacatgaaagccagtgagaatctgaagcacatcgtgaatcacgatgatgtcttcgaagagagcgaggagttgtcgtccgacgaggaaatgaagatggcagagatgcgaccccccctaattgaaaccagtataaatcagcctaaggtagtggccctgtctaacaataagaaagacgacactaaagagactgattccctcagtgatgaggttacacacaattctaaccaaaataatagcaattgttcctcgcctagcagaatgagcgacagcgtttctcttaacaccgatagttctcaggatactagcctttgctcaccggttaagcaaacccacatcgatattaatagcaaaattcggcaagaggacgaaaattttaattctttgctgcaaaatggcgatattttgaatagctctacagaagagaaattcaaggcacacgataaaaaggatttcaacctcccggagtatgatctaaacgtagaagaacgattagtcctgattgagaaaagtgtggatagtacagccactgctgacgatacccataaactcgaccatattaacatgaacctgaataagctgatcacgaacgatacattccagccagagataatggagcggtcaaagactcaggacatcgttctgggtactagcttcctcagcatcaacagcaaagaggaaacggaacacctggaaaacggtaacaaataccctaacctggagtcagtgaacaaggtgaacggacatagtgaggagactagccagtcgcccaaccgaacagaaccccacgactctgactgctccgtggacctgggaatcagcaaatcgacagaggatctctccccccaaaagtcaggtccagtaggctccgtggtgaaaagccactctattaccaatatggaaattggtggtctgaagatttatgatatactgtctgacaacggcccccagcagccttctactaccgtcaaaatcaccagcgccgtggatggaaagaatattgtgcgcagcaaaagcgcaacccttctatacgatcagccgctccaggtgttcacaggctccagttcctccagtgatctgattagcgggaccaaggctatttttaaattcgactcaaaccacaatccagaagagccaaatataatcagagggcctacctcagggcctcagtcagcccctcaaatatacgggccacctcagtataacatccagtatagcagcagtgccgcagtaaaggatactctctggcacagtaagcagaacccccaaatcgatcacgcctccttccctccccaacttttaccccgaagcgaaagtaccgaaaatcaatcttacgccaaacacagcgccaacatgaacttctcaaaccataacaatgtccgtgccaatactgcctaccatctacatcagaggctgggaccggcaagacacggggagatgtgggctattagtcccaatgacaggctgatccccgccgtaacacgctccactattcaaaggcaatcttctgtgagctcaacagcctccgttaacctcggtgatcctggtagtacccgcagggcacagatccccgaaggagactacctcagctatcgggagtttcattccgccgggcgcacaccacccatgatgcctggtagccagagaccactgagcgctaggacctattcaattgatgggccaaatgccagtagaccccagtccgcacgcccaagcataaacgagattcctgagcggaccatgagtgtctcagactttaattactcccggactagcccctcgaaacgccctaacgctagggtgggtagcgagcatagcctgctggaccccccagggaagtccaaggtgccaagggactggcgtgaacaagtactgagacacatcgaagcgaagaagctggaaaagatgcccctgtccaacggacagatggggcaacccttaaggccccaagctagcgtcgccagacacccatctagggagcagctgatcgactatctgatgctcaaggtagcccaccagcccccctatactcagcctcattgctctccacggcagggccatgagttggctaagcaggagatccgtgtgcgcgtggagaaggaccccgagctggggttttccatcagtggaggcgtcggtggcaggggaaaccctttccgtcctgacgacgacggcatttttgtcactcgcgtgcaacccgagggacccgctagcaagcttctgcagcctggcgataagatcatccaggccaatggctatagcttcataaacattgagcatgggcaggctgtgagtcttctaaaaacttttcaaaatacggttgagctaattatcgtgagagaagtcagctcttag

SEQ ID NO: 186772 - DNA, 4116 bp, synthetic construct
  misc_feature 1..4116: note = Description of Artificial Sequence: Synthetic coding sequence
  source 1..4116: mol_type = other DNA
atgaccaccaagcggagcctgttcgtgcggctggtgccctgccggtgtctcagaggagaggaagaaacagtaaccaccctggattatagccactgttccttggaacaagtgccaaaagagatcttcaccttcgagaaaactctcgaagaactgtacttggatgcaaatcaaatagaagagctcccgaaacagctatttaattgtcagtcactacacaaactatccctccctgacaacgacctgacaacacttcccgcctctattgccaacctcatcaacctacgagagctggacgtatcaaaaaacggaatccaggagtttccggagaatattaaaaactgtaaagtgctaacaatcgtagaagcctccgtgaaccccatctccaaactcccagatggtttctctcagttgcttaatctgacccagctgtatcttaacgatgcatttttagagttcttgcccgcaaattttggtagactcaccaaactccagatcctcgaattgagggaaaatcagctgaaaatgcttcctaaaaccatgaatagactgacccagctcgagcgactcgatcttgggagcaacgagttcactgaagtgccagaggtgctcgaacaactcagcggactgaaagaattctggatggatgccaatcgtctcactttcatccctggcttcatcggaagtctgaaacaactaacatacctggacgtttcaaaaaacaacatcgaaatggtcgaggaaggcatttcaacgtgtgagaatctccaggacctgctgctgtcctcaaatagcctgcagcagctgccagagaccatcggatcactaaagaacatcactacgcttaaaattgacgagaatcagctcatgtatctccctgactctatcggtggacttatctctgtcgaggagttggattgtagttttaacgaagtagaagcgctcccaagctcgattgggcagctcactaacctgcgcacatttgccgccgatcacaattatctgcagcaactcccccctgagatcggctcttggaaaaacatcaccgtcctgtttcttcactccaataagcttgaaaccctgccagaagaaatgggcgatatgcagaagctgaaggtcattaacctgagcgacaaccgacttaagaatttacctttttcctttaccaaactgcaacagttgaccgcaatgtggctgtccgacaaccagagcaagccgctgatcccactccaaaaggagactgattccgaaacccagaagatggtgctgacaaactatatgtttccacagcagcccagaaccgaggatgtgatgttcatctccgataacgaatcctttaatccaagcctgtgggaggagcaacgtaaacagcgtgcccaggttgcttttgaatgtgacgaagataaggatgagcgcgaagctccaccccgggaggggaacttaaagcgatacccaaccccttaccccgacgagttgaagaatatggttaagacagtgcagacgatcgtccataggcttaaggatgaggagactaatgaggacagtggacgagacttgaaacctcatgaagatcagcaggatataaacaaggacgtgggtgtcaaaactagtgagagcaccactacagttaagtctaaagtggatgaaagggagaaatatatgatcgggaactctgtacaaaagatctctgaacccgaggcggagatttctcctggaagcctaccggtcacagctaatatgaaggccagcgaaaatctaaaacatatagtgaaccatgatgacgtattcgaggaatctgaagagctgagcagtgacgaggagatgaaaatggccgagatgcggccaccactgatcgaaacctcaattaatcagccaaaagtcgtcgccttgtctaataacaagaaggatgacacgaaagaaaccgacagtctcagtgatgaagtgactcacaactcaaatcagaataattccaactgttcaagcccctcccgcatgagtgactctgtttcactgaatacagattcaagtcaagatacctctctctgtagtcctgttaagcagactcacattgacatcaattcaaagatacgccaggaggacgaaaatttcaattctctgctgcagaacggcgatattctgaactccagcactgaggagaagtttaaggctcatgacaaaaaggacttcaaccttcccgagtacgacctgaacgttgaggagcggctggtcctgatcgagaagtccgttgactcaaccgcaaccgctgatgatactcacaaactggatcacatcaacatgaatctgaacaagcttattactaatgacactttccagccggagatcatggagcgcagcaaaactcaggatatcgttctcggcacatccttcttgtccataaactctaaagaggaaacagaacatttggagaatggcaacaaatacccaaacctggagtcagttaacaaggtcaacggccacagcgaggaaacatctcagagcccgaaccgcaccgaacctcatgactctgactgttcagtcgaccttggaatctctaaaagcaccgaggatctgtccccgcagaagtcgggacccgtaggcagtgtagtcaagtcgcactctattaccaatatggagattggcggccttaagatctatgatatactgtctgacaatggcccccagcagccctcgacgacggtgaagattactagcgctgtggatggtaagaatatcgtccgctccaagagtgcgactctactttacgaccagccattacaagtctttaccgggtcaagtagtagtagcgacctgatatctgggacgaaggcaatcttcaagttcgatagcaatcacaaccccgaggagcctaacattattaggggaccaacctctgggcctcagagcgcaccacagatctacgggccccctcagtacaacattcagtactctagttccgccgccgtgaaagatacgctgtggcacagcaagcaaaatccccagatagaccacgctagctttcccccgcaactgctgcctagaagtgagagcaccgagaatcagtcttatgccaagcacagcgctaacatgaatttttctaaccataacaatgttcgcgctaataccgcctaccatctacatcagcgactgggaccagcccgacatggtgagatgtgggccatcagccctaacgatagactgattccggccgtgacaagatcaaccattcagcgacagtcatcagtctcatccaccgcttcagtcaatctcggggatccggggagcaccaggcgtgcccagattccagagggagactacttaagctaccgggagttccacagtgcaggacgaacgccaccaatgatgcctggatctcaacgacctcttagcgctaggacgtactccatcgacgggcctaatgcatccaggcctcagtctgctcgtccaagcattaatgagataccagagagaacgatgtcagtgagcgactttaactactcacggacatctccatccaagcggcccaacgcacgtgtcggtagtgagcacagtttgttggatccaccaggaaagagtaaagtcccacgtgactggcgtgagcaggtcttgaggcacattgaagctaaaaagttagagaaaatgccactatccaatgggcagatgggccagccactccgcccccaggccaattattcccagattcaccatccgccccaagcctctgtggcacggcatccgagccgtgaacaactgattgactatctgatgctgaaagtggctcatcagccaccatatacacagccacattgttcacctaggcaggggcacgaactagcgaaacaagaaattagggtgcgcgtcgagaaggaccccgagctggggttttcaatcagtggaggtgtcggggggcggggaaacccatttcggccagacgatgatggaattttcgtcactagagttcagcccgaagggcccgcgagcaaactcctacagcccggggacaagattattcaagctaacggatacagctttattaatattgaacacgggcaggcggtatcccttttgaagaccttccaaaacacagtggagctcatcattgttcgcgaggtgagtagttag

SEQ ID NO: 186773 - DNA, 3909 bp, synthetic construct
  misc_feature 1..3909: note = Description of Artificial Sequence: Synthetic coding sequence
  source 1..3909: mol_type = other DNA
atgaccaccaagcggagcctgttcgtgcggctggtgccctgccggtgcctgcggggtgaggaggagaccgtaaccacactggactatagtcattgctccctcgaacaagtgcctaaggaaatttttacctttgagaaaaccttagaggagttatacctagacgcaaaccaaattgaagagcttccaaagcaactcttcaactgccagtccctccacaaactgagcctgccagataatgacctgacaaccttgcctgcttccattgccaaccttattaacctccgcgagctggatgtgtccaagaacggcatccaggagttccccgaaaatataaaaaactgtaaggtcctgactatcgtagaggcatccgtcaatcctatctccaagctccccgacggcttctcccagctcttgaacctcacccagctgtacctaaacgacgcatttttggagttcctgccggccaacttcggaaggcttactaagctgcagatcctagagctgcgtgaaaatcagcttaaaatgctgcccaagaccatgaaccgcctcactcagctggagcggctggacctaggatcaaacgaattcaccgaggtgccggaagttctggaacagctcagtggcctgaaagagttttggatggacgcaaatcggctgacgtttattcctggctttatcggatcccttaaacagttgacatacctcgatgtctctaagaataacatcgaaatggttgaggagggcatatccacatgcgagaacctgcaggatcttctgttatcgtccaactccctgcagcagctacccgagaccatcggatccctgaagaacatcactactctgaagatcgacgagaatcagctgatgtatttgccagacagtattggaggtctcatcagcgtcgaagagctagattgttcctttaacgaagttgaagccctgccctcaagcattggccagctcacaaatctgcggaccttcgcagcagaccataattatctgcaacagctccctcctgagatcggtagttggaagaatataacggtgctcttcctgcactctaacaaactggaaaccctgcctgaggagatgggggacatgcagaagctcaaagtgattaacctaagtgacaatcggctcaagaatctgcctttctctttcaccaaactgcagcagttgacagcaatgtggttatcagataaccagtccaagccactaattcccctgcaaaaggagacagactccgaaactcagaagatggttctaactaactatatgttcccccaacagccaaggaccgaggacgtcatgtttatctccgacaacgaaagtttcaacccctctctgtgggaggagcagcggaagcaaagagcgcaggttgcattcgaatgtgacgaagacaaggatgagagagaggcgcctccgagagaggggaacctcaaacgctacccaaccccctatccagatgaactcaaaaacatggtgaaaacggtccagaccatagtgcaccgtctaaaggatgaagaaacaaatgaagacagcggccgggacttaaagccacacgaggatcagcaggatattaataaagatgtgggtgtgaagacgtctgagtccacaaccaccgtgaagtcaaaggttgacgaacgagaaaaatacatgatagggaatagtgttcagaagatcagtgaacctgaggcggagatttctccggggtccttgcctgtaaccgccaacatgaaagcgagcgaaaatttgaagcacatcgtaaatcacgacgacgtgttcgaagaatctgaggagctcagtagtgatgaagagatgaaaatggctgagatgcgccctccgctgattgaaacaagcattaatcagcctaaggttgtggccctatcgaataataagaaggatgatacaaaagaaacagattcactctccgacgaggtaactcacaattccaatcagaacaattccaactgttcaagcccttcacggatgagtgattctgttagccttaacacagattcatcgcaggatacctctctttgtagtcccgttaagcagacccacatcgacattaatagtaagattcgtcaagaggacgagaatttcaatagcttgctgcagaacggtgatatcttaaatagcagtacggaggagaaattcaaggctcacgataaaaaggattttaacctgcccgaatatgatttgaatgtcgaggaaaggctggtgctgatcgaaaagtctgtggatagcacagcaacagccgatgacactcacaagttggaccacataaacatgaacttgaataaactgataacgaacgatactttccagccagaaataatggagaggagcaagacacaggacatagttcttggtaccagtttcctgtccatcaattccaaggaggagaccgagcacctggaaaacggaaataagtatccaaacctggagagcgtaaacaaggtgaacggtcacagcgaggaaaccagccagtcacctaataggaccgaaccgcatgatagcgactgctcagttgacctggggatatcaaaatctacagaggatcttagccctcagaaatcaggaccggtgggatcagtcgtgaaaagccattctatcacaaatatggaaatcggggggctgaaaatttacgacatactctctgataatgggccacagcagccttccaccacggtcaagattacaagtgcagtagacggaaagaacatagtccgcagcaagtctgccactttgctgtacgatcagccactgcaagtgttcacgggaagctcatcatcttctgatctaatctctggtaccaaggctatcttcaaattcgactccaaccacaatccagaagagccgaacatcatccgcggacccacatccggacctcagtcagcccctcagatctacgggcctccacagtacaatatccagtattcctcctcggctgccgtaaaggacaccctgtggcactctaaacagaatccgcaaattgatcatgcatcctttcctccccagctcctcccccgatcagagtcaactgaaaaccagtcctatgcgaagcactcggccaacatgaatttctcaaatcacaataatgtccgagccaatacagcctaccacctccaccaacggttggggcccgcgcgtcatggtgagatgtgggccatttctcccaatgatagactgattcccgctgtcacacgatccacaatacagcgacagagctcggtcagcagtactgcatctgtaaatcttggggatcccggctcaacccgacgagcccagatccccgagggtgattatctgagctaccgggagttccactcagccggcaggaccccacctatgatgcctggctcccagcgacccctcagtgctcggacatacagtatcgacggccctaacgcaagtagaccacaatccgcgagaccctcaattaacgagatccccgaaagaactatgagcgtctccgatttcaactactccagaaccagtccttccaagcgacccaacgctcgcgtgggctctgagcattccctgctggacccaccgggcaagtctaaagtgcctcgggactggagagagcaggtactccgtcacatagaggcaaagaagctcgagaaaattagggtgagagtggagaaagatcctgagttggggtttagcattagtgggggtgtgggcggacgaggcaatccgtttaggccagatgacgacggcatcttcgtgacacgcgtccaacctgaagggcccgcgagtaaattgcttcagccgggtgataaaataatacaggcgaacgggtactcttttatcaacatagaacacggccaggccgtgtctctgctgaagacgttccagaacacggtggaactgatcatcgtgcgggaggttagttcttag

SEQ ID NO: 186774 - DNA, 4260 bp, synthetic construct
  misc_feature 1..4260: note = Description of Artificial Sequence: Synthetic coding sequence
  source 1..4260: mol_type = other DNA
atgaccaccaagcggagcctgttcgtgcggctggtgccctgccggtgcctgcggggcgaagaggaaacggtgaccacactggactactctcactgttctttggagcaggttcccaaagagatatttaccttcgagaaaacattggaagagctgtacctcgatgccaaccaaatagaagagttgcccaaacagctgtttaattgccagtctttgcacaaactatccttgccagataatgacctgaccacattgcctgcctcaattgccaatctcatcaacctccgagagcttgacgtgtccaagaatggaatccaagagtttcccgagaacattaaaaattgtaaagtacttacaattgtggaagcctcggtaaatccaatcagcaagctcccagatggctttagccagctgttgaatctgactcagttgtatctgaatgacgccttcctggagttcttgcctgctaattttggcaggcttacaaagctgcagatcctggaactgcgggaaaatcagctcaaaatgctgcccaaaacaatgaacagacttacccagcttgagcgcctggatctggggagcaacgagttcacagaagttccagaagtcttggagcagctctccggcctcaaggagttctggatggatgcgaacaggttgacgtttattccgggtttcataggttcactaaaacagctgacctatctggatgtaagcaagaacaacattgagatggtcgaagaggggattagtacctgcgaaaacctccaagacctgttgctgtcatccaacagccttcagcagctgcccgaaacaatcggaagcttgaaaaacattacaactttgaagattgacgagaaccaactaatgtacctccctgattcaatcggtggtttgatttccgtagaggagctggactgctcgtttaatgaggtggaagcccttcctagctcaatcggacagcttaccaatcttagaaccttcgccgcagatcataactacttacaacagctacctcctgaaatcggtagttggaagaacatcacggttctctttctgcacagtaacaaattggagactcttccggaggagatgggtgacatgcaaaagcttaaagtcatcaacttgagcgacaataggctcaagaatctgccatttagtttcacaaagctccaacagctgactgctatgtggctgagcgacaaccagagcaaacctctgattcccttgcagaaggagacagacagtgagacacaaaaaatggttctgactaattacatgtttccccagcagccccggacagaagacgtgatgttcataagtgataatgagtctttcaacccttctctgtgggaggaacagagaaagcaacgcgcgcaggtcgcctttgagtgcgatgaggataaagatgaacgcgaagctccccctagagagggtaatcttaagcgttaccctacaccgtaccctgacgagctcaaaaatatggtgaaaacggtgcagaccatcgtgcataggctcaaagatgaggaaaccaatgaggattcgggacgcgatctgaaacctcatgaagatcagcaggacataaacaaagatgtgggagttaagacatctgagtctactactacagtaaagtctaaggttgatgagcgggaaaagtacatgatcggtaactcagttcaaaagatcagcgaaccggaggcggaaatcagccccgggtcccttcccgtgacagctaatatgaaggccagcgagaatctcaagcatatcgttaatcacgatgacgtgtttgaggagagtgaagaactgagtagtgatgaggagatgaaaatggcggagatgaggccaccactcattgagacaagcattaaccagccaaaggtggtcgcgctgtcaaataacaagaaggacgatactaaggaaaccgattcgctaagcgatgaagtgactcacaatagcaatcagaacaattcaaattgctcatccccatccagaatgtccgactccgtatctctaaacaccgattctagccaggacacaagcctgtgcagcccagtgaaacagactcatattgacatcaattccaagattaggcaagaagatgaaaattttaactcccttctgcagaatggtgacatacttaacagctccaccgaagaaaagtttaaagcccatgacaaaaaggactttaacctgcccgaatacgatttgaacgtagaggagcggttagtacttatcgagaagtcagtagatagtacagccacggcagacgatacacacaagctcgaccacatcaacatgaatctgaacaagttgattacaaatgatacattccagccagaaattatggaacgaagcaaaactcaggacatcgtattggggacaagctttctgagtattaatagcaaagaagagactgagcatctggagaatggaaataagtatccgaatttagagtctgtgaacaaggtgaatgggcactcagaagaaacgagccagtctccgaaccgtacggagccacacgattccgactgctcagtggacttagggatctccaagtccacagaagacttgagcccacagaagagcggacccgttggcagcgttgtgaagagtcactctattactaatatggagattggaggacttaaaatctatgacatcctgtcagacaatggtcctcagcagccttctacaacagtgaaaatcacatctgccgtagacggcaagaacatcgtccgctctaagagtgccacccttttatacgaccagccccttcaggtgttcacgggatcctcatcctccagcgatctcattagtgggacaaaggcgatcttcaaatttgatagcaaccataaccccgaggagcctaatataatccgaggcccaactagcggcccccagtccgctccgcagatctatggtcccccccagtataacattcagtacagttcttcagcggccgtgaaggataccttatggcactccaaacagaacccccagatagatcacgcctccttccctcctcagctgctgcctcgcagcgaatctactgagaaccagagttacgcaaagcacagcgcgaatatgaacttcagcaaccataacaacgtaagggctaacaccgcataccacctacaccagagactgggccccgcaaggcacggtgagatgtgggctattagtcccaatgatcggctgatacctgccgtgaccagatccactatccagcggcagagtagtgtatcctccacagcatcagtgaacctgggcgacccgggcagtacccggagagcccagattcctgagggcgactacttaagttacagggaatttcatagcgctggccgtacaccacctatgatgcctggatcacagagaccactgtcagcacgaacttatagcatcgacggtccaaacgcctcccgcccacaatcggcaagacccagcatcaacgagatccccgagagaactatgtcagtgtccgacttcaactatagccggacgtccccctctaaacgacctaacgcaagagtggggagcgagcactcactgcttgatccccctggcaagtcaaaagtgccacgggactggcgggagcaggtcttgaggcacatagaggcgaaaaagctcgagaaatctatgctgtcccgcagttttaatagcaactttaccactgtttccagctttcactgcggctcttctagggacctgcacggaagtcagggcagcctggccctcagtgtggccgatcgccgagggagcggcggccacatctttcggatgcctttgagtaatggacagatgggccagcctttacgcccccaggctaactattcccagattcatcatccacctcaggccagcgtggcgcgccatcctagtcgggaacagttgatcgattacctcatgctcaaggtagctcaccaacctccgtatacacagccccactgctcaccgcgacagggccacgagctcgccaagcaagaaattagggtgagagtagaaaaggacccggaactgggctttagcatctcaggaggagttggggggagaggaaatccatttcgcccagacgacgacggtattttcgtcacccgtgtccagccagaaggcccggcttccaagctgctacaacctggcgacaaaattatccaggcaaatggttattccttcattaatattgaacacggacaggccgtgagtttactgaagacctttcaaaacactgtcgagcttatcatcgtgcgcgaggtaagcagttag

SEQ ID NO: 186775 - DNA, 1158 bp, synthetic construct
  misc_feature 1..1158: note = Description of Artificial Sequence: Synthetic coding sequence
  source 1..1158: mol_type = other DNA
atgaaggaggaggagggcttccccgaggacgaggccaccgagagcgaaaccctgagtctggttaaggaactcgacgccttccccaaagtaccagagtcctatgtagaaaccagtgcctcggggggaaccgtgtctcttatcgcctttacaaccatggccctcctgaccatcatggagttctccgtctatcaagacacctggatgaaatacgagtatgaggtggacaaggatttcagctccaagttgcgcatcaatatcgacatcaccgttgcaatgaagtgccagtacgtgggcgcggacgtcctggatttagctgagacaatggtggctagcgctgacgggttggtctacgagcccacggtttttgacttgagcccccagcaaaaggaatggcagaggatgttacagctgatccagtcccgactgcaggaagagcattccctccaggacgtcattttcaaaagcgccttcaaatctaccagcaccgccctgcctccgagagaagacgacagctcacagtcaccaaacgcatgccgcattcacggtcacctgtacgtgaacaaggtggcagggaactttcatatcacggtgggaaaggcaatcccccatccaagggggcacgctcacctagctgccctggtgaaccatgaaagctataacttctcccaccggattgatcacttgtcctttggggagctcgtgcctgctatcatcaatcccctggatggcaccgaaaaaattgcaatcgatcataatcagatgttccaatatttcattacggtcgtgcccacgaaattgcatacctacaaaatatctgcggatacgcatcaattttccgtcaccgagcgggagaggattattaatcacgccgccgggtcccacggcgtgagcggtatttttatgaagtatgatctcagctcactgatggtcaccgtgactgaggagcatatgcccttttggcagttttttgttaggttgtgcggcatcgtgggaggtatcttttctaccaccggaatgctgcatggcatcggaaaattcattgtcgaaatcatctgctgtcgctttcggctcggctcatacaaacctgtgaacagcgttcccttcgaggatggccataccgacaaccatctgccgctacttgagaataacacccactag

SEQ ID NO: 186776 - DNA, 1134 bp, synthetic construct
  misc_feature 1..1134: note = Description of Artificial Sequence: Synthetic coding sequence
  source 1..1134: mol_type = other DNA
atgcggcggctgaaccggaagaagaccctgagcctggtgaaggagctggacgcgtttccaaaggttccagagtcttacgtcgagacatccgccagcggaggcactgtgtccctgattgcatttaccacaatggcattgctcactataatggagttttctgtgtatcaagacacttggatgaagtatgagtacgaagtggacaaggacttttcgtcgaagctgcgcatcaacattgatattactgtggcaatgaaatgccagtatgtcggggccgatgtgctggatctcgcggaaactatggtggcgagtgctgacggactcgtgtatgaaccaaccgtgttcgacctgtctccccagcagaaggaatggcagagaatgcttcagctgatccagtctagactgcaggaggagcacagtctgcaggacgtgatctttaagtctgcttttaaatccacctcgacggcattgccaccgcgggaggacgacagcagtcagagcccaaacgcttgcagaattcatggacatctgtacgtgaacaaagtggcaggcaattttcacataaccgtaggaaaggctatcccccacccacggggacatgcccatttggccgccctcgtcaaccatgagagttataactttagccacagaattgaccaccttagctttggagagttggtgcctgccattatcaaccccctcgatggaaccgagaagatcgccatagatcacaaccaaatgtttcagtactttattaccgtggtgcctacgaagctgcacacctacaagattagcgccgacacacaccagttctctgtgaccgagagggagagaatcattaatcacgccgctggctcgcatggtgtgagcggaatctttatgaaatacgatctgagctccctgatggtgaccgtgaccgaggagcatatgcccttctggcagttctttgttagactatgcggaatagtaggtggcattttctctactaccggtatgctccacggaattggaaagtttattgtcgaaatcatctgctgtcggttccggctgggaagttacaaacctgttaattcagtgcccttcgaggacgggcacaccgacaatcacctgcctttgctcgaaaataatactcattag

SEQ ID NO: 186777 - DNA, 663 bp, synthetic construct
  misc_feature 1..663: note = Description of Artificial Sequence: Synthetic coding sequence
  source 1..663: mol_type = other DNA
atgcggcggctgaaccggaagaagaccctgagcctggtgaaggagctggacgcattccctaaggtgcctgagagctacgtggagacatctgcaagcggcggaactgtttcactgattgcattcactacaatggccctgttaaccataatggaattctccgtatatcaagacacctggatgaaatatgagtacgaggtggacaaggacttcagtagcaagcttcggatcaacatcgacataactgttgccatgaagtgccagtacgtgggcgccgatgtcttagatttagccgagactatggttgcctcagccgacgggttggtgtatgagccgaccgtgttcgacctgtcccctcagcagaaggaatggcaacgcatgctgcaactcatacagtctcgcttgcaggaggaacattctctacaggacgtgatatttaaatcggcctttaaatctaccagtaccgctttgcccccccgcgaagatgatagctcccagagccccaatgcgtgccgcattcacggccacctgtatgttaacaaagtggccggaaactttcatattactgtggggaaagccattcctcatccacgaggtcacgcacacctggcagcattagtgaatcacgagtcctataacttttcacaccggatagatcacctatag

SEQ ID NO: 186778 - DNA, 216 bp, synthetic construct
  misc_feature 1..216: note = Description of Artificial Sequence: Synthetic coding sequence
  source 1..216: mol_type = other DNA
atgcggcggctgaaccggaagaagaccctgagcctggtgaaggagctagacgcctttccaaaagttcctgaatcttatgtggagacatccgctagtggtgggactgtatcccttattgcatttaccaccatggcgctcctgaccataatggagttttcagtgtatcaggacacttggatgaagtatgagtacgaggtggataaagacttttcctag

SEQ ID NO: 186779 - DNA, 528 bp, synthetic construct
  misc_feature 1..528: note = Description of Artificial Sequence: Synthetic coding sequence
  source 1..528: mol_type = other DNA
atgcggcggctgaaccggaagaagaccctgagcctggtgaaggagttggatgccttccctaaggtgccggagtcgtacgtggaaacatccgcatcgggtggcacagttagcctcatcgctttcactacgatggcacttttaactatcatggaatttagtgtataccaggatacatggatgaagtatgagtatgaggtggacaaggacttctcctcaaaactgcggattaacattgacatcaccgtggctatgaagtgtcagtatgtaggcgcagatgtacttgatctggcagaaacaatggtggccagtgccgacggtttagtgtatgaacctaccgtgtttgatctctcaccacaacagaaagaatggcagaggatgttacaattgatccagtcccgccttcaggaggagcactcgctgcaagacgtgatattcaagtcagccttcaagagtacttcgacagctctgcctccaagagaagacgacagctcacaatctcctaacgcctgccgtattcacggacattag

SEQ ID NO: 186780 - DNA, 1158 bp, synthetic construct
  misc_feature 1..1158: note = Description of Artificial Sequence: Synthetic coding sequence
  source 1..1158: mol_type = other DNA
atgcccgagtacaagggccggaccgtgctggtgcgggacgcccaggaggggtccgtaacacttcaaattcttgacgtgagattagaagaccagggctcctatcgctgcttgattcaagtgggcaatttatccaaagaggatacagtcatcctgcaagtggccgcaccctctgtagggtcactgagccctagtgccgttgccctggctgttatcttacccgtgttggtcctgctgatcatggtctgcctgtgccttatatggaagcagcggagggcgaaggaaaagctgctttacgaacacgtaacagaggtggataacctattatctgatcatgccaaggagaaaggcaagctccacaaggccgtaaaaaagctcagaagtgaattgaaactgaaaagggctgccgccaactccggatggcggcgagcaagattgcactttgtggccgttaccctagatccggacacagcgcatccaaagcttatattatcagaggatcaaaggtgtgtgcgcctgggagacaggagacagccagtacctgataatccccagagatttgacttcgtggtctctatactcggctccgaatattttacaaccggatgtcactattgggaggtgtacgtaggagataaaactaaatggatccttggcgtgtgctctgaatcagtgagccggaaaggtaaggtgacggcttccccagccaatgggcattggcttctgcgccagtcaagagggaacgaatatgaagctcttacatctccccagactagctttcggctgaaggagccccccagatgtgtgggtattttcctggactatgaagccggcgtaataagtttctataatgttacaaacaaatcgcatatctttactttcacccacaacttctccgggcctctaaggcccttctttgaaccttgtttacacgatggcgggaaaaacaccgcacctctcgtgatctgtagcgagttgcacaagtcagaagagtccatcgtgccaagacccgagggcaaaggacatgctaacggggacgtaagcctgaaagtaaattcctctttgctaccgcctaaagctcccgaacttaaggacatcatcctatccctgccccccgaccttggtccagcactgcaggagctgaaagctccgagtttttag

SEQ ID NO: 186781 - DNA, 1428 bp, synthetic construct
  misc_feature 1..1428: note = Description of Artificial Sequence: Synthetic coding sequence
  source 1..1428: mol_type = other DNA
atggagatggccagcagcgccggcagctggctgagcggctgcctgatccctttggtctttctaagattgagcgtgcacgtgtccggacacgcaggggatgctggcaaattccatgtggcattactcggaggcacagccgaactcttatgcccgctgagtctgtggccgggcacggtcccaaaagaggttcggtggctgcgtagtccattcccgcagaggtcgcaggcagtacacatcttcagggacggcaaagatcaggatgaggacctgatgcctgagtacaagggccggaccgtactggtgagggacgcccaggagggctcagtgaccttacagattttggatgtgcggcttgaggatcaagggagctacaggtgtcttattcaggtggggaatctgagcaaagaggacaccgtcattttacaagtggcagccccaagcgtgggatctctctccccctccgccgtcgcgctggcagtgatacttccagtgcttgtcctgttgataatggtgtgcctctgcctgatctggaaacagcggcgagcaaaagaaaagctgctttatgagcatgtcactgaggtggacaacctgctcagtgaccacgccaaggagaagggcaaactgcataaggcagttaagaagctgaggtctgaattgaagcttaaacgagctgcggccaactccggctggcggagggctcggcttcattttgtcgccgtgacgctggacccggacaccgcacacccgaagttaattcttagcgaggaccagcggtgcgtcaggctgggagacagaagacagccggtgccggacaatcctcagcggtttgactttgtggtctctatcctgggtagcgagtactttaccaccggatgtcattattgggaagtttacgtgggagataagacaaaatggattctcggcgtgtgttcggaaagcgtgagccggaagggaaaggtaacagcctctcctgctaacgggcattggctgttgcggcagagccgcggaaatgagtacgaagctcttactagcccccagactagcttccgcctgaaagagccccccagatgcgtggggattttcctggactacgaggctggcgtcatctcgttctacaacgtgactaataagtcacatatcttcacctttacacacaatttttctggaccactgcgtccattctttgaaccatgtcttcatgacggaggaaaaaacactgctcctctggtcatttgtagcgagcttcataaaagcgaagagtctatcgtcccaagacccgagggcaagggacacgccaacggggacgtgtccttaaaagtgaattcgagcttactgcccccgaaagcccctgagctaaaggacatcatcctgagtcttcccccagatttgggcccagcgctgcaggaactgaaggccccctccttctag

SEQ ID NO: 186782 - DNA, 1428 bp, synthetic construct
  misc_feature 1..1428: note = Description of Artificial Sequence: Synthetic coding sequence
  source 1..1428: mol_type = other DNA
atggagatggccagcagcgccggcagctggctgagcggctgcctgatccccctagtgttcctgagactgagtgtacatgtgtcgggccatgccggcgatgctgggaaatttcacgtagccctgcttggagggacagccgagctcctgtgccccctgtccctatggccaggtacagtgcccaaggaagtcaggtggcttagatcaccgttcccacagcggtctcaggccgtccacatctttagagatgggaaggatcaagatgaggaccttatgcctgagtataaggggcgtaccgtgttagtaagagacgctcaggaaggtagcgtgaccctacaaattcttgatgtgcggctggaagaccaggggtcttatcggtgtcttattcaggtcggcaatctgtctaaggaagatactgtgatccttcaggtggcagcccccagcgtgggatctctcagtccttccgcggtggcacttgctgtgattcttcccgtgctggtgctcctaataatggtgtgtctgtgcctcatatggaagcagcgacgcgccaaggaaaagctcctgtatgagcacgtgacagaagtggataacttgctgtccgatcatgcaaaggagaaagggaagctgcacaaagctgtcaagaaactgaggtccgaactcaaactgaaacgtgccgctgccaattcaggctggagaagagcccgactccactttgttgcagttacgctggatcccgacacagctcatcccaaattgatcctctccgaggaccaacgctgcgtgcgcctaggagatcgccgtcagccggtgccagataacccgcaacggttcgatttcgtggtgtcgattctaggcagcgagtattttacaacaggctgccactactgggaagtgtatgtaggagataaaactaaatggatcctgggggtatgttcagaaagtgtaagccgaaagggaaaggtaaccgcgtctccagcaaacggacattggcttttaagacagtctaggggcaatgagtacgaggctctaacttccccccagacttcctttcgactaaaggaacctccccggtgcgtgggaatctttttggactacgaagccggagtgatcagcttttataacgtgaccaataagtctcatatattcacctttacacataacttcagcggaccactcagaccatttttcgagccctgcttgcacgacgggggcaagaacaccgccccattagtgatctgtagcgaactccacaaatcagaagaatctatcgtgccccgccccgagggaaaaggacacgcaaatggcgacgtgtccctgaaagtgaactcctctctgttgccaccgaaagcccctgaacttaaggatataattttgagccttcctccagacctgggcccagctttacaagaactcaaggctccctccttttag

SEQ ID NO: 186783 - DNA, 2595 bp, synthetic construct
  misc_feature 1..2595: note = Description of Artificial Sequence: Synthetic coding sequence
  source 1..2595: mol_type = other DNA
atgaccaccgagaagagcctggtgaccgaggccgagaacagccagcaccagcagaaagaggaaggcgaggaagcgatcaatagcggccaacaggagccacagcaggaagagagctgccaaacagccgcggaaggggacaattggtgtgagcagaaattaaaggcctcgaacggcgacactccaacccacgaagatctcaccaaaaacaaggaaagaacgagcgaaagtaggggattgtcgagactatttagctcattccttaagaggccgaagagccaggtgagcgaggaggagggcaaagaagttgagtcagacaaagaaaagggggagggcgggcaaaaagaaatcgagtttggtacctctctggacgaggaaatcatcttaaaggctcctattgccgctccagaacccgagttgaaaacagacccctcactcgatctccattcccttagctcggctgaaacccaaccagctcaggaggagctccgggaggatcccgacttcgagattaaggaaggagaagggctggaggaatgttctaaaatagaggtgaaagaggagagccctcagagcaaagccgagacagaactgaaggccagccagaagccaatccgtaaacacagaaatatgcactgtaaggtgagtctgctggacgataccgtctacgagtgtgtggtcgagaagcacgccaagggccaggatctgctgaagagagtctgtgaacacttgaatctcttggaagaagactactttggtttagctatatgggataacgccacaagcaagacatggctcgactctgctaaggagatcaaaaagcaggtgaggggcgtgccatggaactttacctttaacgtgaagttttatccacccgaccccgcacagctcaccgaggacattacccggtactatctatgtttacaattgaggcaagatatcgtggcaggaaggctcccatgctcctttgccactcttgccctactgggttcctacactatccaaagcgaattaggtgattacgaccccgagctgcatggcgtcgactacgtgagcgattttaaactggcccctaatcagacgaaggaactggaagaaaaggtgatggagcttcataaaagttatagatcaatgacgcccgcgcaggccgacctagaatttcttgagaacgctaaaaagctctcgatgtatggagttgatctgcacaaagctaaggacctggagggcgtggatatcattctgggagtgtgttcaagtggtcttcttgtctataaggataaacttcggattaacagattcccttggcccaaggttctgaagatttcttataaacgatccagcttctttatcaagatcagacctggtgaacaggagcagtatgagtctaccattggttttaagttgccatcctacagggccgcaaagaagctctggaaagtgtgtgtcgagcatcataccttcttccgactgacaagtacagatacgatacctaaatcaaagttcttggccctcggttctaagttccgatactccgggcggacacaagcccagaccaggcaagcttctgccttgattgaccgtcccgcgccccactttgagcggactgccagtaagagagcatcgagatccctggatggcgctgctgcagtggacagtgctgatcgttcccccaggccgaccagcgctccagcaatcacacaggggcaagtcgctgaagggggcgtgctggacgctagcgctaagaaaactgttgtccccaaggcgcagaaggaaaccgtcaaagccgaggtgaaaaaagaggatgaacccccagagcaggccgagcccgagcccacagaagcctggaaggttgagaaaacgcacattgaggtcactgtacctacgagcaatggggaccagactcagaaactagcagagaagactgaggacctgattcggatgcgtaaaaagaaaagggaacgactggatggggaaaacatctatatccgccacagtaacctcatgctcgaggacttagataagagtcaggaagaaattaagaagcaccacgcttccatctcggaactgaagaaaaatttcatggagtccgtgccagaaccgcgccctagtgaatgggataagagactcagcactcattctccctttcgcactctcaatatcaatggccagatccccaccggtgaaggccctccactcgtgaaaactcagaccgtgacaatcagcgacaacgctaatgccgttaaatctgagattccaacaaaggacgtaccgatagtgcacacggagaccaaaacaatcacctacgaggcagcacagaccgacgacaactcaggggacctcgatccaggcgtcctgttgacagctcagacaatcacatcggaaaccccgtcgagcactactactacccagataactaagactgtgaagggaggcatcagcgagacccgaattgaaaagaggattgttattacaggcgacgcagacattgatcatgatcaggtgctggtgcaagctattaaggaggccaaagagcagcaccccgatatgagtgtgaccaaggttgtggtgcaccaggaaaccgagattgcagacgagtag

SEQ ID NO: 186784 - DNA, 2328 bp, synthetic construct
  misc_feature 1..2328: note = Description of Artificial Sequence: Synthetic coding sequence
  source 1..2328: mol_type = other DNA
atgaccaccgagaagagcctggtgaccgaggccgagaacagccagcatcagcaaaaagaggagggcgaggaggctataaactctggtcagcaggagccacaacaagaagaatcctgccagaccgctgccgagggtgacaactggtgtgaacagaaactcaaggccagcaacggcgatacaccgacccacgaggacctgactaaaaacaaggaaaggactagtgagagtaggggcctgagtcgactgttttcctcctttctcaagaggcccaaatcacaggtttcagaagaggaaggaaaagaggtggaaagtgataaagaaaaaggcgagggaggacagaaggagattgaattcggcacatctttggacgaagagattatactgaaggctcctattgcggctcccgagccggaactcaaaaccgacccttcgctggatctgcatagtttgtcttcagctgagacccagcctgcccaggaagaacttcgcgaagatcctgacttcgagattaaagaaggagaagggttagaggagtgctcgaagattgaggttaaggaagaatcaccccaatcgaaggctgaaacagaactaaaggcctctcagaagcctatccgaaaacataggaacatgcattgtaaagttagtctgctcgacgatactgtttacgaatgcgtcgtagagacatggttagactctgccaaagagattaagaaacaggtgcggggagtaccatggaactttacctttaacgtgaagttttacccccccgatcctgcccagcttactgaagatataacccgatattatttgtgcctgcaacttagacaggatatcgtcgccggacgactcccttgcagctttgctacgctcgctctcctcggatcatatacgattcagagcgaacttggagactatgatccagaactgcacggtgtggattatgtctcagacttcaaactggcccccaaccagaccaaagaattagaagagaaagtgatggaactgcataagtcctacagatcaatgactccagcccaagccgatctcgagttcctggagaacgcaaagaaactctccatgtacggtgtagaccttcacaaggccaaggacctagagggagtcgatattatccttggtgtgtgctcctccgggctgcttgtttacaaggacaaactgaggataaacagatttccatggcccaaagtcctgaagatttcatataaaaggagtagcttctttatcaaaatcagaccaggtgaacaggagcagtatgaaagtaccattggttttaagctgccctcctatcgtgccgccaagaaattatggaaggtgtgtgtggaacatcataccttcttccggctgacaagcacggacactatcccaaagtctaagtttctcgcattggggagtaagtttagatactctggacggacccaggcccagacccggcaggcctctgctctgatcgaccggcctgcgccccatttcgaacgaacagcttccaagcgggcgagccgaagcttagatggggccgctgcggtagactctgcggatagaagtccccgacctaccagcgctcctgccattactcaggggcaggtcgcagaaggaggcgtcttggacgcaagtgccaaaaagacagtcgttccgaaggctcagaaggagacagtcaaggccgaggtgaagaaggaggatgagccacctgaacaggcagagcccgagcccacagaggcatggaaagatttagataagtcccaggaagagatcaagaaacatcatgcctccatctcggagctgaaaaagaacttcatggaatctgtgccagaaccccgcccatcagagtgggacaagaggctgtccacgcactcacctttcaggactctgaacatcaacgggcagatcccaacgggcgagggccccccactagtgaaaactcagaccgtaaccatcagcgataacgcaaatgccgtgaaatcagagataccaacaaaggacgtgccaatagtccataccgagaccaaaaccattacttacgaggctgcacagacagacgacaactcgggcgaccttgaccctggcgttttactaacagcacaaactatcacctctgaaacaccttcttccactactaccactcagataactaagaccgtgaaaggggggattagcgaaacgcgcattgagaaacgtatcgtaatcactggtgacgccgatatcgatcatgatcaggttcttgtgcaggcaataaaggaggctaaagagcagcatcccgacatgtccgttaccaaggttgtagttcaccaagagacagagattgccgacgaatag

SEQ ID NO: 186785 - DNA, 1926 bp, synthetic construct
  misc_feature 1..1926: note = Description of Artificial Sequence: Synthetic coding sequence
  source 1..1926: mol_type = other DNA
atgcactgcaaggtgagcctgctggacgacaccgtgtacgagtgcgttgtcgaaaaacatgccaagggtcaggacctgctgaagcgagtttgcgagcatctgaacttgctcgaagaggattattttggactggcaatttgggacaacgccacaagcaaaacttggctcgactccgcaaaggaaatcaagaagcaggtgagaggtgtgccctggaactttacattcaacgtgaagttctatcctccggaccctgcccaacttaccgaggacattactagatactacctgtgtttgcagttacggcaggatattgttgccggccgactgccatgctctttcgctactcttgccctgttaggaagctacactatccaaagtgaactgggggactacgaccccgagctgcatggagtggattatgttagtgattttaagctcgctccaaatcagacaaaagagctggaggagaaagtcatggaactgcataagagctatcgttccatgactcccgcccaggctgatctggaatttctcgaaaacgccaagaagctttcaatgtatggtgtcgacctccacaaagctaaagacctagagggcgttgatatcattctgggagtctgttccagtggactgctagtctacaaggataagctcagaatcaatcgatttccctggcctaaagtgctcaaaatctcctacaagagaagcagcttctttatcaagatcaggccgggcgagcaagagcagtatgagtccaccattggattcaagcttccatcgtaccgcgctgccaagaagctgtggaaggtgtgtgtggagcaccacactttcttccgtctaaccagcactgacaccatccctaaatccaaattcctcgccttgggctccaagtttcgatacagcggacgcacccaggctcagacacggcaggcttctgctttaattgacagacctgcaccccacttcgagcgtactgcctcaaaaagagccagccgaagtctggatggagcggcagctgtggacagcgctgaccggtctcctcgacccacgtcagcgccggcaataacccagggacaagtcgccgaaggaggagttctggacgcttcagctaagaagactgtggtgcccaaagcccagaaggagactgtcaaggccgaagtaaagaaggaagatgaacctccagagcaagctgaacccgaaccaacggaagcatggaaggttgagaaaactcatatcgaggtgacggtgcccaccagtaatggcgaccagacacaaaaaaaacgggagcgcttggatggggagaatatctacataagacacagcaacctgatgctggaagacttggacaaaagccaggaggagatcaaaaagcaccacgctagtatttccgagttaaaaaagaatttcatggaatctgtacctgagccccgcccatctgaatgggacaagaggctttccacacatagtccattcaggacgctgaatatcaacggtcagattccaacaggcgaggggccccccctcgtgaaaacacagaccgtgacgatttctgataacgccaacgctgtgaagagcgaaattccgacaaaagatgtccctatcgtccacaccgaaaccaaaacaattacctacgaggctgcacagaccgatgacaacagtggcgatctggaccccggtgtgctactgactgcccagaccatcacatctgagactcctagttctactaccaccacacagatcaccaaaacggtgaaaggggggatctctgagacccgaattgagaagcggatcgtgatcaccggggatgccgacattgaccatgatcaggtcctcgtgcaggccatcaaagaggcaaaagagcagcatccggacatgagcgttacgaaggtggtggtgcaccaagaaacggagatcgccgacgagtag

SEQ ID NO: 186786 - DNA, 2496 bp, synthetic construct
  misc_feature 1..2496: note = Description of Artificial Sequence: Synthetic coding sequence
  source 1..2496: mol_type = other DNA
atgaccaccgagaagagcctggtgaccgaggccgagaacagccagcatcagcagaaggaagagggagaggaggccattaactccggtcagcaggagccccaacaagaggaaagttgccaaactgctgccgaaggtgataactggtgtgagcaaaaactaaaggcatccaacggcgacaccccaacacatgaggacctgacaaagaacaaagaacgcacctccgagagcagggggctgtcccgactgtttagttcattcctgaagcgacctaagtcacaggtgagtgaggaggaggggaaagaggttgagagcgataaagaaaagggtgaggggggtcagaaggaaattgagttcggaacgagtctcgatgaagagatcattctgaaagcccccatagccgcccctgagcctgaactgaaaacagacccatccttagacctgcatagcctatcaagcgccgagacgcagcctgctcaggaggaactccgcgaggatccggactttgagattaaggaaggtgagggtctagaggagtgctcgaagatagaagtcaaggaagagagcccccaaagcaaggctgagactgagctcaaggccagtcagaagcccattagaaagcaccgtaacatgcactgtaaggtttctctgctcgacgacaccgtgtatgaatgcgtggtggagaagcacgctaaggggcaagacctgcttaagcgagtgtgcgagcatctgaatctcttggaggaggattactttggactggccatctgggacaacgccactagtaaaacttggctcgacagcgccaaagagatcaagaagcaggtcagaggtgtcccttggaattttacctttaacgtgaaattctacccccccgacccagctcagttgacagaggacatcactcgatactacctctgcctccaattaaggcaggatattgtggccgggcggctgccatgctcttttgctacactcgctctgctcggatcctataccatccaatctgaactcggcgactacgatcctgagctgcatggggtcgactatgtcagcgacttcaaactggcacccaaccagaccaaggaactggaagagaaggtaatggagctgcacaaaagctaccggtctatgacgcctgctcaggccgatttagaatttctcgagaatgctaagaagctctccatgtatggggtcgacctgcataaagctaaggaccttgaaggagtggatatcatactgggggtctgcagctccggcctgctcgtttataaggacaaactgcggatcaacagattcccctggcctaaggtcctgaagattagctacaaaagaagcagtttttttattaaaatcagaccaggagagcaggaacagtacgaaagcaccattggctttaagttgccatcataccgggcggctaagaaactgtggaaagtttgtgtggaacaccataccttttttagactgactagcacagatactattcccaagagtaagtttctggcgctgggatcaaaatttaggtattccggcaggacacaggcccaaacccgacaggccagcgcgctcatcgacaggcccgcaccacacttcgaacgcaccgctagcaagcgcgcatctcgatctctcgatggggccgccgccgtggattctgcggatcgttctccccgtccaacatcggcgccagcaataacacagggacaggtcgctgagggaggggtgctggacgcaagcgctaagaaaacggtcgtccccaaggctcaaaaagagaccgtcaaagccgaggtgaagaaggaggacgaacctccagaacaagccgagcccgaacctactgaggcctggaagaagaagcgcgagcgcctcgacggagagaacatttacattagacattccaatctgatgctggaggatttggataagagccaggaagaaatcaagaaacaccatgcgtccattagtgaactgaagaagaattttatggagtcagttcccgaacctcggcccagtgagtgggataagagactatctactcactccccattccgcacgctcaacataaacgggcagattcctacaggagagggtcctccattggtgaaaacccagaccgtgaccatcagcgataacgccaatgccgtcaaatccgagatcccaactaaagatgtacctatcgttcacactgaaacaaagacaatcacctatgaggctgcccagactgatgataatagcggtgatctggatcctggcgtactcctcactgcccagaccattacctctgaaacgccgtcatccaccactactacccaaataaccaagactgtgaaaggcggcatctcggagacacggatcgagaagagaattgtcataactggcgatgccgatattgaccacgaccaggtgctggtgcaagccatcaaagaggcaaaggaacaacaccctgatatgtccgtgacaaaagtggtcgttcatcaggagactgaaatagcagatgagtag

SEQ ID NO: 186787 - DNA, 2484 bp, synthetic construct
  misc_feature 1..2484: note = Description of Artificial Sequence: Synthetic coding sequence
  source 1..2484: mol_type = other DNA
cgggcccgggccgcccggagccagaacgccgtgggccccgtgcccgctgcaccttccccagagaaatctttggtgaccgaggctgagaactcacagcaccagcagaaggaggagggagaggaggccataaactctgggcagcaggaacctcagcaagaggagtcttgtcagactgctgcagagggggacaattggtgtgagcagaaactgaaggcttcaaacggtgacacccccacccacgaggacctcactaagaacaaggagcgtacctctgaaagcaggggcctgtcgcgcctgttttcaagcttccttaaaagacccaaaagccaagtgtcagaggaggagggaaaggaagtggaaagcgataaagaaaaaggagaaggcggtcagaaagaaatagaatttggcacgagtctggatgaggagataatcttaaaagcccctatcgccgcccccgaacctgagctgaaaaccgacccatcccttgatctccacagcctctcatccgcagagacccagccagcccaggaagagctcagggaggaccccgattttgagattaaggaaggcgagggacttgaggaatgtagcaagattgaagtaaaggaagaaagtcctcagagcaaggctgaaactgagctcaaagcttcgcagaagcccattcgaaagcacagaaatatgcactgtaaagtgagtcttttagacgacacagtgtacgaatgcgtagtcgaaaaacacgctaagggccaggatttattaaaacgtgtgtgcgagcatctgaacttactggaagaggattactttggactggcaatttgggataatgctacatccaagacctggctggatagcgctaaggagatcaagaagcaagtgcggggcgtgccgtggaacttcacgtttaatgttaagttctaccctccagatcctgcccaattaaccgaagacatcacacgctattacttgtgtctgcagctgcgtcaagatatagtcgctggccggctgccttgttctttcgccaccctggcgctattgggaagctatacaatccagtctgaactgggagattacgatcctgagctccatggagttgactatgtatctgactttaaactggcccccaaccagaccaaggagctggaagagaaggttatggagttacacaaatcctatcgctcaatgacacccgctcaggccgacttggagttcctggagaacgcgaaaaagctcagtatgtacggggttgatcttcataaggctaaagacctagaaggcgtagatatcattcttggggtctgctctagtggcctcctagtttataaggataagctgcgaattaataggttcccatggccaaaagtacttaagatctcttacaagcggtctagcttttttatcaagattagacctggggaacaagaacagtacgagtcgaccatcggatttaagttaccttcttacagagctgctaagaagctgtggaaggtgtgcgtggagcaccatacgtttttcagactcaccagcaccgatacaatccctaaatctaagtttttggccctggggagtaaatttcgctatagcggacgcacccaggctcagactcggcaagcttccgccttgattgatcgcccagctccacatttcgaaagaacggccagtaagcgggcgtccagatctctcgatggggcagccgccgtggactccgccgatcgcagtcctcggcccacatccgcccccgccataacacaaggccaagtggccgagggcggcgtcctggacgcatcagccaaaaagacagtcgtgcctaaagcgcaaaaagagacggtgaaggctgaagtaaagaaggaggacgagccccctgagcaggccgagcctgaaccaactgaagcttggaaggacctcgataagtctcaagaagaaatcaaaaagcaccatgccagcattagcgaactcaagaagaattttatggaaagtgtacctgagccgcgcccttctgagtgggataagagactatctacacatagcccttttcgcacccttaacattaacggacagatccccaccggggagggaccacctctggtaaagactcagaccgtcactatctccgacaatgccaatgccgttaaatccgaaatcccaaccaaggatgtgcccatagtccacaccgaaactaagaccataacctacgaagccgcccaaactgatgataattccggggacctcgaccccggggtgctcctgaccgctcagactatcacatccgaaacaccttcctccactactaccacacagatcacaaagaccgttaagggtggcatttcagagacacggatcgaaaaaagaatcgtgattacgggagatgccgatattgatcatgaccaggtgcttgtccaagctattaaagaagctaaagaacaacatccagatatgtctgtgacaaaggtcgtggtgcaccaggagaccgagattgcggatgagtag

SEQ ID NO: 186788 - DNA, 2163 bp, synthetic construct
  misc_feature 1..2163: note = Description of Artificial Sequence: Synthetic coding sequence
  source 1..2163: mol_type = other DNA
atgaccaccgagaagagcctggtgaccgaggccgagaacagccagcaccaacaaaaagaggagggcgaagaagccataaactctggacagcaagagcctcagcaggaggaatcttgccaaacggccgccgagggagataactggtgtgagcaaaaactgaaagcctctaacggagatacccctacacatgaggacctgactaaaaataaggagagaacatctgaatctaggggcttatctcgcctgttctcgagctttcttaagagacccaagagccaagtgagcgaggaggaggggaaagaagtcgaaagtgataaggagaaaggggaagggggccaaaaagaaattgagtttggcacgtccctagacgaggaaatcattttgaaggccccaatcgctgcgcctgagcctgagctgaaaacagatcctagtctggacttgcactctctgagctctgcagaaacccagcccgcgcaggaggagctccgagaggacccggactttgaaataaaggaaggagaaggcctggaagagtgttccaagattgaggttaaagaagagagtcctcagtctaaggccgaaacggaactaaaggcctcccagaaacctattcggaaacaccgcaacatgcattgtaaggtgagcttattggacgacactgtgtatgagtgtgttgtagaaaagcatgcaaaggggcaggacctgctgaagagggtatgtgagcacctgaatttactggaagaagactattttggattggccatatgggacaacgccacttctaaaacttggttagacagtgcaaaggagatcaaaaaacaggtgcggggcgtgccttggaactttacctttaacgtcaagttctaccccccagatcctgcccagcttaccgaagatataacaagatattacctgtgcctgcagctgcgccaggatatcgtggcagggagacttccttgttccttcgcaaccttggcgctgttggggtcatatactatccaatctgaactgggagactacgaccccgagctgcacggagttgactatgtttccgactttaaactcgccccgaatcagaccaaagaactagaggagaaagtcatggagctgcacaagagctaccgctccatgacaccagcacaagctgatttggagtttttagagaacgcgaagaagcttagtatgtacggcgtagatcttcacaaggctaaggacctggagggggtggatattattctgggcgtctgttcctcaggactgctcgtgtacaaagataaacttagaattaataggtttccatggcccaaggtgctgaagatttcctataaacggagtagcttctttattaagattcgaccgggggaacaggagcagtacgaaagcacgatcgggttcaagcttccgagctatcgtgctgccaaaaagctgtggaaggtttgtgttgagcaccatacattttttagactgaccagcacagacaccataccaaagtcaaaatttctggccctgggctccaagttcaggtacagcggacggacccaagcacagacccgacaagccagtgctctcattgataggcctgcaccccacttcgagagaaccgcctctaaaagagcctcaagaagcctggacggagccgcggctgtggatagtgccgacagatcgcctcgccctacctctgccccagccataactcaaggccaggtagctgagggaggcgttcttgacgctagtgcgaagaaaactgtggtgccaaaagcacagaaagagacggtcaaagcagaggtcaagaaggaggatgagccccccgaacaggccgagcccgagcctaccgaggcttggaaagtcgagaagacgcacatcgaggtgacggtacctacaagcaacggcgatcagacccagaagaagagagaacgcctagacggggaaaacatttacattcgtcattccaatttaatgttggaggacttggataaatcccaggaggagattaagaagcaccatgcctctattagtgaacttaaaaagaacttcatggagagcgtgcccgaaccgcgtcctagtgagtgggacaagcgcttatccactcacagtccctttcgcaccctcaatattaacggacagatccctacaggcgagggcgtatctactcttagcacctag

SEQ ID NO: 186789 - DNA, 2595 bp, synthetic construct
  misc_feature 1..2595: note = Description of Artificial Sequence: Synthetic coding sequence
  source 1..2595: mol_type = other DNA
atgaccaccgagaagagcctggtgaccgaggccgagaacagccagcaccagcaaaaagaggaaggggaggaggctattaattctggacagcaggaaccccagcaggaggaatcgtgtcagaccgcagcagaaggggacaattggtgtgaacaaaagctgaaggcatctaatggcgatacaccaactcacgaggatctcaccaagaataaagagcggacttccgaatctcgtggcctatcccgcttgttctccagttttctgaagcgtcctaagagtcaggttagcgaggaagagggtaaggaggtggagagcgacaaggagaagggcgaggggggacagaaggagatagaattcggcacatctttggatgaggagatcatccttaaggcgcccattgccgcacccgagccggagctgaaaaccgatccatcactcgatctacattctctatcctctgcggaaacccagcctgcccaggaagagctgagggaagacccagacttcgagattaaggagggagaaggtctggaggagtgctcaaagattgaagtgaaagaggagtctccccagagtaaagccgaaaccgagctgaaggcgagccagaagcctatcagaaagcacagaaacatgcattgcaaggtctcactcctggatgacacggtgtacgaatgcgtggtagagaaacacgccaaaggccaggacttgctgaagagagtgtgtgaacaccttaatctgcttgaagaggattacttcggtctggccatctgggacaatgcgacttccaaaacatggctggattccgcgaaagagataaaaaaacaggtacgcggcgtgccatggaacttcacttttaacgtcaaattctacccccctgatcctgcacagctgactgaagacataactcgctattacctgtgtctccaattgaggcaggatattgtagccggccgcttgccatgctcttttgcgaccctggcccttctaggttcctatactatacagagcgaactgggcgattacgaccccgagctgcatggagtcgattatgtctccgattttaaactggcccctaatcagacaaaggagttagaagagaaagtgatggaattgcataaaagctatcgtagcatgactcctgcacaggccgatctggagttcctcgaaaatgcaaaaaaactttccatgtatggggtggacttgcataaggccaaggatctagagggggttgacattatcttgggggtgtgcagctccggtctgctagtctacaaagataagttgcggatcaaccgcttcccctggccaaaggttctcaaaatttcctataagcgctcatcttttttcattaagattagaccaggggaacaggaacagtacgaatccaccataggtttcaaactgccaagttatagagccgctaagaaattgtggaaagtgtgcgtagagcatcatactttctttagattgacctccaccgatacgatccccaagagcaagtttctcgccttggggtccaagttccgctactccggccgcacacaggctcaaacgagacaggccagcgcccttatcgatcgaccggccccccattttgagaggaccgccagtaagcgagcctcccgctcattggacggcgccgccgcggttgattctgcagatagaagcccccggcctacctctgctcccgctatcacccagggtcaagtcgccgagggtggtgtactggacgccagcgccaagaaaaccgtcgtaccgaaagctcagaaggagacggtcaaagcagaggtgaaaaaggaggacgaaccccccgaacaagccgagccagaaccaacggaagcctggaaggttgaaaagacccatatagaggtgactgtcccgacatctaacggagaccagacccaaaagctcgccgagaagactgaggaccttataaggatgcgaaaaaagaagcgagagaggctcgacggagagaatatctatatccggcacagcaatctgatgctagaggacttggacaagagccaggaggagattaagaagcatcacgcctccatttctgaactgaaaaaaaacttcatggaatccgttccggagccaaggcccagtgaatgggataaacggctaagtacacactcgcctttcagaactctcaacatcaatggtcagatacccactggcgagggacctccgctagtcaagacccagacagtgacaataagtgacaatgccaatgctgttaagtcggagattcccacaaaggatgtgcctatcgtccatactgaaacgaagaccattacctatgaagccgcccagaccgacgacaatagcggcgacctcgaccctggggtactgctgacagcccaaacaattacttccgagaccccttcctcaaccactactacccagataaccaagactgtaaaaggaggaatctcggaaaccagaatcgaaaagcgcatcgtgattactggtgacgccgacatcgaccatgaccaagtgctggtccaggccattaaagaagccaaagaacagcacccagacatgtcagtaaccaaggttgtggttcaccaagaaactgagatagcagacgagtag

SEQ ID NO: 186790 - DNA, 1767 bp, synthetic construct
  misc_feature 1..1767: note = Description of Artificial Sequence: Synthetic coding sequence
  source 1..1767: mol_type = other DNA
atgcactgcaaggtgagcctgctggacgacaccgtgtacgagtgcgtcgtagaaaaacacgccaaaggtcaggatctgctgaaacgcgtctgtgaacatctgaatctgctggaggaggactactttgggctggctatctgggataacgcaacaagcaaaacgtggctcgacagtgccaaagaaatcaagaaacaggtccgcggagttccttggaatttcacatttaatgtgaagttttacccccccgaccctgcacagctgaccgaggacataactcggtactacctgtgcctccaattacgccaggatatagtggctggaagactcccctgtagttttgccactctcgcccttctaggaagctataccattcaatctgaactgggggactacgaccccgaactgcatggggtggactatgtttcagattttaagctcgcaccaaatcagactaaggaattggaggagaaagtcatggaactgcacaagagctatcgttccatgactccggctcaggccgatctagaatttctcgagaatgctaagaagttatcaatgtatggggtggacctgcataaagccaaggatctagaaggagttgatattatcctgggcgtatgcagttccggactgctcgtgtacaaggataaacttcggatcaatcggttcccatggcctaaggtgcttaaaattagttacaaaaggagttccttcttcattaagattcgaccgggagagcaggaacaatatgaaagtaccatagggtttaagctccctagctacagggctgccaaaaagctttggaaagtgtgtgttgagcaccacaccttctttcgcctcacgagcacagacaccattcctaagtctaaatttctggctctaggcagcaagtttcgttactcggggagaacccaggcacaaacacgccaggctagcgctcttatagaccgacctgctccccacttcgagcgcaccgcgagcaagcgggcatcaagatccctcgacggagccgccgcggtcgattccgcagatagaagtccccggcctacaagcgcaccggctattacccaagggcaggttgcagaggggggcgtgttggacgcatctgctaagaaaacagtggtgcctaaagcacaaaaggagacggttaaagccgaggtgaaaaaggaagacgagccacccgaacaagctgagcctgaaccaacagaagcttggaagaagaaaagggagcgactcgacggtgagaatatatatatcaggcatagtaatcttatgctggaggacctggacaagtcgcaggaagagatcaagaaacaccatgccagcatctccgagctgaagaaaaacttcatggagtctgtcccagagccaaggccgtctgaatgggacaagcgcctcagcactcactctcctttccggacactcaatataaatggccagatcccgaccggggaaggacctccactggtgaagacccagacggtgaccatcagcgataatgctaatgcagtgaagagcgagatccccactaaggatgtccctatcgtccatacagagacaaagacaattacgtacgaggcggcccagactgtgaaaggcggcatcagtgagacccgcatcgaaaagcggatagtaattaccggcgacgcggacatcgatcacgatcaggtattggttcaggcaatcaaggaggcaaaggaacaacatccagatatgagcgtgactaaggtggtggttcaccaggaaacagaaattgctgatgagtag

SEQ ID NO: 186791 - DNA, 2115 bp, synthetic construct
  misc_feature 1..2115: note = Description of Artificial Sequence: Synthetic coding sequence
  source 1..2115: mol_type = other DNA
atgaccaccgagaagagcctggtgaccgaggccgagaacagccagcatcagcagaaggaggagggagaggaagcaataaattccggccaacaggagccccagcaggaggagagctgtcagactgctgccgaaggagataactggtgtgagcagaagctgaaggcgtcaaatggtgacacaccgacacacgaagacttgaccaagaacaaagagagaactagcgagtcccggggcctttcacgcctgttttccagttttctaaaacgtccaaaaagtcaggtgagcgaagaagagggaaaggaggtcgagtcagataaagaaaagggggagggaggccaaaaggaaatcgaattcgggaccagtttggacgaggagatcatactcaaagcccccatcgccgccccagaaccagaattaaagacagacccaagcctggatctgcatagtctgtcgtcggctgagacacagacttggctggattcagctaaggaaatcaaaaagcaggttcgtggagttccctggaacttcactttcaatgtgaaattttacccacctgacccagcgcagctgaccgaggacatcacacggtactacctctgtttgcagctgagacaggatatcgtggctggcagactgccctgttctttcgccacactggccttattgggctcttatacaatacagagcgagttgggcgattatgaccctgaactccatggcgtcgattatgtctctgacttcaaactcgccccgaaccagacaaaagagcttgaggagaaagtcatggaactgcataaatcgtaccgcagcatgacccccgctcaggccgacttagagttcctggagaacgctaagaaactgagcatgtacggggtggacctccacaaagccaaagacttggaaggtgtggacattatattaggagtgtgcagctctgggttactggtgtataaggacaagctcagaattaatcggttcccttggccaaaagtcttaaaaatcagttataagcggagttccttcttcatcaaaattagacctggcgagcaggagcagtatgaaagtacaatcgggtttaaattgccatcctaccgcgcagcaaagaagttatggaaggtgtgtgtagaacatcatacttttttcaggctgacaagtaccgatacaatacctaagtccaaattcctggcactggggtcaaaattccgttactccgggagaacacaggcacaaacaaggcaggcctcggcactgattgacagaccggctccacatttcgagagaaccgccagtaaacgagcctcaaggtctctggatggtgccgccgcagtggatagcgccgatcgatcccccagacctacctccgctccggccattactcagggccaggtggccgaggggggcgtgcttgacgcgagtgcaaagaagacagtggtgcccaaggcccagaaagaaacggtgaaggccgaggtgaaaaaggaggatgaacccccagagcaggccgaacctgagcccacagaggcctggaaagatctggataaatcccaagaggaaataaagaagcatcacgctagcatttccgagttgaagaaaaatttcatggaatcagtcccagaacctaggccttctgagtgggataagagactgtcaacacactcaccctttcgtaccttgaatataaacgggcagattcccacaggagagggtccaccgctcgtgaagacacagactgttacgatttcggacaatgcaaacgcagtgaagtccgaaatcccaacgaaagatgtcccaatcgtgcacaccgaaactaaaactatcacttatgaggccgctcagacagacgataactccggcgacctggaccctggagtcctccttaccgcccagacaataacgtctgagaccccatcaagcaccactacaacgcaaattacaaaaaccgttaaaggtggtatctcagagaccaggatcgagaagcggatcgttattaccggcgacgctgacatcgaccacgatcaggttctggtgcaggccattaaggaggcaaaggaacagcatcctgacatgagtgtcaccaaggtcgttgtgcaccaggaaactgagatcgctgacgagtag

SEQ ID NO: 186792 - DNA, 2304 bp, synthetic construct
  misc_feature 1..2304: note = Description of Artificial Sequence: Synthetic coding sequence
  source 1..2304: mol_type = other DNA
atgaccaccgagaagagcctggtgaccgaggccgagaacagccagcatcagcagaaagaagagggggaagaggccattaattcaggtcaacaagagcctcagcaggaggagtcctgccagactgccgccgagggagacaattggtgcgaacagaaactgaaagcttccaatggagacaccccaacccatgaagacctcactaagaacaaagagcggacctccgaaagtagaggtctgagccgtctgttctcctcctttctgaaaagaccaaagtcgcaggtgagcgaagaagaggggaaggaggttgaatctgataaggaaaaaggagaagggggtcagaaagagattgaatttgggactagcttggatgaagagatcatcctgaaagcccccatcgcagcgcccgagcccgagctcaagaccgatccctcgctggacctgcatagtcttagcagtgcagaaactcagcctgcccaagaagaactccgcgaggatcccgactttgaaattaaggaaggagagggtcttgaagaatgctctaaaattgaagtcaaggaagagagcccacagtcaaaggctgagactgaactcaaagcctcacagaagccaatcaggaagcataggaacatgcactgcaaagtctctctgctggacgatactgtctatgaatgtgtggtggagaaacatgcaaaaggtcaggatctcctcaagagggtctgcgagcacctgaatctgcttgaagaggactacttcggcctggcgatctgggacaatgcaactagtaagacctggctggacagtgctaaggagataaagaaacaggtgcgaggggttccctggaatttcactttcaacgtcaaattctacccaccggaccctgcacaattaacggaggacattacacggtactatctttgcctgcaattaaggcaggatatagtggccgggagattaccctgtagttttgccaccctcgccttgctcggcagttatacaatccagtctgaactgggggattacgaccccgaactccatggcgtggactatgtgagtgattttaaattagcccctaatcagaccaaggaactggaagagaaggtgatggagctacacaaaagttatcgtagtatgacccccgcgcaggcagacctggagtttctggagaatgctaaaaagctatccatgtatggagtagatctgcacaaagccaaagatcttgagggagttgacatcattttgggagtgtgcagctcaggcctgctcgtgtacaaagacaagctcagaatcaaccgatttccttggcccaaggtgctcaaaatcagttacaaacggtcttcttttttcatcaaaatccgcccaggggaacaagaacaatatgagtctactattggattcaaactcccaagctatagagctgcaaaaaagttgtggaaagtgtgtgtggaacatcacacgtttttccggctcacctccacggatacgatccccaagtctaagttccttgcactaggttcaaaattcagatactcaggccgcactcaagcccagacgaggcaggcttccgcactgatcgatcggcctgcaccccactttgaaaggaccgccagtaaacgagcctctcggtcactcgacggcgcagccgctgtggacagcgccgaccgttcgccacggcccactagtgcacccgccatcacccagggccaggtggctgaaggaggcgtactcgacgcatcagctaagaaaacagtcgtccctaaagcccagaaagagactgttaaagcggaggttaagaaggaagatgagcccccggaacaagcagagccagagcccactgaggcatggaaagacttggacaagagccaggaggaaattaagaagcatcatgccagtatcagtgagctgaagaaaaactttatggaaagcgttcctgaaccccgcccgtccgagtgggacaaacgattatcaacacattctccgtttcggaccctcaatataaatggacagatacctacgggcgaagggactgacgataacagtggcgatctggacccaggggttttgcttacggcccagaccatcacctcagaaacaccctctagcacaaccacaactcagattacaaagacagtaaagggcggtatctccgagactaggatagaaaaaagaatcgtcataaccggtgacgcggacattgatcatgaccaggtactggtacaggcaatcaaggaggcaaaagagcagcaccccgacatgtccgtgacgaaggtcgtggtgcaccaggaaactgaaattgctgatgagtag

SEQ ID NO: 186793 - DNA, 2145 bp, synthetic construct
  misc_feature 1..2145: note = Description of Artificial Sequence: Synthetic coding sequence
  source 1..2145: mol_type = other DNA
atgaccaccgagaagagcctggtgaccgaggccgagaacagccagcaccagcaaaaagaagagggcgaggaagctattaattccggacaacaggaaccacagcaggaagaatcatgccagaccgcagccgagggagacaattggtgcgagcaaaagctcaaagcaagtaacggagacactcccactcacgaagacctcaccaagaacaaggagaggacatctgagtcacggggattgtcccgcctgtttagctcatttctaaagcgtcctaaatcccaagtatccgaagaagaagggaaagaagtggaatcagacaaggaaaaaggtgagggagggcagaaagaaatcgaattcggaacatccttggatgaggagatcatcctgaaagctccaatcgctgctccagagcccgaactgaaaactgacccctccctggatctccattctctgagttctgctgagacccaacctgctcaagaggaactcagagaggatcccgatttcgaaattaaagagggggagggcctagaggaatgctctaaaattgaggtaaaggaggaatcacctcaatctaaagccgagacggagctcaaagcttcacagaaacccatcagaaagcaccgcaatatgcattgcaaggtgtctttgcttgatgacacagtctacgaatgtgtggttgaaaaacatgccaagggccaggacttgctgaaacgggtgtgcgaacacttaaatctcctcgaagaggactattttggactcgcaatttgggacaatgcaaccagcaaaacatggcttgacagtgccaaagagatcaagaagcaggtgagaggtgtgccatggaacttcacctttaacgttaaattttatccccctgaccccgcacaacttaccgaagatatcaccagatattatctctgcctgcagcttcgccaggatattgtggcaggccgactcccatgctcgttcgccacgctggcacttctggggtcatacacgattcagagcgaactgggagactacgaccccgagctccatggggtggattatgtgtcagacttcaaactggcccccaaccagactaaagaactcgaagaaaaggtgatggaactgcacaagagctaccgaagcatgaccccagcgcaagccgatctcgagtttctggagaacgccaagaagctgagtatgtacggggtggatctacataaggcgaaagaccttgaaggtgtcgacataatcctaggggtgtgctctagtggtttgctggtttacaaggacaagctccgcataaatcggtttccctggcccaaggtgctgaaaatttcttataagcggagcagtttcttcattaagatcagacctggagagcaggagcaatatgaatccacaatcggattcaaactgccgagctatcgagctgcaaagaagctgtggaaggtctgcgtagagcaccatactttttttcgccttacctccactgatacaatcccgaaatccaaattcctggcgctcgggagcaaattccggtacagcggcaggacccaggcccaaactcggcaagcttctgcactcatcgacaggcctgccccccacttcgaaaggaccgcttcaaagagagcaagtcgcagcctcgacggagcagctgccgtggattcagctgatcggtctccccgccctacatcggcccctgcaattacacagggacaggtggccgagggcggtgtgttggacgcctccgctaaaaaaacggtcgtacccaaggcacagaaagagactgtaaaagcggaggtgaagaaggaggatgagccgcctgaacaggctgaaccagagccaaccgaagcctggaaagtcgagaagactcatatcgaagtgacagtgcccacttctaacggtgaccaaacccagaaaaagcgggagaggctcgatggtgagaacatctatatcaggcactcaaaccttatgctcgaagacttagacaaaagccaggaggagatcaagaaacatcatgcctctatctccgaactgaagaagaattttatggaatccgtccccgagcctaggccttctgagtgggacaagaggctgtccactcacagtccttttagaaccctcaacataaatggacagatcccgaccggtgaaggttag

SEQ ID NO: 186794 - DNA, 2061 bp, synthetic construct
  misc_feature 1..2061: note = Description of Artificial Sequence: Synthetic coding sequence
  source 1..2061: mol_type = other DNA
atgggctgcttctgcgccgtgcccgaggagttctactgcgaggtgttgcttctagacgagagtaaacttacattgaccactcagcagcaggggattaagaagagcactaagggttccgtggtgctcgatcatgtcttccaccacgttaacttggttgagatcgactatttcggactgcggtactgtgataggtctcaccaaacctactggctagatccggctaagaccctcgccgagcataaagaactgattaacacaggccccccctacactctctatttcggaattaagttctacgctgaagatccctgtaaactgaaggaagagattacacgctatcaattcttcttacaggtcaaacaggacgtgctgcaggggagactgccgtgtcccgttaacacagctgcccagcttggagcttatgccatacagagcgagctcggcgactatgacccctacaaacatacagcaggatatgtgtccgaatacaggtttgtgccggaccaaaaggaagagctggaagaggcaattgagaggatccataaaactctaatgggacagatcccatcagaagcagagctgaactatttgagaacagcaaaatccctggagatgtacggtgtggatttacaccctgtgtacggggaaaacaagagcgagtacttcctcgggttgactccagtcggagtagtggtttataaaaataaaaagcaggtgggaaaatatttttggcctcgcatcactaaggtccatttcaaggaaacacagttcgagctaagagtgctgggaaaggattgcaacgaaacttcattcttctttgaggcaagaagtaaaacagcatgcaaacatctgtggaaatgctctgttgagcaccatactttctttcgaatgccagaaaacgagagtaactctcttagccgtaagctctctaagttcggttccatacggtacaagcaccgttattcaggcaggacagccctgcagatgtcaagagacctgtccatacagctgccccgccccgatcagaacgtcacaaggagccgaagtaaaacctaccctaagcgcattgcccagacacagcccgccgagtcgaacagcatctctcgcatcaccgcaaacatggaaaatggagagaatgagggcacaattaaaatcattgcaccttcgccagtgaagtcatttaagaaggcgaagaatgagaattctccagacacacagcggagtaaaagtcacgctccctgggaggagaacggaccacagtccggactgtacaactcaccttctgatcgtactaagtctcccaagtttccttacacacggagacgtaatcctagctgtggctcggataacgactccgtccaaccggttagacgacggaaagcacacaattcgggagaagacagcgacttaaagcaaaggaggagatcccgctcacggtgtaatacatcaagcggtagtgaatccgaaaactctaaccgagaataccgcaaaaagcgtaacaggataaggcaggagaatgacatggtggatagcgctccccagtgggaggctgtgcttagaaggcagaaggaaaagaaccaggccgatcctaacaaccggcgcagcaggcaccgctctcgcagccgttcacctgatattcaagcaaaagaagagctgtggaagcacatacagaaggagcttgttgatccttccggattatccgaggagcagcttaaggagattccttataccaaaattgagacgcagggcgatccaataagaatcaggcattcccattctccccgaagttatcgacaatatagaagatctcagtgctcggacggagaaagatcagttcttagtgaggtgaattcaaaaacggacctagtgcctcccctacccgtgacacgtagttccgacgcccaaggcagtggagacgctaccgtccaccagaggagaaacgggagtaaagattcactgatggaggagaaaccacagacatctaccaataatttggctgggaagcacacggccaagaccattaaaaccatccaggcgagtcggctaaaaactgagacctag

SEQ ID NO: 186795 - DNA, 1836 bp, synthetic construct
  misc_feature 1..1836: note = Description of Artificial Sequence: Synthetic coding sequence
  source 1..1836: mol_type = other DNA
atggacttcaagaagagcaagctgaccctggtggtggtggaggacgatgaccagggccgtgagcaggaacacactttcgtgttccgactggattccgctcgtacttgtaaacacttgtggaaatgcgccgttgaacaccatgcgttctttagactgcgcactccaggaaatagtaaaagtaatagatccgatttcattcgcctgggctctcggtttcgtttcagcggcaggacagagtaccaggcaacacacggttcccgtttgaggcggacgagtacgttcgagcgcaagccctccaaaagatatcccagtcgccgccactccacctttaaggcatcaaatcccgtcattgctgctcagctctgctcgaagaccaaccctgaagtacacaattaccagccacaatatcaccctaacatccacccttcgcagcccaggtggcaccctcatagtcctaatgtcagctacccgctgccgagtccggtgttgtcatccagcgatagactccccttcggcatcgaggagaacgggggaacgccctttctgacggcagcatctggccgacaccatcatcagcatcagcaccagcaccagcaccagcaccatagcaactacagtcttagcctcacactagaaaacaaagaaggtccccttcgatcccccaactctagttcaaagtctctgaccaaattgagtcctgggacaccagccctgttcagcgaagctgccgctcacctaaaaaagctggagctggaaacagtcaaggccgcgggcccctggccccctctccatattaacatcaacaaagcggaagaaaaaaaggtgtctgagaaaaccctgcagactccattgctcccaagccctgtggcggaccatgtgaaatgcaacatcctcaaagctcagctggaaaatgccagtcgggtgaacatccaagggggtaaagaagagagtccctttgtgaacataaacaaaaaatcttccctgcaggatgcctccgttcggtcacccattcctattcgagtggagactgctcaaccagccgtcgaaaagcctgagataaaacccccacgagttcggaaactgacccggcagtactccttcgacgaggacgatctgccgcctgacctggcggaggcagtgggagtcactacctcaactacaactaatacgactacggcagcgacacaggtctctgttccactaccgtctccaaaagtgcagaacgtatcatctccgcataaatccgaggggaaaggactcctcagccctggggccaagtcccccagcgaccgtggaggtgcttttacactggaacccggtgacctcctgatggacttcactgaggcaactccactcgccgaacctgcgtcaaacccacactgtgctcactctaggtgtagtcctcctctttctctccctatgaaagaggagaccacgggcgtctgtatgtacccgccaattaaaactcgcctcattaagaccttcccggtagatactatgaatcctttccctgatacatttactaccggccctcagttcaccgcggattttcgggactcaaagctgcagtgctgtcctgggcccactagccctttaataccagccgctacccttcgcccactcactgagacagtacacagcgccgaccacctccatcaccccgaaacttgcttctccggcagccagtgccgcgataccccggccggtacaggagagcgcgaggatgacgagaaaactgtcgacgaccgtacagtgaagttctccccctgtcacctggaagacggcatggtgccctccgtgcgactcctaagtagcggttttgtatgcagcttgtag

SEQ ID NO: 186796 - DNA, 1323 bp, synthetic construct
  misc_feature 1..1323: note = Description of Artificial Sequence: Synthetic coding sequence
  source 1..1323: mol_type = other DNA
atgaagttcctgctgatcaaggacgcccccggcaagaagaagcggaagaatctcatgctttccttcaaacggaaacacgccaagggacaggacctgtttgaccagatagtataccacctcgatctcgtggaaactgattatttcggcctgcagtttctggactcggctcaggtagcccactggctggaccacgctaaacctattaaaaaacagatgaagatcgggccagcctatgcgctgcatttcagagtgaagtactattccagcgaacctaacaaccttcgtgaagagtttaccaggtatttgtttgtgctacagctgagacatgatatcctgagcggcaaacttaagtgcccttacgaaaccgccgtggagttggctgcactttgcctgcaggcggaacttggcgaatgcgaacttcccgagcatacgccggagctagtgtccgaattccgctttatcccaaaccagacagaagccatggaatttgatatttttcaacgttggaaggaatgtcgcggaaaatcccccgcccaggctgagctgagctacctgaacaaagccaaatggctggaaatgtacggagtagacatgcatgtcgtccgagggcgggatggctgtgagtactcactcgggctaacgcctacaggcatcctgatcttcgagggagctaacaagatagggctattcttctggcccaagatcacaaagatggactttaaaaagtctaaactgaccttggttgtagtggaggacgatgatcagggacgcgagcaggaacataccttcgtgttccgtctggactctgcgagaacttgcaaacacctgtggaagtgtgccgtggaacaccacgcattcttcaggcttcgcacgcccggcaattctaaatctaataggagcgattttatcaggctcggaagtaggtttcgattttcagggaggaccgaatatcaggcaacccatggttcccgccttcgacggacatccacattcgaacgtaaaccatctaaaagatacccttcacgtagacatagcaccttcaaggcaagcaaccctgtgatagcagcccagctatgctccaagaccaaccccgaagtgcataactaccagccacaatatcatcctaatattcatccgtcacagccacgctggcacccccactcccccaacgttagacctagttttcaggacgacagaagtcactggaaagccagtgcctctggcgatgatagtcattttgattacgtgcatgaccagaaccagaagaatttgggtggaatgcagtcaatgatgtatagagacaagctgatgaccgcactatag

SEQ ID NO: 186797 - DNA, 1557 bp, synthetic construct
  misc_feature 1..1557: note = Description of Artificial Sequence: Synthetic coding sequence
  source 1..1557: mol_type = other DNA
atgctgcggttcctgcggcggaccttcggccggcggagcatgcagcgttatgctagaggcgccgccgggcggggcgccgcaggcctaggcgatgaaagggatggcgggcccaggggcggacctgcagccgccgcctccagcagcgcccttcctgccgcccctggcggcagcgtgttccctgccggaggcggaccgcttctgaccggaggagcggccgtccacatttccgctgccggggccgcaaaagccaccctgtactgccgggttttcctgttggatggtactgaagtatcagtggacctgcccaagcatgctaaaggtcaggacctatttgaccagatcgtctaccacctagacttagtcgagactgactattttggcctgcaattcttggactcagcccaggtcgcacattggttggatcatgctaaaccaatcaagaagcaaatgaaaatcggaccggcgtatgcgctacattttagagtaaagtactattcttccgagcccaataatctgcgggaggagttcacccgttacctgtttgtgctgcagttgcgccacgacatcctgtcagggaaactgaaatgcccctatgaaacggccgtagagctggcagctttatgcctgcaggcagagcttggcgaatgcgaactcccagagcataccccggaactggtgtccgagttccggtttattccaaaccagaccgaagcgatggagtttgacatcttccagaggtggaaagagtgcagaggcaagtcccccgcccaggctgagctgtcctatcttaataaggctaaatggctagaaatgtacggagttgatatgcacgtggtgaggggccgtgacggctgtgagtactcgttaggcctcacccccaccggaatcctcatcttcgagggggcaaataaaatcggactttttttctggcccaagatcaccaagatggattttaagaaatccaagttgaccttagtggtcgtcgaggacgacgatcagggcagggaacaggagcacacgttcgttttccgcctggattccgcaagaacttgcaaacacctgtggaaatgcgccgtcgaacaccatgctttcttcagactgaggacacctggaaactcaaagtcaaaccgatccgacttcatcaggctcggttcaaggttccggttttcaggtcgcacagagtaccaggcgactcatggctcccggctgcgccggacctctacctttgaacgtaagccatcaaagaggtacccttcaaggcggcatagcactttcaaggcttcaaaccccgtgatcgctgcacagctgtgttctaagacgaacccggaagttcataattaccagcctcaatatcatccaaatattcatccttcccagccccgctggcatccccacagtccaaatgtccgcccctcctttcaggacgaccgtagccattggaaggcctcagctagcggggacgactctcacttcgactatgtccacgaccaaaatcaaaagaaccttggcggaatgcagtcaatgatgtatagagataaactgatgacagctctttag

SEQ ID NO: 186798 - DNA, 2703 bp, synthetic construct
  misc_feature 1..2703: note = Description of Artificial Sequence: Synthetic coding sequence
  source 1..2703: mol_type = other DNA
atgctgcggttcctgcggcggaccttcggccggcggagcatgcagcggtatgctaggggagccgccgggcggggtgctgctggcttaggcgatgaaagggacggtggcccccgggggggccctgctgcagctgcctctagtagcgccttgcctgctgcaccaggaggctcggtcttccctgccggtggaggccctctgctcactgggggagcggccgtccacatttcggctgcgggggccgccaaagctacactgtattgtagagtcttcctcctagatgggactgaagtgagcgtagacctgcccaaacacgctaagggacaggatctattcgaccagattgtttatcacctggatctcgtggagacagactatttcggactgcagttcctggactccgcgcaggttgcccattggttggatcacgcaaaacctataaagaagcagatgaaaattggcccagcctatgcgttgcacttcagagtgaagtactacagctccgaacccaataacctgagggaggagttcacaaggtacctttttgttctgcagcttagacatgacattctgtccggcaagctgaaatgcccttacgaaaccgccgttgaactggccgcactgtgtttgcaggcagaactgggagagtgcgagctgcctgagcacacacccgaattagtgtctgaatttcgttttattcctaatcagaccgaagccatggagttcgacatatttcagagatggaaggaatgccggggcaaaagtccggcccaagccgagttgtcctatctgaataaggctaagtggctcgaaatgtacggcgttgatatgcacgtggttcgaggccgcgacggctgtgagtatagtctggggctgacacctaccggcattttgatctttgagggggcaaataagattgggctgttcttttggccaaagataacaaaaatggattttaagaagtccaagctcacactggtggtcgtggaggacgatgatcagggccgagagcaagaacataccttcgtgttccggcttgattccgctcggacatgtaaacatctctggaaatgtgccgtagagcaccatgcctttttccgtctgcgtactccaggaaacagtaaatctaacaggtctgattttatccgccttgggagcaggtttcgattttccggacgcacagaataccaggcaacccacgggagcagattgaggcgaacctccaccttcgagaggaagccctccaaacgctatccctcccgccgccactcaacctttaaagcaagtaatcccgtgattgccgctcagctctgctctaagactaatcccgaggtgcacaattatcagccacaataccatccaaacattcacccttctcagccacggtggcatccacactcgcccaacgtgagttatcctctgccaagtcctgttctgagcagcagcgacaggctgccctttggaatcgaggagaacggcggaaccccctttcttacagctgcatctgggcgccaccaccaccaacaccagcaccagcatcagcatcagcaccactcaaactacagtcttagcctgacccttgagaataaggaggggcccctccgaagtccaaactctagttcaaagagcctcaccaagctctccccagggacccccgcacttttttccgaggccgcagcccatctaaaaaagctcgaactggaaacagtaaaggccgctggtccctggccacccctgcatatcaacatcaacaaagcggaagaaaagaaagtgtcagagaaaacactgcagactccactgctgccgtcccccgtcgctgaccatgtgaagtgcaacattctcaaagcacagctggaaaatgcctctcgagtaaatattcaaggcggcaaagaggaatccccatttgtaaacattaacaagaagtctagcctgcaagacgcaagtgtgcggagtcccatacccattcgcgtggaaactgcgcaacccgccgtggagaaaccagaaatcaaacccccccgagtgaggaaactgactcggcagtattcctttgacgaggatgacttgcctcctgatctggctgaggccgtgggagtgacgaccagcaccacgaccaatactactaccgctgcaacccaggtgtctgtgcccctgccttccccaaaggtgcagaacgtgtcctccccccacaagtcggagggaaagggcctcctgtctccaggggccaagtctccgtcagatcgcgggggtgcatttactctggagcccggtgatctcctgatggatttcaccgaagctacacctttagctgagcccgcttccaacccccactgcgcgcactcccgatgcagccctcccctgagcctgccgatgaaggaagagacaacaggagtgtgcatgtatcccccgatcaagacgcgtttaataaagacctttccagtagacacaatgaatccattcccggacacttttacgaccggtccacagtttacggcagacttcagggattcaaaacttcaatgctgtcccgggcccacttctccgcttattccagcagccacgctgaggcctctgaccgaaaccgtctccactgtgcagaccatctacactacccgcaaacccgtctctctcgctgcttccgcagagacactgaggcaggagctcgaacgggagaaaatgatgaagaggctgcttatgacagagctttag

SEQ ID NO: 186799 - DNA, 2202 bp, synthetic construct
  misc_feature 1..2202: note = Description of Artificial Sequence: Synthetic coding sequence
  source 1..2202: mol_type = other DNA
atgctgagcttcttccggcggaccctgggccggcggagcatgcggaagcatgccgaaaaagaacggttgcgggaagcacagagagccgccacacatattcctgcagccggcgacagcaagtccattatcacttgccgggtgtccctactcgatggtaccgacgtttcagtggatttacctaagaaagctaagggacaggagctctttgaccaaattatgtatcacctcgacctgatagagagtgattacttcggcttacggttcatggactccgcccaagtagcccactggctggacggcactaagagcatcaagaaacaggttaagatcgggtcaccttactgccttcatctcagagtgaaattctactcctccgaacccaataatctccgggaagagctgaccagatatctcttcgtcttacagctcaagcaagatatcctctctgggaaacttgactgcccctttgacaccgccgtccagttggccgcatacaacctgcaggcagaactgggcgattacgatctggcggagcactcgcccgaactggtctccgaatttagattcgtaccgatacagaccgaagagatggagctcgcaatctttgagaagtggaaggaatatagaggccaaactcccgcccaggcggaaactaattacctgaataaggcaaaatggttagaaatgtacggggtggatatgcacgtggtcaaagctcgcgatgggaatgattacagcctaggtcttacacctacaggagtgctcgtgtttgaaggagatacaaaaatcggactcttcttctggcctaagatcaccaggcttgactttaaaaagaacaagttaactttggttgtcgtggaagacgacgaccagggtaaggagcaggagcacacatttgtgttcaggctagatcatcccaaggcttgtaagcacctgtggaaatgcgcagtggaacatcatgcattttttcgattacgcgggccagtacagaagagctctcataggtcaggctttatcagactgggtagccgtttccgctacagcggaaagacggaataccagaccacaaagactaacaaggcccgacgttccacaagctttgaacgtagaccttccaagcgctacagccgcagaaccctgcagatgaaagcgtgtgcgacaaaacctgaagagttatccgtacacaataacgtgtctactcagagtaatggatcacagcaggcgtggggaatgcggtctgcgctgcccgtgagcccctcgatttcatctgcccctgtacctgttgagatcgagaacctgccacagtcacctggaactgaccaacatgatcgcaaatgtatccctctgaacattgatttgttgaacagtcccgatctcttggaagcgactatcggggacgtgataggagcttccgataccatggagacgtctcaagcactgaacgacgtgaatgtggctacacgcttgccaggcttgggagagccggaggtagagtacgaaacattgaaggatacaagtgaaaagttaaaacagttagaaatggaaaactcaccattgctctccccacgaagtaacattgacgtgaacatcaactcacaggaagaagtcgtaaaactgaccgaaaaatgccttaataacgtcatcgagtcacccggcctaaatgtcatgagagtgccacccgacttcaaatccaacatcttgaaagctcaggtggaggctgtgcataaagtgaccaaggaggatagtcttctctcgcacaagaacgccaacgtccaagatgccgctacaaacagtgccgtcctcaatgagaacaacgtgcctttacccaaggagtcacttgagactctgatgttgatcactccagctgattctggaagtgttttgaaagaggccaccgacgaattggatgcattgcttgcctcattgacggaaaatctgattgatcacactgtcgcaccacaggtgtcttccacctcgatgattacccccaggtggatagtgccccagagcggagctatgagtaacggcctggccggctgcgagatgctcttgactgggaaagagggccacggaaataaggacggcattagcctgattagtccacccgcacccttcttggtcgacgccgtgacctcttctgggcccatacttgccgaggaagcagtgctgaaacagaagtgcctgctcaccacagaactctag

SEQ ID NO: 186800 - DNA, 1518 bp, synthetic construct
  misc_feature 1..1518: note = Description of Artificial Sequence: Synthetic coding sequence
  source 1..1518: mol_type = other DNA
atgctgagcttcttccggcggaccctgggccggcggagcatgcggaagcatgccgaaaaagaaaggctacgagaagctcagcgagccgcaactcacattccggccgcaggagactcgaagagcattatcacctgtagagtaagtttacttgatggcacggatgtgagcgtggacctgcccaaaaaggcaaaaggccaagagttattcgaccagatcatgtaccacttagacctgatagaatccgattattttggactgcgctttatggactccgcacaagttgctcactggctagatggcacgaaatctatcaagaagcaggtgaaaatagggagtccttactgtctccaccttcgagtcaagttttactcttctgaaccgaataatcttagagaggaactgaccagatatctcttcgtgcttcagttgaagcaggatatcctgtctggtaaactggactgcccctttgacaccgccgtacagctcgcagcgtacaacctacaggccgaactgggtgactacgacctggcggaacactcacccgaactcgtgtcagagttccggtttgtgccgattcagacagaagagatggagttagccatcttcgaaaaatggaaggagtaccgcggtcagactcctgcacaggcagaaacgaattatttgaataaagctaaatggctcgaaatgtacggcgttgacatgcatgtggtaaaggcaagagatggcaatgactacagcctgggccttacccccaccggggtgttggtgtttgaaggggatacaaaaatcgggctatttttctggcctaaaatcacgagactcgattttaaaaagaataaactaacactggtagtagtcgaagacgatgaccagggaaaagagcaggaacacacctttgttttcagactggaccatcccaaagcctgcaagcacctgtggaaatgtgctgtggagcatcacgctttcttccgccttcggggaccagtgcagaaaagcagtcaccgctcgggctttattagattgggctcacggttccggtactcaggcaaaactgaataccagaccaccaaaaccaacaaagctagacgaagcaccagctttgaacggagaccgtccaagagatattccagacgaaccttgcagatgaaagcctgcgccaccaagcctgaagagttgtccgtgcacaacaatgtgagtacccagtcgaatgggagccaacaggcatggggaatgagaagtgccttgcccgtgtcaccctccatcagtagtgctcctgttcccgtcgagatcgaaaatctgccccaatcacccggaacagaccaacacgacaggaagtggctgtcagctgccagtgactgctgccagagagggggcaatcagtggaacactcgggctttaccaccgccgcagaccgcccacagaaactataccgacttcgtgcatgagcataatgtgaagaatgcggggatccgccatgacgtccacttccctggacacaccgcaatgaccgagatatag

SEQ ID NO: 186801 - DNA, 1518 bp, synthetic construct
  misc_feature 1..1518: note = Description of Artificial Sequence: Synthetic coding sequence
  source 1..1518: mol_type = other DNA
atgctgagcttcttccggcggaccctgggccggcggagcatgcggaaacatgcggaaaaggaaagactgagggaagctcaacgcgcggccacccatattcccgcagccggagactcaaaatccataatcacatgtcgggttagcctgttagatgggacagacgtgtccgtcgacctaccaaagaaagcaaaagggcaagagctgttcgatcagattatgtaccacctggatctgatagaaagtgactattttggcctgcgattcatggattctgcacaagtcgcgcactggctcgatggaactaaatctatcaagaaacaggtgaagatcggttccccctactgtcttcacctgagagttaaattttacagttcagagccgaataacctgagggaggagctcacaagatatctcttcgtgctccagctgaagcaggacatcctgtctgggaagctggattgccctttcgataccgcagtgcagttggctgcatacaatctgcaggccgagctaggcgattacgatttggctgagcattctccagagctcgtgtcagaatttagattcgttcccatccagaccgaggagatggaacttgctattttcgagaaatggaaagaatacagggggcaaactcctgcccaggccgagaccaattatctcaacaaagccaagtggctcgagatgtacggtgtggatatgcacgttgtcaaggctagggatggtaatgattactccctgggtctgactcccacgggggtcttagtcttcgaaggagatactaaaatcgggctgtttttctggcctaagattacacgcctcgactttaaaaagaacaaactgactctcgttgttgtcgaggacgatgaccaggggaaagagcaggagcatacatttgtctttaggctggaccatcccaaagcgtgcaagcacctgtggaaatgtgctgtagaacaccacgcttttttcaggctaagaggacccgttcagaaatcttcgcaccggagcgggtttatacgcctgggcagccgattcaggtactctggcaaaaccgagtatcaaaccacaaagacaaataaagcgcggcggagcacgagctttgagagaagaccaagtaagaggtattctagacgcactctccagatgaaagcctgtgccaccaaacccgaggagctgtcagtgcacaacaatgtctccactcagtcgaacggttctcaacaggcatggggcatgcgttctgccctgcccgtcagcccctcgattagctccgcgcccgtccctgtcgagatcgaaaacttgccacagagtccagggaccgatcagcacgatcgtaaatggctgagcgcagcgtccgattgctgccaacgtggtggcaaccagtggaatacacgcgccctccctccacctcaaacagcccatcggaactacactgactttgttcacgagcacaatgtgaaaaatgcgggtatccggcacgacgtgcacttcccgggccacacagccatgactgagatttag

SEQ ID NO: 186802 - DNA, 2064 bp, synthetic construct
  misc_feature 1..2064: note = Description of Artificial Sequence: Synthetic coding sequence
  source 1..2064: mol_type = other DNA
atgctgagcttcttccggcggaccctgggccggcggagcatgcggaagcatgccgagaaagaaaggttgagagaggcacaaagggcagcaacacatattccagccgcaggtgactccaagtccatcattacctgccgcgtttcattgttagacggaacagacgtgtccgttgatcttcccaaaaaagccaagggacaagaattgttcgatcaaataatgtaccatttggatctgattgagtcagactatttcggcctgaggttcatggattcagcccaggtggctcactggctggatggcacgaagtctattaagaagcaggttaaaatcggaagcccctactgtttgcatctacgggtgaaattttactctagcgaacctaacaacctgagagaggaactgaccagatatctgtttgtgctccagctgaagcaagatatattatcgggcaagcttgactgcccttttgacaccgccgtgcagttggccgcgtataacttgcaggccgagctgggcgactacgatctggcagaacattcaccagagctggtgagcgaatttcggtttgtccctattcagaccgaggaaatggaactggccatcttcgaaaagtggaaggaatatagaggccaaactccggctcaggcagaaaccaactacctaaacaaagccaagtggcttgagatgtacggggtggatatgcacgtcgtcaaggcacgtgacgggaatgattattccttaggattgactcctacgggggtcctggttttcgaaggggataccaaaataggtctgttcttctggccaaagatcacaagacttgacttcaagaagaacaaactcactttggtcgttgtggaagatgacgaccagggcaaagagcaggagcacaccttcgtgttccggttagatcatccaaaggcttgtaaacacctgtggaagtgtgctgtcgaacaccacgcattcttccgtctcagaggacctgttcagaagagcagccataggtcgggcttcatccgcctgggctccagatttcggtactccggcaagacagagtaccaaacgacgaagacaaataaggcacgacgatccacatcttttgagcggcgcccaagtaaaaggtacagccgtcggaccctccaaatgaaagcctgcgccactaagcccgaagaattaagcgtacacaacaatgtgagcactcagagtaatggtagccagcaagcatggggaatgcggagtgccctacccgtcagtccatctatttctagcgccccagtccccgtagaaatcgagaacctgccccagtcgccgggcaccgatcagcacgatcgtaagtgtattccgctgaacattgaccttttgaactcccccgatctgctcgaggccacaattggagacgtcatcggtgcctctgacacaatggaaacttctcaggcactgaatgacgtgaacgtcgctacacgcctaccggggctgggcgagcccgaggtggagtatgaaaccctaaaagatacaagcgagaagcttaagcagctggagatggaaaattcaccgcttctgtcgccccggagcaacattgacgtgaatattaatagccaagaagaagtagtgaagctcacggaaaaatgccttaataatgtgattgagagccccgggctgaacgtgatgcgtgtcccaccggacttcaagtccaatattctgaaggcacaggtcgaagctgtgcataaagtaaccaaggaagactccctgctctcacacaagaacgcgaacgtgcaggatgcagctactaacagcgccgtgttgaacgaaaataacgtacccctgcccaaagagtcactggaaacacttatgctgattacacccgcagattccggttctgtgctaaaggaagctaccgacgaactggacgccctcctggctagcttaaccgaaaacctgatcgatcatacggtggctccccaggtttctagtacttctatgattacccctagatggattgtgcccctgtggtctcactttggtcgccggagctgtcctgaggccgaagtgttcactgaccactag

SEQ ID NO: 186803 - DNA, 2199 bp, synthetic construct
  misc_feature 1..2199: note = Description of Artificial Sequence: Synthetic coding sequence
  source 1..2199: mol_type = other DNA
atgctgagcttcttccggcggaccctgggccggcggagcatgcggaagcatgcagagaaggaaagactacgagaggcgcagagggccgcaactcacatacctgcagctggggactccaaaagtatcattacttgcagggtgtctctgctcgacggaacagacgtctcagtagacctgccgaagaaggctaaaggccaggagctctttgatcagatcatgtaccatctcgaccttatcgagagtgactacttcggactcaggtttatggattctgcccaggttgcacactggctcgatgggacaaagtctatcaagaagcaagtgaagatagggagcccgtactgcttgcacctgcgagttaagttttacagttcagagcctaacaatctgcgggaggagctcacacgatacttgtttgtgctccagctgaaacaggacatactgtccggtaaactcgattgtccttttgacactgcagtacagctcgccgcatacaacctgcaggccgagctgggagactatgatttggctgaacatagtccagaactggtgtcagaattccgcttcgtgcccatacaaaccgaagagatggagttggccatttttgaaaaatggaaagagtaccggggtcagacacctgcccaggccgagacaaactacctcaacaaggcaaagtggttggaaatgtacggtgtcgacatgcacgtggtgaaggcccgagatggaaatgactattctcttggcctcactcccaccggagtcctggtatttgaaggagatacgaagatcggcctgttcttctggcctaagatcacccgactcgactttaagaaaaataaactcaccttggtggtcgtcgaggatgacgatcagggtaaggagcaggaacacacctttgtgttcaggctggatcatcctaaggcttgtaaacacctgtggaaatgtgccgtagagcaccatgccttcttccggctccgaggcccagtccagaaatccagtcatcgctcagggttcattcgattaggcagccggtttcgctactcaggcaaaactgaatatcagactaccaagacaaacaaagctcgacggagtaccagtttcgagcgtcgtccgagcaagagatattcacgtcggaccctgcaaatgaaagcgtgcgctacaaagccagaggaactctcagtgcataacaacgtaagcacccagtcaaacggttcccagcaagcctgggggatgcggagcgctctaccggtgagcccgtcaatctctagtgctccagtgcccgtcgagattgagaacctgcctcagagtcctggtacagatcagcacgacagaaagtgtatccccctgaatatcgacctgctgaactcaccggacctcctggaagcaaccattggagatgtgatcggcgcttcagacacaatggaaactagccaggctcttaacgatgttaatgtggccactcgtttgcctgggctgggcgaaccggaagtagaatacgaaaccctcaaggacacctcagaaaaactgaaacaactggagatggaaaactcccccctgcttagcccccgtagtaatatcgatgttaatattaattcccaagaagaggttgtgaagctgacagagaagtgtctgaacaacgtgatcgagagtcccggcttgaatgtgatgcgagttcctcctgacttcaagtctaatatcctgaaagcgcaggtagaggccgtccataaggtcacaaaggaggactcactgttgtcacacaagaatgctaatgttcaggatgccgccactaacagcgccgtcctgaatgagaacaacgtccctctccctaaagaatcactggaaaccctgatgctaatcacccctgcagactcgggcagcgtacttaaagaagccacagacgaactggatgccctccttgcttcactgactgagaacctgattgaccataccgtcgcaccacaggtgagtagtacttccatgattacccctcggtggatcgtaccttctggagctatgagtaacggcctcgccggctgtgaaatgctcctgacaggcaaagagggacatggtaacaaggacggaatcagcctgatcagcccccccgcaccttttctcgtggacgccgttacctctagtggccccatcttagccgaggaggccgtccttaagcagaagtgcctcctgacaacagagctgtag

SEQ ID NO: 186804 - DNA, 2340 bp, synthetic construct
  misc_feature 1..2340: note = Description of Artificial Sequence: Synthetic coding sequence
  source 1..2340: mol_type = other DNA
atggaggagaaggactacagcgaggccgacggcctgagcgagcggactactccaagcaaagcccagaagagtcctcagaaaatcgccaaaaagtataagagcgctatctgcagggtcacactgttggatgcttccgaatatgagtgcgaagtggaaaagcacggccgtggtcaggttctctttgaccttgtatgcgagcatctgaatctcctcgaaaaggattattttggattaactttctgtgacgccgattctcaaaagaactggctggaccccagtaaggagatcaaaaagcagattcgatcaagcccttggaattttgcatttaccgtgaagttctacccacctgatcccgctcagcttaccgaggatatcactcgctattacctgtgtcttcagctgcgggccgacataattaccggacgactgccgtgtagcttcgtgactcatgcgttgctggggagctacgcagtgcaagcggaactcggtgattatgatgccgaggagcacgtgggcaactatgtctctgagttgagatttgcgccaaatcagacccgggaattggaggagaggattatggagctgcacaagacatatagggggatgactcccggagaggctgaaatccacttccttgagaacgctaagaaactgagtatgtatggcgttgacctacatcatgctaaagacagtgagggcatcgacatcatgttaggcgtctgcgctaatggcttgctgatttacagggatcgcctccgcatcaataggtttgcctggccaaagatcctgaagatttcttacaaacgctccaacttctatatcaagatccgccccggcgaatacgagcagtttgagtctactataggctttaagctgcctaaccataggtccgctaagagactttggaaggtatgtatcgaacaccacaccttttttcgcctagttagcccagagccacccccgaagggctttctggtgatgggttcaaaatttaggtatagcggcaggactcaggcgcaaaccaggcaagcttctgctttgattgaccgccccgcacctttctttgaaagatcaagttccaaacgctacactatgtctagatctcttgatggtgctgaattctcccgccctgcttccgtgtctgagaatcacgacgccgggcctgatggcgataagagagatgaagatggagaatcagggggccagcgctcagaagctgaggagggcgaggtacggacaccgaccaaaattaaagaactgaaatttctggacaaacctgaggatgtgttgttgaaacaccaggcgtcgatcaacgaactgaagaggacactgaaggaaccgaatagtaagctaatccacagggaccgcgactgggaaagggaacgccggctgccttcatcacctgcctctccttcccccaaagggactcccgagaaagcaaacgagagagctggactgagagaaggttccgaggagaaggtgaagccaccacggcctagagcacccgaaagtgacacgggtgacgaagatcaagaccaggagcgggacaccgtgtttctgaaggacaaccacctggctattgagagaaagtgcagctcaattacggtgtcatcaacttcatcactagaggccgaggtggatttcactgttatcggggactaccacggaagcgcctttgaagacttcagccggtcactccccgaactcgatcgtgataagagcgacagcgatactgagggacttctgttttctcgagacctgaataagggtgctccatcgcaggacgatgaatcaggtggcattgaggacagtccagaccggggagcctgctccacgcctgacatgccacaatttgagccagtgaaaaccgagactatgactgtgtcctctctcgcaatacggaaaaagatagaacctgaagccgtgctgcaaaccagggtttcagcgatggacaacacccaagagaactctctgaagtcaggaaagggagccgccgccatgatcccgggccctcaaactgtcgcaacggagattcggagcctgagtccgatcatcgggaaagacgtgttgactagcacctatggcgccactgctgaaacacttagtacatccaccactacccacgtgactaagactgtcaagggtggtttctccgagacacgcatagaaaaacgtatcataatcaccggcgatgaggatgtggaccaggatcaagccctggccctggctataaaagaggccaagctgcagcatcctgatatgcttgtgacgaaagctgtggtgtacagagaaactgacccatcccctgaagagagagataaaaagccgcaggaaagctag

SEQ ID NO: 186805 - DNA, 2646 bp, synthetic construct
  misc_feature 1..2646: note = Description of Artificial Sequence: Synthetic coding sequence
  source 1..2646: mol_type = other DNA
atgaccaccgagaccggccccgacagcgaggtgaagaaggcccaggaggaggcccctcagcagccagaggcagcagccgctgtgactactcctgtgaccccagcgggccacggccacccagaagcaaattctaatgagaagcaccctagccagcaggatacccggcccgcagagcagtccttggacatggaggagaaggactatagcgaggctgacgggctcagtgagcgcacaactcccagcaaagcccagaaaagtcctcagaagatagcaaaaaagtacaaatccgcaatctgccgtgttacactactagacgcaagcgagtatgagtgtgaggtggagaaacatggacgcggacaggtcttgtttgacctggtgtgtgaacacctaaatttactggaaaaggactatttcgggttgactttctgtgacgccgattcccagaaaaactggttagacccttctaaggaaattaagaaacaaattcggagctctccctggaatttcgcttttacagtgaagttctatccacctgaccccgcccagttaactgaggacatcaccagatattacctttgccttcagctcagagccgacattatcacaggcaggttgccatgttcctttgtgacccacgctctgctggggtcttacgccgtccaagcggagctgggcgattacgacgcagaggagcacgtgggcaattacgtctctgaactgagatttgctcctaaccaaacgagagagctcgaggaaaggatcatggaactgcacaagacttatagaggaatgacacctggggaagctgaaattcacttcttggaaaatgccaagaaactgtctatgtatggagtggatcttcatcacgccaaggatagcgaggggattgacattatgctgggagtgtgtgccaacggacttctcatctatcgcgacaggcttagaattaaccgctttgcctggccgaaaatattgaagatctcttacaagcgctctaacttctatatcaagattcgcccaggcgagtatgagcagtttgagagcaccataggcttcaaactgcccaaccataggtctgcaaagcggttgtggaaagtgtgtatcgaacatcataccttctttaggttagtgtcgccagagcctccacctaagggcttcttggtaatggggagcaagtttcggtattcaggccgcacccaagcccagactcgtcaagccagtgctctgatcgacaggccagcccctttcttcgagcggagcagcagcaagagatacacaatgtcaaggagcttggatggagctgagttcagccggccagcttctgtctccgagaaccacgatgccggtcccgacggcgataagcgcgacgaggatggggagtctggaggccaaaggtccgaggcagaagagggtgaggtgcggactccgacgaaaataaaagaactgaagcctgagcaggagacaactccacgccacaaacaagaatttctggacaagcccgaagacgtcctcttaaaacatcaagcctcaatcaatgaattgaaacggacactcaaagagccaaattccaaactgattcatcgggatagagactgggaacgggagcgacggttgccgtcctcccccgcttcacctagccccaaggggacccccgaaaaggccaatgagcgggctgggttacgggagggctccgaagaaaaggttaagcccccaaggccgcgagcgccagagtctgacacaggagacgaagaccaagaccaggagagggataccgtgttcttgaaggataatcatcttgctatcgagcggaaatgcagttccattaccgtgagcagcacctcctctctggaagcagaggtggacttcaccgtgatcggagattaccacggcagtgccttcgaggacttctctcgcagcctcccggagttggaccgcgataaatcggatagcgatacggaggggcttctattttctagagatttgaataagggggctccctctcaggatgacgaaagcggaggtatcgaggacagtcccgacagaggggcatgttcaacaccagatatgccccagttcgagcctgttaagacagaaacgatgacagtctccagtcttgccattcgaaagaagatagagcctgaagccgtgttacagaccagggtcagcgctatggacaatactcaacaggtcgacggctctgcgtccgtgggtcgagagttcatcgccacaactccctccatcaccaccgagacgatctctacaaccatggagaactccctgaagagtggaaagggggcagcggccatgatccccggaccccagaccgtggctacggagatcaggagcctttcacccattatcggtaaggacgtattaacctctacctatggggccactgccgaaaccctgtccacatctactactacccacgtgaccaagaccgtgaagggtggattctccgagacccggatcgagaagcgcattatcattacaggagatgaagatgtggaccaggaccaggctctggcattagccataaaggaggcaaagctgcaacacccagacatgcttgtgaccaaggccgtcgtgtacagggaaacggatccctcccccgaggagagagataagaaaccacaagagtcatag

SEQ ID NO: 186806 - DNA, 2877 bp, synthetic construct
  misc_feature 1..2877: note = Description of Artificial Sequence: Synthetic coding sequence
  source 1..2877: mol_type = other DNA
atgagccggagcctggacggcgccgagttcagccggcccgccagcgtgtcagaaaatcacgacgctggcccagacggggacaaacgtgacgaagatggggagagcgggggccaaagatcagaagcggaggagggcgaagtaagaacacctaccaagatcaaggagttgaaacctgagcaagagacgactcccagacacaaacaggagttcttggataaaccagaggacgtgctcctgaaacaccaagccagcattaatgagctgaaaagaacgttgaaagaaccgaacagtaagctcatccaccgtgatagagattgggagcgcgaacgaaggcttcccagctcccctgcctcacctagcccaaagggcacaccagagaaagcaaatgagtcccaacgaacgcaggatatttcccagcgcgacctggttcccgagcctggggctgcagccggtttggaggttttcactcagaaatctttggccgcttccccagagggatccgagcactgggtgtttatcgagcgggaatatactaggccggaggagctcggccttctcaaagtgactaccatgcagcaggaggaacgccaagctggcctcgccgggattctggcaaacgggaggctatcaaaggtcgatgtgctagtggataagttcaaggttgaggtggcaaccgaggaaatggtggggaatagaagagcgaatactcaacagcaaggaaagatgatcgcctctccagaagattttgaatcagtgggagaggaaggtccttggataagagaatcaccaggaggagcagctttagcaagtgggagaaccttggccgaaaagctgctcgaaggttcagagctgagggccgacacccgggaggctaccatccggaaccggtgcatgagcgacgggcaaccagaggggcagaccgaattacggaaaggtttggaagagcctcacacgtgtggacggccgacggcccccggtacaaggcctgcagaagtggacgtcctgtccccggcctccgacaagggtggactgcaatcttttctgcttgaccctgcccatgctgaagctcgcgcggaactcagtaatgaaactgatactagctttgccgagcgaagcttctatcttaactacgaggagaaggattccgaagaccaggttctccctccacccttggaagagcgcaaaggtcgcttggacgcccccccagggggtgagcctcgtccaacccttaactctttagacctgcgggtgtctgcagccgcatcttcccggtcgaaggatgaggcccatatgacgagccccaaagaaggggccgggacccctaagaaccacggtggccctggcgacttgaaggggtccccggccggtcagacattcgctgagggatgggaggacgcgcagtggggagtagaaggagagtttccccacctgactgcctctgctgcaagggaggagggcactcctgttagtggcgacttactcggcaaggccgaggagagccccacagaggagttaaagaagcatcctccccaccggggccaaggcgtgcacccagatccccaggcctgcgcactgccccgggcaattcccctcaacgttcgcaagccagtcaaaccagaccggggaaactttccaccaaaggaacggggagtggttcccacacaaaaggggggagcagagttaaaggaccgcgaggcctcagccttcctgcacatggaagtgattatccctctcccggcttcacccggacatagtgaggacttggctgccttggaggaggccagtccttccccaaccagtcatggctctggggagccaagcgagctgcgagagccattcctgaggcatgtacatctcagcaaagcttcaccagagcctaaggaccaggtcgggttcgtagtatcacccgcaaccggaggggaaagacggcctcctccaattacttctaggaagccaagggttgtccccgaggaagcggaaggacgaattcccctgggctttggtttccctagcggaaaacgccgcgaaatgactagcttccaggcaggggatcaagaaggaagcttagaggacatctccaaaacatctgtggccaacaagatccgtatatttgaaacccatggcgctgagaccagaaggatgtcggaaggcgaggcccgaagcctgcccaacgatgtttcatccgaggcgccagtaggtcaggctgaacagcagcgtagtacgttgagcgatctgggcttcgcccagctacaaccgcctggagatttcgcctctcccaaggcaacgcactctaccgttatccccctcgcgactcgacactttagggaggacaccagtgccagctatcaggaagcccacaccgaactcgagcccgtttctccaaacagcggatgtgaaactacactggctgaggctactggcaccggaaacaaatcaggggacgctgtgagggaggaaaagcggagcaccaacctggcagccaatacgcctggaaaaggagggagactgcgcttcgcctcccccagtgggccacaaagagcagggcttcgggaaggctccgaggaaaaggtgaagcccccccgcccacgagcaccagagagtgacacaggggacgaggaccaagatcaggaacgggatactgtttttctcaaagacaatcacttggccattgagcgtaagtgtagctctatcaccgtgtccagcacttcgtctctagaggccgaagtggacttcacggtgataggcgattaccatggatcagcttttgaggattttagtaggtccctgcccgaacttgaccgcgacaaatcagattctgatactgaaggattgttatttagtcgcgacctgaacaaaggtgcaccaagtcaggactag

SEQ ID NO: 186807 - DNA, 2643 bp, synthetic construct
  misc_feature 1..2643: note = Description of Artificial Sequence: Synthetic coding sequence
  source 1..2643: mol_type = other DNA
atgaccaccgagaccggccccgacagcgaggtgaagaaggcccaggaggaggcccctcagcagccagaggctgcggccgctgtcacaacacctgttactccggccggccatgggcatccggaagccaattcaaacgagaaacatcccagtcagcaagacacccggcccgccgagcagtcactggacatggaagaaaaggattactcagaagcagatggcctgtctgaaaggacaaccccaagcaaggcccagaagtccccccaaaagatcgccaagaagtacaaatccgcgatttgccgggtcacattgctcgatgcgtccgaatacgagtgcgaggtcgagaagcacgggagaggccaggttctgttcgacctggtttgcgagcatctgaacctccttgagaaggattacttcggactcacgttctgcgacgccgatagccagaaaaattggttagaccctagcaaagaaatcaaaaagcagataaggtcatcaccatggaacttcgcctttactgtcaagttttaccctccggatcctgctcaacttacggaggatattacccgatattacttgtgccttcagctcagagcagacattattaccggtcgcctaccttgctcattcgtgactcacgcgcttcttggcagctatgccgtgcaggctgagctaggagattatgatgcagaagagcacgtcggtaattatgtgtccgagctgagatttgcccctaaccagactcgggagcttgaagagcgcatcatggagttgcacaagacctatagaggaatgacccctggtgaggccgaaatccattttctggaaaatgcaaagaagttaagtatgtatggggttgatttgcatcacgctaaagatagcgagggtatagacataatgctgggtgtgtgcgctaatgggcttctgatctaccgggaccgattgagaatcaacaggtttgcttggccaaagattcttaagatatcctataagagatccaatttttacatcaagattcggcccggagagtacgaacagtttgagagtacaattggttttaagctgcccaaccatagatccgctaagagactctggaaggtgtgcattgagcaccacacctttttcagactggtttctccagaacctccgcccaaaggtttcttggtgatgggaagcaaattccgctattccggcagaacacaggcacagactcgtcaagcttctgccctgatagatcgacctgcgcctttttttgaacggtccagctcaaagcggtataccatgtcaaggagcttggatggagcggaattcagtcggcccgcttcagtttctgagaatcacgacgctggacccgatggcgataagcgagatgaagacggagagagcggtggccaacggtccgaggccgaggaaggtgaggtgcgcactcccacgaaaatcaaggagttgaagcctgagcaggaaacaacccctcgacacaagcaagaattcctggacaagcccgaagacgtgttgctgaagcatcaagccagcattaatgagctgaagcgcaccctgaaagagccaaactccaagttaattcatagagatagagactgggaacgtgagcggcgtcttccctcctctcccgcctccccttcgcccaagggtactcctgaaaaagctaatgagcgcgctggcctgagggaaggttccgaggagaaggtgaagcctcctcgcccaagagcccccgagtctgacacaggtgacgaagaccaagatcaagaacgggacaccgtattcctgaaggacaatcatctcgccatcgagcgtaagtgctcatccatcaccgtttccagtacaagcagcctggaggccgaagtggacttcaccgtgatcggggactatcacgggtccgcatttgaagatttttctaggtcgctgcccgaactggaccgcgacaaatctgacagcgacacggaagggttgctcttttccagagacttaaacaaaggcgccccctctcaggacgatgagtccggcggaatcgaggactccccggaccggggagcctgctcgacccccgacatgccacagtttgaacccgtcaaaactgaaacaatgacggtctcatcactggctatcagaaagaaaattgaacctgaggccgtgttacagacccgggtttcagccatggacaatactcaggtagacggctcagcaagtgtgggaagagaattcatcgcaaccaccccctcaattacgacagagacaatatccacaacgatggagaactcactgaagtccggcaagggggccgctgccatgattcccgggccgcagactgttgccaccgaaatcaggagtctgagtcccatcataggaaaggacgtgctgacttcgacatatggggcaacggctgagaccctgtctacttctaccacgacccatgtcacgaagacagtcaaaggcggcttttctgaaactaggatcgagaagaggatcatcataactggcgatgaggacgtcgaccaggatcaggctctggcactagcaatcaaagaggccaaactgcagcatcctgacatgctagtcacaaaggcagtggtgtaccgggagacagacccctctcctgaagagcgtgacaagaagccacaggagtcctag

SEQ ID NO: 186808 - DNA, 600 bp, synthetic construct
  misc_feature 1..600: note = Description of Artificial Sequence: Synthetic coding sequence
  source 1..600: mol_type = other DNA
atggaggagaaggactacagcgaggccgacggcctgagcgagcggacaaccccttcaaaagcacagaaatctcctcagaaaatagctaagaaatataagagcgccatctgtagggtgacactcctggacgcgtcagagtacgagtgtgaggtagaaaagcatgggagagggcaggtgctgtttgaccttgtgtgcgagcatttgaatctcctggagaaagattattttggccttactttctgcgacgcagattctcagaaaaattggctggatccgtccaaggaaatcaagaagcaaatccggagctccccctggaacttcgcattcaccgtcaagttttatcctcctgaccctgctcagttaaccgaggatatcaccagatactatctgtgcctgcagttacgagctgatatcatcacagggcggctgccatgttcttttgtgactcatgccttactggggagctacgccgtgcaggccgagctgggggactatgatgcggaagagcacgttggtaactatgtgagcgagctccggtttgcgcctaatcagacacgcgagcttgaggaaagaatcatggaactacacaagacctattag

SEQ ID NO: 186809 - DNA, 2106 bp, synthetic construct
  misc_feature 1..2106: note = Description of Artificial Sequence: Synthetic coding sequence
  source 1..2106: mol_type = other DNA
atggtgttcctgggccggatcaacgaggtggagcccgccaagggcttagcagaatcactggctcctactgagcggagcgtgaagagtcttgatatggaagaaaaggattatagtgaagctgatggcctgagtgaacggaccactccaagcaaggcgcaaaaaagtccccagaagatcgccaagaagtataagtccgctatttgtagagtgacactgttagatgcatctgagtatgaatgtgaggtggagaagcatggccgtggtcaagtccttttcgatctcgtgtgcgaacacctcaatctgctggagaaggactattttggactgacattctgcgatgccgattcacagaagaactggttggatccttcaaaggagatcaagaagcagataagaagctctccttggaatttcgcatttactgtgaaattctatccaccagacccggcacaactcacggaggacatcaccaggtactacctgtgcctccagcttcgcgcagacattatcaccggtcgactcccttgttctttcgttacccatgccctcctagggtcctacgctgtgcaggcggagcttggagactatgacgccgaagaacacgtgggtaactacgtgtcagagttgcgttttgcacctaaccagacacgtgagctcgaagagcgaataatggagctacacaagacttacaggggaatgacaccaggagaagcagaaattcatttcttagaaaatgctaaaaagttgtctatgtatggggttgatctgcatcatgctaaagattcggaaggcatcgatattatgctaggcgtgtgcgccaacggtctactcatttatcgggacagactgcgtattaatcgcttcgcatggcctaagatccttaagattagttataagagaagtaacttctatataaagattaggcctggcgagtacgagcaattcgagtcaaccatcggcttcaaactgccgaatcaccggagcgccaagaggctgtggaaagtgtgcattgagcatcacacgttcttcaggctggtgtctccagaacccccacctaagggttttcttgtgatggggtctaaattccgatattcaggtaggactcaggctcagacacgacaggccagcgccctgattgatcgacctgctcctttcttcgagagaagtagctccaagcggtataccatgagtaggagtctggacggagccgagttttcccgccctgcgtccgtatccgagaaccatgacgctggcccagacggggataaacgtgacgaggacggcgagtctggagggcaaagatctgaagctgaggaaggagaggtgaggactccaactaaaatcaaagaactcaaattcctagacaaacctgaggacgttctgttgaaacatcaagcctccatcaatgaattaaaacgcacacttaaggagccaaactccaaactgatacaccgagaccgggattgggagagagagcgtcggttaccctcttcccctgcgagcccaagcccgaaggggacccccgaaaaagccaacgagcccgtgaaaaccgagaccatgactgttagttccctggctattcgaaagaagatagagcctgaggccgtgcttcagactcgggtttccgcgatggacaatacccagcaagtggacggatctgcatcagtcggcagagaattcatagccaccaccccgtccatcacaacggagactataagcacaacaatggagaattccctgaaaagcgggaagggcgccgcagccatgatccctggaccacaaaccgtggccacagagatccggagtcttagtcccataattggaaaggatgtgcttacatccacctacggtgcaaccgcggagacactgagtacaagcacgacgacccatgtgactaagactgtcaaggggggtttctccgaaactcggatcgagaaaagaatcatcattactggagacgaggacgtcgatcaagaccaagcattggccctagcaataaaggaagctaaactgcaacaccccgacatgttagtgaccaaagccgttgtgtatagggaaacagatcctagccccgaagaacgggataagaaaccacaagaatcatag

SEQ ID NO: 186810 - DNA, 2319 bp, synthetic construct
  misc_feature 1..2319: note = Description of Artificial Sequence: Synthetic coding sequence
  source 1..2319: mol_type = other DNA
atggaggagaaggactacagcgaggccgacggcctgagcgagcggaccactcctagcaaggcccagaagagcccacagaagatcgccaagaaatacaaatccgcgatatgtcgtgtcaccctactggacgcctctgaatacgagtgtgaggtggagaattggcttgatccatccaaggaaattaagaaacagatcaggtcctccccctggaattttgccttcacagtgaaattctatcctccagatccagcccagcttacagaagacattactcgctactacctttgcctgcagctccgggccgatattattacaggccgactcccctgctcgttcgtgactcatgctttacttggttcctacgccgttcaggccgaattaggcgattatgacgctgaagaacatgtggggaattatgtgagcgagttaagattcgccccaaatcaaacacgggagctcgaagaaaggataatggaacttcacaagacctaccgggggatgacaccaggtgaggcggaaatccattttttggaaaatgccaagaagctgagcatgtacggcgtcgatctgcatcatgccaaggattctgaaggcatcgatatcatgctgggcgtgtgcgccaacggtttgctcatctaccgcgataggctgcgtatcaaccgctttgcttggcccaagattttaaagattagttacaaacggtcaaacttctatattaagatacgtcctggagagtacgagcagttcgaaagcacgatcggcttcaaactccccaaccataggtccgcgaaacggctgtggaaggtttgcatcgagcaccacacattctttaggcttgtctcccctgaacccccacccaagggctttttagtgatgggatcaaagttcaggtactcgggccgaactcaagcccagacacggcaggcctcagcgctcattgatcgcccggcaccattcttcgaacggtcaagcagcaaacgttatacaatgagtcggagtctggacggcgcggagttttccaggcctgccagcgtgtccgaaaaccatgacgccggccctgacggggataaacgcgacgaggacggagaaagtggtgggcaaaggtctgaagccgaagaaggggaggtaaggacgccaacgaagattaaggagttgaaatttctggacaaaccagaggacgtgctcctgaaacatcaagccagtattaatgagctgaagcgtactctgaaagaacctaactctaaattgattcatcgtgaccgcgactgggagcgcgagcggaggcttccttcttcgcccgcatctcccagccctaaggggactccagagaaggcaaatgagcgcgccggcctgagggaaggcagcgaggaaaaggtcaaacctcctaggccccgtgctcccgaaagcgataccggtgatgaggatcaggaccaagagagagacaccgtgtttctaaaagacaaccatctggccattgagagaaaatgcagctccataacagtcagtagcacgagctcattggaagctgaggtggattttaccgtgattggagattaccacggtagcgcatttgaggatttctctagaagccttcccgaattagacagggacaaaagcgattccgacaccgaaggcctgctcttctccagggacctgaataagggcgcccctagtcaggatgacgaatccggcggaatagaggattctcccgacagaggggcctgcagcacaccagatatgccccagttcgagcctgtgaagacagaaactatgaccgtgtcctcgctggcaatcagaaagaaaatcgaacccgaagccgtacttcagactagagttagcgcaatggacaacacccagcaagtcgacgggtctgcaagcgtgggccgggagtttatcgccaccacaccatctataaccaccgaaacaattagcaccacgatggagaatagtctgaagagcggcaaaggggccgctgcgatgattcccggaccccagacagtggccacagaaatccgaagcctgagtccgataataggcaaagacgtcctgaccagcacttatggtgccactgcagagactctctcgacgagtaccacaactcatgttaccaagactgtgaagggcggcttcagcgaaacccgcattgagaaacggatcataatcactggagacgaggatgtggaccaggaccaggctctcgccttagcaatcaaggaagccaagttgcaacatcctgacatgttggtgacaaaagccgttgtgtatcgggagacagatccctcacctgaggagcgagacaaaaagccacaagaatcttag

SEQ ID NO: 186811 - DNA, 2319 bp, synthetic construct
  misc_feature 1..2319: note = Description of Artificial Sequence: Synthetic coding sequence
  source 1..2319: mol_type = other DNA
atggaggagaaggactacagcgaggccgacggcctgagcgagcggaccacaccttccaaggcccaaaagtcccctcagaagatcgctaagaagtacaagtccgcgatttgtcgtgtaactcttctggatgccagcgagtatgaatgtgaagtcgaaaactggctggatccttcaaaggaaatcaaaaaacagatcaggtcaagtccatggaactttgcattcactgttaagttttatcctcccgaccctgctcagctgactgaggatattacacggtactatctttgtctgcagttgagggcagatattattaccggtagactgccctgctcgttcgtaacccacgctctgctcggaagctacgcggttcaggctgagttaggcgactacgatgcagaggaacatgtgggcaactacgtatccgagctgcgattcgccccgaaccagacacgcgaattggaagagcgcattatggagctgcataagacgtaccggggcatgaccccaggggaagccgaaattcattttttggaaaatgccaaaaagctgtccatgtacggcgtcgacctgcatcatgccaaagactccgagggtatagacattatgctcggagtgtgtgccaacggactgttgatctatcgggaccgcttgagaattaatcgatttgcttggccaaagatcctgaaaattagctataagcgttctaatttttacatcaaaataagaccaggtgagtacgagcagtttgaatcgactatcggcttcaaactgcccaatcacagatccgctaagaggctgtggaaggtgtgtatcgagcaccacacattctttaggctggtctctcccgaacctccacccaaaggctttctcgttatgggatccaagtttcggtactctggtcgcactcaggctcagaccagacaagccagcgcgctcatcgacaggcctgcacctttcttcgagaggagctcctctaagaggtatactatgtcccggagtcttgatggggccgaatttagccgcccagcctccgtgagcgagaatcacgacgccggccccgatggcgataagcgcgatgaggacggagagtctggtgggcaacgaagcgaggcagaagagggagaagtgcggacccccacaaagattaaagagctaaagttcttggacaaacccgaagatgtcctactcaaacaccaggccagcataaacgagctgaagcggacactgaaggagcccaattccaagctgattcacagagaccgtgattgggagagagaacggaggctgccttccagccctgccagcccttcaccaaaggggacgcccgagaaagcgaacgagcgggcaggcctgagagagggcagcgaagagaaagttaaaccacctaggccccgggcgcccgaaagcgataccggtgacgaagaccaggatcaggaaagagacaccgtgttcctgaaagataaccaccttgccatagagagaaaatgtagcagtatcaccgtctccagcacttcaagcttggaagcagaagtagactttactgttatcggagactatcatggatccgcctttgaagactttagtagatccctacctgagcttgatcgggacaagtctgacagcgacacagaggggttgctgttttctagggacctaaataaaggtgctccatcccaagatgacgaatctgggggaattgaagactcccccgacagaggggcttgttccacgccagatatgccccagttcgagccggtgaagactgagaccatgactgtctcttctctggcaatcagaaagaagatcgaacctgaggcagtgctgcaaacacgcgtttcggccatggacaatactcagcaagtggatggctccgcctctgtggggcgggagttcatcgcgacaacaccatcaatcacgaccgagactatttcaaccacaatggaaaactccctgaaatccggcaaaggagcggccgccatgatcccaggcccgcagacagtcgccaccgagatccggtctctttcacctattatcgggaaagacgtgttaacctcaacttacggtgccactgctgaaactctcagcacaagcactacaacccatgtgactaaaacagtaaaaggcggcttcagtgaaacaaggatcgaaaaacgaattatcattaccggagacgaagacgtagaccaggatcaggccctggccttagccatcaaggaggctaaattgcagcaccccgacatgttggtaaccaaagcggtcgtgtatagagaaacagacccatcccctgaggagcgtgataaaaaaccccaagaatcgtag

SEQ ID NO: 186812 - DNA, 600 bp, synthetic construct
  misc_feature 1..600: note = Description of Artificial Sequence: Synthetic coding sequence
  source 1..600: mol_type = other DNA
atggaggagaaggactacagcgaggccgacggcctgagcgagcggactaccccctcaaaggcccagaaatccccacagaaaatcgcaaagaaatataagagtgccatatgccgtgttacccttctcgacgcgagcgagtacgaatgtgaggtagagaaacatgggcggggacaagttctgtttgatctcgtgtgtgagcacctaaatcttcttgaaaaggattatttcggcctaactttttgcgatgcagattcccagaagaattggttagatccctccaaggagatcaagaagcagattcgctcatctccctggaactttgctttcacggttaagttttatcctccggatcccgctcaactgacagaagatattaccagatactacctgtgtctgcagctccgggccgatattattactggtcgtctgccttgcagctttgtgacacatgcgctcctgggaagctacgctgttcaagctgagcttggggactatgacgcagaagagcacgtggggaattacgtatccgagctcagattcgcccctaaccagactcgggagttggaggaaagaattatggaactgcataagacgtattag

SEQ ID NO: 186813 - DNA, 2385 bp, synthetic construct
  misc_feature 1..2385: note = Description of Artificial Sequence: Synthetic coding sequence
  source 1..2385: mol_type = other DNA
atgaccaccgagaccggccccgacagcgaggtgaagaaggcccaggaagaagcaccgcagcagcccgaggctgcagcggcggtgacaacccccgtgacccccgcaggacatggccatcccgaagctaactctaatgagaaacatcccagccagcaggacaccagacctgcggaacaatccctagacatggaggagaaagactacagcgaagcagatgggctgagcgaaagaacaactccaagcaaagcccagaagagccctcagaaaattgcaaaaaagtataaatctgcaatctgtcgggtgactcttttggacgcatctgaatacgagtgcgaggtcgagaagcatggacggggccaggtccttttcgatctggtttgcgagcacttgaatctgctcgagaaagactatttcgggcttacattctgcgacgctgattctcagaagaactggctggatccatccaaagaaattaaaaagcaaattcggagttccccatggaacttcgccttcactgtcaagttttatcccccggaccccgcacaactgacggaggatattactcgctattacctctgcctgcagctcagggccgacatcatcacagggaggcttccctgctccttcgtgacgcacgccctgttgggctcatacgcggtacaggccgaactgggggattacgatgccgaagaacacgtaggtaactacgtgagcgagctgagattcgcacctaaccaaactagggagctcgaggagcgcattatggaactacataaaacgtaccgaggaatgactcccggtgaagctgagatccattttctggagaacgccaagaagctttccatgtacggcgtggaccttcaccacgcgaaggactccgagggtatcgacattatgcttggtgtttgcgccaacggtctgctaatctacagggacaggctgagaataaacagatttgcctggccaaaaattctcaaaatttcctacaagaggtcaaacttctacattaagatcaggcctggcgagtacgaacagtttgagagtacgatcggcttcaaactcccaaatcataggtccgccaagcgtctttggaaggtgtgcatcgagcaccataccttttttcgcctggtctcacccgagcctccccctaaaggcttccttgttatggggtctaaatttcggtattccggaaggactcaggcgcagactagacaggcatctgcccttatcgatcggccggcccctttttttgaacgcagcagcagcaagcggtacacaatgagccggagcttggatggcgcagagttctccaggcccgcctccgtctccgagaatcacgacgccgggcccgatggggacaagagggatgaggatggagagagcggcggccagcggagcgaggccgaagaaggcgaagtgcgcactcccaccaagattaaggagctgaaaccagagcaggaaaccacccccagacacaaacaggagttcctcgataaaccggaggatgtactcctaaagcatcaggcgagcataaacgagcttaaacgcaccctgaaggagcccaattccaagcttatccaccgggacagagactgggagcgggagcggcgtctgcccagcagcccagcctctcccagccccaaaggcacaccagaaaaggccaacgagcgcgctggcctgcgagagggaagcgaggaaaaggtgaagcccccaagaccccgggcccctgagtccgacacgggcgatgaagaccaggaccaagagcgcgatacggtctttcttaaagataatcatctcgccatcgagcgaaagtgcagctccattacagttagctcaacttcctccttggaagccgaagtggattttaccgtgataggcgattaccatggctcagccttcgaggatttctctaggtctttacccgaacttgatagagataaatctgacagcgacaccgaaggactgctgttttcacgagatcttaataaaggagctccgagccaagacgatgagagtgggggaattgaagattcacccgaccggggcgcctgctcaactcccgatatgccccagttcgagccggtgaagaccgaaaccatgacagtctcttccctggcaatcaggaaaaagattgagcccgaagcagttctgcaaaccagagtgagtgccatggacaacacccaggagaatagcctcaaaagtgggaaaggtgccgcagccatgattcccggccctcaaactgttgcaactgagattcggagtctcagcccttctgctgaccatagagagcgctgtccacaccagcacttgaggagacactgtggtaatcccctgaacctgcatcaccacccttgtcatcaaaactgtgaaaggcgggtcttttag

SEQ ID NO: 186814 - DNA, 507 bp, synthetic construct
  misc_feature 1..507: note = Description of Artificial Sequence: Synthetic coding sequence
  source 1..507: mol_type = other DNA
atgaccaccgagaccggccccgacagcgaggtgaagaaggcccaggaagaggcaccccaacagcccgaggcagccgccgcagtaactaccccagtgacacctgcaggccacgggcacccagaggccaattccaacgagaaacacccctctcagcaggatacaagacctgctgagcagtcactggacatggaggaaaaagactactccgaggcagacgggctatcagagcggacaacacccagcaaggcccaaaaatccccacaaaagatcgcgaagaagtataagtcagccatatgcagagtaacgctcctggacgcctctgaatacgaatgtgaagtagagaaacacggcagaggccaggtgttatttgatctggtttgtgagcacttgaatctcctggaaaaagattatttcggcttgaccttctgcgacgcagattctcagaaaaattggctggatccttctaaagaaatcaaaaaacaaatcaggtccagcccctggaactag

SEQ ID NO: 186815 - DNA, 180 bp, synthetic construct
  misc_feature 1..180: note = Description of Artificial Sequence: Synthetic coding sequence
  source 1..180: mol_type = other DNA
atgaccaccgagaccggccccgacagcgaggtgaagaaggcccaggaagaagcccctcagcagcccgaggcagccgccgccgtcactacccccgtgacacccgccggccacggccacccagaggccaattctaacgaaaagcatccgtcccaacaagatacgaggccggccgagcagtag

SEQ ID NO: 186816 - DNA, 774 bp, synthetic construct
  misc_feature 1..774: note = Description of Artificial Sequence: Synthetic coding sequence
  source 1..774: mol_type = other DNA
atggaggagaaggactacagcgaggccgacggcctgagcgagcggaccaccccctctaaagcacagaaatccccgcagaaaattgctaaaaagtataaatccgctatttgccgcgtcacacttcttgatgcctccgagtacgaatgcgaggtggaaaaacatgggagaggacaggtcttgtttgacttagtgtgcgaacacctgaatctgttggagaaggattacttcggcctgactttctgcgacgccgatagtcaaaagaattggcttgacccatccaaggaaattaaaaagcagattaggtcctcgccatggaactttgctttcacggtaaagttttatccccccgatcccgcacagctgaccgaagatatcacaagatattacctttgcctgcaactccgagctgatatcattacgggtcgactgccatgttcatttgttacccacgcgttactgggctcatatgcagtccaggcagagttgggcgactacgacgctgaagagcatgtgggaaattacgtatccgagttgcgctttgcgcccaatcagacccgcgaacttgaggagcggattatggaactccataagacctacagaggaatgacaccaggtgaggcagagatccacttcctcgaaaacgccaagaagttgtctatgtacggagtcgatctgcaccacgcgaaggattcggaagggattgatattatgcttggggtgtgcgccaatgggttgctcatctatcgcgaccgactcaggataaataggttctag

SEQ ID NO: 186817 - DNA, 114 bp, synthetic construct
  misc_feature 1..114: note = Description of Artificial Sequence: Synthetic coding sequence
  source 1..114: mol_type = other DNA
atggaggagaaggactacagcgaggccgacggcctgagcgagcggaccacacctagtaaagcacagaagtcaccccaaaaaatcgctaaaaagtacaaaagcgcaatctgttag

SEQ ID NO: 186818 - DNA, 360 bp, synthetic construct
  misc_feature 1..360: note = Description of Artificial Sequence: Synthetic coding sequence
  source 1..360: mol_type = other DNA
tgaagcgtgggccgggagttcatcgccaccacccccagcatcaccactgaaacgatctcaacaactatgatcatcggtaaggacgtactgacgagcacatatggcgcaacagcggagacgctctctacctctaccactacacatgtgactaagaccgtcaaggggggctttagcgagacacgaatcgaaaaacgaataatcataaccggggacgaggatgtagatcaagaccaggcattagcacttgcaattaaggaggccaaattacaacatcctgacatgctggtgactaaggccgttgtttatcgcgaaactgatcccagtccagaagaacgcgataaaaagccacaggagtcttag

SEQ ID NO: 186819 - DNA, 2340 bp, synthetic construct
  misc_feature 1..2340: note = Description of Artificial Sequence: Synthetic coding sequence
  source 1..2340: mol_type = other DNA
atggaggagaaggactacagcgaggccgacggcctgagcgagcggaccacacccagcaaagcccaaaagtctccacagaagattgctaagaagtacaagtctgcgatctgcagggtgactctgctggacgcatctgagtatgaatgcgaggtggaaaagcatgggcgagggcaagtgctttttgacctggtctgcgaacacctgaacctgctggaaaaggactattttgggctcaccttttgtgacgccgatagccagaagaactggctagacccctccaaggagatcaaaaaacagattaggtcctcaccctggaacttcgcatttacagtgaagttttacccccctgatcctgcccaactcacagaagacattactcgttactacctgtgcctacagttacgggcagatatcatcacaggacgattgccatgctctttcgttacacacgcactcctgggctcttatgcggtgcaagcagagcttggagattatgatgccgaggagcacgtcggtaattacgtgagcgagctgcgctttgcccccaatcaaacgcgagagcttgaagagcggatcatggaactgcacaagacctatagaggcatgaccccaggtgaagccgaaattcactttttggaaaatgcgaaaaagctttccatgtacggcgttgacctgcaccacgcaaaggattctgaagggatcgatatcatgcttggagtgtgcgcgaacggactgctgatttatagagacagactgagaatcaatcgattcgcctggcctaagattctcaaaatcagctacaaaagatccaatttttacatcaaaattcgaccgggggaatacgaacagttcgagagcaccatcggatttaagctgcccaaccaccggtccgccaagcgtctgtggaaggtgtgcatcgaacaccacacattttttcgattggtttcccccgagcctccgcccaaggggtttctggtgatggggtcaaagttccgatattcaggaagaactcaggcccagaccagacaggctagtgccctaatagaccgtcccgcacccttttttgagagatcgtcctctaaacgctacaccatgtcccgatccctggacggtgctgagttttcaaggccggcctcagtaagtgaaaaccatgatgccggaccagacggagacaagagagatgaggacggcgagagtggcggccagagatccgaggcagaagagggtgaggtacgtacccccactaagattaaggaactcaaatttctggacaaacccgaggacgtgctgctgaagcatcaggcctcaataaacgaattgaagcggactctgaaagaacctaactccaagctcatccaccgggatcgggactgggagagagaacgacgcttgccttccagtccagcaagtccatcaccaaagggcactcccgagaaagcaaacgaacgcgcaggacttagagaggggagtgaggagaaggtcaagccacctcgccctcgcgcgcctgagtctgatactggagacgaagaccaagaccaagagcgtgatacagtattcctcaaagataatcaccttgcaatcgagaggaagtgttcctctattacagtgagtagtacgtctagtcttgaagctgaggttgactttaccgtgattggcgactaccatggaagtgcctttgaagacttcagtagatcactgcctgagctggacagagacaaaagcgacagcgatacagaaggcctcctcttctctcgagaccttaataagggggcccccagtcaagacgatgaatcaggaggtattgaggacagtcccgaccggggagcctgttctacgcctgatatgccgcagttcgaacccgtgaagacagaaaccatgaccgtgtcatcacttgcgattaggaagaaaattgagcccgaggctgtgttgcagacaagggtaagcgccatggataatacacaggagaattctttaaagtcggggaaaggagctgccgcaatgatccccggaccgcagacagtagcgacagagatacggtcgctgtcacctataattggcaaggatgtgctgacatcaacctacggagcaactgctgagacgcttagtacttccaccactacccatgtgacgaagaccgtcaagggaggcttctcagaaacacgtatagaaaagcgcatcattatcaccggcgatgaagatgtcgatcaggaccaggcactggcactggctatcaaagaagccaagttacagcatcccgacatgttggtgaccaaagccgttgtgtatagggagaccgacccctcccccgaagagagagacaagaagccacaggagtcttag

SEQ ID NO: 186820 - DNA, 345 bp, synthetic construct
  misc_feature 1..345: note = Description of Artificial Sequence: Synthetic coding sequence
  source 1..345: mol_type = other DNA
atgaccaccgagaccggccccgacagcgaggtgaagaaggcccaggaagaagctccccagcagccagaagccgccgccgcggtaaccacccccgtgactccggcaggacacggccacccggaggctaattctaatgagaaacacccttcacagcaggacacccgcccggctgagcagtccctggatatggaagagaaagattattccgaggcggatgggctgtccgagaggacaaccccctcaaaagctcagaaaagtccacagaaaattgcgaaaaagtacaagagcgcaatctgtagagtcacacttctggatgcctctgagtacgaatgcgaggtcgaatag

SEQ ID NO: 186821 - DNA, 567 bp, synthetic construct
  misc_feature 1..567: note = Description of Artificial Sequence: Synthetic coding sequence
  source 1..567: mol_type = other DNA
atgaccaccgagaccggccccgacagcgaggtgaagaaggcccaggaggaagctccacagcaaccagaagcagcggctgccgttaccactcctgtgactccagctggtcacgggcacccagaggccaatagtaatgaaaaacaccccagccaacaggacacaaggcctgccgagcagagcctcgacatggaggagaaagactacagcgaagccgacggcctcagcgagcggaccactccatctaaggcccaaaagtccccccaaaagatagcgaagaagtacaagtcagccatctgtagagtgaccttgctcgacgccagtgagtacgaatgtgaggtcgagaagcacggacgtggccaggtgttgtttgacctcgtttgtgagcatcttaacctattggaaaaggactactttggcctcaccttttgtgacgctgactcccagaagaactggctagatcccagcaaggaaatcaaaaagcaaattaggtcaagcccttggaactttgcatttacagtcaaattctatcctcctgatcccgctcagctgaccgaggacattacatag

SEQ ID NO: 186822 - DNA, 705 bp, synthetic construct
  misc_feature 1..705: note = Description of Artificial Sequence: Synthetic coding sequence
  source 1..705: mol_type = other DNA
atggagagcacccccgagccccggcccaacgagtgggagaagcggagaattaccccactgtctctgcagacacaagggcggaagggagaccatttgtttaaagacattttgagtgtgaaggaaaagtacctgatgcctactatttggactgtggaggagaaggcacaggagaccgataaaactagggctcctgagagtgaaggcccctgtacgggagcgagggatgcagtgaaatccagtcatgagacacttaatatcgtagaagagaaaaagagagctgaagtgggaaaagatgagcgggtcatcacggaggaaatgaatggcaaggaaatctcacctggtagcgggcctggggagatcaggaaggttgagcccgtaacacaaaaggattccacttctcttagcagcgagtcgagcagctcctcaagcgagtccgaagaggaggatgtgggcgaataccggccgcaccatcgggtgacggagggaactatacgcgaggagcaagaatatgaggaggaggttgaggaagagcctaggccagccgccaaggtggttgagagggaagaagcagtgcccgaggcgtctccggtgacccaagcaggcgcctcggtcattacagtggaaactgtgatacaagaaaacgtcggcgcgcagaaaattccaggcgaaaaatctgtccatgagggagccctgaagcaggactag

SEQ ID NO: 186823 - DNA, 3018 bp, synthetic construct
  misc_feature 1..3018: note = Description of Artificial Sequence: Synthetic coding sequence
  source 1..3018: mol_type = other DNA
atgaccaccgaggtgggcagcgtgagcgaggtgaagaaggacagctctcagctgggcacagatgctacaaaggagaagcccaaggaggtcgccgagaaccaacaaaaccagagtagcgatcctgaggaggaaaagggcagccaacctcctcccgctgccgagtctcagagctcactgaggagacagaaaagggagaaagaaacatccgagtctcgagggatctccaggttcatccccccttggctcaagaagcagaagtcctatactttggtggttgccaaagatggcggggataaaaaagagcctactcaagctgtggttgaggagcaggtgctggacaaggaagagcctctccctgaggagcaacgtcaagcaaaaggcgatgccgaggagatggcccaaaagaaacaagagattaaagttgaggtcaaggaggaaaagccaagtgtgagcaaagaagaaaagcccagcgtctccaaggttgagatgcagccaacggagttggtcagtaaggaacgagaagagaaggttaaggaaacacaggaggacaagctcgagggtggcgcagctaagcgcgagactaaggaagtgcagactaatgaactgaaagccgaaaaagcttctcagaaagtgacgaagaagactaaaacagtacagtgcaaagtgacattgctggacgggacagagtactcatgcgacctcgagaaacacgccaagggacaggttcttttcgacaaagtttgcgagcacttgaacctcttggagaaggactacttcgggcttcttttccaggaatcccctgagcagaaaaattggcttgatccagctaaagagatcaagcgccagctacgaaacctcccctggttatttacctttaatgtcaagttctaccccccagacccatctcaattgactgaagacatcaccagatacttcctctgcctccagctgagacaggacatagccagcggaagacttccctgttcctttgtcacacacgctctcttgggctcctacacactccaggctgaactcggagattatgaccccgaggagcatggaagcatcgatttgtccgaatttcagttcgccccgacacagaccaaagagctggaagaaaaagtggccgaattgcataagacacatcgaggactgagtcctgctcaggccgatagtcaatttctggagaacgcaaaaagactttcaatgtacggcgttgatctccatcacgcaaaagactctgagggcgtagacattaagctcggggtgtgtgccaatggattactcatctacaaggaccgcctgagaatcaaccgattcgcctggcccaaaatcctgaaaatcagctacaagcggtcaaatttctatataaaggtgaggccagccgagctggagcagtttgaatctactatcggatttaaattgccaaatcaccgcgccgctaaacgactatggaaggtgtgtgtcgaacatcatactttctatagactggtctcaccggagcaacctcctaaagccaagtttttgaccttgggttcaaagttcaggtactccggcagaacccaagcacaaacgaggcaagcttcaacactcatcgatcggcccgcaccacatttcgaacgaacctcgagcaagcgtgtgtcgagatccttggatggcgctcctattggcgtcatggaccaaagcctaatgaaagattttccaggggccgcgggcgaaatatccgcatatggcccagggcttgtgtctatcgcagtagtgcaggatggggatggacggcgggaggtgagatcgcccactaaggcaccccatctccagcttatcgagggaaaaaagaatagtctgagggtggagggtgacaatatttacgtccgtcatagtaatcttatgctcgaggagctggacaaagcgcaggaggacatcctcaagcatcaagccagtatttctgagctgaaaagaaacttcatggagtctactccagaacccaggccaaacgagtgggagaagcgacggatcacacccctgtctcttcaaactcagggatccagccatgagactttaaacattgtggaggaaaagaagagggccgaggtgggtaaagatgagcgagttatcacagaggaaatgaatgggaaggagattagccccggatccggaccgggtgaaattaggaaggtggagccagtgacccaaaaagactccacaagtctttcctcggaatcttcaagcagcagtagcgagtctgaagaggaagatgttggagaatacagacctcatcatagagtcaccgaaggcaccatcagagaggaacaagagtacgaggaagaggtggaagaggaacccagacccgctgctaaggtggtggagcgggaagaggcggtccctgaagcaagcccagtgacccaggcgggagcttccgtgataaccgtcgagactgttatccaggagaatgtcggggcacaaaagatcccaggggaaaaaagcgtacatgaaggagcactcaagcaggatatgggggaggaagcagaggaagagccccagaaggtgaatggagaagtctcacatgtagatatcgatgtgctaccgcagatcatttgctgctccgaaccccccgtggtcaaaacagagatggtaacaattagcgacgctagccaacgcaccgaaatcagtacaaaagaggtgcctatagtccagacagaaacaaagacgataacttatgagtctcctcagatcgacggtggagcgggtggggatagcggcacactgctgaccgcccagaccatcacgtctgagtcagtgagcaccacaaccactacacacatcaccaagaccgttaaaggcggaatcagcgagacccgaatagaaaagcgcattgtgattacaggtgacggcgatattgatcacgaccaagcactggctcaggccatcagggaggctcgagagcagcaccccgacatgtctgtcacacgtgtcgtggtccacaaggagaccgaactggctgaggagggtgaggattag

SEQ ID NO: 186824 - DNA, 3018 bp, synthetic construct
  misc_feature 1..3018: note = Description of Artificial Sequence: Synthetic coding sequence
  source 1..3018: mol_type = other DNA
atgaccaccgaggtgggcagcgtgagcgaggtgaagaaggacagcagtcagctcggtacagacgcaaccaaagaaaagccaaaagaagtcgccgaaaatcagcagaaccagtcatccgatccagaggaagaaaaaggcagtcagccaccaccggctgctgaatctcagtccagtctacgcaggcaaaagcgtgaaaaggaaacatctgagtcgcgtggaatctcccggtttatacctccctggcttaagaagcaaaaatcatacactcttgtggttgctaaggatggtggggataagaaggagccaactcaggcagtggtggaggaacaggtcctggacaaagaggagcccttgcctgaggaacagagacaggctaagggcgatgctgaagaaatggcacaaaaaaagcaggagatcaaggtggaagtaaaagaagaaaagccgagcgttagcaaagaagagaagcccagtgtcagcaaggttgagatgcaacccaccgagcttgtttctaaagaaagagaagagaaggtgaaggaaacgcaggaggacaaattagaggggggtgccgcgaagagggagaccaaagaggtgcagactaatgaactgaaagctgagaaggcctcccaaaaggtgactaagaaaacgaagacagttcaatgcaaggtgacgttgctcgatggcactgaatattcttgtgacctggagaagcatgctaaggggcaggttctgtttgacaaggtgtgtgaacatttgaacctgttagaaaaggattatttcggtctactttttcaagagtcccccgagcagaagaattggctcgatccagccaaagagattaaacgccagctgaggaacctgccctggctttttaccttcaatgtgaagttctacccacctgatccctctcaattgacggaggatataactagatatttcctgtgcctccagctgcgacaggatatcgctagcgggcgcctaccttgctcctttgttacccacgccctgttggggagttatacactgcaggcagaattaggggactatgatcctgaggagcatggttctatcgatctcagtgagtttcagttcgcgcctacacagactaaggaactggaggagaaggtcgccgagctccacaaaacccaccgaggcctctcgcctgcacaggctgatagtcagttcttggagaacgctaaaagactgtccatgtacggagtggatctccaccacgctaaagactctgagggcgtagatattaagctcggcgtgtgtgccaatggactgttgatttataaggacagactccggattaatcggttcgcgtggccaaagatcctgaaaattagctacaagagatcgaacttctatatcaaggtaagacccgccgaactggagcagttcgaaagcaccatcggctttaaacttcctaatcaccgcgctgcaaagcggctgtggaaggtgtgtgtcgaacatcacacattctaccgcctcgtctcgcccgagcaaccacccaaagcaaaattcctaaccttaggctccaaattcagatactccggccgcacccaggctcagacccggcaagcgagcaccctaatcgatcgtcccgccccccacttcgagagaaccagttctaagcgggtgtcaaggagcctggatggagcgcccataggagtgatggaccagagcttaatgaaagactttccgggcgcggccggcgagatctccgcgtatggaccaggtcttgtctccatcgcagtagtccaggatggggatggtcgcagggaggtaagatccccaaccaaagcaccacatcttcagctaatcgagggcaaaaagaacagcctgcgagtcgagggagataatatctacgtgcggcattcaaacctgatgctggaggaactggacaaggcccaggaagacatccttaaacatcaagcaagcatatcagagttgaagcgcaattttatggagtccactcccgaaccacgcccgaacgagtgggagaaacgtagaattacccccctcagcctccagacccagggtagttcgcacgaaacccttaatatcgtggaagagaagaaacgagccgaagtgggcaaggacgagcgggtgatcactgaagagatgaatggtaaggaaatcagccctgggtccggacctggagaaatacgcaaggtggaacctgtgacccagaaggactccacgagtttaagctctgaaagttcttcatcgtcctctgaaagtgaagaggaagacgtgggcgagtacaggcctcatcaccgggtcaccgaaggaaccatcagagaggagcaggagtatgaggaagaggtggaggaggagcctagaccggccgctaaggtggtcgagagggaggaggcagttcctgaggcttcccccgtgacccaggccggagcgtctgtcataaccgtggaaaccgtaatccaagagaatgtaggtgcccagaaaatcccgggcgagaagtccgtccatgaaggcgccttgaagcaggatatgggcgaagaagccgaagaggagcctcagaaagttaatggtgaggtgtctcacgtagatattgacgttttaccccaaataatttgctgttctgaacctcccgtcgtgaagactgaaatggttacgatctccgatgcatcacagaggaccgagatctccacaaaggaggtacctatcgtccagaccgagacaaagaccattacctacgagagcccccagattgacggaggggctggaggtgactccggaacattgctcacggcacagacaattacatcagagtccgtaagtaccactactactacacatattacaaagacggtgaaaggtgggataagtgaaactcggatcgagaagcgcattgtaataactggcgacggcgacattgaccacgatcaagccctggctcaggccattcgagaggcccgcgagcagcatcctgacatgtctgtaacccgcgtggtggtccataaggagactgaactggcggaagagggggaagactag

SEQ ID NO: 186825 - DNA, 2022 bp, synthetic construct
  misc_feature 1..2022: note = Description of Artificial Sequence: Synthetic coding sequence
  source 1..2022: mol_type = other DNA
atgaccaccgaggtgggcagcgtgagcgaggtgaagaaggacagctcccagcttggcacagacgcaactaaggagaagccgaaagaggtggccgaaaatcagcagaaccagagcagcgatccagaggaggagaagggcagccagccccccccagccgccgagtcacagtcatctttaagacgacagaagcgggagaaggaaacgagcgagagcaggggcatctcccggtttattcctccttggctgaaaaaacagaagagctacaccctggtggtggcgaaagacggtggagacaaaaaagagccaactcaggccgtggtggaggagcaagtgctagacaaggaagaacccctcccagaagagcagagacaggctaaaggtgatgctgaagagatggctcagaaaaagcaagaaataaaagtggaagtcaaggaagaaaagccgtccgttagtaaggaggagaagccaagcgtatcaaaagtggagatgcagcccaccgagctggtgtcaaaggagagagaagagaaagtgaaagagacccaggaggacaagctagagggcggtgctgcaaagcgtgagacaaaagaggtgcaaacgaatgagttgaaagctgagaaagcaagccaaaaggtgacaaagaagacaaagaccgttcagtgcaaggttacgttgttggacggaaccgagtactcctgcgatctcgagaagcacgccaagggacaggtgctgttcgacaaggtttgtgaacacttgaatcttttagaaaaagactactttggactcctcttccaggagtcacctgagcagaaaaattggctggaccccgctaaggagataaagcgccaattgcggaacctgccatggttgtttaccttcaacgtgaaattttatccacccgacccttctcagctgaccgaggacattacccgctactttctctgcctccaactccgccaggacattgcttcaggacggttgccttgtagctttgttacacacgccttgctcggatcatacaccttgcaggcggaattgggagattatgaccccgaagagcatggctcaatcgatctctctgagttccagtttgccccaactcagacaaaggaactggaggaaaaagtggcagaactgcataagacacacaggggtctctccccggcacaggctgatagtcagttcttagaaaatgccaagaggttgtccatgtacggagtggacctgcaccatgccaaagattccgaaggagtcgatatcaaactgggagtgtgtgccaatggtttactgatttacaaggacaggctccggatcaaccgctttgcgtggccgaagattctgaagatttcttacaagaggagcaatttctacatcaaagtacgtcccgctgagctagagcagttcgaatctactataggctttaagcttccaaaccaccgagccgccaaacgcctgtggaaggtatgtgtggagcaccataccttctatcgcctggtgtctcctgagcagccccccaaggcaaagttcctgaccctgggctccaaattccgctacagcggacggacccaggcacagaccagacaggctagcactcttattgatcgaccggccccccacttcgagagaacgagtagcaaacgggtgagccggtcactggacggagcacccattggggtgatggaccagtctcttatgaaagactttcccggcgcagccggggagatttccgcatatggtcccggcctcgtcagcatcgcagttgtgcaagacggggacggtcggagagaagtgcggagcccgactaaggcacctcatctccaactaattgaggggaaaacagttaagggaggaatatcagaaactcgaatcgaaaagcgaattgttatcacaggggacggggacattgatcacgatcaggctctcgctcaagccatacgtgaggccagggagcagcacccagacatgtctgtcaccagagtggtagtccataaggaaaccgagctggcggaagagggagaggattag

SEQ ID NO: 186826 - DNA, 1902 bp, synthetic construct
  misc_feature 1..1902: note = Description of Artificial Sequence: Synthetic coding sequence
  source 1..1902: mol_type = other DNA
atgaccaccgaggtgggcagcgtgagcgaggtgaagaaggacagctcccagctaggcacagatgcaacgaaggaaaagccaaaagaggtggcagagaatcagcaaaatcaaagctccgatcctgaggaggaaaaagggagtcagccgcccccagccgccgaaagccagtcctcgctgcgacgccagaagagagagaaggaaacatccgagtcccgaggtatctcccggttcatccccccctggctgaagaagcagaagagttacaccctcgtcgtggcgaaagacggtggggacaaaaaggaaccgacacaggccgttgtggaggaacaggtgctcgataaggaagagcctctgcctgaggaacagaggcaggcaaagggcgacgcagaagaaatggcacagaaaaaacaggaaatcaaagtcgaggtaaaggaagaaaagccatccgttagcaaagaggagaaaccgtcggtgagcaaagtggaaatgcagccaactgaacttgtaagcaaagaaagggaggagaaggtcaaagagacacaagaggacaaactcgaaggcggagccgcgaaacgcgagaccaaagaagttcaaactaatgagttgaaagccgagaaggcttcccagaaggtgacaaaaaagaccaagaccgtgcaatgcaaagtgacccttttggacgggaccgaatattcttgtgaccttgagaaacatgctaagggacaggtgctcttcgacaaggtctgtgaacacctgaacttgctcgaaaaggactactttgggctactgttccaggagtcccccgaacagaagaactggctggacccagccaaggagataaaacgacaactgcgcaatctgccctggctctttacttttaatgtcaagttttaccctcccgatccatcccaactgacagaggatattactcggtacttcctatgcctgcagctgcgtcaggacatcgcctctggccgacttccatgtagctttgttacacacgccttgctgggctcatacacgctccaggcagagcttggcgattacgatccagaagagcatgggtctatcgacctcagcgagttccaatttgcgccaacccagacaaaggagcttgaagagaaggtcgccgaacttcataagacacacaggggcttgtctccggcgcaagcagattctcagttcctggagaacgccaaaaggcttagtatgtatggggtggatctccaccatgcaaaagactctgagggggtcgatataaagcttggggtgtgcgccaatggcctgctcatttacaaggaccgtctgaggatcaatcgcttcgcttggcctaagatcctgaagatatcctataagcggtctaacttttatatcaaagtgagaccagcagaactcgagcagtttgaatctactatcgggttcaaactgcccaaccacagggctgcaaagagactttggaaggtttgtgtcgagcaccacacattttaccggcttgtgagccctgagcaaccaccaaaagcaaagttcctcaccctgggctcaaagtttcggtactccggtagaacacaggcacagacacgtcaggccagtacgctcatcgacaggcctgcacctcactttgaacggacgtcaagcaaaagggtgtcacgctcgctggatggagcgccaattggagtcatggaccagagcttaatgaaggacttccccggtgcagccggcgagatcagtgcctacggacctgggctcgtctccatcgcagtggtgcaggacggggatggaagaagggaggtgagatcccctactaaagccccacacctgcagctgatcgaaggtaaatcaagccacgagaccctcaacattgtagaagaaaagtctggccaaagattgggcaagactaaggaatag

SEQ ID NO: 186827 - DNA, 2244 bp, synthetic construct
  misc_feature 1..2244: note = Description of Artificial Sequence: Synthetic coding sequence
  source 1..2244: mol_type = other DNA
atgaccaccgaggtgggcagcgtgagcgaggtgaagaaggacagcagccaacttggcacagacgccaccaaggagaaacctaaagaagtggccgagaatcagcagaatcagtctagtgaccccgaagaggagaaaggtagtcagcctccccccgcggccgaatctcagagcagcctaaggcggcagaaacgcgagaaggaaactagcgaatctaggggcatcagtagatttattccaccatggcttaaaaagcagaagagctacacactggtggtggcaaaggacggaggcgacaagaaggaacccactcaggccgtggtcgaagagcaggtgctcgacaaagaggaacccctgccggaggaacaacgtcaagcaaaaggtgacgcagaagagatggcacaaaagaaacaggaaatcaaagtcgaggtcaaggaggagaaaccctcagttagcaaggaggaaaaaccatccgtctcaaaggtagaaatgcaacccaccgaactggtgtcgaaggagcgggaggagaaagtgaaggagacccaggaggataaactcgaggggggagcagctaagcgggagacaaaggaagttcagactaacgagctcaaagcagaaaaggcatctcagaaagtgaccaagaagactaaaaccgtgcagtgcaaagttactctgttggatggaactgagtattcttgcgacttggagaagcacgccaaagggcaggtactcttcgataaggtatgtgagcacctgaatttgttggaaaaagattattttggactacttttccaggagtccccagaacagaagaactggctagaccccgcgaaggagataaagcgccagttgagaaacctaccctggttgtttacctttaatgtgaagttctatcctccagacccctcgcagttgaccgaggacattactagatatttcttgtgccttcagctcagacaagacatcgcgagcggaaggttaccttgtagcttcgtaactcacgcactacttggatcctatacgctccaggctgagcttggcgactatgacccagaggaacacggttcaattgatctgagcgagtttcagtttgcaccaacacagacaaaagaactggaagagaaggtggcagagttgcacaagacgcaccgcggcctgagtcccgctcaggccgactctcagttcctggaaaatgctaaaaggctgtctatgtatggggtggacctgcaccatgcaaaggattctgaaggcgtggatatcaagttaggagtctgcgcgaatggacttctcatctacaaggatcgtctcaggatcaatagattcgcctggcccaaaatactgaagatttcatataagcgcagcaacttctatattaaagtgaggcccgcagagctggagcagtttgagagtactatcgggtttaagctccctaaccatagagctgccaaacgactttggaaggtgtgcgtcgagcatcatactttttatagactcgtctcgcccgagcagccaccgaaagcaaaattcctgacgctgggttcaaagttcaggtactcaggtcgcacccaagcccaaacaagacaagccagcaccctcatcgacaggcccgcgcctcatttcgagcgcacttcctctaagagagtgagtaggtccctggacggggcccccataggcgttatggaccaaagcctaatgaaagatttccccggggctgccggagaaatctcagcttacggacccggattggtgagcatcgcagtggtgcaggatggtgatggaagacgcgaagtgcggtctccaaccaaagccccccacctgcagctgatcgaaggaaaaccccctgttgtgaagacagagatggtgacaatcagtgatgcctcccaaagaactgaaatctccaccaaagaggtacccattgtgcaaactgagacaaagacgataacatatgaaagcccccaaatcgatggtggcgcggggggggactctggtaccttgctgacagctcagacaattacaagtgaatccgtgagtacaactactaccacccatataacaaagactgtgaaaggaggcatttccgaaacaaggatcgaaaagagaatcgtgatcacaggcgacggggacatcgaccatgatcaggctctggcccaagcaatccgggaagcaagagagcagcatccggacatgagtgtgaccagggttgtggtacacaaagaaacggagttagccgaagaaggcgaagattag

SEQ ID NO: 186828 - DNA, 1143 bp, synthetic construct
  misc_feature 1..1143: note = Description of Artificial Sequence: Synthetic coding sequence
  source 1..1143: mol_type = other DNA
tgactgggcagcaagttccggtacagcggccggacccaggcccagaccagacaggcgtctacactgatagacagacctgccccacactttgaacggacgagtagtaaacgcgtgagcagaagcttagatggcgcgccaatcggcgtgatggaccagtcactaatgaaggattttcctggcgctgccggggagatctccgcttatggcccgggactggtgtcaattgccgtggtacaggatggtgacggccgcagggaggtgcgatcacccacgaaagcaccgcacctgcagctaatcgagggcaagaaaaactctcttcgagtcgaaggcgacaacatctatgtacgccattccaatctcatgctggaggaactggacaaggcccaggaggacatcttgaaacaccaggcatcgatttcagagctcaagcgcaatttcatggaatctacacctgaacctcggccaaacgaatgggagaaaagaaggattacaccgttgagcctgcagactcagggacgcaagggagaccatctgtttaaagacatactgtctgtgaaagagaagtacctgatgcccacaatttggactgtggaggagaaggctcaggagacggataagacacgggctccagagagcgaagggccgtgcacaggggcaagagacgcagtcaagtcctctcacgagacgctgaacatagtggaagaaaaaaaacgggccgaggtgggaaaagatgaaagggttataacagaggagatgaacggaaaggaaatttctcccgggtccggacctggcgagataagaaaggtggaacccgttacccagaaagactccacttcgctgagttccgagagctcttcttcttcctctgaaagcgaagaggaagacgtaggggaataccgaccgcatcacagagtgacagagggtaccatcagggaagagcaggagtacgaggaggaagtcgaagaagaaccccgccccgccgccaaagtagttgagcgggaggaggccgtacctgaagcaagcccagtgacccaggcaggcgcaagcgtgataaccgtggagaccgttatccaggaaaatgtaggtgctcagaaaattcctggggaaaaaagtgtgcatgaaggagcccttaaacaggactag

SEQ ID NO: 186829 - DNA, 1152 bp, synthetic construct
  misc_feature 1..1152: note = Description of Artificial Sequence: Synthetic coding sequence
  source 1..1152: mol_type = other DNA
atggaggaggaggagacccagctggaggaggagctggacaaggcccaggaagacatcctgaaacaccaggctagtatcagtgaactcaagcgcaactttatggagtctactcccgaaccccgacccaacgaatgggaaaaacgcagaatcacaccacttagcctgcagacacagggatcgtcgcatgaaacactgaacattgtggaagagaaaaaacgtgccgaggtgggaaaggatgagagagttatcacggaggaaatgaatggcaaagagatatccccgggttcaggacccggagagatcaggaaagtggaaccggttacgcaaaaggactctacgtcgctaagcagcgagagctcatcgtccagctcggaaagcgaggaggaggacgtgggcgaatatagaccgcatcatagggtgaccgaggggacgatccgggaggagcaggaatacgaggaggaggtggaagaggagccgagaccggccgccaaggtggtggaaagagaggaggcggttcctgaagcttctcccgtgacgcaggccggggccagtgtgattacagtcgagacggtaattcaggagaatgtgggggcccagaagatcccgggcgaaaagtccgtccatgaaggtgccctgaagcaggacatgggcgaagaggccgaggaggaacctcaaaaagtcaacggtgaagtttctcatgttgacattgatgtgttgccccaaatcatctgttgtagcgaaccgcccgtggtgaaaaccgagatggtaactatttcagacgcatcccagcgcactgagatatctaccaaagaagtccccatcgtccagacagaaacaaagactattacttacgagagcccacagattgatgggggagctggaggagattccggtaccctcctgacggcacagacaatcactagcgagagtgtgagcacaaccacgaccacccacattaccaaaactgtgaaaggggggatcagcgagacacgcatcgagaagcgaatcgtaatcacgggagacggcgacatagaccatgatcaggcgctggcgcaggcaatacgcgaggccagagagcagcacccagacatgtctgtgacccgggtagtcgtacacaaggagaccgaattagctgaggagggcgaggactag

SEQ ID NO: 186830 - DNA, 2022 bp, synthetic construct
  misc_feature 1..2022: note = Description of Artificial Sequence: Synthetic coding sequence
  source 1..2022: mol_type = other DNA
atgaccaccgaggtgggcagcgtgagcgaggtgaagaaggacagctcacagctcgggacggatgcaaccaaagagaaacctaaagaagtggcggaaaaccaacaaaaccagtcaagtgacccggaggaagagaagggatcacagcctccacccgcagctgaaagtcaaagctctctgaggcggcaaaaacgagagaaggaaacaagcgaatccagaggcatctcgcgctttattccaccttggttgaagaaacagaagtcttacactctggtagtggctaaagacggtggcgataaaaaagaacccacacaagcagtggttgaagaacaggtgctcgataaggaggaacccctgcctgaagagcaacgccaagcgaagggagatgccgaggagatggcgcagaagaaacaggagatcaaggtggaagtgaaggaggaaaagccctcagtgagtaaggaagaaaaaccctctgtatccaaagttgaaatgcaaccgactgaacttgtgagcaaagaaagagaggagaaagtcaaggaaacccaggaggataaactggaggggggggcagccaagagggaaaccaaagaagtgcaaacaaatgaactcaaagctgagaaggccagtcagaaagttacgaagaaaactaagacagttcagtgcaaggtgacactgctggacggaaccgaatactcatgcgacctcgagaagcacgccaaaggccaggtgctgtttgataaggtttgtgagcatctcaacctgctagagaaggattacttcggactgttatttcaggaatcacccgagcagaaaaattggctcgatccagcaaaagaaatcaaacgccagctcaggaatcttccatggttgtttacattcaatgtaaaattttatccgcccgacccgtcacagctgacagaagacattactaggtattttttatgcctgcagttgaggcaggacatcgccagcggaagactcccttgctcatttgtgactcacgcgctcctggggagctacacattacaggctgagctcggcgattatgaccctgaggagcatggtagcatcgatctttctgagttccaattcgcccccacgcagactaaagagctagaggagaaggtggctgaactccataaaactcatagaggtctgtcaccagctcaagctgattcccagtttctggagaatgccaagaggctgagtatgtacggcgttgatctacaccacgcaaaggatagcgaaggggtggacattaaactgggggtgtgtgctaacgggctcctcatttacaaagaccgattacgcattaatcgctttgcatggccaaagattctgaaaattagctacaaaagaagcaacttctatattaaggtgaggcctgcggagcttgaacaatttgaaagtacaataggttttaagttgccaaatcatagagctgccaagaggctatggaaagtttgtgtagaacatcacaccttttaccgtcttgtctcacccgagcagccacccaaggctaaatttcttactcttggctccaagtttaggtatagcggccgcacacaggcacaaaccagacaagcttctaccctcatagatcggcccgctccgcactttgagagaaccagctcgaaaagagtgtcaagatcactggatggggccccgatcggcgttatggaccagtcattaatgaaagatttccccggggccgccggagagatcagcgcctacggaccgggcctggtgtccatcgcagttgtgcaggatggcgacggacgacgcgaggtcagatctcctacaaaggccccgcatctacaattgatcgagggaaaaacagtgaagggaggaatctctgaaacacgaattgagaaaaggattgtgataactggcgacggtgatattgaccacgaccaagccctggcccaggccattcgggaagctagagaacagcatccagatatgtccgttaccagagtcgtagtgcacaaggagacagagctggccgaagaaggggaagattag

SEQ ID NO: 186831 - DNA, 462 bp, synthetic construct
  misc_feature 1..462: note = Description of Artificial Sequence: Synthetic coding sequence
  source 1..462: mol_type = other DNA
atgaccaccgaggtgggcagcgtgagcgaggtgaagaaggacagctctcagctggggaccgacgcaaccaaggagaaacccaaagaggtggcagagaaccagcagaaccagtcaagtgaccccgaagaagagaaaggatctcagcctccgccggctgcagaatcacagagtagcctgcgtagacaaaaaagagaaaaagaaactagtgagagcaggggaatctcacgatttatccccccctggctcaagaagcagaagagttatacgcttgtcgtcgcaaaagatgggggtgataaaaaggaacctactcaggctgtggtagaggagcaggttctagacaaagaggagcctctccccgaagaacagaggcaggcaaaaggggatgccgaggagatggcccaaaagaaacaggaaatcaaagtggaggtgaaagaggagaagccatctgtttcaaaggaatag

SEQ ID NO: 186832 - DNA, 2244 bp, synthetic construct
  misc_feature 1..2244: note = Description of Artificial Sequence: Synthetic coding sequence
  source 1..2244: mol_type = other DNA
atgaccaccgaggtgggcagcgtgagcgaggtgaagaaggacagctcacaactcggaaccgatgccacaaaagagaaacctaaggaggtagcagaaaaccaacagaatcagagctcagatcccgaagaagagaaggggtctcagccaccgcctgccgcggagtctcagtctagcctgaggagacagaaaagagagaaggagacaagcgagtcgcgcggaatctctcgcttcattccgccctggcttaagaagcagaagtcatatacacttgtggtggcaaaggatggtggcgacaaaaaggaaccaacccaggctgtggtagaggaacaggttctggacaaggaagaaccgctgccagaagaacagagacaggctaagggggacgctgaagaaatggctcagaagaagcaggagattaaagtggaggtgaaagaggaaaagccatccgtgtctaaagaggagaagcctagtgtgagcaaagtggaaatgcaacctactgagctcgtgtcgaaagaacgtgaggagaaagtgaaagaaacacaggaggataagctggaaggcggcgccgctaagagggaaaccaaagaggtgcaaaccaatgagctcaaggctgaaaaggcatcccaaaaggttacgaaaaagactaagaccgtgcagtgtaaggtgaccctgctggacggcactgaatactcctgcgatttagagaaacacgctaaagggcaggtcctgtttgataaggtctgcgagcacctgaacttgcttgagaaagactacttcggactcctcttccaggaatctcctgaacaaaagaactggcttgaccccgctaaagagataaaacgtcagcttcgaaacttgccctggttgtttacctttaacgtgaaattctaccctccggatccgagccagttaactgaggacatcaccaggtacttcctttgtttacagctccggcaagatattgccagtgggcgcctaccttgcagttttgtgacgcacgcactgttaggttcctacacccttcaagccgaactgggcgattacgaccccgaggaacatgggtccatcgatctaagcgagttccagtttgcgcctacacagactaaggagttagaggagaaggtggcggaactacacaagactcaccgcggcctgagccccgcacaagccgactctcagtttctcgaaaatgccaagaggttgtccatgtatggcgtcgatctgcaccacgctaaggattctgaaggtgtcgacattaaactgggcgtgtgtgccaatggcctcctgatttacaaggaccggttaagaattaatagattcgcttggccaaaaatcctcaagattagttataagaggtctaacttctatatcaaggtgaggcccgccgagttggagcagttcgaatcaactatcggctttaagctccctaatcaccgcgctgcgaagagattgtggaaagtgtgtgttgagcaccacaccttctatcggctggtcagtcctgaacaacctcctaaagccaaattcctaaccctgggttccaaattcaggtatagtggccggacccaagcccagacgcggcaggccagcaccttgatcgatcgtccagctccccattttgaaagaacatcctccaagcgggtcagtagatccctggacggcgcgcctattggagtgatggatcaatcactgatgaaggactttcccggggcagccggggagattagtgcctacgggcctggcctcgtctctatcgccgtagtccaggatggggacggtagaagagaagtgagaagtccaaccaaagcgccacacttgcagctgattgaagggaaaccgccagtggtgaagactgaaatggtgacaatcagcgatgcatctcagcggactgagatatcgaccaaagaagtcccaatcgtgcaaacagaaaccaaaaccataacatacgagagcccccaaattgatggcggtgcaggcggcgattccgggacactcctcacagcgcaaacaatcacgtccgagtctgtatccacgactaccaccacacatattactaagacggttaaagggggcattagcgagactcgaatcgaaaaacgcatcgttatcacgggcgacggagacatcgatcacgaccaagcactcgcacaggccattcgggaggcgcgggagcagcacccagacatgtcagtgactagggtcgtggtccacaaggaaacagaactcgcagaagagggggaggactag

SEQ ID NO: 186833 - DNA, 540 bp, synthetic construct
  misc_feature 1..540: note = Description of Artificial Sequence: Synthetic coding sequence
  source 1..540: mol_type = other DNA
atgaccaccgaggtgggcagcgtgagcgaggtgaagaaggacagcagccaactagggaccgatgccacaaaggaaaagccgaaggaagttgccgaaaatcagcagaaccaatcctcggacccagaggaagaaaagggaagccagcctccgccggccgccgagtcccagtcttctcttcgcagacagaagcgcgagaaggaaacctccgaaagccgcgggatcagtaggtttattccgccatggctgaagaaacaaaagtcttacaccctcgtggtcgctaaagacggcggagataagaaagagccgacccaggcagtggtggaggagcaagtccttgataaagaggaaccattgccagaggagcagagacaagctaaaggggatgccgaggagatggcgcaaaaaaagcaggagataaaagtagaagtgaaagaagaaaaacccagcgtgagcaaagaggaaaaaccttcggtgtccaaagtggagatgcagccgacggagctggtgtcaaaggagcgcgaagaaaaagtgaaggaatag

SEQ ID NO: 186834 - DNA, 2559 bp, synthetic construct
  misc_feature 1..2559: note = Description of Artificial Sequence: Synthetic coding sequence
  source 1..2559: mol_type = other DNA
atgaccaccgaggtgggcagcgtgagcgaggtgaagaaggacagcagtcagcttggaactgatgctaccaaggagaagccgaaagaggtggctgagaaccaacagaaccagagcagcgaccccgaagaggagaagggatcacagccgccacctgctgccgaatcccagagctcgctccgacgacagaaaagggaaaaggaaacctccgagagccgtggtattagtcggttcatccctccctggctgaaaaagcagaagtcttatacattggtggtcgccaaagacggaggcgacaagaaggaacctactcaggccgtggttgaggagcaggtgctcgacaaggaggaacccctccccgaggaacaacgccaggcaaaaggggacgcggaagaaatggcccagaaaaaacaggagatcaaggtcgaagtgaaggaggaaaagccgagcgttagtaaagaagaaaaaccttccgtatcgaaggtggaaatgcagccaacagaactggtgtcaaaagagcgtgaggagaaagtgaaagagacacaggaggataagttggagggtggcgccgccaagagggaaacaaaagaagtgcagaccaacgagctcaaggccgagaaggcctcacagaaggtgacaaagaaaaccaaaacagttcagtgtaaagtcacactattggacggcactgaatacagttgtgatctcgaaaaacacgccaaaggccaggtgctgttcgacaaagtctgcgagcacctaaacctgctggagaaagactactttggcttgctgttccaggagtcccccgaacaaaaaaattggcttgaccccgctaaggagattaaaagacagttgcgcaatctgccatggctcttcacatttaatgtgaaattctatccccctgatccctcacaattaactgaggatataacacggtatttcttgtgcctccagctgcgacaggacatcgccagcggtaggctgccatgttcctttgtgacccacgctcttctaggctcatacacgctgcaggccgagcttggagattatgatcccgaagagcatggatcgatcgatctcagcgagttccaatttgcaccaacacaaacgaaggagctcgaagagaaagttgcggagctgcacaagacccacagaggcttgtctcctgcccaggcagacagccaatttttagaaaacgcaaaacggctgtctatgtatggtgtagacctgcaccatgccaaggactcagaaggtgtggacattaagttaggtgtgtgtgctaatggcttactgatttacaaagatcgactgaggatcaaccgctttgcctggcctaaaattctaaagatctcctataagagatcaaacttctatattaaggtgagacccgccgagttggagcagttcgaatccaccattggttttaagcttcctaatcacagagctgctaagagactctggaaagtgtgtgtggagcatcacacgttttatcgactggtgtctcctgaacagccgcctaaggcaaagtttcttactctggggagtaaattccggtatagcggccgcactcaagctcagacccgtcaggcaagcacccttatcgaccgtcccgcaccccactttgagagaaccagtagcaagcgcgttagtcgaagcctagatggagctcctataggggttatggaccagtctctcatgaaggactttcctggcgcggcgggtgagattagcgcttacggcccgggtttagtatccatagctgtggttcaggacggcgatggacgacgagaagtaagatcccctaccaaagccccccaccttcagttaatagaggggaaatcctctcacgagaccctgaacatcgtcgaggagaagaaaagagccgaagtggggaaggacgaacgcgtgataactgaagagatgaatggaaaggaaatttctcctggatctggcccgggtgagatcaggaaggttgaaccggttactcaaaaggattctacaagtttatcttcagagtcatcttccagctctagtgaatccgaagaggaagacgtaggagagtataggccgcaccacagagttacagagggaaccatacgcgaggagcaggagtatgaagaagaagtggaggaggaaccaaggcctgccgccaagcctcctgttgtgaaaacagagatggtgacaatctcggacgcaagtcagagaactgagatcagcaccaaggaggtccccatcgttcagacagagaccaaaacaatcacttacgaatcgccccagatagatgggggggccggaggcgactccggcactctcctcacagctcaaactatcaccagtgagagtgtgagcacgacaaccaccacccatattaccaagactgtgaagggaggaatttccgagacgcgaattgagaaaaggatcgtgataaccggtgatggcgatatcgatcacgatcaagcactggcccaggcgatcagagaggcgagagagcaacatccggacatgtctgtgactagagtcgtcgttcataaggagacagagctggccgaggagggggaagattag

SEQ ID NO: 186835 - DNA, 357 bp, synthetic construct
  misc_feature 1..357: note = Description of Artificial Sequence: Synthetic coding sequence
  source 1..357: mol_type = other DNA
atgaccaccgaggtgggcagcgtgagcgaggtgaagaaggacagctctcagttaggcacagatgccactaaggaaaagcccaaagaagtggcggagaatcagcaaaaccagtcatccgatcccgaggaggagaaaggcagccagccacctcctgcggcagaatcgcaatcatcactcaggagacagaaaagagagaaggaaaccagtgaatcccgtggtatctcacgcttcatcccaccatggctgaaaaagcaaaaatcatatacccttgtggtggcgaaagatggaggagataagaaagagccgacccaggcggtcgtcgaagagcaggttctggacaaggaggagccgctatag

SEQ ID NO: 186836 - DNA, 606 bp, synthetic construct
  misc_feature 1..606: note = Description of Artificial Sequence: Synthetic coding sequence
  source 1..606: mol_type = other DNA
atggaggaggaggagacccagctggaggagaagaacagcctgcgggtggaaggggacaacatttatgtccgtcactctaatctaatgctggaagaactggacaaggcccaagaggatatcctcaaacatcaggccagcatcagtgaacttaagcgcaacttcatggaaagcactccggagcctcgccccaacgagtgggagaagagacgcatcactcccctcagcttacagacacaaggcacacgcgcacctgaaagcgaggggccttgcaccggcgccagagatgcggttaagccacctgttgttaaaacagaaatggtgacaatatccgacgcctcccagcgaaccgagatctccacaaaagaggttccaattgttcagactgagacaaagacgattacatacgaatccccacaaacggtaaagggtggtattagtgaaacacgaatcgaaaagcggattgttatcactggggacggagacatagaccacgaccaggcattggctcaagccatacgcgaagcacgggagcagcaccctgacatgagtgtaacaagagtagtggtgcacaaagagaccgaattagccgaagagggggaagactag

SEQ ID NO: 186837 - DNA, 384 bp, synthetic construct
  misc_feature 1..384: note = Description of Artificial Sequence: Synthetic coding sequence
  source 1..384: mol_type = other DNA
atgaccaccgaggtgggcagcgtgagcgaggtgaagaaggacagcagccagctgggcaccgacgccaccaaagaaaagccaaaggaggtggccgagaatcagcagaatcagtccagcgaccctgaggaggagaagggcagccagcccccaccggcagctgaatctcagagcagtcttcgccgacagaaaagagaaaaggagacttctgagtctcgtggcatcagtagattcattcctccttggctgaagaaacagaagagttacactctggtagtcgctaaggacggcggtgacaaaaaggaaccaacacaagcagtggtagaagagcaagtgctagacaaggaagagccactgcccgaggagcagagacaagctaaaggatag

SEQ ID NO: 186838 - DNA, 489 bp, synthetic construct
  misc_feature 1..489: note = Description of Artificial Sequence: Synthetic coding sequence
  source 1..489: mol_type = other DNA
atgaccaccgaggtgggcagcgtgagcgaggtgaagaaggacagcagccagcttggcacagatgctaccaaggagaaaccaaaggaggtcgcggagaatcagcagaaccagagttctgatcccgaagaggaaaagggttcacagccccccccagcagccgagtctcagtccagtttacggcgtcagaaaagggaaaaggaaacaagcgaaagcagaggaatcagtagattcatccccccttggctcaaaaaacaaaaaagttatacacttgtggtggccaaagatgggggcgataagaaagagcctacccaggccgtggtagaagaacaggtgctcgataaagaagaaccattacccgaggagcagagacaggccaaaggtgacgccgaggaaatggcacagaaaaaacaggaaattaaagtagaggtgaaagaggaaaagcctagcgtgtcaaaggaggagaaaccttcagttagcaaagtggaatag

SEQ ID NO: 186839 - DNA, 3264 bp, synthetic construct
  misc_feature 1..3264: note = Description of Artificial Sequence: Synthetic coding sequence
  source 1..3264: mol_type = other DNA
atgaccaccgagagcggcagcgacagcgagagcaagcccgaccaggaggctgagccccaagaagcggcaggagcacaggggcgggccggggctccggtgccagaaccacctaaggaggaacaacagcaggccctcgagcagtttgccgctgctgcagcacactccactccggtgaggcgggaggtgacagacaaagagcaggagttcgccgcgagggcggcaaaacagctggagtatcagcagctcgaggacgacaagttgtctcagaagagctcttcctctaagctcagccggtctccgctgaaaatcgtgaaaaagcccaagtcaatgcagtgtaaggtgatccttcttgacggttctgagtatacttgtgacgtggagaaacgcagcaggggacaagtgctgttcgataaggtctgtgagcatctgaacctcttggaaaaggattatttcggcctgacctatcgagacgccgagaatcagaagaattggctggatcccgctaaagagattaagaagcaggttaggtccggggcctggcacttttccttcaacgttaagttttatccacctgatccggcccagctgtcagaagatataaccagatattacctgtgtctgcagctcagagatgacatcgtttcgggaagactgccgtgttccttcgtgaccctcgcattgctagggagctacaccgttcagtcagagctgggcgattacgatcccgacgagtgcggatctgactatatctctgaatttcgtttcgccccgaaccacaccaaggaactcgaagacaaggtgattgagctccacaaatctcatcgtggcatgacaccggccgaggcagagatgcactttctggaaaacgccaagaagctctctatgtacggcgtcgatctccaccatgccaaagactccgagggtgttgagatcatgttaggcgtctgtgcttctggacttctgatctatcgcgacagattacgaattaatcgatttgcctggccaaaggtcctgaagatcagttataaaaggaataatttttatattaagataagacccggcgagttcgaacagtttgaatcaacgattggctttaagctccctaatcacagagccgctaagcggctgtggaaggtgtgcgtggagcatcacaccttttttcgcctcctgctcccagaagctcctcccaagaagttcctgacacttggatctaagtttcgctactccggcaggactcaagctcagacaaggagggcatccgcactaatcgacagaccagctccatattttgagcggtcctcttcgaagcggtatacaatgtcccgctcccttgatggcgaagttggtaccggccagtatgccactactaaaggcatctcccaaacaaacctgatcacaaccgtgactccggagaaaaaggctgaggaggagcgcgatgaggaagaagacaaaagacgaaagggtgaggaggtcaccccgatctctgcgatccggcatgaaggtaagtccccaggcctcggaacagatagctgtccactgagcccaccctctacacactgcgcacctacctctccaacagagctgaggcgcaggtgcaaggagaatgattgcaagttgcccggctacgagccgtctcgggccgaacacctgcctggagagccagcattggattcggatgggccagggcggccatatttaggggaccaggacgtggcattttcatatagacaacagactggaaaaggcacgacattgttctccttcagcctacagttgccagagtcttttccgtctctgctggacgacgatgggtatctttcttttccaaacctcagcgagacgaatctgctgcctcaatccctacagcactacttacctatccgaagccctagcctcgtcccctgcttcctgttcatatttttctttctgttgtcagcctcattcagcgtgccctacgcccttactctgagcttccccctggcactgtgcctctgttacctggaacctaaggccgccagtctcagtgcttccctcgataacgatccatccgactctagcgaggaggagacagattctgagcggaccgacaccgccgctgacggtgaaaccacggccactgagtcagaccaggaagaagatgctgagctaaaggctcaagagttagaaaagactcaagatgacttgatgaagcaccagacaaatatcagtgagttgaagaggaccttcctggagacctccacggatactgccgttaccaacgagtgggagaagcgcctcagtacaagcccggtgaggctcgccgctaggcaagaagacgccccaatgatcgagcctttggttcctgaagagaccaaacagagctcaggggaaaaattgatggacggttctgaaatattctctttgctcgagtccgcacgcaagccaaccgagtttatcggaggagtcacaagcactagtcagagctgggtccaaaagatggaaaccaagaccgagtcctctggaatagaaacagaacctacagtgcaccacctgccgctcagcacagaaaaggtagtgcaagagacagttctggtggaggagaggagggtggtgcacgcttccggagacgcctcatatagcgctggggacagcggtgatgccgccgctcagcctgcttttacaggcattaaggggaaagagggcagcgcccttacggagggtgcgaaggaggagggaggggaagaagtggccaaagctgtgcttgaacaggaggagacagctgccgccagtcgcgagcggcaggaggagcagagcgccgcaattcacatctctgagacactggagcagaagcctcatttcgagtcaagtactgtcaagactgagacgatttcttttggttcggtgtcccctggaggcgtgaagctggagatttcaacaaaggaagtgcccgttgttcataccgaaaccaagaccatcacgtatgagagctcacaggtggatccgggcaccgacctggagccaggagtcctgatgagcgctcagacaatcacatcggagaccacctctacgacaactactactcacattaccaagacagtgaagggaggtatctccgaaactcggatagaaaaacgaatcgtgatcacaggggatgccgacattgatcacgaccaggccctcgctcaggcgatcaaagaggctaaggagcagcatcccgacatgtcagtcactaaggtggtggttcacaaggagaccgagatcactcccgaagacggggaggactag

SEQ ID NO: 186840 - DNA, 3264 bp, synthetic construct
  misc_feature 1..3264: note = Description of Artificial Sequence: Synthetic coding sequence
  source 1..3264: mol_type = other DNA
atgaccaccgagagcggcagcgacagcgagagcaagcccgaccaggaagctgagcctcaagaggcagccggcgcgcagggccgcgctggcgctcctgtccccgaaccccctaaagaagagcagcaacaggcactcgagcagtttgcggcagctgcagcccattccacgcctgtgcgtcgcgaggtgaccgacaaggagcaggaattcgcggcaagggccgcaaagcagctcgagtatcaacagttagaagacgataaactgtcccagaaaagctccagctctaaactctcccggtcacccttgaagattgttaagaagccgaagtctatgcaatgtaaggtgattcttctcgatggtagcgaatacacctgcgacgtggagaagcggagccggggccaggtcctgttcgacaaagtgtgcgaacatttaaatctcctcgagaaggactactttggcttgacgtatagagatgccgagaaccagaagaactggctggatccagccaaggaaattaaaaagcaagtcagatcaggagcatggcatttcagctttaatgtgaaattctatccacccgaccccgcacaactgtccgaagatatcacacggtattacctctgtttacagctgcgcgacgacattgtcagcggtagactcccctgctcttttgtaacattagccctcctaggtagttataccgttcagtctgagctcggtgattatgatcctgacgaatgtggatcagattatatctccgagtttagatttgctccaaaccacaccaaggagctggaagacaaggtgattgagctccacaagagccaccggggtatgactcccgccgaagctgaaatgcacttcctggagaacgctaaaaaattatctatgtacggcgtggacctccaccatgctaaggacagtgaaggagttgaaattatgctcggggtctgtgctagtgggctccttatctatagagatagacttagaataaaccgtttcgcttggcccaaagtgcttaagataagctataagcggaacaacttttacattaagattcggcccggcgagttcgaacagttcgagtctaccattggtttcaaactgcccaatcatcgagctgccaagaggctgtggaaggtctgtgtcgagcaccacaccttcttcaggcttctactgccggaggcccccccaaagaagtttctgaccctgggaagcaaattccgttactcagggcgcacccaggcccagacccggagagctagcgcacttattgatcggcctgctccatatttcgaacgctcgtcatctaagagatataccatgagtagaagtctcgacggagaggtggggactgggcagtacgcgaccacgaagggcataagtcagaccaacttgatcactacagtcactccggagaagaaggccgaagaggagagagacgaagaggaggataaacggagaaaaggcgaggaagtaaccccaattagtgctatcaggcatgagggaaaaagccctggcctcgggactgattcatgccctctttctcctccttctacacactgcgcgcccacaagtccaacagagctccgcagaagatgtaaagagaacgactgcaaactgcccggctatgagccctcacgtgcagagcaccttcccggagagcctgccttggatagcgacggccccggcaggccctatctgggggaccaggatgttgctttcagttaccgccagcagacaggtaaaggtaccacactcttctcttttagcttgcagctgccagagagttttccatctctcctcgacgacgacggataccttagtttccctaatttgtccgagacgaacctgctgccacaatccctccagcattacctgccaattagatccccttctttggtgccctgctttctgtttatcttcttttttctcctgagcgcatcttttagtgtcccttacgccttgactctgtcattcccgctggctctgtgcctttgctacctcgaaccaaaagcagcctccctgtcagccagtctcgacaacgatccttctgattcctctgaggaagagacagacagcgagagaacggacactgctgccgacggcgagacaacagctaccgaaagtgatcaagaggaggacgccgagctcaaagcacaggagctggagaagacccaggacgatctgatgaagcatcaaacaaacatctcagaacttaagaggacctttctggagacaagtaccgacactgctgtcacaaacgagtgggaaaaacggctttccactagccctgtcaggttggctgcccgacaggaggacgctcctatgattgagccgctggttcctgaagaaaccaaacagtccagtggtgaaaaactcatggatggctcagagatcttcagcctgcttgaatccgcgcggaagccaacggagtttatcggtggcgtgacaagtaccagtcagtcatgggtacaaaagatggagacaaagactgagtcttccgggatcgagaccgagcccacagtgcaccatttgcctctcagcacggagaaggtcgtgcaggagacagtgctggtggaggagaggagagtggtccatgcctctggtgacgcaagctatagcgcaggcgatagtggcgacgccgccgctcaacccgccttcaccggtatcaaaggaaaggaggggagtgccctgacagagggggccaaggaggagggaggagaagaggtggctaaggccgttttggagcaagaggaaactgctgccgcttctagggaacgacaggaggaacagagcgccgccatccacatatcagagacactggagcagaagccgcacttcgaaagctcgaccgtcaaaactgaaaccataagtttcggctccgtgagccctggaggtgtgaagttggagatctcaactaaggaggtacctgttgtgcacacagagacgaaaactatcacttacgagagctcacaggtagatcccggaactgatcttgagccaggagtcctcatgtctgctcaaactatcacatctgaaactacttcaacaacgaccacaacacatatcaccaaaactgtaaagggtggtatttctgaaacgaggatcgagaaaaggattgtgatcaccggggacgctgacatcgatcacgatcaggccttagcccaggccattaaagaagctaaggaacagcatcccgatatgtccgtaacaaaagtggtcgttcacaaggaaacagaaataaccccagaggacggagaggactag

SEQ ID NO: 186841 - DNA, 2598 bp, synthetic construct
  misc_feature 1..2598: note = Description of Artificial Sequence: Synthetic coding sequence
  source 1..2598: mol_type = other DNA
atgaccaccgagagcggcagcgacagcgagagcaagcccgaccaggaggcggagccccaagaagccgctggcgcccaaggacgcgccggggccccagtgcctgaaccacccaaggaagagcagcaacaggctttggaacaattcgcggcggccgccgcacactcaaccccggtacgaagagaagtgactgataaggagcaggaattcgccgctcgtgctgcaaagcagctggagtaccaacagctggaagacgataagctgtctcagaagtcaagctcttcaaagcttagtaggtcgccgttaaaaatcgtgaagaagcctaaatccatgcaatgtaaggtgattctgttggatggctcagagtacacctgcgatgtggagaagcgatcccggggccaggtgctattcgacaaagtttgtgaacatctcaatttgctggagaaggactatttcggactcacttatagagacgccgagaaccagaagaactggctcgatcccgctaaagagataaagaaacaggttagatccggtgcctggcatttcagtttcaatgtgaaattctatcccccagaccccgctcagctgagtgaggacataacaaggtattacctgtgtctgcaactgcgcgatgatattgtaagtggaagattgccctgttcattcgtgacactcgctctgctggggtcttacacagtgcaatctgaactcggagactacgacccagatgagtgcggtagtgactatattagtgaattcagatttgccccaaatcacaccaaggagttagaggacaaggtgatcgagttgcataaaagtcatagaggcatgactcccgccgaagctgagatgcactttctcgaaaacgccaagaaactgagcatgtacggagtggatttgcaccatgccaaggacagtgaaggcgtggaaatcatgctgggagtttgcgcttccggcctccttatctaccgcgacagactgaggatcaatcgctttgcctggccaaaagttttgaaaatcagctacaagaggaataacttttacataaaaatccggcccggtgaatttgagcagtttgaatccaccatcggatttaagctgccaaatcatagagctgcaaagcgtctgtggaaagtgtgcgttgagcaccacacgttttttcggctgctactccctgaagcaccaccaaaaaagttcctgaccctgggctccaaattccggtactccggtagaacccaggctcagacccgtagagcttcagcacttatagaccggcctgccccctatttcgagagaagcagcagtaagaggtatactatgagcagatcccttgacggcgcctccgtcaatgagaaccacgaaatctatatgaaggacagtatgagcgcagccgaagtggggactggacagtacgcaacaaccaagggaattagccagactaacttgattaccaccgtcacacctgagaagaaggcagaagaggagcgagacgaagaagaagacaagcgcaggaagggtgaagaagtgacccctatatcagccatccgccatgagggcaaaaccgacagcgaaaggactgacaccgccgccgacggtgaaaccaccgcaacggaggagctcgaaaagacacaggatgatctgatgaagcaccagactaatatttcagaactgaaacgcacttttttggagacctcaactgacactgctgttacaaatgagtgggaaaagcggctatctacatctcctgtcagactggcggctagacaggaagacgcacccatgatagagccattagtaccagaagaaaaaatggagaccaaaacagaatccagcggaatcgagactgagcccactgtgcatcacctacccctgtctacagaaaaggtcgttcaagagaccgtcctcgtggaggagcgtagggtcgtacacgcgtcaggagatgccagctactcagccggagattccggcgatgctgccgcacaaccggcatttaccggcattaaaggcaaagagggcagcgcactgaccgagggtgccaaagaggaggggggtgaggaagtcgctaaggcagttcttgaacaggaagaaacagccgccgcctccagggaacgccaggaggagcagagtgccgccattcacatcagcgaaacactcgagcagaaacctcattttgagtcctccaccgtcaagacagaaacgatctcctttggttctgtgagccctggtggagtaaagctggaaatctctactaaggaggtgcctgttgtgcacaccgagacaaaaactataacctacgagtcctctcaggtggaccctgggactgatctggagcccggcgtcctcatgtccgcccagacaattaccagtgagactacaagtacaacaaccaccacccacatcactaaaactgtgaaaggtggcatctccgaaacccgcattgagaaacgtattgttattacaggcgatgcggacattgaccatgaccaggccctggcccaagccatcaaggaagctaaagagcaacatcccgacatgtccgtgacaaaggtggtggtccacaaagaaactgaaattacccctgaggacggagaggactag

SEQ ID NO: 186842 - DNA, 1155 bp, synthetic construct
  misc_feature 1..1155: note = Description of Artificial Sequence: Synthetic coding sequence
  source 1..1155: mol_type = other DNA
atgaagcaccagaccaacatcagcgagctgaagcggaccttcctggagacatctaccgatacagccgtgaccaacgagtgggaaaaaagactaagcacgtccccagttcgtcttgccgcccgccaggaggacgctccaatgattgaaccactggtgccagaagaaacgaaggaagaaaccgaaatctctgagaaagtgatttttttgcagcagggcagcgcgccctttttggaaagccagacaaaacagagctcaggcgagaaattgatggacgggagcgaaatcttttccctgctcgaatctgcccgtaagcctacagagttcatcggaggggtgacaagtactagccagtcttgggtacagaaaatggagacgaagaccgagtcctcaggcatcgagactgagcccacggtacaccacttaccactaagcaccgagaaggtcgtccaggagactgtgctcgttgaggagagacgagttgtgcacgcctccggtgatgcaagctacagcgccggtgattccggagatgccgccgctcagcccgccttcactggcatcaaggggaaagaaggatctgctctgactgagggcgcgaaggaagaggggggtgaagaagtagcaaaagccgtgctcgagcaggaagagactgctgcggcttctagagagcgccaggaggaacagagcgctgccattcacatctccgaaaccctggagcagaagcctcactttgagtcctcaactgtcaaaactgagaccatctcttttggaagtgtgtcaccggggggagtgaaattagaaataagtacaaaggaggtgcccgtggtccacacagagaccaagacgatcacctacgagtcatcacaggtggatcctggcaccgatctggaaccaggggtgctgatgagcgcccagactataacttcagagaccactagcacaacgacaactacacatattacaaaaaccgtgaagggtggaatcagtgaaacaagaatcgagaagaggatagtgatcactggagatgcagacattgaccatgaccaggcactggcccaggcaattaaggaggcaaaggagcagcaccctgatatgtcggtcaccaaagttgtagtgcacaaggaaacggagatcacaccggaagacggagaggattag

SEQ ID NO: 186843 - DNA, 2271 bp, synthetic construct
  misc_feature 1..2271: note = Description of Artificial Sequence: Synthetic coding sequence
  source 1..2271: mol_type = other DNA
atgcagtgcaaggtgatcctgctggacggcagcgagtacacctgcgacgtagagaaaaggagcaggggccaggtgctgttcgataaagtttgtgagcatttgaatctcttggaaaaagactattttgggctgacctatcgcgacgccgagaaccagaagaattggttggaccccgcgaaggagattaagaagcaagtccggagcggagcctggcacttcagctttaacgtgaagttctatccacccgaccctgcacaactttctgaagacattacacgatactacttgtgtctccagctgcgcgatgatattgtgtcaggacgtttgccatgctcatttgtcactctagcgctccttggatcatacaccgtacagtctgaattgggcgactatgatcccgatgagtgcgggtctgattatatttctgagttcaggttcgctccaaatcataccaaagaacttgaagataaggtcatcgagcttcacaagtcacacagggggatgacacccgctgaggcggaaatgcacttcctcgagaatgcaaaaaaattgtctatgtacggcgtagatctgcaccacgctaaagactccgaaggagtggagattatgctcggagtatgtgcgagcggactgttgatatatagggacaggttgagaattaatagatttgcctggcctaaagtcttgaagattagctacaagagaaacaatttttacatcaaaatcagacccggcgagtttgaacagttcgaaagcaccatcggatttaagctgccaaatcaccgcgcggcaaagaggctctggaaagtttgcgttgagcaccacacattctttcggctgttgctccctgaagcccctcccaaaaagtttctgaccctggggagcaagttcagatattctgggcgtacccaggctcagactagaagagcttcagcactgatagaccgaccagcaccttatttcgaaagaagtagctcaaaaagatatacaatgtcaagaagcctggatggggcgagtgtcaacgaaaatcacgaaatttacatgaaagattctatgagcgccgccgaagtggggaccggacagtatgccaccaccaaaggaatttctcagactaaccttataacaacagtgacaccagaaaagaaggccgaggaggagcgcgacgaggaggaggacaaaagacggaaaggagaggaggtcacacccatatcagccatacgacacgagggcaagaccgactcagaacggaccgacaccgccgccgatggtgagacgactgccacggaggagttggaaaaaacgcaggatgatcttatgaaacatcagactaacattagcgagcttaaacggaccttcctggaaacctcgaccgacacagcagtcaccaacgaatgggagaaaaggctgtccacgtcccccgtgcgcctggctgcacgtcaagaagacgcacccatgatcgagcctctcgtacctgaggaaaagatggagacgaaaactgagtccagtggtatcgaaaccgagcccacagtccatcaccttccactcagcaccgagaaagtcgtgcaggagactgttcttgtggaggaacggagagtagttcacgcttcaggggacgcctcttattcagccggagattccggtgacgcggccgcacagcccgccttcacggggatcaaagggaaggagggttcagccctgaccgaaggcgcgaaggaggagggtggcgaggaagtggctaaagccgtactggaacaggaagagaccgctgctgcatctagggagaggcaggaagagcagtccgccgccatccatatttccgagactctcgaacagaagcctcacttcgagagcagcaccgtgaagacagaaacaatctctttcggatcagtatctcccgggggggttaaattggaaattagcaccaaggaggtgcccgtcgtgcacactgagactaagacaattacctacgagtcgtcccaagttgacccaggcacagacctggaacctggtgtccttatgagcgctcagaccatcaccagtgagactacctctaccactactacgactcacatcaccaagaccgtgaagggcggtatctctgagacccggatcgagaagcgcattgttattacaggagacgcggatatcgatcatgatcaggctttagctcaggctattaaggaagctaaggagcaacatcccgatatgtccgttaccaaagtggtggtgcacaaggaaactgagattacacccgaggatggagaggattag

SEQ ID NO: 186844 - DNA, 1179 bp, synthetic construct
  misc_feature 1..1179: note = Description of Artificial Sequence: Synthetic coding sequence
  source 1..1179: mol_type = other DNA
atgaagcaccagaccaacatcagcgagctgaagcggaccttcctggaaaccagcactgatacggccgttaccaacgagtgggaaaagagactcagcacatcacctgtccgcttagccgcccggcaggaggatgctccaatgattgaacccctggtacctgaggaaccctctgtcattaaaaagatgcaggaaggcgacagtgccgattccgtagttacttctcggcaaataattttccaaaaaactgtaccctctacattggagacgaaacagagcagcggcgaaaaactgatggatggaagcgaaatcttctccctcttggagtccgcccgtaaacccaccgagtttatcggaggcgtgacaagtacctctcaatcctgggtgcagaagatggagactaagaccgagtcatctggaattgaaaccgaacccactgtgcaccatctgcctctgtcgaccgaaaaagttgttcaagagaccgtcctggtagaagaacggcgcgtggtgcacgcctctggggatgcctcgtactctgccggagactcaggtgatgctgccgcccaaccggcctttactggaattaaaggcaaagagggatccgccctgacagaaggcgccaaggaagaggggggagaggaggtcgcgaaggcagtgctcgaacaggaagaaaccgcagccgccagccgggagcggcaggaggagcagagtgccgccattcatatctcagaaaccttagagcagaagcctcacttcgaatcgtccaccgtaaagaccgaaaccattagctttgggagtgtctcccctggaggcgtgaagctggagatctccactaaggaagtccccgtggttcacaccgaaacaaaaacaatcacatacgagagctctcaagtcgatcccggcactgacctcgagcccggggtgttgatgagtgcacagaccataacatcggaaaccacatcgacaacaaccacaacacacatcacaaaaacagtgaaaggtggaatttccgaaactagaatcgagaagagaatagtgataaccggcgacgccgacatcgaccatgaccaggcgctggctcaggctattaaagaggccaaagagcaacatcctgacatgtccgttaccaaggtggttgtgcataaagagacagaaatcacgccggaggacggggaagattag

SEQ ID NO: 186845 - DNA, 936 bp, synthetic construct
  misc_feature 1..936: note = Description of Artificial Sequence: Synthetic coding sequence
  source 1..936: mol_type = other DNA
cggtggcagctgggcggcgccgccaccgccgccgccggcggcgcccgggtatggcggcccttgcccgcttcaaggtcgtccttcccgccaccctcccctcgattggacccaggggaattcgagggaaagagtccttgcggaggaacgtgcgagcagccatatttaagtctcccacttaggtacttcttcagccccaggaaagtcgtcccagccggatgtgagcaagcccccgggggcgccccgaaagagggattcggcgatagcgactccgagtctaagcccgaccaagaggcggaaccccaggaggccgccggcgctcagggcagagctggggctcctgtgcccgaaccccctaaagaggagcaacagcaggcactggagcagttcgcagcagctgccgcacacagcacgcccgtccggagggaggtgaccgacaaagaacaggagtttgcggcgagggcagcaaaacaacttgagtaccagcaactcgaggatgataagttaagccaaaaaagttcttccagcaaactgagtcgatccccgctcaagattgtgaagaagcccaagtcaatgcagtgtaaagtaattctcctggatggctctgaatatacctgtgacgtggaaaaaaggtcccggggtcaagtgctcttcgacaaggtgtgcgagcatcttaatcttctcgaaaaggactactttggactcacctatagggacgctgagaaccagaagaactggctggacccagctaaagagattaaaaagcaggtccgatccggggcttggcatttctcgtttaacgtcaaattttaccctcctgacccggcccagttgtctgaggatataactcggtactacctctgcctacagctcagagatgacatagttagcggaaggctgccttgcagttttgtcactctcgctctactcggctcatag

SEQ ID NO: 186846 - DNA, 2652 bp, synthetic construct
  misc_feature 1..2652: note = Description of Artificial Sequence: Synthetic coding sequence
  source 1..2652: mol_type = other DNA
atgaccaccgagagcggcagcgacagcgagagcaagcccgaccaggaggcggagccccaggaagcagctggtgcccaaggacgggccggtgctccagtccctgaacctcccaaggaagagcagcagcaagctttggaacagttcgcggccgctgctgctcattcgactcccgtgaggagagaggtcacagacaaagaacaggaatttgccgctagggccgcaaaacaacttgagtaccaacagttggaggatgacaagctgtcccagaagagctcatccagcaaactttcaaggagccctctgaaaatcgtgaagaagccaaagtctatgcagtgtaaagtaatattgctcgatggatccgagtatacctgcgacgtagagaagaggagccggggtcaggtcctattcgataaggtgtgcgaacacttgaatctgctcgaaaaggactattttggcctaacctaccgcgatgccgagaatcaaaagaactggctggacccggcaaaggaaatcaagaaacaggttcgttctggcgcatggcacttcagtttcaacgttaaattctatccccccgaccctgctcagctgtctgaggatataacgcgctactacctctgccttcagctgcgcgacgatatcgtaagcgggaggttgccttgctcattcgtgacccttgcgctgttggggagctataccgtgcagtcagagctgggggattacgatccagacgagtgcggtagcgattatatctccgaattccgttttgctcccaaccacaccaaggaacttgaggacaaggtgattgaactgcataagtcacacaggggaatgacacctgcagaggccgagatgcacttcctggagaacgctaagaagctcagtatgtacggggtcgatttgcatcacgccaaagactcggaaggagtggagatcatgctgggggtttgtgcttcagggctgctgatctatcgggatcggctcagaatcaaccgcttcgcctggcctaaggtgcttaagatctcatataagagaaataatttttacattaagattaggcccggtgagttcgagcagttcgagtccactatcggtttcaagctccccaatcacagagccgccaagaggctctggaaggtgtgcgtggagcaccatacattcttccgcctgcttctaccagaggccccccccaagaagttcctgacactcgggtcgaaattccggtactccgggcgcacgcaggcccagacgcgcagagcctccgctctgattgaccggccggcgccatactttgagcgctcctctagtaagcggtatacgatgtctcgttcacttgacggcgccagcgtcaacgagaatcacgagatatacatgaaggacagtatgtcagcagctgaggtggggaccggccagtacgctacaaccaagggcatctcacagacgaatctcatcactactgtcacccctgagaagaaagctgaagaagagagagacgaggaagaggataaacgacgaaagggtgaagaagtgacccccatcagcgccattagacatgaaggcaagactgacagcgaacgcacggacacagcagccgatggtgaaaccactgctactgaaagtgatcaagaggaagatgctgaactcaaagctcaggagctggagaaaacacaagatgatctcatgaaacatcagactaacatcagcgagctgaaaagaaccttcctcgagacatctacggataccgcagtcaccaatgagtgggaaaaacgactgtcaacttcccccgtacgcctcgccgctcggcaggaggatgcccctatgattgagccgctcgtgcctgaagagaccaagcagtcttctggcgaaaaattgatggacggttctgaaatcttcagccttctcgagagcgcccgtaagccaaccgaattcatagggggtgttaccagcacatcacaatcttgggtacaaaaaatggagaccaaaactgagtctagcgggatcgagaccgaacctactgtgcaccatttaccgctgagcaccgagaaagtcgttcaagaaacagttctggttgaagagaggagagtggtgcacgcatccggcgatgcctcctatagcgccggtgacagcggtgatgccgcggctcagcccgcattcactgggattaagggaaaagagggctccgccctgacagagggggctaaggaagagggcggggaggaagtagctaaagccgtgcttgagcaggaagagacagccgcggcatcccgggagcgccaagaggaacaatctgctgctattcacatttccgaaactcttgagcaaaaacctcacttcgagtcctcaaccgtcaagacagagaccatatctttcggatcagtgagcccgggaggcgtgaaactggaaatttccacaaaggaagtgccagtggtacacaccgaaacaaaaacaattacctatgaaagctctcaggtcgaccctggcacggatctagaaccaggcgtgctgatgagcgcacaaactatcacctccgaaactacaagtaccacgacaaccacgcatatcacaaagactgttaaaggaggtatctcagagaccaggatcgagaagaggattgtgatcacaggagacgctgatattgatcatgatcaggaatag

SEQ ID NO: 186847 - DNA, 2271 bp, synthetic construct
  misc_feature 1..2271: note = Description of Artificial Sequence: Synthetic coding sequence
  source 1..2271: mol_type = other DNA
atgcagtgcaaggtgatcctgctggacggcagcgagtacacctgcgacgtggagaagagatccaggggtcaggtgctgtttgacaaagtgtgcgagcatctcaatctgcttgagaaggactattttggtctgacctatcgagatgcggagaaccaaaaaaactggctggacccagccaaagagatcaagaaacaggttcgtagcggcgcctggcatttttccttcaacgtgaaattctaccccccagatcccgcacagctaagcgaggacatcactcggtactatctgtgtttacagctgcgggacgatatagtttccggcaggctgccctgctccttcgtgaccctggcactgctgggctcctacactgtgcagagtgagttgggggactacgatcctgatgaatgtgggtccgactatatttctgagttcagatttgcgccaaatcacaccaaggaactcgaggataaagtgattgagctccacaaaagtcacaggggtatgacaccggccgaggcagaaatgcacttcttggaaaatgccaagaagctcagcatgtacggggtggaccttcatcacgcaaaagatagtgagggagtggaaattatgctcggggtttgcgcatcgggcctcttgatctatcgcgatcggttaaggatcaataggttcgcctggccaaaggtactgaagatcagctacaaacggaacaacttttatatcaagataagacccggagagtttgagcagttcgagagtacaataggcttcaagcttcccaaccatagagccgctaagagactgtggaaagtctgcgtggagcaccacacttttttccgcctgctgctccccgaagcacctccaaaaaaattcctgactcttggatccaaatttagatactccgggagaacccaggctcagacccgccgagctagcgccttgatcgaccgtccggcaccctatttcgagcggagcagtagtaaaaggtacactatgagtagatcgttagacggggcatcagtcaatgaaaatcatgaaatttacatgaaagattcaatgtccgccgctgaggtgggaacaggacagtacgccacgacgaagggcatctcccagaccaacctcatcacaaccgtgacccctgagaaaaaagccgaagaggagagagacgaggaggaggacaaacgtcgaaagggggaggaagtcacccctatctcagccatccggcatgagggcaaaacggattccgagcgaaccgatactgctgccgacggcgagaccacagccaccgaagagttagagaaaactcaagatgacctgatgaaacatcaaacaaatatctcagagcttaaaagaacctttctggaaacatctacagacacagcagtcacgaacgagtgggagaaaagactctcaacctctcctgttcggctcgctgccaggcaggaagatgcacctatgatagagccactggtccccgaggagaaaatggaaaccaagacagaatcttccggtatcgaaacagaaccaacagtacatcatcttcccttgtccacagagaaggtggtgcaggagacagttctggttgaggaaagacgggtagttcatgcatccggagacgcgtcttactccgccggcgattcaggggacgccgcggcacagccagcatttaccggcatcaagggcaaagagggctcagctttgacagagggagccaaggaggagggcggcgaggaagtggcgaaagcggtgctggagcaggaagagactgccgcagcatccagggagcgccaagaagagcaatctgcggccattcatatctctgagacattagaacagaagccccactttgaatcctcaaccgtgaaaactgagaccatcagcttcgggagtgtgtccccgggcggcgtgaaactggagatctcaaccaaagaagtgccagtggtgcacaccgaaaccaagacgatcacttacgagtctagtcaggtcgatccaggcacagatcttgagccaggtgttctgatgagtgcccagaccataacatcagagaccacgtcgactacaaccaccacccacatcaccaagacggtgaaagggggtatcagcgaaacacgtattgagaagcggattgtcatcactggggatgccgacattgaccacgatcaagctttggcccaagcaatcaaagaggccaaagaacagcaccccgatatgagcgtcacaaaagttgtcgtgcacaaggaaacagaaataacgcctgaggatggagaggattag

SEQ ID NO: 186848 - DNA, 2166 bp, synthetic construct
  misc_feature 1..2166: note = Description of Artificial Sequence: Synthetic coding sequence
  source 1..2166: mol_type = other DNA
atgggccagggcgagcccagccagcggagcaccggcctggccggcctctatgccgctcctgctgcctcgccggttttcatcaaaggaagtgggatggacgccctgggaatcaaatcctgcgatttccaggctgcccgcaacaacgaggagcaccatactaaagctctgtcctctcggaggctgtttgtgcgcaggggccagccatttaccatcatcctttactttcgcgccccagttcgcgcattcctgcctgctctaaaaaaggtggcactgacagctcaaacaggcgagcagcctagtaaaataaatcgtacacaagcgactttcccaatttcatccctgggcgatagaaaatggtggtcagcagtggtcgaggaacgagatgcgcaatcttggactatctctgtgactacccctgccgatgccgtgattgggcattattccctgttgctgcaggtctccgggcggaagcaattgctgttggggcaatttaccttgctgtttaatccatggaaccgcgaggacgcagtgttcctcaagaacgaggcccagcgtatggagtacctcctgaaccagaatggccttatatatcttggcaccgccgactgcatccaggctgaatcttgggatttcggtcagttcgaaggagatgtgatcgatctttctctgagactgctgagtaaagacaaacaggtggagaagtggagccagcctgtgcacgtggctcgagtactcggggctctgctccactttctgaaggaacaacgggtacttcccacccctcagactcaagcaactcaggagggtgcacttctgaacaagaggagggggtccgtgcccatcctgcgccaatggctcacaggaagggggagaccagtctacgacgggcaagcttgggtcctggcggcggtggcttgcaccgtcctaagatgcctgggcattccagcgcgggtcgtaacaacatttgcttctgcccaaggtaccggcgggaggctcttaattgacgaatattataatgaggagggcctgcagaacggagaaggccaacgaggaaggatatggatctttcagacaagtacagagtgctggatgacgcgccccgctctgcctcagggctatgatggttggcagatactgcatccctctgcccctaatggaggcggggtgctcgggtcctgcgatctggtacctgttcgtgccgtcaaagaagggactcttgggctcactcctgcagtttccgatcttttcgctgccattaatgcctcttgcgtagtgtggaaatgttgcgaagacgggactctggaactgacggactccaatacaaaatacgttggtaacaatatcagtacgaagggggtgggctctgatagatgcgaggatataactcagaattacaagtatcccgagggctcccttcaagaaaaagaggtactggagagggtggaaaaggagaagatggagagggaaaaggacaatggaatccggccgcctagtctggagaccgcatctccattatacttgttattaaaggcgccaagcagtctccccttgcgcggggatgctcagatttcagtgaccctggtcaaccacagcgaacaggagaaagcagtgcaacttgccatcggagtccaggcagtacattacaatggagtgctggccgccaagctgtggcgcaaaaaacttcaccttacactctcagccaatctagaaaagatcattacaattggcctgttcttctccaattttgagagaaacccgcccgaaaatacattcctgaggctcacagccatggcaacccactctgaaagtaatttaagctgcttcgctcaagaggatatcgccatatgcagaccccacctcgcaatcaagatgcccgaaaaagccgaacagtaccagcccctgaccgccagtgttagcctccagaattccttggacgcacctatggaggactgcgtgatctccatcttaggtagaggtcttatccatcgagaacggtcctaccggtttcgcagtgtatggcccgaaaacaccatgtgcgcaaaattccagttcaccccaacacacgtcgggctgcaacgcctgaccgtagaggtggactgcaacatgtttcaaaacctgactaactataaaagtgtcacagtcgttgctcctgaactgagcgcatag

SEQ ID NO: 186849 - DNA, 1860 bp, synthetic construct
  misc_feature 1..1860: note = Description of Artificial Sequence: Synthetic coding sequence
  source 1..1860: mol_type = other DNA
atgggccaggccctgggcatcaagagctgcgacttccaggccgcccgaaataatgaagagcaccacacaaaagccctatcatcaaggcgcctatttgtgcgacgcgggcaaccatttacaatcatcttgtacttcagggcgccggtgagggctttcttaccagctttaaagaaagtagctctcacagctcaaacaggagaacaaccttcaaagatcaatcgaacacaggccacctttccaatttcttccctcggcgatagaaagtggtggtccgccgtcgtggaagagagagatgcccagtcctggaccatctctgtgactacacctgctgatgcggttatcggacactatagtctgctgctccaggtgtctggccgcaagcagctcttgcttggacagttcactctgttatttaacccctggaatagagaggatgctgtattcttaaaaaacgaggctcaaaggatggaatacttgttgaatcaaaacggtctgatttaccttggaacagcagactgcatacaagctgaatcttgggatttcgggcaatttgagggggacgtgatagacctgtctctccgtctactgtcaaaagacaagcaagtggaaaaatggagtcagccagttcacgttgcccgggtgctcggagctctgcttcacttcctcaaggaacaacgcgtgctgccgacaccacagacccaagccactcaggagggagctttgctaaacaagaggcgggggagcgtccccatcctacgtcaatggttaactgggcgaggacgccctgtttatgatggtcaggcttgggtcctggcagctgtggcatgcaccgtgctccgctgcctgggaatcccggccagggtggtgactactttcgcatcagcccagggtacagggggccgcctactgatcgacgagtattacaacgaagagggcttgcaaaacggggaaggtcagaggggaagaatatggaaatgctgtgaagacggtacactggagctgaccgatagtaacacgaaatacgtaggcaataatatctccactaagggtgtggggagtgatcgctgcgaggacatcacacagaactacaagtacccagagggctcattgcaggaaaaagaggtcctcgaacgcgtggagaaggaaaaaatggaacgagaaaaggataatggaatccgtcctccctcactcgagacagcatcccctttgtacctcctccttaaggccccatcctctctacctctgcgaggggatgctcagatatctgtcacgctggtcaatcattccgagcaagagaaggcagtgcagctggctatcggtgtgcaggccgtacactataacggcgtgctggcagcaaagctgtggcgaaaaaagctgcacctaactctttccgccaatctcgaaaagattatcacaatcggactgttcttctctaacttcgagaggaatccgccagaaaatactttccttcgtttgaccgcgatggctacccatagtgagagtaacctgagctgcttcgctcaggaagacatcgcaatctgtcgccctcatctcgccatcaagatgcccgaaaaagccgagcagtaccagcctttgacagcctccgtgtccctgcaaaattcactggacgcgcccatggaagactgcgtgattagcatcttgggtcggggcctgatccatcgcgaaagatcttatagattccgctctgtatggcctgagaacacgatgtgcgccaaatttcagttcacccctacccacgtagggctccagagactcacggtcgaggtcgattgtaacatgtttcagaacctcacaaattacaaatccgtcaccgtggtcgcacccgagctgtcggcctag

SEQ ID NO: 186850 - DNA, 2076 bp, synthetic construct
  misc_feature 1..2076: note = Description of Artificial Sequence: Synthetic coding sequence
  source 1..2076: mol_type = other DNA
atgggccaggccctgggcatcaagagctgcgacttccaggccgccagaaacaacgaggaacatcacaccaaggccctgagcagtcgccgattgttcgtgcgacggggacagcctttcaccataattctctacttcagagcgcccgtaagagcgttccttcccgccctgaagaaggttgcactcacagcccagactggcgagcagccttccaaaatcaaccgtacacaggccaccttccccatatcatctctgggcgataggaaatggtggtcagccgtggtggaggaaagggatgcccaaagttggaccatctctgtgacaacgcccgccgatgccgtgattggccactactccttgctgctgcaggtgtcagggaggaaacagctgctgctgggccagttcacacttcttttcaacccctggaatcgtgaagatgccgtgtttctgaaaaatgaggctcaacggatggaatacttactgaaccagaatggtcttatctaccttggaaccgccgactgcattcaggctgagtcctgggattttggccagttcgagggtgatgtgattgacttgtcactgcgtcttctttcaaaggacaagcaagtcgagaaatggagtcagcctgtgcatgtggcccgagtccttggggccctgctacacttcctgaaagaacaaagggttctcccaactcctcaaacccaggcaacccaggaaggtgcactcctgaacaaaagacgcggttctgtacctattctgaggcagtggctgacagggcggggccgccccgtctacgatggacaggcatgggtgctggcggctgtggcgtgcaccgtcctgaggtgcctggggatcccggcccgggtggtgaccaccttcgccagcgcccagggaacgggagggcggctattgatcgacgaatattataacgaagagggtttgcagaacggcgaagggcaacgagggcgcatctggattttccaaaccagcacagaatgctggatgacgcgaccggcactaccgcaggggtacgatggctggcagattctgcacccgtctgcccccaacggcggaggagttctgggatcctgcgatttggtcccggtgcgcgctgtcaaggaagggacgctcgggctcacacccgcggtgagtgaccttttcgctgctataaatgcctcctgtgtcgtgtggaagtgctgcgaagatggaacacttgaattgaccgattccaacactaagtacgtcggaaataatatctcgaccaagggagtggggagtgacaggtgcgaggacatcactcagaactacaaatatcctgaaggctctctacaggagaaggaagtcctcgaaagggtagaaaaggagaaaatggagagggagaaggataacggtattagaccaccctctctcgaaaccgctagccccttgtacttgctgctgaaagcaccttcctcgttacctttaagaggtgacgctcagataagcgtgaccctggtgaatcattctgagcaagagaaggccgtccagcttgccattggagtccaggcagtccactataatggcgtgctcgcggcaaaattgtggaggaaaaagctccatctgactctgagcgctaatttggaaaagataatcaccatcggcctattctttagcaacttcgagcgtaatccccctgagaacacctttttacggcttaccgccatggctacccacagcgaatccaacctcagctgctttgcccaggaagacattgccatctgcagaccacaccttgccatcaagatgccagaaaaggcagagcagtatcaacccctgactgcgtctgtcagcctgcaaaatagcctcgatgcacccatggaggattgcgtgatctccatcctcggtcgaggacttattcaccgggagcggtcttatagattcagaagcgtttggcccgaaaacaccatgtgcgcaaagtttcagttcacccctacacacgttgggctccagcggttgacagtggaagtggattgtaatatgttccagaacttgactaactataaatctgtcaccgtggtggcacctgagctgtccgcgtag

SEQ ID NO: 186851 - DNA, 1842 bp, synthetic construct
  misc_feature 1..1842: note = Description of Artificial Sequence: Synthetic coding sequence
  source 1..1842: mol_type = other DNA
atgggccaggccctgggcatcaagagctgcgacttccaggccgccagaaacaacgaggaacaccatacaaaggcgttatcgtctagacgcctttttgtccggcgaggacagccatttactattattctgtactttagagcccctgttagggcctttctgcctgcccttaaaaaagtggctctgactgctcagactgaagacgccgtcttcctgaaaaacgaggctcaaagaatggagtacctactgaaccagaatggtcttatctatctcggcaccgccgactgtatccaggccgagagttgggatttcgggcagttcgaaggcgatgtgatcgatctaagtctgcgtctgctgtccaaggacaaacaggttgagaaatggagccagcctgtccatgttgcacgtgtcctgggagctttactccattttcttaaggagcaaagggtgctacccaccccgcaaacacaggcaacccaggaaggcgccctgcttaacaaacgccgcgggagtgtccccatccttaggcagtggttaacaggtcgcggtagacccgtgtatgatgggcaggcctgggtgttggcagcggtggcatgcacagtgctccgatgtctgggtatccccgcccgtgtcgtaactacttttgcgtccgctcagggaacaggaggaagactactcatcgatgagtactataacgaggagggactgcagaacggggaaggccaaagggggcgaatatggatcttccaaacatccacagaatgctggatgacacggcccgcactgccgcagggttatgatgggtggcagatccttcacccctccgcacctaatggtggtggagttttgggtagttgcgacctggttcccgttcgggcagtcaaagaggggacactgggcttgactccagctgtgtcagacttattcgcggcgatcaacgccagctgtgtggtctggaaatgttgtgaggacggtaccctggaactgacagatagcaatacgaaatatgtggggaacaatataagtaccaagggagtgggaagtgaccggtgcgaggacatcacccaaaattacaaatatccagaaggcagcctccaggagaaagaagtgctcgaacgtgtggaaaaggagaaaatggagcgagagaaagacaatggaatcaggccacctagccttgagacagcctcacccctttacctgctcctaaaagctccttcttcgctgcccttgaggggagatgctcaaatttccgtgacactggtaaatcattctgagcaggaaaaagctgtgcagcttgctatcggagtccaggccgtgcactataacggggtcttggccgctaagttatggagaaaaaaactccacctcacactctccgcaaatcttgagaaaatcattactatcggtcttttcttctcaaactttgaaagaaatccgcccgaaaacacttttctgcgtcttacagcgatggcaactcactccgagtctaatctgtcctgttttgcgcaggaggatattgcgatttgcagaccccatctagcaattaagatgcccgaaaaagctgaacagtaccaacccttgactgcttccgtcagcctgcaaaactctctcgatgccccgatggaagactgtgtcatcagcattctcgggcgcggcctaatccacagggagaggagttacagattccggtctgtgtggcccgagaataccatgtgcgcgaaatttcaatttacccccacgcatgtgggattgcagcgcctgactgttgaagtcgactgtaatatgtttcagaacttaacaaattacaaatcggttacagtggtggcacccgaactgtcagcatag

SEQ ID NO: 186852 - DNA, 1218 bp, synthetic construct
  misc_feature 1..1218: note = Description of Artificial Sequence: Synthetic coding sequence
  source 1..1218: mol_type = other DNA
atggagcggctgcagaagcagcccctgaccagccccggcagcgtgagcccatccagagattctagtgtgcctggatccccctcttcaatcgtggctaaaatggacaatcaggtcctcggttataaggatctggcggccattcccaaggataaagctatcctagatatcgagagacccgacctgatgatatatgaaccccatttcacttatagcctcctggagcatgtggagctacctcggtcacgggaaagaagcttgagcccaaaaagcacgtcccccccacccagccccgaagtttgggccgatagtcgaagtcccggcatcatcagccaagcttccgccccacgaaccacgggcactccacggacttccctgcctcacttccaccatcccgaaacatccaggcctgactccaacatctacaagaaaccaccaatctacaagcagagagagtccgtcggaggatctccccagactaagcacctaatcgaagatctgattatcgagtcttccaagtttcccgcagcacagccgcctgaccccaaccagcctgccaaaatcgagaccgactattggccttgcccccccagcctggccgttgtcgagaccgaatggcgcaagaggaaagcatctcgcaggggggcggaggaggaggaagaagaggaagatgacgatagtggtgaagagatgaaggcactgcgggaacgccagagggaagaactgtctaaggtcaccagcaatttgggcaaaatgattctaaaggaagagatggaaaaatccctgcccattcgaaggaaaacccggagcctccccgatcgcacccctttccatacatctttacatcagggtaccagcaagagcagtagtctgcctgcctacggtagaaccactctgagccggctgcagagcaccgagtttagccctagcggctcggaaaccggatcgcccggcctccagaacggggaagggcaaagaggaaggatggacagaggcaactccctcccttgtgtgttggaacaaaaaatttatccatacgaaatgctagttgttacgaacaaagggagaaccaagctgccccccggggttgataggatgagactcgagaggcacctttccgctgaagacttcagccgggttttcgctatgtcaccagaagaattcgggaaattggctttatggaagaggaatgagctgaaaaagaaggcctccctcttttag

SEQ ID NO: 186853 - DNA, 1218 bp, synthetic construct
  misc_feature 1..1218: note = Description of Artificial Sequence: Synthetic coding sequence
  source 1..1218: mol_type = other DNA
atggagcggctgcagaagcagcccctgaccagccccggcagcgtgtcccccagcagagattctagcgtccccgggtctcccagctccattgttgcaaagatggataatcaggttctgggctataaagacctagcagccatccccaaggataaagccatcctggatattgagcgcccagatcttatgatatatgagccacactttacttacagtctcctggagcacgtcgagctcccccgaagcagggaacgcagcttatcgcctaaaagcaccagcccacccccttcacctgaggtttgggccgactccagaagcccaggcataatttcccaggcatcagcccctagaacaaccgggacgccgcggaccagcctaccacattttcaccatcccgaaacctcccgacctgatagtaacatctacaaaaaacccccaatatataagcagagggagagcgtgggcgggagcccccagaccaagcacctgattgaggaccttatcattgagtcttctaagtttcctgcagctcaacctcccgaccctaatcagcccgccaagatcgaaaccgactattggccctgtcctccctctttggctgtggtggaaactgaatggcgcaagcggaaggcctcccgccgtggcgcggaggaagaagaggaagaggaggatgatgattctggggaggagatgaaggcgctgagagagcggcagcgtgaagaactctctaaggtgacatccaacctggggaagatgatcttaaaggaagaaatggagaaaagccttcctattcgtcgcaaaacacgaagccttccagacagaacaccattccacacctcccttcaccagggaacctcaaagtctagcagcctgcctgcctatggccgaaccacgttaagcagactccaaagcacagagttctctccaagcgggtccgagactggaagccctggtctgcaaaatggcgaaggccagaggggaagaatggacagaggtaattccctgccttgcgtcttggaacagaagatttacccatacgagatgctggtcgtcactaataaagggcggactaagttacccccaggggttgaccggatgcgtctggaacgccacctgtcagctgaggacttctcccgagtgtttgcaatgtcccccgaggagttcggcaagctggccctgtggaaacgtaacgagctcaaaaagaaagcctcactgttctag

SEQ ID NO: 186854 - DNA, 1626 bp, synthetic construct
  misc_feature 1..1626: note = Description of Artificial Sequence: Synthetic coding sequence
  source 1..1626: mol_type = other DNA
atgatctacgagccccacttcacctacagcctgctggagcacgtggagttaccacgctcccgcgagcggtccttatctcctaaaagcacgtccccaccacctagtccagaggtttgggctgattctcgttctcctggaattatcagccaggcgtccgcgccgcgtaccactggcacgcctcgcacctctctgcctcactttcaccatccagagacgagtcgtcccgactcgaatatctacaagaaacctcccatatataagcaacgagagagcgtgggtggctccccccaaacaaagcatctcattgaggacctaataatagaatctagtaaatttcctgccgcccagccaccagatcctaaccagccagctaaaatcgagacagactactggccttgtccaccttcactcgccgttgtcgaaacagaatggaggaagcgcaaggctagtagacggggggctgaagaagaggaggaggaagaagacgatgactcaggcgaagaaatgaaggctcttcgtgagcgacaacgagaagagctttccaaagtgaccagtaatctgggcaagatgatcctcaaggaggaaatggaaaagtcactgcccatccgaaggaagacacgctcccttccagatcgcacacctttccacaccagcctacatcaaggaacatccaagagtagctccctgcccgcctatggccggacaacactgtcacgcttgcagtccactgaattcagccctagcggctcagagaccgggagccccggcttacagaacggggaagggcaacgcgggcgtatggacagaggaaatagcctcccttgtgtgctcgaacaaaaaatctacccctatgaaatgttggttgtgactaataagggccggacaaaactgccacctggagtggacaggatgaggctggagcgacacctgtctgctgaggatttttcgagagtgtttgcaatgtccccagaggaattcggaaaattggcactgtggaagaggaacgaattgaaaaaaaaggccagcctatttggggccctggttgtaagaccagttggatgtctggaacagctggaaggcaggtgcagaggagggaaaagacccggccgaaaaagctcccggctgttgtgtaggcccccgtccccacctattctcacccccgactcatttccagcacttcagccccctgcccctctgacattagtcggaactggtcctagctctgcgagcggccgagaggtgaccccaccgctgcagctggccttgacttcagccagaaaacctagggcatctaagcctttcgcccccgccctgagattgccccagaaacccggcctgcgtgtggagatgccgccgacccatgaccctggcccaccacccgccagccggcccagaaacggcaacagttctaccaaaccaggaactggtcagaagctgggtctcccgccgccccttgacggcgtgaaaaggccaggtctggcccatttcggggtttcttggctccccgctctaacatacacacacgcgccccctcacactctgtgtagcttaaagaacgtgatctattggggcccaccaagctgcttcccacatctccctttaccataccttaccccacccgcttag

SEQ ID NO: 186855 - DNA, 1152 bp, synthetic construct
  misc_feature 1..1152: note = Description of Artificial Sequence: Synthetic coding sequence
  source 1..1152: mol_type = other DNA
atggagcggctgcagaagcagcccctgaccagccccggcagcgtgtcaccttcaagggattcctccgttccaggctcgcctagcagcatcgtggccaaaatggataaccaggtgctcgggtacaaagatcttgccgctatcccaaaagataaagctatactggacatcgagagaccagacttgatgatctacgagcctcactttacatatagtttattggagcatgtcgagctcccacgcagtagggaacggagcctgtcgccaaagtccacatctcccccaccctcaccagaagtgtgggccgatagcagaagccctggtattatctcccaggcaagtgcacccaggaccactgggaccccgcgtacatccttgccccacttccaccatcctgagacatctagacccgatagcaacatctataaaaagccgcccatttacaagcaacgggagtctgtgggaggttcaccacagaccaaacacctgatcgaggatctaattatagagagttccaagttcccagctgcacagccgccagatcccaatcagcccgccaaaatcgaaaccgattactggccctgtcccccaagtcttgctgtggttgagacagagtggcgtaaacggaaagcatctcgcagaggagctgaggaggaggaagaagaggaggatgatgattctggcgaagagatgaaggccctgcgggagaggcagagagaagagctgtcaaaagtgacatcgaatttgggaaagatgatccttaaggaggagatggaaaaaagccttccgatacgccgcaaaactcggtcacttcccgatcgcaccccgttccatacgagtctacatcaggggacctccaagtcctcttccctgcctgcctatggcaggactaccctcagcagattacagtccacagagttctctccgtctgggtccgagactggtagccctggactccagatttatccttatgaaatgctagtagttactaacaaaggtcggaccaagcttccaccaggtgtggaccggatgcggctcgagcgtcatctcagcgcagaagacttctctcgcgtttttgctatgagtcctgaagaattcggtaaactggccctatggaagcgcaatgagttaaagaagaaggcttctctgttctag

SEQ ID NO: 186856 - DNA, 1152 bp, synthetic construct
  misc_feature 1..1152: note = Description of Artificial Sequence: Synthetic coding sequence
  source 1..1152: mol_type = other DNA
atggagcggctgcagaagcagcccctgaccagccccggcagcgtgagcccatccagagacagcagtgtgccaggcagtccctcatccattgtggccaaaatggataatcaggttctggggtataaggacctcgcagctatccccaaagacaaagcgatcctggacattgagaggcctgacctgatgatttatgagccacattttacttattctctgttggagcacgtggagcttcccagaagtagggaacggagcctgagccccaagtccacttctccaccaccaagtcccgaagtgtgggctgattctaggagtccaggaatcataagccaagcatccgctccccggacaaccggaacgccccgcacgtcactacctcacttccatcatccagagactagtcggccagactctaacatttacaagaagcctccgatatataaacagcgcgagagcgtcggtggttctccccagacaaaacatctcatcgaggatctaattatcgaaagctccaaatttcccgccgctcagccacccgatccgaaccaaccagccaaaattgaaaccgactactggccgtgcccaccatcgttggcagtggttgaaaccgagtggcggaagaggaaggcgtctcggcgcggggccgaggaagaggaggaggaagaagacgatgattccggggaggagatgaaggccctgcgggaacgacagcgagaagagttgtcaaaagtaaccagcaacctaggtaagatgattctgaaagaagaaatggaaaaatccctccctatccgtagaaaaactagaagcctccccgatcgtactccattccacacttccctgcatcagggcacctccaagagttcttccctgcccgcctatggccgaaccaccctttcacgtttgcaaagcacagagttttcacctagcgggagtgaaacagggtctcctgggctgcagatttacccctatgagatgctggtcgtgaccaacaaaggccgcacaaaattaccacccggcgttgacagaatgaggcttgagagacacttgtctgcagaagatttctcacgagtgttcgccatgtcacctgaggaatttgggaaattggccttgtggaagaggaacgagctgaagaaaaaggcttctttgttctag

SEQ ID NO: 186857 - DNA, 1218 bp, synthetic construct
  misc_feature 1..1218: note = Description of Artificial Sequence: Synthetic coding sequence
  source 1..1218: mol_type = other DNA
atggagcggctgcagaagcagcccctgaccagccccggcagcgtgagccctagccgggacagctctgttcctggcagccctagtagtattgtggctaagatggacaatcaggtgctgggctacaaagacctggccgccataccaaaagataaggcgatactcgacattgaaagacccgatctcatgatttacgagccacacttcacatattctctgctggagcacgtggagctcccacggtccagagagcggagtctgagccctaagagtacatctccacccccatctcctgaggtatgggctgattctcggtcgccaggcatcatctctcaggcaagtgcaccccggacaacgggtacgccacggaccagcctaccccatttccaccatccagagaccagccgacccgattccaacatctataagaagcctcccatatacaaacaacgcgagtctgttggtggtagcccccaaactaaacacctgattgaagacctgatcattgaaagcagtaaattcccggctgcacagccaccagatcccaaccagccggccaagatagagacggactattggccatgccctccaagcctcgcagtggtggagacagaatggcgaaagcgcaaagccagtagaagaggggccgaggaggaggaagaagaagaagacgatgacagcggtgaggagatgaaggctctgagggaacggcagagggaggagttatcaaaagtcactagcaacctcggcaagatgatcctgaaggaggaaatggaaaaaagcttgcccatacgtcggaaaacgcgttccctcccagatcggacgccatttcacacttcactgcaccaggggactagtaagtctagcagtcttcctgcttacgggaggaccactttatctagactgcagagcacagagttctcccctagcgggtccgagaccggttcacctggattgcagaacggagaagggcaacggggtagaatggatcggggcaattcccttccttgtgtgcttgaacaaaagatctacccgtacgagatgctcgtcgtaaccaacaaaggccggacaaagcttcctcccggagtagaccggatgagactggagaggcatctctccgcggaagatttcagtcgcgtgtttgccatgtcacctgaggaatttggcaagctggctttatggaagcgaaacgaactgaagaagaaggccagcctgttctag

SEQ ID NO: 186858 - DNA, 1077 bp, synthetic construct
  misc_feature 1..1077: note = Description of Artificial Sequence: Synthetic coding sequence
  source 1..1077: mol_type = other DNA
atggagcggctgcagaaggccaagatggacaaccaggtgctgggctataaggatttggctgcgattccaaaagacaaagcaatactggacatcgaacggcccgatctgatgatctatgagccacacttcacatactccttactcgaacacgtggaactgcctaggtcaagagagaggagcctgtccccaaagtctacttcacccccaccatctcctgaagtgtgggccgatagcagaagccctggcatcatttctcaggcctcagcgccccgaacaacagggacaccaagaacatcccttccacattttcatcatcccgagacatcccgaccagactccaatatctacaaaaagccacctatttataagcagagggaatcagtcgggggctctccccagaccaagcatctcattgaggatctgatcatcgagagttcaaagttcccggccgcacaaccccccgacccaaaccaacctgctaagatcgagacagattattggccgtgtccccctagcctagccgtggttgagaccgagtggcggaaaagaaaggctagtcgcaggggcgccgaggaagaggaggaagaagaggacgacgactcaggagaggagatgaaagctttacgggaaaggcaacgcgaagagctgtccaaagtcacctctaatctgggaaagatgatactgaaggaggagatggagaagagcctacctatcagaaggaaaaccaggtccttaccagaccgaacccctttccatactagtcttcatcaggggacaagtaaaagctcctcactgccagcttatgggaggaccaccctctcacggctgcaaagtacagagttctctcctagcgggtctgagacggggtcgcctggtctgcagatatacccctacgaaatgcttgtcgtgaccaacaaaggccgtacgaaactgccacctggcgtcgacagaatgaggctggaacgtcacctgtctgcagaggacttttcccgggtgttcgccatgtctcctgaagaattcggtaaactggcactttggaagagaaacgaactgaaaaaaaaggcgtccctgttctag

SEQ ID NO: 186859 - DNA, 1152 bp, synthetic construct
  misc_feature 1..1152: note = Description of Artificial Sequence: Synthetic coding sequence
  source 1..1152: mol_type = other DNA
atggagcggctgcagaagcagcccctgaccagccccggcagcgtgagtccatcgagggattcctctgttccaggaagcccaagcagtatcgtggcgaagatggacaaccaggtgctcggttacaaagacctggcagctattcccaaggacaaggccatcctcgatatcgagcggcccgacctgatgatttatgagccacacttcacctacagcctgttagaacacgtagaactcccacggtcgcgcgagcgatcgttgagccctaaatctacatcccccccgcccagtccagaggtgtgggccgattctcgctcacctggtatcattagtcaggcaagcgccccacgcacaacaggcacacctcgcacttcgcttcctcatttccatcaccctgaaactagtagaccggatagcaacatttataaaaagccacctatctataagcagcgagagagcgtgggtgggtcccctcagactaagcatttgatagaggatctgatcattgagtccagtaagttcccagctgcccagcctcccgatcccaatcagccagccaagattgagaccgactattggccttgcccccctagtctcgcggttgtggagacagaatggcggaaacggaaagcttccagaagaggcgcggaggaggaggaggaggaagaagacgacgatagtggtgaggagatgaaggctttgagggaacgccagcgtgaggagctgtccaaggtcacctccaacctgggaaaaatgatccttaaagaagagatggagaagagccttcccatccggaggaaaacacgaagcctgcctgatcgaacgcccttccatacatcattacatcagggaaccagtaagagcagctcacttcctgcatatggacggacgaccttgagcagactacagtccactgaattttctcccagtgggagcgagacgggatctcctggtctgcagatctacccatacgaaatgctggtggttactaacaagggtcgtacgaaactgcctcctggcgtggacaggatgaggctggaacggcacctctccgccgaagacttcagtcgggtatttgccatgtcacccgaagaatttgggaagctggccctctggaaaagaaatgaattaaaaaagaaggcttcactgttctag

SEQ ID NO: 186860 - DNA, 1218 bp, synthetic construct
  misc_feature 1..1218: note = Description of Artificial Sequence: Synthetic coding sequence
  source 1..1218: mol_type = other DNA
atggagcggctgcagaagcagcccctgaccagccccggcagcgtgagcccttctcgtgattcgtcagtccctgggagcccttcctcaattgtcgccaaaatggacaatcaggttcttgggtacaaggatctcgctgccatcccaaaggataaggcaatactggatatcgagagaccagatctcatgatttacgagccccatttcacatactcgcttttggaacacgtcgaactgccaagaagcagagaaagaagcctcagtcctaaatcaaccagtccccccccaagccctgaggtttgggcggacagccgaagcccaggaatcatttcccaggctagcgccccaaggaccacgggaactccaagaacatcattaccacactttcatcatcctgaaacaagcagacctgacagcaacatttataagaagccgcccatatataagcagagggagagcgtcggagggtccccgcagacgaagcatttgatcgaagatctaatcatcgagagctccaagttccctgccgcccagccgccagatccaaatcaaccagctaagatcgagacagactactggccgtgtccacccagcttggctgtggtggagacggaatggcggaagcgtaaggcctccaggcgtggagctgaagaggaggaggaggaggaggacgacgattccggggaggagatgaaagctcttagggaacgccaaagagaagagctgagtaaggtaacgtctaatttgggaaagatgatactcaaagaggagatggagaagtctttgcccatacgtcggaagacacgaagtctccccgatagaacgccattccacactagtctgcatcaggggacatcaaagtcatcgtcactgcctgcttatggtcggacaactttgtccaggctccaatcaacagaattcagtccctctggctccgaaaccggcagccctggcctgcagaatggggagggccagcgggggcgaatggatcggggaaactccctgccctgtgtactcgagcagaagatttatccctatgagatgcttgtagtgacaaacaagggacggacaaagctccctcctggcgtggaccggatgcgactggaaagacatctgtctgccgaggatttcagcagggtgttcgccatgagccccgaggagttcggaaaactggccctgtggaaaaggaatgaattgaagaagaaggcttctttattctag

SEQ ID NO: 186861 - DNA, 1098 bp, synthetic construct
  misc_feature 1..1098: note = Description of Artificial Sequence: Synthetic coding sequence
  source 1..1098: mol_type = other DNA
atggagcggctgcagaaggccaagatggacaaccaggtgctgggctacaaggacctggccgcaatccccaaggacaaggcaattctggacatagagcggcctgacctgatgatatacgagcctcacttcacctattcactgctagaacacgtggaactgccaaggtctcgcgaagtttgggctgactcccggtcccccgggataattagtcaggcgtccgccccacgcacgaccggcactcccaggaccagtctgccgcactttcatcaccccgaaacttcacgtcccgatagcaacatttacaaaaaaccacctatctacaagcagcgggagtcagtgggaggatccccccaaaccaagcacctcattgaggatctcatcatcgagtcatccaagtttcctgcggcgcagccccccgaccctaatcaacctgctaaaatcgaaacagattattggccttgtccaccctcgctagccgtggtcgaaaccgagtggcgaaaaagaaaagcctcccggcgcggggcagaggaggaagaggaggaagaagatgatgacagcggggaggaaatgaaggcgctccgggagaggcaaagggaagaattgtccaaggtgacgtccaacctcgggaagatgatactgaaggaagagatggagaaatccctcccaatccgaaggaagactagatccctccccgatcgaactccgtttcataccagcctccaccagggtacatccaagtcttcatccctgcctgcgtatggcagaactacactgtccagactccagagcacagaatttagtccatccggctctgaaacaggcagccctggcttacagaatggggaaggacaaagggggcgcatggaccgtggaaattcactcccttgtgttctggaacagaagatctacccttacgagatgctggtggtcaccaataaaggtagaaccaagctgccaccgggagtcgatagaatgcgtctggaaagacacctctctgccgaggatttctcccgcgtgtttgccatgtcaccggaagagtttggaaaactcgcgctctggaaacgcaatgagttaaagaagaaagcaagcttattctag

SEQ ID NO: 186862 - DNA, 570 bp, synthetic construct
  misc_feature 1..570: note = Description of Artificial Sequence: Synthetic coding sequence
  source 1..570: mol_type = other DNA
atggacgccgtggacgccaccatggagaagctgcgggcccagtgcctgtccagaggggcctctgggattcagggtctggcaagatttttccgtcagctggatcgagatggctcccggagcttggatgccgacgagttcaggcagggccttgccaagcttggtctggtgctggatcaggccgaggctgaaggggtctgcaggaaatgggatcgtaatggaagcggcacgctcgaccttgaagagttcctacgagccctgcggccacccatgagtcaggccagagaggccgtgattgccgctgccttcgccaagctggaccgatcgggcgatggggtggttacagtggatgacctgcgtggagtatattccggccgagctcatcccaaggtgcgtagtggagaatggaccgaggatgaggtgcttcggagattccttgacaatttcgattctagcgagaaggatggccaagtcactttggctgagtttcaggactactattctggagtaagtgctagcatgaatacagatgaggagtttgttgcaatgatgacctccgcatggcaactatag

SEQ ID NO: 186863 - DNA, 2565 bp, synthetic construct
  misc_feature 1..2565: note = Description of Artificial Sequence: Synthetic coding sequence
  source 1..2565: mol_type = other DNA
atggccctggagcaggccctgcaggccgcccggcagggcgagctggatgttctacggagcctgcatgcagctggcctgctcggcccgtctctccgggaccctctcgacgccttaccggtgcaccatgctgcccgggcaggtaaactgcattgcctccgattccttgtggaagaggctgccctcccggccgccgctagggctcgaaatggcgccacaccagctcatgacgcctctgccaccgggcatctcgcgtgcttacaatggttgctaagtcagggcggctgtcgcgtgcaggataaggacaactctggcgccacagtcttgcacttggccgcccggtttggccatccggaagtcgtcaactggttgctgcatcacggcggcggtgaccccacggcggcgaccgacatgggggctctacctatccactacgctgctgccaaaggcgactttcccagcctcagacttttggtagaacactacccggagggcgtgaatgctcaaaccaaaaacggcgccacccctctgtatctcgcctgccaggagggacatctcgaagtgacccagtacttagtccaggagtgtggggctgatcctcatgctagggcccatgacggtatgactccactgcacgcggcagcccagatgggccattcgccagtgatcgtctggctcgtaagctgtacagatgtgtctttgagcgagcaggataaggacggagccacggcgatgcactttgctgcttcacggggtcatactaaagttctttcctggcttttgctccacggcggcgagatatcagctgacctgtggggtggaactccattgcacgatgccgccgaaaacggggaacttgagtgctgccagatattagtggtgaacggtgcggaactggatgttcgggatagagacgggtatactgccgcagacctgtccgattttaatggccacagccattgtacccgctacttacggacagtagagaatttatctgtggagcacagggttctctctcgagacccctccgctgagttggaggccaagcagccagactccggaatgtctagtcccaacacgaccgtttcagtgcagcctctgaacttcgacctgtcttctccgacctctaccctgtctaattatgactcttgcagttcgtctcatagcagtattaagggccaacacccaccatgtggtctctctagtgccagggctgccgacatccagagctacatggacatgttgaacccagagctgggtctccctcggggcaccatcggaaaacctacccctccacccccacctccgagttttcctcctcccccccctcccccaggaacccagctacctcccccacctccgggttatccagccccaaaaccacctgtggggccgcaagcggctgacatatacatgcagacgaaaaataaattgaggcacgtcgaaaccgaggcccttaagaaggagctctcaagctgtgacgggcacgatggactaagaaggcaggactcatcacgcaagccccgagcattctccaaacagccaagcactggtgactattataggcagctgggtcgctgtcccggcgagactttggcagcacggccgggcatggcgcacagcgaagaagtgagagcacgtcagccagctagagccggatgcccgcggctggggccagctgccagggggtcactcgagggtcctagcgcccccccacaggccgctctcctgccaggtaatcacgtccctaacggctgcgcagcggacccaaaagcctcgcgggagctgcctcccccaccacctccgccgccaccccccttacccgaggccgcaagttccccgcctccggcgccaccactccccttggaaagcgcaggacccggttgtggccaacgccggagcagctcgtcaacaggttctactaaaagttttaacatgatgtctcctacaggcgataatagcgagctgttggccgaaataaaagccggtaaaagcctgaaacccacaccacaatccaaaggactaacaaccgtcttttctggcattggccagcccgcctttcagcctgatagtcccttgccttcagtgtcccccgccctgtctcctgtccgcagccctaccccacccgccgctggttttcagcctttacttaacggcagtctggttccagtccctccaacaacacctgcccctggagttcagctggacgttgaagctctcatacccacccacgacgagcagggccggcccatccccgaatggaagcgtcaggtgatggtccgaaagatgcagcttaaaatgcaggaagaggaagagcagagaagaaaggaagaggaagaagaggccagactcgcctccatgcctgcatggagacgggacctgctccggaagaagctcgaagaggagcgagagcaaaagcgcaaagaggaggagagacagaaacaagaggagttacgaagagagaaggaacagtccgaaaaactgcgaacccttgggtatgacgagagcaagctggcgccctggcaacgacaggtgattctgaagaaaggagacatcgccaagtactag

SEQ ID NO: 186864 - DNA, 867 bp, synthetic construct
  misc_feature 1..867: note = Description of Artificial Sequence: Synthetic coding sequence
  source 1..867: mol_type = other DNA
atggcccacagcgaggaggccgccctgctgcccggcaaccacgtgccaaacggatgtgccgccgatcctaaggccagcagggagcttccaccaccaccccctcctccccccccccctcttcctgaggccgcttcaagccccccccctgctcctcctctgccgttggaatctgcaggaccaggctgcggccagaggcgtagctcttccagcacgggatctacgaaaagttttaatatgatgagtccaaccggggacaacagtgaattattagcggagataaaggctggcaaatcactcaagcctacaccccaaagcaagggactgaccacagtcttttccggaatcggtcagcccgccttccagcctgattctccgttaccgtccgtgtcacccgcactgtcacccgtgcggtctccaaccccacctgccgcaggattccaacccctgttgaacggttcacttgtgccggtgccacccacgactcctgccccaggggtgcagttagacgtcgaggccctgattccaacccatgatgaacagggccgcccaataccggagtggaaacggcaggtgatggtccggaaaatgcagttgaagatgcaggaggaagaggagcagcgcaggaaggaggaagaagaagaagctcggttggcgagcatgccagcctggcggcgcgatctactccggaagaagcttgaagaagagagagaacagaagcgcaaggaagaggagcggcagaagcaagaagaactgagacgagaaaaggaacagagtgagaaactgaggacgttgggttatgatgaatcgaaactcgcaccttggcaaagacaggtcattctgaaaaaaggcgacatcgccaagtattag

SEQ ID NO: 186865 - DNA, 645 bp, synthetic construct
  misc_feature 1..645: note = Description of Artificial Sequence: Synthetic coding sequence
  source 1..645: mol_type = other DNA
gacggcatgacccccctgcacgccgccgcccagatgggccacagccccgtaattgtgtggctcgataaagacggtgctaccgccatgcactttgccgcctccagaggccacacaaaggttctgtcttggctccttctgcatggtggtgaaatctccgcagacctctggggcggaacacccttgcacgacgcagctgagaatggcgagctggagtgctgccaaattcttgttgttaatggagcagagcttgatgtcagggaccgcgacggctacaccgcagcagatctttcagactttaacgggcactctcactgcacacgctacctgcgaacagtcgaaaaccttagtgtcgagcatcgggttctgagtcgagatcctagcgcagagctggaggccaagcaaccggattcagggatgtcatcccccaacactacagtgtccgtccagcccttgaacttcgatctttcgagtccaacatccacgctgtccaactatgacagttgttctagctctcatagctccattaaaggtcagcaccctccctgtggattgagtagcgcacgtgccgcagacatccagtcttatatggacatgctgaaccccgagcttggcttgccacggggaactatcgggaagccaacctag

SEQ ID NO: 186866 - DNA, 567 bp, synthetic construct
  misc_feature 1..567: note = Description of Artificial Sequence: Synthetic coding sequence
  source 1..567: mol_type = other DNA
tgagagatcaaggccggcaagagcctgaagcccaccccccagagcaaaggcctgactacagttttctcaggcatcggtcagccagctttccagcccgactcgccactgccaagtgtgtcacctgccttgagtccagtcaggagccccacgcctccagccgccgggttccagcccctgctaaacggatccttggtgcctgttcccccgactacaccggccccaggggtgcaactggacgtggaggctctgatccccacccacgatgagcaaggccggccaattcctgagtggaagcggcaggttatggtgagaaagatgcaactaaagatgcaggaggaagaagaacagcgtcgcaaggaagaggaggaagaagcaaggcttgccagcatgccggcttggcgccgcgacttgctgaggaagaaattggaggaagagagggagcagaagcggaaggaagaagagagacagaagcaagaggaattgcggcgggagaaagaacagtccgaaaagcttagaactctgggttacgacgagtctaagcttgctccctggcagcggcagatatag

SEQ ID NO: 186867 - DNA, 1335 bp, synthetic construct
  misc_feature 1..1335: note = Description of Artificial Sequence: Synthetic coding sequence
  source 1..1335: mol_type = other DNA
atggcccgggtgggccccggccgggccggcgtgagctgccagggccggggcaggggaagagggggaagcggacagagacgcccacccacttgggaaatatccgatagcgatgccgaagattcggctggatcagaggccgccgctcgcgcccgtgacccagctggcgagcgaagggccgcggccgaggcactgcggttactccgtcctgaacaggtgttgaagcgactggctgtatgtgtggacacagccatcctggaagatgcgggcgccgacgtcctgatggaggctctggaagccctcggatgcgaatgccgcattgagcctcagcgccccgcccggagcctgcggtggactcgtgcttcccctgacccatgccctcgatcattgccccctgaggtgtgggcggcaggggagcaggaacttcttctcttgctggagcctgaggagttcctgcaaggggtggcgaccctgacccagatctcagggcccactcactgggtcccctggatttctcctgaaacaaccgcaagaccacatcttgccgtgatcggtctggacgcgtacctgtggtaccgatctctttcttgccctcaacaagggtggctaggacgcggctttcggggaggaggactgtggcagaggccatcgtctggacgcgccggacccatgggcagcggggaagaatggtcgccactgctccgctcacgacagcatgtctctaggggaacccaacagccggagtctcctaaagtagccggagcagaagtcgccgtgagttggcccgaggtggaggaggtgcgggcctgtctctcatgggcgctagtgctccttcagctatgggcaaacctggatgtgcttttagtagctagctggcaggagctcagtcgccacgtatgcgcagttaccaaagctctggctcagtatccgctcaagtgcgtgatgccaagacttaagggcggcaggattacatcccgccaatatcgagaatcccaggcctttagcttctgcacagccggaagatgggctgctggggagcctgtagcacgtgatggagcggggcttcaggccgcttggagaagacaaatcagacaattttcgcgggtaagccctgctgtggctgacgccgtggttactgcctttcctagtccccggctcctgcagcaggcactggaagcctgttccactgagcgagaacgaatgggtttacttgctgacttgcccgtgccaccatccgaaggcggtcgtccgcgtagggtgggcccagatctcagtagaagaatttgtctatttctcacaacggcaaatcctgaccttctcctggatctggggagttag

SEQ ID NO: 186868 - DNA, 1161 bp, synthetic construct
  misc_feature 1..1161: note = Description of Artificial Sequence: Synthetic coding sequence
  source 1..1161: mol_type = other DNA
atggcccgggtgggccccggccgggccggcgtgagctgccagggccgggggagaggacggggcggctctggtcagagacgtccccctacgtgggaaatatcggactcagacgctgaggactctgcgggctctgaagctgcagcacgcgcccgcgatcccgccggcgagcgtagggccgccgccgaggctctccgcctactccgaccagaacaggtcctgaagagactggccgtgtgcgtagatacggccatcctggaagatgccggtgctgatgttctaatggaggctctagaggccttagggtgcgaatgtcgcatcgagccccagcgccctgccaggagcctcaggtggacacgagcaagccctgacccctgccctaggtctctcccaccggaggtgtgggcagccggcgaacaggaattgctattgctcctggaaccagaagaattcctgcaaggagtagcaacccttacccagatttccggccccacccactgggtgccgtggatttcaccagaaactacagcccgaccccacctggcagtgattgggcttgacgcatacttatggtcgaggcagcacgtgtcccgaggaactcagcagccggaaagccccaaagtggccggcgcagaggtagcggtgagttggcctgaggtggaggaggtgagggcctgtttgagttgggcactcgtcttgttgcagctgtgggcaaatttagatgtactgttagtagctagttggcaagaactctcccgtcacgtgtgcgccgtgaccaaggcacttgcccaatacccattgaagtgcgtaatgcccagacttaaaggcggccggattacctccagacagtatagggagtctcaggccttttctttttgcacagctgggagatgggccgctggagaacccgtggcccgggacggggcaggcctgcaggctgcatggaggcgacagattcggcagtttagccgcgtgagccccgccgtagccgacgcggttgtgacagcattcccttcacctcgactgttacaacaggccctcgaagcctgtagcactgaacgggagcgtatggggctccttgctgtcgggccggatctaagcaggcggatttgcctttttctgaccactgccaaccctgatctgctgctagatttggggtcatag

SEQ ID NO: 186869 - DNA, 2523 bp, synthetic construct
  misc_feature 1..2523: note = Description of Artificial Sequence: Synthetic coding sequence
  source 1..2523: mol_type = other DNA
atgatgagcatccaggagaagagcaaggagaacagcagcaaggtgacaaagaagagcgacgacaaaaatagcgagactgagatccaggactcacagaaaaatctcgcgaagaagtcgggccccaaagagaccatcaagtcccaggctaaatcctcgagcgaatcgaaaattaaccagcccgagcttgaaacgcggatgtccaccaggtccagcaaggctgctagcaatgataaggctacgaagtccataaacaaaaacaccgtaacagtccggggctacagtcaagagtctactaagaaaaagctctcccaaaagaaattggtgcatgagaacccgaaagctaacgaacaactcaatcgccgatcacagagactccaacaactgactgaagtctcccgccggtcactcaggtcgagagagattcagggccaggtgcaggcagttaagcagtcattacctccgaccaaaaaggagcagtgtagttcaacccagagcaagtcgaacaagacaagtcaaaagcatgtgaagcgaaaggtgctcgaagtcaagtcagactcaaaggaggacgagaaccttgtgatcaacgaggttattaacagtccaaagggcaaaaagcgcaaggttgaacatcaaacagcctgtgcatgcagtagccaatgtacccagggatcggaaaagtgccctcagaagaccaccagaagggacgagactaagccagtgccagtgacaagcgaagtgaaaaggtcaaaaatggctacaagtgtggtacccaagaaaaacgaaatgaaaaagagtgtccacacacaggtaaatacaaataccaccttacccaagtcgccccagcccagcgttccagaacagtcagacaatgaacttgaacaggcggggaaatcaaagcggggatctatcttgcagctgtgcgaggaaatcgcaggagagattgagagtgataacgttgaggtgaagaaagagtccagccagatggaatccgtcaaagaagagaaacctaccgagatcaagttagaggagacatcagtggagagacagatccttcatcagaaggaaaccaaccaggatgtgcagtgtaatcgattttttccaagccggaagaccaagcccgtgaaatgcatcctgaatggaatcaacagctctgcgaaaaaaaactctaactggacaaagatcaagctaagtaagtttaattctgttcagcacaataaactggacagtcaggtctccccgaagttaggtctgctgaggacttctttttccccacccgccctggagatgcatcatcctgttacgcagtctacttttctgggcactaaattgcacgataggaacatcacatgtcagcaggaaaaaatgaaggaaattaacagtgaggaagtcaagattaacgatattacggtggagatcaataaaacaacagagcgtgctccagagaactgtcatctggccaatgaaattaaaccgtctgacccaccattggataatcagatgaaacacagttttgactcggcgtctaacaaaaacttctcccaatgcctggaatccaagttagaaaacagccctgtcgagaacgtcacagctgccagtaccctcctctcccaagcgaaaattgatactggggagaacaaattccccggaagtgccccacaacagcactcaattctcagcaaccagacatctaagagtagtgacaaccgggagaccccacgtaaccatagcctgcctaagtgcaacagtcacttagagatcacaatacctaaggatctgaaattgaaggaggctgagaaaaccgacgaaaaacagctaataatcgatgccggtcaaaagcgatttggagccgtatcctgcaatgtatgcggtatgctttacaccgccagtaatccagaagacgaaactcagcacctcctctttcataatcagtttatttcagcagttaaatatgtaggatggaagaaggagcgtatactggctgaatatccagacggtcggatcatcatggtgctccctgaggaccccaaatacgctcttaaaaaagtcgacgagatccgtgaaatggtagacaacgacttgggtttccaacaggcacccctgatgtgttatagccgtaccaaaactttactattcatcagcaacgataagaaagttgtgggttgcctgatcgcagaacacattcagtggggctatcgtgtcatagaggaaaagcttcccgtcattcgcagcgaggaggaaaaggttcggttcgagcggcagaaggcatggtgttgttcgacacttccagaacctgctatatgcggaatctcccgcatctgggtctttagcatgatgcggagaaagaagattgcaagccggatgattgaatgcctacgctccaattttatatatggatcgtacttgtccaaagaagaaatagccttctccgacccgacccccgatggaaaactcttcgcaactcagtactgcggcaccggccagtttctggtgtataatttcattaatgggcagaattcaacttag

SEQ ID NO: 186870 - DNA, 2106 bp, synthetic construct
  misc_feature 1..2106: note = Description of Artificial Sequence: Synthetic coding sequence
  source 1..2106: mol_type = other DNA
atgatgagcatccaggagaagagcaaggagaacagcagcaaggtgaccaagaaaagtgatgataaaaactctgagactgaaatccaagattctcagaagaacctggccaaaaagtctggccctaaggaaacaattaaaagccaagccaaaagttctagcgagagtaagatcaatcaaccagagctggaaaccagaatgagcactcgaagttcaaaagctgcaagtaacgataaggcaacaaagagtatcaataagaacacggtgaccgtcaggggctactctcaggaatccactaagaaaaagcttagtcagaagaaactcgtccatgagaaccctaaggctaatgaacagcttaaccggaggtctcaaaggttacaacagttgacagaggtgtcgaggagatctctgagatcacgcgagattcaggggcaggtgcaggccgttaagcagagcctgccaccgacaaagaaggagcagtgttcttccacccagagtaaatccaacaagacatcacagaaacatgttaaacgcaaagtgctggaggtcaaatcagactctaaggaggatgaaaatctggtcattaatgaagtcattaacagccccaagggtaaaaaaagaaaggtcgagcaccagacagcttgcgcctgttcatctcagtgtactcaaggtagcgagaaatgcccacagaaaaccacccgcagagacgaaactaagcccgtcccagttacttcggaggtgaagcgctccaaaatggccaccagcgttgtgcctaaaaagaatgaaatgaaaaagagcgtccacacccaggtcaacacaaacacaaccctaccgaaatctcctcagcctagtgtgcccgagcagagcgacaacgagctcgagcaggcagggaagtccaaaagggggtcgatactccagctgtgcgaagaaatcgctggggaaatcgagtcagataatgtggaagtcaagaaggagtcttcgcagatggaaagcgtcaaagaggagaagccgaccgaaataaagctggaggagacctccgtggaacgccagatactgcaccagaaagaaacaaatcaagatgtacagtgcaatcgtttctttccatcacggaagacgaaaccagtgaagtgtatcctgaacgggatcaattctagtgctaaaaaaaactctaactggaccaagatcaaactgagcaaattcaacagcgtgcagcacaataagttagatagccaggtgtctcctaaacttggacttctgagaacctccttttccccacctgccctagagatgcatcatcctgtcactcagtcaaccttcttggggaccaagctgcacgatcgaaacatcacatgtcagcaggaaaagatgaaagagattaattccgaggaggttaaaattaatgacatcaccgttgagatcaataaaacgacggaacgcgctcctgaaaattgccacctggctaatgagatcaaacccagcgacccaccattagacaaccagatgaagcatagcttcgattcagccagcaataagaattttagtcagtgtcttgaatctaaactcgagaacagtcccgtcgagaatgtaaccgctgctagtaccttgcttagtcaggctaagattgacaccggggagaataagtttcccggcagtgctccgcagcagcattctatcttgagcaaccagacctccaaatcctctgataaccgtgagactccacgcaaccatagtctcccgaaatgtaattcccacctggagatcactatcccgaaagacttaaaactgaaggaggccgaaaaaaccgatgagaaacagcttattatcgatgcgggccaaaagcggttcggagctgtgagttgcaacgtgtgcggcatgctttataccgcttcaaatcctgaagacgagacacagcacctgttgtttcacaaccagtttatctctgcggtaaaatacgtcgtcctgctgattaaccaccacgaatgcggctcagaagaagagtttattacgtccctcttcctgtccatgtttaactttcgctatacacaaaggtcattctcgtttccaataaggttcctagagggattggaagaaagaaagaactccgggtag

SEQ ID NO: 186871 - DNA, 1806 bp, synthetic construct
  misc_feature 1..1806: note = Description of Artificial Sequence: Synthetic coding sequence
  source 1..1806: mol_type = other DNA
atggccgccctgaccccccggaagcggaagcaggacagcctgaagtgcgactctctactgcactttaccgagaatctttttccatcaccaaataaaaaacactgcttttaccagaattccgacaagaatgaggagaatttgcactgttcccagcaagaacacttcgtactttccgcattgaagacgacagagataaatcgactaccgtctgctaatcagggctcacccttcaagagcgctttaagcactgtatccttctacaaccagaacaaatggtacctgaaccctctagagagaaaactgatcaaagagtcacgctcgacatgtctgaaaactaacgatgaggataagtccttcccaatagtaacagagaagatgcagggcaagccagtgtgttccaagaagaataacaagaaaccgcagaaatcccttactgctaaatatcagccgaagtataggcacatcaagccagtcagccgaaattctcgcaactctaagcagaaccgagtgatttataaaccaatcgttgagaaggaaaacaactgccatagcgcagaaaataatagtaatgcaccacgagtcctgtcgcaaaaaataaagccacaagtgactcttcaggggggggccgcttttttcgtcagaaagaaaagctccctcagaaagtccagtctggagaatgagccgtccctgggcaggacgcagaagagtaagtcggaggtgattgaggactcagacgttgaaacagtctctgagaagaagacttttgctacccgccaagtgcctaaatgcctggtgttagaggagaaactgaaaatcgggctgttgagcgcatccagtaaaaataaggagaagctgatcaaggacagctccgatgaccgagtgtcgagcaaagagcacaaagtcgataaaaatgaggcattcagtagtgaagactctcttggcgaaaataaaaccatttctcctaaatcaaccgtttacccaatcttctctgcctctagcgtgaatagtaaacgttccctgggcgaggagcagttctcagtggggagcgtgaacttcatgaagcagacaaatattcagaagaataccaatacccgggatacctccaagaagaccaaagatcagctcatcatagacgctggtcaaaaacacttcggggccactgtttgtaagtcctgcggaatgatatacaccgcatcaaatcccgaggatgaaatgcagcatgttcaacaccaccatcgtttcctagaaggaatcaaatacgtagggtggaaaaaggagcgtgtggtggccgagttctgggacgggaagatcgtgctggttctaccccacgacccgagcttcgctattaagaaggtggaggatgtccaggagttggtggacaatgaactggggttccagcaagtggttccgaagtgccccaataagataaaaacctttctgttcatctctgatgaaaaacgcgtggtggggtgcctgatcgcagagcctattaaacaagctttccgcgtgctaagcgagcccatagggccagaaagtcccagcagcactgaatgcccccgagcatggcagtgtagcgacgtgccagagccagccgtgtgcggcatttcccgaatatgggtttttaggctgaaacggcggaaacgtattgccagacggctggtggatactctgcggaactgttttatgtttggttgttttctgtctacagacgaaatcgcattctcagaccccacacctgacggtaagctgtttgctacaaagtactgtaatacccccaattttttagtgtacaatttcaacagttag

SEQ ID NO: 186872 - DNA, 720 bp, synthetic construct
  misc_feature 1..720: note = Description of Artificial Sequence: Synthetic coding sequence
  source 1..720: mol_type = other DNA
atgaagcagaccaacatccagaagaacaccaacacccgggacacctccaagaaaacaaaagaccagctgatcatcgacgccggacaaaagcacttcggggccaccgtgtgtaagtcctgcggtatgatctacaccgcctctaaccccgaggatgagatgcaacacgttcagcatcaccatcgttttttagaggggataaagtacgtggggtggaaaaaggagcgcgtagtcgcggagttctgggatggtaaaatcgtgctggtcctgccccacgaccccagtttcgcaataaagaaagttgaggacgttcaggaacttgttgacaatgagttaggcttccagcaggttgtgcctaaatgtcccaataaaattaagactttcctttttatttccgatgaaaaaagagtggtgggctgcctcattgctgagcctatcaaacaagcgttcagagtcctaagtgaaccgatcggtccggagtccccttcttccaccgaatgcccgcgcgcctggcagtgctctgatgtgcctgagccagctgtgtgcggcatttcccgcatctgggtgtttcggttaaagcggagaaagagaatcgctcgccggctggtggacacattgcgtaactgcttcatgttcggttgctttctgtccaccgatgaaatcgccttttctgaccccacacccgacgactgtcgccgactcaatagataccaggagacctag

SEQ ID NO: 186873 - DNA, 849 bp, synthetic construct
  misc_feature 1..849: note = Description of Artificial Sequence: Synthetic coding sequence
  source 1..849: mol_type = other DNA
atggccctgaagcagatcagcagcaacaagtgcttcggcggcctgcagaaggtttttgagcacgactcagttgagttgaactgtaagatgaaattcgctgtgtatctaccccccaaagccgagacgggcaagtgcccggccctgtattggctgagcgggctgacatgtactgagcagaacttcatatctaagtcaggttaccaccaatctgcttcagaacacggcttagttgtgatcgcccctgataccagcccccgcggatgtaacattaagggtgaggatgagagctgggattttggaacgggagctggattctacgttgatgccaccgaggatccttggaaaaccaattatagaatgtactcttacgtgacagaggaactgccccagttgatcaatgctaacttcccagtggatcctcagcggatgtctatcttcgggcatagcatgggtgggcacggcgccctcatctgcgccctgaaaaatcccggcaagtataagagtgtgtcggcattcgcgccgatatgtaatcccgttctgtgtccatggggcaaaaaggcattcagcgggtatctgggaaccgaccagagcaagtggaaggcctacgatgctactcacttagtaaagagctacccagggagccagctggacattctgatcgaccagggaaaggacgaccagttcctgctcgatgggcaactacttcctgacaacttcattgctgcatgtacagagaagaagatccccgtggtgtttcgccttcaagaaggctatgaccacagctactacttcatcgcaaccttcattacagatcacatcagacatcacgcaaaatacctgaatgcgtag

SEQ ID NO: 186874 - DNA, 642 bp, synthetic construct
  misc_feature 1..642: note = Description of Artificial Sequence: Synthetic coding sequence
  source 1..642: mol_type = other DNA
atggccatcacccagttccggctgttcaagttctgcacctgcctggcaaccgtgttctcattcctgaagaggctgatttgccggtcaggaagagggaggaaactgtcaggtgatcagattactctccccacaacagtcgactactctagtgtccctaaacaaaccgacgtagaagaatggacctcttgggacgaggatgcaccaacgtctgtcaaaattgaaggtggtaacggtaacgtggccacacagcagaattctctggagcagctggagccagactattttaaggatatgaccccaactatccgaaaaactcagaagattgtcataaagaaacgggaaccattgaactttgggatcccagacggctctacagggttcagctcccgcttagctgctacacaggatctgccattcatccatcagtccagcgagttaggggacttggacacatggcaagagaacaccaacgcctgggaggaagaggaagacgccgcatggcaggcggaagaggtgctgcggcagcagaagttggccgaccgcgagaagagagccgctgagcagcaacgcaaaaaaatggagaaagaagcccagcgcctcatgaaaaaggaacaaaacaagatcggcgtcaaattgtcctag

SEQ ID NO: 186875 - DNA, 642 bp, synthetic construct
  misc_feature 1..642: note = Description of Artificial Sequence: Synthetic coding sequence
  source 1..642: mol_type = other DNA
atggccatcacccagttccggctgttcaagttctgcacctgcctggctaccgtcttctcgttcttaaagaggttgatttgtcggagtggccggggaaggaaactctccggagatcaaataactctcccaaccacagtggactattcttcggtgccgaagcagaccgacgtggaggaatggacttcatgggacgaagacgctcccacatcggtgaaaatcgaaggagggaatggtaatgtggctacacaacagaactccctggagcagctggaacctgactattttaaggacatgacccctaccattcgaaagacacagaagattgtcatcaaaaagcgagaacccctcaacttcgggatcccagatggcagtaccggcttctccagtcggttagccgccacccaagatttgccctttatccaccagtcttccgagcttggcgatttagacacttggcaagaaaataccaatgcatgggaggaggaggaggacgccgcttggcaagccgaagaggtgctgcgccagcagaagctggccgatcgtgagaaacgggccgctgaacagcaacgaaagaagatggaaaaggaggcacagagactgatgaagaaagagcagaataagatcggggtgaagttgtcttag

SEQ ID NO: 186876 - DNA, 594 bp, synthetic construct
  misc_feature 1..594: note = Description of Artificial Sequence: Synthetic coding sequence
  source 1..594: mol_type = other DNA
atggccatcacccagttccggctgttcaagttctgcacctgcctggctactgtcttctcatttctaaagagacttatatgtcggtccgggagaggacggaagctcagcggggatcagattactcttcccaccactgtagattattcttccgtgccgaagcagacagatgtggaggagtggacatcctgggatgaggacgcgccaaccagcgttaaaatagaaggtggcaatggtaatgtggctactcagcagaatagtttagagcagctggagcccgattactttaaggatatgacgcctaccatacgcaaaacgcagaaaattgtcatcaaaaagagagagcctctgaatttcgggattccggatggctcgacaggcttctccagtcgtctagctgccacacaggacctgccattcattcatcaatcatctgagttaggagacctggatacgtggcaggagaatacaaacgcctgggaggaagaggaggacgctgcgtggcaggccgaggaggtgttgagacagcaaaagctggctgatcgcgaaaaacgcgcagctgagcagcagagaaagaagatggagaaggaggcttag

SEQ ID NO: 186877 - DNA, 777 bp, synthetic construct
  misc_feature 1..777: note = Description of Artificial Sequence: Synthetic coding sequence
  source 1..777: mol_type = other DNA
atggccatcacccagttccggctgttcaagttctgcacctgcctggccactgtcttctcattcctgaagcgtctgatctgtcgctccgggcggggtcggaaacttagcggggaccagattactctgccaacaactgtggattattcatcagttcctaaacagacagatgtggaggagtggactagctgggacgaagatgcacctactagcgtaaagattgagggaggtaacggaaacgttgccacgcaacagaatagtctggagcagctggagcctgactactttaaagacatgacacccaccatccggaaaacccagaagattgtgatcaagaagagagagcctttgaatttcgggattcctgatggaagcaccggcttcagtagccggctggcagcaactcaggatttgccattcatccaccaatcttctgagctgggagacttggacacatggcaggagaacacaaatgcctgggaggaggaagaagacgccgcctggcaggctgaggaggtgctacgaagtagaacgaacgtatgcctattgtgttccctgctgtttcaccaccctactccaactagcacaccttacatcaatcagtccgtcaagatagagagagtgtcccttggccagtggtcgtacggaaaatctaaggagcagcagaagctcgccgaccgagagaagcgcgctgccgagcagcagaggaagaagatggagaaggaagctcagagactcatgaaaaaggagcagaataagatcggtgttaaactgagttag

SEQ ID NO: 186878 - DNA, 237 bp, synthetic construct
  misc_feature 1..237: note = Description of Artificial Sequence: Synthetic coding sequence
  source 1..237: mol_type = other DNA
atggccatcacccagttccggctgttcaagttctgcacctgcctggctaccgtcttcagctttttgaagaggttgatctgccggagtggtcgggggcgtaaattgtctggagaccaaatcactttacccaccacagtagattattcttctgtacccaaacagacagacgtcgaagagtggacttcctgggacgaagatgcccctacctccgtaaaaatcgagggtggcaacggctag

SEQ ID NO: 186879 - DNA, 1272 bp, synthetic construct
  misc_feature 1..1272: note = Description of Artificial Sequence: Synthetic coding sequence
  source 1..1272: mol_type = other DNA
atgagcagccaggtggtgggcatcgagcccctgtacatcaaggccgaaccagctagccctgactctccaaaaggctctagtgagactgaaaccgaacctcctgtggcactggcccccggtcctgcccccactaggtgcttgccagggcataaagaggaggaagacggcgagggcgccggccctggcgaacaggggggtggcaagttggtgctttccagcctgcctaagcgattgtgtctggtgtgtggggacgtggcctccggatatcactacggcgttgccagctgtgaggcctgtaaggccttcttcaagcggacaatccagggcagtatcgaatatagttgcccagctagcaatgagtgtgagatcaccaagcggcgtcgtaaagcttgccaggcgtgtcgatttaccaaatgtttgcgggtgggaatgctcaaagagggggttcgcctggaccgggtcaggggcggaaggcaaaagtacaagcgaagaccggaggttgatcccctccccttccctggaccctttcctgccggaccacttgccgtagcaggcggtccccggaagactgctgcccccgtcaacgcgcttgtatctcacctcctggttgtggaacccgaaaagctgtacgccatgcctgatccagcggggcccgacggacatttacccgccgtggcaacactctgtgacctgtttgacagggagatcgtggtaactataagctgggcaaaaagcatcccggggtttagtagcctctccctttcggaccagatgagcgtgctgcagtccgtgtggatggaagttcttgttctgggcgtggctcagcgaagcctaccacttcaagacgagctggccttcgccgaggacttggtcctggacgaggagggcgctcgggccgcaggactgggtgagctgggagcggccctactgcagttagtcaggcggctccaggctctccgcctcgaacgcgaagagtacgtattgctgaaggccctggccttagctaatagtgacagcgtgcatattgaagatgcagaggctgttgagcaactgcgggaagcattacacgaagctctactggagtatgaagccggacgcgctgggccgggaggtggcgccgaaaggcgaagggccggcaggctgctactgacactgcctctgctccgacagaccgctggcaaagtcctggcgcacttctacggggtgaagttagagggcaaggtccccatgcacaagctgttcctcgaaatgctcgaggcgatgatggactag

SEQ ID NO: 186880 - DNA, 1272 bp, synthetic construct
  misc_feature 1..1272: note = Description of Artificial Sequence: Synthetic coding sequence
  source 1..1272: mol_type = other DNA
atgagcagccaggtggtgggcatcgagcccctgtacatcaaggccgagcccgcttcacccgactcacctaaagggagtagtgaaaccgaaacagaaccaccggtcgccttagcacctgggcccgcccctacacgctgccttcctggccataaggaggaagaggacggagagggagctggccccggagagcagggcgggggtaagctggtgctctcaagtctaccgaaacgcctgtgtctggtgtgcggggacgtggcatccgggtaccattatggggttgccagctgcgaggcgtgtaaggccttcttcaaacggactatccagggtagtattgagtacagttgccccgcatctaatgaatgcgaaattacgaagcgcaggcggaaggcctgtcaggcgtgtcgttttactaaatgcctccgagttgggatgcttaaggagggcgtgcgcttggacagggttcgcggcgggcggcaaaagtataaacgccgacctgaggtggatccactgcccttccctggcccatttccagcagggccgcttgctgtggcaggcggcccccggaagacagccgcaccggtgaacgccctcgtttcccatttacttgttgtcgagcccgagaaattgtacgctatgccagacccggcgggccctgacggacacttaccggcagtagctacgctttgcgatctgtttgatagggaaattgtggtgactatcagctgggccaagtcaattcctggcttctcatcgctctccctttccgaccagatgtctgtcttgcaaagcgtttggatggaagtgctagtactcggggtcgctcaaaggtcactgcccctgcaggatgaattagctttcgctgaagatctcgtgctggacgaggagggtgcccgagcggcaggattgggggaattaggcgctgccctgctgcagcttgtacgtcggctgcaggcacttcgcctggagcgcgaagaatatgtgctcctgaaagcattagccctcgccaactctgattctgtgcacattgaagacgcagaggcagtggagcagttgagggaggctctgcatgaagcattgctagagtacgaggcaggccgtgctgggccggggggaggggctgaaagacgaagggccggccggcttctgctgactctcccactgctgaggcagactgcagggaaagtcctggcccacttttacggggtcaagttggagggaaaagtcccaatgcacaaactcttcttggaaatgctcgaggcaatgatggattag

SEQ ID NO: 186881 - DNA, 1269 bp, synthetic construct
  misc_feature 1..1269: note = Description of Artificial Sequence: Synthetic coding sequence
  source 1..1269: mol_type = other DNA
atgagcagccaggtggtgggcatcgagcccctgtacatcaaggccgaaccggcttcaccagattctcccaagggatcctcagagacagagacagagcccccggtcgccctggcccctgggcccgcccctacacgttgtctgccaggtcacaaagaggaggaggatggtgagggagctgggcctggagagcagggtgggggcaaactggtattatcatcccttccgaagcggctgtgcctcgtgtgcggggatgtggcttcgggataccattacggggtagcctcttgtgaggcttgcaaagccttcttcaagagaaccatccagggctctatagagtacagctgtcctgccagcaacgaatgcgaaatcactaagcgcagacggaaggcctgtcaggcttgcaggtttactaagtgcctgcgtgttggtatgcttaaagaaggagttagactggatagggtgcgagggggcagacaaaagtacaaacggcggccggaggtggatccactcccatttcctgggcccttcccagcaggcccgctggccgttgccggaggccctagaaagacggccccggtgaacgcccttgtctcccaccttttggttgttgaaccagaaaagctatatgcaatgcccgacccagccggacctgacggacacttacccgccgtggctacgttgtgtgacttgttcgacagggaaattgtggtgactattagttgggccaagagtatccccgggttctcatccttgtccctctcagaccagatgtcagtgctgcagtcagtttggatggaggtcctggtgttgggggtggcccagcgatctctgccattgcaggacgaactcgcctttgctgaggatctggtgctggacgaggagggcgccagggccgctgggttgggagagctcggggctgctctactgcaattagttcggcgcctgcaggcacttagactcgagagggaagaatatgtgctcttaaaggcactcgcattagcaaactctgattccgtgcacatcgaagatgctgaagctgtcgaacagctgcgggaggcccttcatgaggccctcctggagtatgaagccgggagggcaggacccggagggggcgctgaaagacgccgggcaggtaggttgctgctaacgctgcctctgctgagacaaacagctggtaaagtgctggcccatttctacggggtcaagctcgaaggcaaagttcccatgcataagctgttccttgaaatgctggaggctatgatggactag

SEQ ID NO: 186882 - DNA, 330 bp, synthetic construct
  misc_feature 1..330: note = Description of Artificial Sequence: Synthetic coding sequence
  source 1..330: mol_type = other DNA
atgagcagccaggtggtgggcatcgagcccctgtacatcaaggccgagccagcgtctcctgattccccgaaaggcagttctgaaacagagacggagcccccagtggcgctcgcacccggacctgccccgaccagatgtctgcctggtcataaagaagaggaggatggggagggagccggccctggggagcagggcggcggtaagctcgtcttaagctccctgcctaagcgtctctgtctcgtgtgtggggacgtggcctctgggtaccactacggtgtcgcgtcctgcgaagcctgtaaggctttcttcaagaggacaattcagggctag

SEQ ID NO: 186883 - DNA, 1503 bp, synthetic construct
  misc_feature 1..1503: note = Description of Artificial Sequence: Synthetic coding sequence
  source 1..1503: mol_type = other DNA
atgagcagcgacgaccggcacctgggcagcagctgcggcagcttcatcaaaaccgaacccagttcacctagctcaggcatcgatgccctgagtcaccactctccatcaggtagctccgacgcatcagggggatttggtctagccctgggaactcacgccaacggtctggattccccacccatgttcgccggcgctggactcggtgggacgccatgccggaagagctacgaggattgcgccagcgggattatggaggactccgccattaagtgcgagtatatgctgaacgctattccaaaacgcctctgtttggtgtgcggtgacatagctagtggctaccactacggcgtggcgtcgtgtgaggcctgcaaggctttcttcaagcggacaatccagggcaatatcgaatattcatgcccagcgaccaacgagtgtgagatcaccaagaggcggcggaaatcctgccaagcctgtcgcttcatgaagtgcctgaaggtggggatgctcaaagagggcgtaaggctggaccgggtcaggggtggaaggcagaagtacaaacgacgactagactctgaatctagcccatacctcagtcttcagatctcacctcctgcaaaaaaaccactcacgaagattgtcagctacctcctggtggcagagccagataaactttacgccatgccaccgcccggaatgcctgagggagatattaaggcattgacaaccttatgcgacctagccgaccgggaactggtggttatcatcgggtgggcgaagcatattccgggtttctcctcactcagcttgggggaccaaatgtctctccttcaaagcgcatggatggagattctgatcctcggaatcgtctataggtctctgccctatgacgacaaattggtgtacgcagaggactacattatggatgaagagcactcccggttggcgggactgcttgagctgtatcgcgccatcctgcagctggtgagaagatacaagaagctcaaggttgagaaggaagagttcgttacgctgaaggccctcgctctcgccaatagtgattccatgtatatcgaagatctcgaggcagtgcagaagctccaggatttgctgcacgaggctttacaggattacgaactaagtcagcgccatgaagagccttggagaaccggaaagcttctcttgaccctcccgctcttgagacagaccgcagcaaaagccgtgcagcatttttactcagtcaagctccaggggaaggtgccaatgcacaaactctttcttgagatgctagaagccaaagcctgggcacgcgccgactctttgcaggaatggcgccccttggaacaagtgccttcaccccttcacagagccactaaaaggcaacacgtgcactttcttaccccattgcccccacccccctcagtggcttgggtgggaacagctcaggcaggctaccacctggaagtgtttcttccacaacgcgccggctggcccagagctgcatag

SEQ ID NO: 186884 - DNA, 1527 bp, synthetic construct
  misc_feature 1..1527: note = Description of Artificial Sequence: Synthetic coding sequence
  source 1..1527: mol_type = other DNA
atgagcagcgacgaccggcacctgggcagcagctgcggcagcttcattaagaccgaaccatcatcaccgagcagcggcatcgacgctttatctcatcatagtccctcaggctcctcagatgcttcaggggggttcggtctcgcattgggcactcatgcaaacggcctcgattcccctcccatgtttgcaggagcaggccttggggggacgccttgtcgtaaaagttacgaggactgtgccagcggcattatggaagacagtgcaataaagtgtgaatacatgttgaacgccatccctaaaaggctctgtttggtgtgcggtgacatcgcgtccggctatcactacggcgttgcttcgtgcgaagcttgtaaagctttctttaaacggacaatacaaggcaatattgagtactcctgccccgccacgaacgaatgcgaaattaccaagcgcaggagaaagtcatgtcaggcctgtcgatttatgaagtgcctaaaggtggggatgctgaaggagggagtgcgtctggatcgtgttaggggcggcagacagaagtataagcgtagattggactctgagagtagtccatacctgtcacttcagattagtccccccgccaagaaacccctgacgaagattgtctcatatctcctagtcgcagaacccgataagctatacgcaatgcctcctccaggaatgcctgaaggcgacattaaggccttgactactctgtgtgatctcgccgatcgggagctggtggtgatcatcggatgggcgaaacacattccgggattcagctcgttgagccttggggaccaaatgagcctcctgcagagcgcttggatggagatcctcatacttggcatagtatatagatctctcccgtatgacgacaaacttgtgtatgctgaagattacattatggatgaagaacacagcagactggctggcctcctggagctctatcgcgcgattttacaactggtcagaagatacaaaaaactgaaagttgaaaaagaagagtttgtgacacttaaagctctcgcacttgcgaacagcgatagtatgtatatcgaagatttagaggcagtgcagaaactacaggacctgctgcacgaggctctgcaagattatgaactctcccagaggcatgaagagccctggagaacaggcaaactgctccttactctccctctgctccgacagacagcagccaaggcagtccagcatttttactcggtgaagctccaggggaaagtgcccatgcacaaacttttcctggaaatgttggaggctaaggttggtcaggaacaactgcgtggctctcctaaggacgagaggatgtccagccatgatggcaagtgtcccttccaatcagccgcgttcacctcgagagaccagtccaatagccctgggatccctaaccctaggccaagtagccccacacccctcaatgaacgagggcggcaaatctctccctctaccagaacaccaggcgggcagggaaagcacctgtggttaacaatgtag

SEQ ID NO: 186885 - DNA, 1503 bp, synthetic construct
  misc_feature 1..1503: note = Description of Artificial Sequence: Synthetic coding sequence
  source 1..1503: mol_type = other DNA
atgagcagcgacgaccggcacctgggcagcagctgcggcagcttcatcaaaactgagccctcttccccatcgtctgggatcgacgccttatcccatcacagtccctccgggagtagcgatgcttcagggggtttcggtctcgctctgggcacccatgccaacggcctcgacagtcccccaatgtttgctggagctggtttgggcggcaccccctgccggaaatcctacgaagattgtgcctccggtataatggaggactccgccataaagtgtgagtacatgctcaatgcgatccccaagagactgtgcttagtgtgcggcgatatagccagtggctatcattatggggtcgccagctgcgaggcctgcaaggcctttttcaagcgaacaatacaggggaacatcgagtattcatgccccgccactaatgagtgcgaaattacaaaacgccgcaggaaatcatgtcaggcctgcagatttatgaaatgtctaaaagtaggtatgctgaaggagggcgtgcgcctcgatcgcgtgcgcggaggaagacagaaatataaaaggcggctggattcagagtcttccccttacctgtcgctgcaaataagccctcccgccaagaaacccctgaccaagatagtttcctacttgctggtagctgaacccgacaagctgtacgccatgcctccaccaggcatgcctgaaggtgacatcaaggctctgaccaccctttgcgacctggcagacagagagctcgtggtaattatcgggtgggctaaacacatcccagggttttcgagcttgtctctgggcgatcaaatgagcttgctacagtccgcttggatggagattctcatcctgggaattgtgtacaggtcccttccttacgacgacaagttggtctacgctgaagactatattatggacgaggaacactctaggctggcgggactgctcgagctgtaccgagccattctacagctagtgaggagatacaagaaactgaaggtggaaaaggaagagttcgtgacccttaaagccctggcattagccaattccgactcgatgtatatagaggacctggaagcagtgcagaagctgcaggacctcctgcacgaagccctccaggactacgagctctcgcaacgacacgaggagccgtggagaactggcaaactgctgttgacattacctctgttaaggcagaccgcagcgaaagccgtacaacatttctactctgtcaagttgcagggtaaggtgccaatgcacaagttgttcttagagatgctggaggctaaagcctgggccagggccgatagcctgcaggagtggcgacccctggagcaggtgccttcacctctgcatcgggcaacgaagcggcagcatgtacatttcctcacacctttgccaccccctcctagcgtggcatgggtcggaaccgctcaggctggctaccacctggaggtattcctgcctcaacgcgctggctggccgagagccgcctag

SEQ ID NO: 186886 - DNA, 1527 bp, synthetic construct
  misc_feature 1..1527: note = Description of Artificial Sequence: Synthetic coding sequence
  source 1..1527: mol_type = other DNA
atgagcagcgacgaccggcacctgggcagcagctgcggcagcttcatcaagacagaaccaagcagcccctcctccgggatcgatgcgctgagccaccactccccctcaggctcctcagatgcctctggcggctttggcctggcattgggtactcacgccaacgggcttgactctccgccaatgttcgctggggccggactggggggaaccccgtgcagaaaatcttacgaagactgcgcatcgggcatcatggaggacagcgccatcaagtgtgagtatatgttgaacgctattccgaaacggttgtgtctggtatgtggagacatcgcatcaggatatcactatggcgtggctagttgtgaagcctgtaaagcctttttcaagagaaccatccaaggaaacattgaatactcctgtcctgccacaaatgagtgtgaaatcactaagcggcggcgcaagtcctgccaagcttgccgatttatgaagtgtttgaaggtcgggatgctaaaggaaggagtccggctcgaccgggttcgcggaggtcgccagaaatataagagacgattagactccgaatcctctccctatctaagtctgcagatcagtccaccggccaaaaaacccctgaccaagatagtgtcctatcttctggtggctgagccggacaagttgtatgctatgccccctcctggcatgccagaaggagatataaaggccctgactacattatgtgacttagctgaccgggagctggtggtaatcataggctgggctaaacacatcccggggttcagttccctgtcactgggagatcagatgtcattgctccagtccgcgtggatggagatattgatccttggcattgtctaccgctccctgccctatgacgataaactagtgtacgcagaggattacattatggacgaagagcacagccgcctcgccggtttattggagttgtacagagcaattttgcaactggttcggcgatataagaagctcaaagtggaaaaagaagagttcgtcaccctgaaagcgctcgccctggctaatagcgattccatgtacatcgaagatttggaagctgtgcagaagctccaggatcttctgcacgaggcgcttcaggactatgagttgtctcagcggcacgaggaaccctggaggaccggaaaactgctgttgacactgcctctgctgcggcagaccgccgctaaggcagtacagcacttctatagtgtgaaattacagggcaaagttccaatgcacaagctgtttctggaaatgcttgaagcaaaggtaggacaggaacagctgcgcgggtcacctaaggacgagagaatgagcagtcacgatggcaaatgccctttccaatctgccgccttcacttctagagaccaatccaactctcccggtatccctaaccccaggcctagctcacccaccccacttaacgagcgaggtcggcagatcagccctagcactcggactcctgggggccaggggaagcatctctggctcaccatgtag

SEQ ID NO: 186887 - DNA, 1527 bp, synthetic construct
  misc_feature 1..1527: note = Description of Artificial Sequence: Synthetic coding sequence
  source 1..1527: mol_type = other DNA
atgctgctgaaccggatgagcagcgacgaccggcacctgggcagctcttgcggttcattcatcaagaccgaaccaagttctccatcctcgggaatcgacgccttatcacaccattcaccaagcggctctagcgacgcgtcaggaggatttgggctggctctgggaacacatgccaacgggcttgattcccccccaatgtttgcaggcgccggtcttggcggaacaccctgtcgcaagtcctatgaggattgcgccagcggcattatggaggattcggctattaagtgtgaatacatgctaaatgcaatccccaaacggctgtgcttggtgtgtggcgacattgccagcggttaccactacggcgtagcttcatgtgaggcctgtaaggctttcttcaagcggactatccaggggaacatcgaatacagctgtcctgccactaatgaatgcgaaatcaccaagagacggcggaagagctgtcaggcttgtcgctttatgaagtgtctcaaggtaggaatgttgaaagaaggtgtacgtttggatcgggtccgggggggtcgtcagaagtacaagaggagactggattccgagtcatccccctacctgtctctccagatttcccccccagccaaaaaaccactgacaaaaatcgtctcatacctgctggtggccgaacctgacaagctgtacgccatgccacccccaggcatgccagagggcgatatcaaggcacttaccactctgtgcgacctagccgatagggaattagtcgttattattggttgggccaagcatatcccaggcttttcctctctgagtctaggagatcaaatgagcctcttacagtcggcttggatggagattttaatccttgggattgtgtataggagcctgccctacgacgacaagctggtctatgcagaagattacattatggacgaggagcattctagactcgccggactgttggaactgtatagagctattctgcagttggtgaggagatataaaaagttaaaagtcgagaaagaggaattcgtgacccttaaggccctagccttggcaaatagtgattcgatgtacattgaggacctcgaggccgtgcaaaaattacaagatctccttcacgaagccctgcaggattacgagctctctcagagacatgaagagccatggagaaccggtaagctgctactcacgttaccactgcttcgccagacagccgctaaagccgtgcagcacttttacagcgtgaagctccaggggaaagtgcctatgcacaagcttttcctggagatgttggaggccaaagtggggcaagagcagctgagagggagcccgaaggacgaacggatgtcctcccatgacggcaagtgtccctttcaaagcgcggctttcactagcagagaccagtccaattcaccaggaatcccgaaccccaggcccagttccccaacaccgctcaacgagcgcggccgtcaaatctcaccgagtactcgaacacccggcgggcagggcaaacactag

SEQ ID NO: 186888 - DNA, 1302 bp, synthetic construct
  misc_feature 1..1302: note = Description of Artificial Sequence: Synthetic coding sequence
  source 1..1302: mol_type = other DNA
atgagcagcgacgaccggcacctgggcagcagctgcggcagcttcatcaagacggagccctcatctcctagcagcggaatagatgccctctcacatcactcgccctctggctcaagtgacgcctccggtggcttcgggctcgcactgggcacccatgccaatggtctggattccccccccatgttcgcgggtgcagggctcggcggcactccatgtcgcaagtcctatgaagattgtgcatctggaattatggaggatagtgcaatcaaatgcgagtatatgctcaatgctatcccaaagagactttgcctggtatgcggggatattgcctctggctaccactacggcgttgccagttgtgaagcttgcaaggccttcttcaaaaggacgatccagggaaatattgaatactcttgccccgccacgaacgagtgtgaaatcacaaagcgccgccgtaaatcctgtcaggcatgccggtttatgaaatgtctaaaggtaggtatgctgaaagaaggcgtaaggttggaccgcgtaaggggcggccgccagaagtataaacggaggctcgattctgagagctctccatacctgagcctccagatcagccccccagcaaagaagcctttgaccaagatcgtgagttatctgctggttgccgagcccgacaagctgtacgcaatgcctccccctgggatgccagagggggacatcaaagccctcacaacgttatgtgacctggccgatagagaactagtggtaataattgggtgggcaaaacacattccagggttcagttcattgtcattgggcgaccagatgtccttactgcagtcagcgtggatggaaattctgattctcggcattgtctacagaagcttgccctacgatgacaagcttgtctatgcagaggactacataatggacgaggagcatagtcgactcgcgggactgctcgaattgtacagagctattctgcagctcgttagacgatataaaaaactgaaggtagagaaagaagagttcgtcacattaaaagctctcgcactggcaaatagtgactcaatgtatatagaagatctcgaggccgtgcagaaactccaggacttattgcacgaggcactccaagattacgagctcagccaacgccatgaggagccctggaggacaggaaaacttctccttacactgccactgctgcgacaaactgccgcgaaggccgtgcagcacttctactcagttaagcttcaagggaaagtgccaatgcataaactatttctcgaaatgttggaagccaaagtgtag

SEQ ID NO: 186889 - DNA, 1311 bp, synthetic construct
  misc_feature 1..1311: note = Description of Artificial Sequence: Synthetic coding sequence
  source 1..1311: mol_type = other DNA
atgagcaacaaggaccggcacatcgacagcagctgcagcagcttcataaagacggagcctagtagtcctgcttctctcacggactctgtcaaccatcactctcccggaggctcctccgacgcgtccggtagttactcttccaccatgaacggtcatcaaaatgggctcgattcccccccactttacccgagcgcccccatattgggaggctccggacccgtcagaaagctgtatgatgactgttccagtactatcgtcgaggacccacaaacaaagtgtgagtacatgctgaacagcatgccaaagcgcctctgccttgtgtgtggagacattgcctccggatatcactatggagtggcgtcttgtgaagcctgtaaagcgtttttcaagaggaccatccagggcaatatagaatatagctgtcctgccactaatgagtgtgaaattaccaaaagaagaagaaagtcatgccaggcctgtaggttcatgaagtgcctaaaagtgggtatgctcaaggagggagtgagactggatagagttaggggtgggaggcagaaatacaaaaggagaattgatgcagaaaacagcccttatctcaatccccagctggtacaaccagcaaagaagccctacaacaagatcgtgtctcacctccttgtcgctgaacccgaaaaaatctatgcaatgccagatccgacggttcccgactcagacatcaaagctctgacaactctgtgtgacttggccgacagggagctggttgtgattatcggatgggcaaagcacattcctggtttctccaccctgtcgttagctgaccagatgagcctcctccagtccgcatggatggaaatactgatcctgggggttgtctatcgcagtctcagtttcgaggacgaactcgtgtacgcggacgactacattatggacgaggaccaaagtaagctagcgggtctgctggatctgaataatgcaattttacaactcgttaaaaaatacaagagcatgaaattagaaaaggaggaattcgtcaccttgaaagcaattgccttagccaatagcgattccatgcacatcgaggatgtggaggccgttcagaaactgcaggatgtactccatgaagccctccaggactatgaagccggacagcacatggaggaccctaggagggccgggaaaatgttgatgaccctgcctctccttaggcagacatctacaaaggcagtgcagcacttctacaacatcaaattggagggcaaggtccctatgcataagctcttccttgaaatgttggaagcaaaggtgtgctag

SEQ ID NO: 186890 - DNA, 1308 bp, synthetic construct
  misc_feature 1..1308: note = Description of Artificial Sequence: Synthetic coding sequence
  source 1..1308: mol_type = other DNA
atgagcaacaaggaccggcacatcgacagcagctgcagcagcttcatcaaaacagaaccaagctctccagcttctctgactgacagcgtcaaccatcactcccctggaggatccagtgatgcgagcggttcgtattcctctaccatgaatgggcatcagaatggtctggatagcccccccctataccccagtgcacctattctcgggggctccggacccgtacgcaaactgtacgatgactgtagttcgaccatcgtggaggatccgcagacaaagtgcgagtacatgctgaactccatgcccaagagattatgcctggtttgcggtgacattgcctcgggctatcattacggtgtcgcatcctgcgaggcctgcaaggccttcttcaagcggactatccaagggaacattgaatacagctgccccgccacaaacgagtgcgagataacaaaacgcagacggaaaagctgccaggcctgtcggtttatgaaatgtttgaaggtcggcatgctgaaggagggcgttcggctagatcgggtgcgtggcggacgccagaaatataagcggcgaattgatgcagaaaactccccatatctcaaccctcagctcgtgcagccagctaaaaaaccatacaataaaatagtctcgcatcttctggttgcagaacccgagaagatttatgcaatgccggatcctacagtacccgactccgatatcaaggcactgactaccctctgcgacctggctgatcgcgagctcgttgtgataatcggctgggctaaacatattccgggcttctccaccctctctctcgccgatcagatgagcctactgcagagcgcgtggatggagattctgatcttaggcgtcgtctataggagcctgagcttcgaagatgagctagtatatgccgatgactatattatggacgaggatcagtccaaactggcaggtctcctggacttgaataacgctatattgcagctggttaagaaatacaaatcgatgaagctggagaaagaagaattcgtcacccttaaggcaatcgcactggccaattcagactctatgcatatagaggacgttgaagctgtacagaaacttcaggatgttctgcatgaggcacttcaagactacgaggcagggcagcacatggaggacccacgacgagcgggtaagatgctgatgacgcttcctttactgaggcagacatcgacgaaggctgtacaacacttttacaacataaaactggagggcaaggtgcctatgcacaaactttttctggagatgctggaggccaaggtgtag

SEQ ID NO: 186891 - DNA, 1308 bp, synthetic construct
  misc_feature 1..1308: note = Description of Artificial Sequence: Synthetic coding sequence
  source 1..1308: mol_type = other DNA
atgagcaacaaggaccggcacatcgacagcagctgcagcagcttcataaagacagagccctcctccccagcttctctgaccgatagcgtcaaccaccactcacctggggggtcctcagacgcctccggatcttattcttcaaccatgaatgggcatcagaacggcctggattctccaccactgtaccctagcgcaccaattctgggagggagtggaccagttagaaagctttacgacgattgcagttccaccattgtggaggatccccagactaaatgcgaatatatgttgaactccatgcctaagcgtctttgccttgtgtgcggcgatattgccagcggctatcattatggtgtagctagctgtgaagcatgcaaggctttcttcaaacgcacaatacagggaaatattgagtattcctgtcctgccacaaacgaatgtgagatcacaaagaggagaaggaagtcttgtcaggcttgccgcttcatgaaatgtctcaaagtggggatgttgaaggagggagttaggctggaccgggtgcgaggagggcggcaaaagtacaagcgtcggatcgacgcagagaactcaccctacctgaatccacagctggtgcagcccgcgaagaagccttacaataaaatcgtatcccatctcctggtggcagagccagaaaagatttacgcaatgcctgacccaactgtgcctgactccgatattaaggcgctcaccactctttgcgatctggctgatcgcgaactagtcgttattatcgggtgggccaagcatattcctggcttcagcacgctcagcctggccgaccagatgtccttgctccagagcgcctggatggagattttaattctaggtgtggtttaccgatccctctctttcgaggacgagcttgtgtatgcggatgactatattatggatgaggaccaaagtaaattggcaggcctgttagatctcaacaacgccattctgcagttggttaagaagtacaagagtatgaagctcgagaaggaagagttcgtgaccctcaaagctatcgccctggcgaattcagattctatgcacattgaagatgtcgaggccgtgcaaaagctccaggacgtgctgcatgaggcactgcaagactatgaagcgggacagcatatggaagaccccagacgtgcgggtaagatgctcatgacattgccactcctgcggcaaacatccactaaagccgtccagcacttttataacattaaattggaaggcaaggttcccatgcataagctcttccttgagatgctcgaagcaaaggtgtag

SEQ ID NO: 186892 - DNA, 1308 bp, synthetic construct
  misc_feature 1..1308: note = Description of Artificial Sequence: Synthetic coding sequence
  source 1..1308: mol_type = other DNA
atgagcaacaaggaccggcacatcgacagcagctgcagcagcttcataaagactgagccatcttctccagcatctctgaccgattccgtgaatcatcatagtccagggggtagtagtgatgccagcggctcttatagtagtacaatgaacgggcatcagaatgggctggattccccaccactttatccttccgccccaatcctgggtggctcaggtccggtccgaaagctttacgacgattgctcctccacgatcgtggaagatcctcagaccaaatgcgaatacatgctcaattccatgcccaaaaggctctgcctcgtttgcggtgatatcgctagtggataccactacggcgtggcctcctgcgaggcttgtaaggcattctttaaacggaccatccaaggcaatattgaatactcatgcccagctacaaatgagtgcgagataaccaaaagacgacggaaaagttgccaggcttgtcggttcatgaagtgtctcaaagtgggaatgctaaaggagggtgttcgtctcgaccgggtccggggtgggcgccaaaagtacaaaaggcgaatagatgccgagaacagcccttatctgaatccgcagctggttcagccggctaaaaaaccgtataacaaaattgtgtcacatctgctcgtcgctgagcccgagaaaatctatgcgatgcctgacccaactgtgccagattccgacataaaggctttgacgacactatgtgatcttgcggatcgcgaactggtagttatcatcggatgggccaagcacatccctggattctctacactgagcctggcggaccagatgagcctgctgcagtccgcatggatggagatcctgatcctgggcgtagtctaccggtctctgtcttttgaagacgagctggtctatgccgatgattacatcatggacgaggaccagagcaaactggcaggcctgttagatctaaataacgccattctgcagctcgtcaagaagtataagtcaatgaaactggaaaaggaggagtttgtgacactgaaagccatcgctctggccaactcagatagcatgcatatcgaagatgtggaggccgttcagaaactgcaggatgtcctgcacgaggccttacaggattacgaggctggtcagcatatggaggacccgcggagagccggaaagatgctcatgaccctcccattgctcagacaaacctctacaaaagcggtgcagcacttctacaacattaagctcgagggcaaggtgcccatgcataagctgtttctagagatgctggaagccaaagtctag

SEQ ID NO: 186893 - DNA, 1308 bp, synthetic construct
  misc_feature 1..1308: note = Description of Artificial Sequence: Synthetic coding sequence
  source 1..1308: mol_type = other DNA
atgagcaacaaggaccggcacatcgacagcagctgcagcagcttcattaaaaccgagcccagcagtccagccagcctgacggattccgtgaatcaccactccccgggaggaagttctgacgccagtgggagttactcatctaccatgaatggtcaccagaatggacttgacagcccccccctgtatccttccgcccctatcctgggcggctcagggcccgtgcgaaaactgtatgatgattgttctagtacgatagttgaggatccccagaccaagtgcgaatatatgctcaacagcatgcctaagaggctgtgtctagtttgtggcgatattgcaagcgggtaccactatggagtggcctcctgcgaggcctgcaaagcttttttcaaacggacgatacagggtaacatcgagtactcctgcccagcgactaatgaatgcgagattactaaacgccggagaaaaagctgtcaagcctgccgctttatgaagtgtctgaaagtcggcatgctgaaggagggcgtccgcctggaccgtgtccgcggggggcgacagaagtacaaaaggaggattgatgccgaaaattctccttacttgaacccccaactcgtccagcccgctaaaaaaccctacaacaaaatcgtctcccatctactggtcgcggagcctgagaaaatttatgcaatgcccgacccaacagtgcctgactctgacataaaggctctgaccaccctgtgcgatctagccgatagggagctagttgtgattatcggttgggcgaagcatatcccaggcttctccactctgtcactggcggatcaaatgagtttgctgcagtcagcctggatggagattcttatcctgggtgtcgtttacagatcgctgtcatttgaagatgaattagtgtacgcagatgactatataatggacgaggaccaatccaagttggctggtctgctggacctcaacaatgccattctgcaactggtcaaaaagtacaaaagcatgaagctcgagaaggaagaattcgtcacgctcaaggctatcgctctggccaatagcgatagtatgcacatcgaagatgtggaagctgtgcagaaactgcaggatgtcctgcacgaggccctgcaggactacgaggcaggccagcatatggaggacccaagacgggcggggaaaatgctgatgactctgccactcctgagacagacttccacaaaggctgttcaacacttctataacatcaagctggaagggaaagtccccatgcacaagcttttcctcgagatgctcgaggctaaggtttag

SEQ ID NO: 186894 - DNA, 1308 bp, synthetic construct
  misc_feature 1..1308: note = Description of Artificial Sequence: Synthetic coding sequence
  source 1..1308: mol_type = other DNA
atgagcaacaaggaccggcacatcgacagcagctgcagcagcttcattaaaaccgagccatcttcaccagcatccctaaccgatagtgtcaaccatcattcacccgggggatctagcgacgccagtggtagctatagctcaactatgaacgggcatcaaaacggcttagatagcccccctctctacccatctgctcccatactcggcggcagcgggccagtcagaaaactgtacgacgattgcagctccacaatcgtagaggacccccagactaagtgtgaatatatgctgaactcaatgccgaaaaggctttgtctggtgtgcggtgatatcgctagtgggtaccactatggagtagccagctgcgaggcatgcaaggccttcttcaaacgcaccatccagggtaacatagagtattcctgccctgccaccaatgaatgtgagattactaagaggcggaggaaaagctgtcaagcatgtagatttatgaagtgtctgaaagttggcatgttgaaggagggagtccggcttgatcgagttcggggcgggcggcagaaatacaagcgcagaatcgacgccgaaaactccccctatcttaatccacagctggttcaaccagctaagaaaccatacaataagatcgtgtcccacctccttgtcgctgaaccagaaaagatctacgccatgccagacccaacagtgcctgactccgatattaaggccctgacgacactgtgcgacctcgctgaccgagagcttgttgtaattatcgggtgggcaaaacacattcccgggttctccaccctctcactggccgaccagatgtcactgctgcagagcgcttggatggagatattgatcctgggtgtcgtgtatagatccctgtccttcgaagatgagctggtgtacgccgatgattacattatggacgaagaccagtctaagctcgccggactgctcgacctgaataatgctattctccagctcgtcaaaaaatacaagtccatgaaactagagaaggaggaatttgtcaccttgaaagctatagccctggccaactcagatagcatgcacatcgaggacgtggaagccgtgcaaaagctgcaggacgtgctgcatgaggctttgcaggactacgaggctggccagcatatggaggatcctagacgggctggaaagatgctgatgaccctgcctctattaagacaaacaagtactaaggcagtacagcatttctacaatataaagctcgaaggcaaggtaccgatgcataagctgtttttagaaatgctggaggccaaggtctag

SEQ ID NO: 186895 - DNA, 1308 bp, synthetic construct
  misc_feature 1..1308: note = Description of Artificial Sequence: Synthetic coding sequence
  source 1..1308: mol_type = other DNA
atgagcaacaaggaccggcacatcgacagcagctgcagcagcttcatcaagacggagcctagctcacctgccagcctcactgacagtgtgaaccatcattctcctggtggaagctcggatgcctccggatcatattcttcaacaatgaatggccaccaaaatggcctcgactccccgccgctctatccttcagcacctatattggggggcagcggacccgtccggaaactgtacgacgactgcagcagcacaattgtagaggatccccagacaaagtgcgagtacatgctgaactcaatgccaaagaggctgtgtttagtatgtggcgatattgcaagcggctaccattacggagttgcctcatgtgaagcttgcaaggctttttttaagcggaccatccagggcaacatagaatactcttgtcccgccactaatgagtgcgagattactaagcgccggagaaaatcttgccaggcctgcagatttatgaaatgtctgaaagtgggcatgttaaaggagggcgtgcgcctcgaccgagtccggggaggccgccagaagtataaaagacgcatcgatgccgagaactccccatatctgaacccacagctggtgcagcccgctaaaaaaccgtacaataagattgtttcccatcttctggtcgccgagccagagaaaatttacgcaatgcccgatcccaccgtgcctgacagcgatatcaaggcactgacaactttgtgtgatctcgcagaccgggaactcgtggtgataatcggttgggcaaaacatatccctgggttttcaactctttccttggctgatcaaatgagtctgctacagtcggcgtggatggaaattctcatcttaggagtggtctacagatcactgtccttcgaagacgaactggtgtacgcggacgactatattatggatgaggatcagagcaaattggctgggttgttagacctgaacaacgctatcctgcaactggtgaaaaaatataaaagcatgaaattggagaaggaggaatttgtgacactgaaagctattgccctcgccaattcggatagcatgcacattgaggatgttgaggcagttcagaagttacaggatgtgttgcatgaagcgcttcaagactacgaggctggtcaacacatggaggaccctcggcgagctggcaaaatgctcatgactctgcctctcctgcggcagactagcacaaaggccgtgcagcatttctataacatcaaactagaagggaaagtacccatgcacaagttgtttctggagatgctggaggcgaaggtctag

SEQ ID NO: 186896 - DNA, 1329 bp, synthetic construct
  misc_feature 1..1329: note = Description of Artificial Sequence: Synthetic coding sequence
  source 1..1329: mol_type = other DNA
atgagcaacaaggaccggcacatcgacagcagctgcagcagcttcattaagacagagcccagctccccagccagtttgacggattctgtaaaccaccattcacccggcggttcctcagatgcgtccggaagttactcttctacaatgaatggccaccaaaatggattagactccccacccttgtatccgagtgcgcccatcttgggcgggtccggcccagtcaggaagctgtacgacgattgcagctccaccatcgttgaggatccccagacaaaatgtgaatacatgctgaactcgatgcccaaacgcctatgcctggtgtgcggggatatcgcctctgggtaccactacggagtcgccagctgcgaggcgtgtaaggcctttttcaagcgaaccattcagggcaatattgagtacagctgccctgccacgaatgagtgtgagattacgaaacgccgccgcaagtcttgccaagcgtgccgtttcatgaagtgtttaaaagtgggcatgttgaaagagggggtgaggctcgaccgggtgcggggaggaagacagaagtacaagcggcgcattgacgcagaaaattcaccctacctcaaccctcagttggtccagcccgctaagaaaccacttctatggtctgatcccgccgataataagattgttagtcatctgcttgtggctgagccggagaagatttatgcaatgcccgacccaaccgtgccggactctgatatcaaggccctgaccactctctgcgatctcgctgatcgcgaactggttgtgatcatcgggtgggcgaagcatatccccggattcagcactctgtctttagcagatcaaatgtcgctactacagagcgcttggatggagatactaatcctgggtgtggtgtacaggagcctctcttttgaggatgaactcgtttacgctgatgactacatcatggatgaagatcaatccaaactggcaggcttgcttgacttgaacaatgcaatcctccagttagtgaaaaaatataaaagtatgaaactcgagaaagaggagtttgtgactcttaaggccatcgcccttgccaattccgatagtatgcacatagaagacgttgaagccgtccagaagttacaggacgttctccacgaggcactgcaggattatgaggctgggcagcacatggaggacccgcgccgcgccggcaaaatgctcatgactctgcccctgctacggcagacttctactaaggctgtgcagcacttctacaatataaaactggaaggaaaggttccaatgcacaagctgttcctcgagatgctggaggcaaaagtctag

SEQ ID NO: 186897 - DNA, 1377 bp, synthetic construct
  misc_feature 1..1377: note = Description of Artificial Sequence: Synthetic coding sequence
  source 1..1377: mol_type = other DNA
atggacagcgtggagctgtgcctgcccgagagcttcagcctgcactacgaggaagaattgctttgtcgcatgtctaacaaggacagacacatcgattcatcctgcagctccttcatcaagactgagcctagcagtccagcttcacttactgattctgtcaatcaccactctcccggtggctcaagcgacgcctcaggctcatactcaagtaccatgaatggacaccagaacgggctcgattcccctcctctataccctagcgctcccatacttgggggttctggcccagttcggaagttgtatgacgactgttctagcacaatcgtcgaagatccacaaaccaaatgcgaatatatgctgaacagcatgccaaaacgcctgtgtctcgtgtgcggtgacatcgcttcaggataccactatggcgttgcctcgtgtgaggcgtgcaaagccttttttaagcggacgatccaaggcaatatagagtattcatgccctgcgaccaacgagtgcgagatcacgaagcgaagacgaaagagttgccaggcatgccgattcatgaagtgcctgaaagttgggatgttgaaggaaggagtgcgcctagatcgcgttaggggaggtagacagaagtacaaacgcagaatcgacgcggaaaatagtccatatctcaatccccagcttgtgcagcctgccaaaaagccttacaacaagattgtttcccacttgctcgttgctgagcctgagaagatttacgccatgcctgaccctactgttccagactccgatatcaaagcactcacaaccctgtgtgacctcgctgaccgcgagttggtcgtaataatcgggtgggccaagcacatccccggctttagcactctctccctcgcggatcagatgtcattactgcagtcagcttggatggaaattctcattcttggagtggtctaccgcagcttgtcttttgaagacgaactggtgtatgcagatgactatatcatggacgaagatcaaagcaaattggctggcctcttggacctgaataacgctattcttcagctcgtgaagaaatacaagagcatgaaactggaaaaggaagaattcgttacacttaaggccatagcactggccaactccgatagtatgcacattgaagatgttgaggcagtacagaagcttcaggatgtcttgcacgaggctctgcaggactacgaagctggccagcacatggaagatccaaggagggcgggtaagatgttgatgacactccccctgctgcggcagacctccaccaaagcagtccagcacttctataatattaagctagagggaaaagtgccgatgcataagctgttcctggaaatgctcgaagccaaggtgtag

SEQ ID NO: 186898 - DNA, 171 bp, synthetic construct
  misc_feature 1..171: note = Description of Artificial Sequence: Synthetic coding sequence
  source 1..171: mol_type = other DNA
atgagcaacaaggaccggcacatcgacagcagctgcagcagcttcataaaaacggagccgtcttcaccagcatccctgaccgactcagtcaaccaccatagccctggggggagttcagatgctagtgggtcctacagctccacaatgaatggacaccagaacgggctgtag

SEQ ID NO: 186899 - DNA, 279 bp, synthetic construct
  misc_feature 1..279: note = Description of Artificial Sequence: Synthetic coding sequence
  source 1..279: mol_type = other DNA
atgagcaacaaggaccggcacatcgacagcagctgcagcagcttcatcaagaccgaaccctcctctccggccagcctaactgactctgttaaccaccactccccaggcggctcatcagatgcgagtgggagctatagcagcaccatgaacgggcaccagaatggtcttgattcacctccattgtacccctctgccccgattctgggagggtccggtccagtccgtaagctctatgacgattgttcttccacaatagtggaggaccctcaaaccaaatag

SEQ ID NO: 186900 - DNA, 1065 bp, synthetic construct
  misc_feature 1..1065: note = Description of Artificial Sequence: Synthetic coding sequence
  source 1..1065: mol_type = other DNA
atgagcaacaaggaccggcacatcgacagcagctgcagcagcttcatcaagacagagccctctagtcccgcgtcccttacggatagcgttaatcaccattccccaggaggaagtagcgacgcctccggaagctatagctccaccatgaatgggcatcagaatggactagattcacccccactgtatccctccgcgccaatcctcggaggtagcggtccagtcagaaagctttacgatgactgttccagcacgattgtcgaggacccgcagaccaaatgcgagtacatgttgaactctatgccgaagcggctttgcctggtctgtggcgatattgcaagcgggtaccattacggagttgcatcttgcgaagcttgcaaggcattttttaagaggactattcaaggcaatatcgaatatagctgccctgccactaacgaatgtgagataaccaagcgccgccggaaaagttgtcaggcctgtcgctttatgaaatgtcttaaagtgggtatgcttaaggaaggcgtgcgtctggacagagtccgtggaggtcgccagaaatacaagaggagaatcgatgcggaaaattccccttacctgaatccacagctcgtacagcccgccaagaaaccctataacaagatcgtatctcacctgctagttgctgagcccgaaaagatttacgccatgcctgaccctacagtgcctgattctgacattaaagcgctgactacactgtgtgaccttgctgaccgcgagctcgtagtaataattgggtgggctaaacacatccccggtttttcaaccctatcccttgcggaccagatgagcctgctgcagtctgcttggatggaaattttaattctgggggttgtatacagatctctgagcttcgaggatgaactggtctatgctgacgattacatcatggacgaagaccagtccaagctcgccgggctgttggacctaaacaatgccatcctccaactcgtgaaaaaatacaagtctatgaagctggaaaaagaagaatttgtcactttaaaggcaatcgcattagctaatagctag

SEQ ID NO: 186901 - DNA, 153 bp, synthetic construct
  misc_feature 1..153: note = Description of Artificial Sequence: Synthetic coding sequence
  source 1..153: mol_type = other DNA
atgagcaacaaggaccggcacatcgacagcagctgcagcagcttcattaagacagagccgtcatctccagcctccttgacagatagcgtcaatcatcactctccagggggatcgtctgacgccagtggttcctattccagtaccatgaactag

SEQ ID NO: 186902 - DNA, 1308 bp, synthetic construct
  misc_feature 1..1308: note = Description of Artificial Sequence: Synthetic coding sequence
  source 1..1308: mol_type = other DNA
atgagcaacaaggaccggcacatcgacagcagctgcagcagcttcataaagaccgagccgagcagccctgcatcgctcactgatagtgtgaatcaccattcacccggggggtcttcagatgcttctggaagttatagctccaccatgaacggccatcagaacggattggactctccccccttataccctagcgctcccattctaggcggcagcggccctgttaggaagctttacgatgattgcagttccaccatcgtggaagacccccagaccaaatgtgagtatatgttgaacagtatgcccaaacgcctgtgcctggtatgtggcgacattgccagcgggtatcactacggggtggcctcatgcgaagcctgcaaggcattctttaaaagaacaatacagggcaacatagaatattcctgccccgccaccaacgagtgtgaaatcaccaagaggagacgaaaaagctgtcaggcttgtcgatttatgaagtgtctgaaggtcggcatgctgaaagaaggagtacgcttagaccgagtgagaggaggaagacagaagtacaagcgccggatagatgccgagaactctccttatctgaatccgcagctggtgcagccagccaaaaaaccatacaataaaattgtttctcatctgttagtggcagaaccagaaaagatctatgccatgccagacccgacagtgcctgactctgacataaaagcactcactaccctgtgtgatcttgccgatcgtgagctggtagtcatcatcgggtgggcaaagcacatccccggcttttcaaccttgagtctcgccgatcagatgagcctgttgcaatctgcttggatggaaattctaatcctcggcgtggtttatcgctccctcagctttgaggatgagttggtttacgctgatgattatataatggatgaagatcaatcaaagcttgccgggttactagatttaaataacgctattctgcagctggtcaagaaatataaatctatgaagcttgaaaaggaggaatttgtgacactcaaagccatagccctggccaacagtgattcgatgcacatcgaggacgttgaagctgtacagaaactccaggatgtgctccacgaggctttgcaggattacgaagctggccagcacatggaggatcccaggagggcggggaagatgcttatgacccttcctctactgagacagacaagcacgaaagcagtccaacacttctacaacataaagctcgaggggaaagtaccaatgcataagctttttttagagatgctggaagcaaaggtttag

SEQ ID NO: 186903 - DNA, 1308 bp, synthetic construct
  misc_feature 1..1308: note = Description of Artificial Sequence: Synthetic coding sequence
  source 1..1308: mol_type = other DNA
atgagcaacaaggaccggcacatcgacagcagctgcagcagcttcatcaaaaccgaaccttcctcccctgctagtctcacggacagtgtgaatcaccactcaccaggtggctcaagtgatgctagcggctcttactcctcgactatgaatggacaccagaatgggctcgattcccccccactctatccctcagcccctatcctcggagggtcgggcccggttagaaaactctacgacgactgtagttcaaccattgtcgaagaccctcaaacaaaatgcgaatatatgctgaattccatgccaaagagactctgcctcgtctgtggggacatcgctagcgggtaccattacggagtcgcgtcttgcgaagcttgtaaggctttttttaaacggaccatacagggaaacatcgagtactcttgccccgctactaacgagtgtgaaatcaccaagcggagaaggaagagctgccaggcctgtaggtttatgaagtgcctaaaggtgggaatgttgaaggagggggtgcgactggaccgggtgcggggtgggaggcagaagtacaaacggaggattgacgctgagaattcaccttaccttaatccccaattggtacaaccggctaaaaagccatacaacaaaattgtatcccacctcctagtcgcggaacccgaaaaaatctatgccatgcccgatcctaccgtccctgatagcgatattaaagccctcaccaccctgtgcgaccttgctgacagggagctggtcgttattatcggatgggccaagcatatccccggtttctcaactctgagccttgccgaccaaatgagcttactgcagtccgcctggatggaaatactgatcctcggcgtcgtgtataggagtctaagcttcgaagacgaactggtttacgctgacgattacattatggatgaggatcagagcaagctggcaggcctattggaccttaataacgctatcctgcagctggtgaaaaaatacaagtcaatgaagcttgagaaagaggagtttgtgaccctaaaggcaatcgccttggctaactctgattctatgcacatcgaggatgtggaagcagttcaaaagctccaggacgtgctgcatgaagctctccaagactatgaagccggtcaacatatggaggatccccgccgggccggaaagatgttaatgaccctcccacttttaaggcagaccagtaccaaggctgtgcaacacttttataatatcaagctagagggcaaagtccctatgcataagctgttccttgagatgttggaagctaaggtttag

SEQ ID NO: 186904 - DNA, 1308 bp, synthetic construct
  misc_feature 1..1308: note = Description of Artificial Sequence: Synthetic coding sequence
  source 1..1308: mol_type = other DNA
atgagcaacaaggaccggcacatcgacagcagctgcagcagcttcattaaaacagagcccagctctcctgcctccttgactgattctgtcaatcaccactcgccaggaggatcatcagacgcctccggcagttattctagcacaatgaacgggcaccagaatggactggatagtccaccgctgtatccctcagccccgatacttggggggagtggacctgtcaggaaattgtatgatgactgtagttccactatcgtggaagaccctcagaccaagtgcgagtacatgctgaatagcatgcccaagagattatgcctggtatgtggggacatagcgagtgggtatcactacggcgtggccagttgcgaagcctgcaaggcattctttaaacgaacaattcagggcaacatagagtactcctgccctgccacaaacgagtgcgaaattacgaagcggcggaggaagagttgccaggcttgtcgctttatgaagtgcttgaaggttgggatgctgaaagagggcgtacggctggatcgcgtcaggggtgggcgacagaagtacaaaaggaggattgacgcggagaacagcccttatctgaatccgcagctggtgcagcccgcaaagaagccttataataaaatcgtgtcccacttgctggtcgccgaacccgaaaagatctacgccatgcctgatcccactgttcctgatagtgacattaaggccctgacaacattatgtgatctggcagacagagagctcgtggtgatcatcggctgggctaagcacattccaggctttagtacgctgagcctcgcagatcaaatgtctctgctccagtctgcatggatggagatcttgattttgggagtggtgtacagatctttgtcttttgaagatgagctggtgtacgccgacgactacattatggatgaggatcagtccaagttggccgggctgctagacctgaacaacgccattttacagctggtgaagaagtacaagtctatgaagttagaaaaggaggagtttgtgacactcaaagccattgccctcgctaacagcgatagcatgcatatcgaagacgtagaagccgttcagaagctacaggatgtcttacatgaggctctccaggactacgaagccgggcagcacatggaagatccaaggcgcgctggaaaaatgctgatgactctccccctgctccgtcaaactagcaccaaagccgtccagcatttctacaatataaagctggaggggaaagtccccatgcacaagctgtttctggaaatgcttgaagccaaggtatag

SEQ ID NO: 186905 - DNA, 1413 bp, synthetic construct
  misc_feature 1..1413: note = Description of Artificial Sequence: Synthetic coding sequence
  source 1..1413: mol_type = other DNA
atgtggcgggagtgcgactggggcctgggcgccgtgaagagcgaccttgcctgtgtcccctcagctaagcgcctgctgtgcagaatgtcaaacaaggacagacacatcgatagcagttgcagcagcttcataaagaccgagccctccagccccgcaagtctgacagacagtgtcaaccatcatagtcccggagggtcatcagatgccagcgggtcttattctagtactatgaacgggcaccagaatggcctggactcacccccactttatccctcagcacctatcctgggcggctctggtccagtcaggaagctttacgatgactgttcttctactatcgtggaagaccctcagacaaagtgtgagtatatgctcaactccatgcccaagaggctctgcctagtctgtggcgacatcgcttctggttatcactacggtgtggcttcatgcgaagcttgcaaggccttcttcaagaggaccatccagggcaacatcgagtatagctgccctgctaccaacgagtgcgagataaccaaaaggcgtcggaaaagctgtcaggcctgccgctttatgaaatgtctgaaggttgggatgctaaaagagggcgtacggcttgatcgggttcgcggagggcggcagaagtataagaggcggatcgatgcagagaactctccctacctaaatccccaacttgtgcagcctgctaagaaaccattgctctggtctgatccagccgataataaaatcgtgtcccacctgcttgtcgctgaaccagagaagatttatgccatgcctgatcccaccgtgcccgatagcgatattaaggctctgaccaccctctgtgatctggcggacagagagcttgtcgttatcataggttgggcaaagcacatacccggcttttcgactctttcccttgctgatcaaatgtcattgctgcagtctgcctggatggagattttgatcctcggagtcgtttacagatcattgagcttcgaagatgaacttgtctatgcagacgactacattatggacgaagaccaaagcaagctggccgggttgctggacctgaacaatgctatcttacaactcgtgaaaaaatacaagagcatgaaactggagaaagaggaattcgtgactctgaaggcaatagcactcgctaattccgatagcatgcacatagaggatgttgaggccgtccagaaactgcaggatgttctgcacgaagcactgcaggattatgaggccggacaacacatggaagatcccaggcgggccgggaagatgctcatgacactgcctctcttacgccaaacctccacgaaggcggttcagcatttctataacattaagctggaggggaaagttccgatgcacaagctgtttttggaaatgttggaagccaaagtttag

SEQ ID NO: 186906 - DNA, 1359 bp, synthetic construct
  misc_feature 1..1359: note = Description of Artificial Sequence: Synthetic coding sequence
  source 1..1359: mol_type = other DNA
atgctgtgcggccggccccggagcagcagcgacaaccggaacttcctaagagagcgggcaggactatcctccgccgccgtgcagacacgtattgggaatagcgccgcatcccgaagaagccctgcggcacgtccacccgtgccggctcctccagcattgcccaggggcagaccgggcaccgagggaagcacatccctcagcgcgcccgctgtgctggtggtggccgttgcggtggtggttgtcgtcgtcagcgcagtcgcgtgggctatggctaattatatacatgttcctccaggctcccccgaggtgcccaaactgaacgtcacagtccaggatcaggaagagcatcgatgccgggaaggcgccctatccctgctgcagcacttacggccgcactgggacccacaggaagtaaccctccaactctttaccgatggcatcactaacaaattgattggatgctatgtaggcaacaccatggaggacgtggtgcttgtccgtatctacgggaacaagactgaattgctggtggatagggatgaagaagttaagagctttcgcgtcctccaagctcatggctgcgcaccacagctgtattgcacatttaacaatggactgtgctatgaatttatccagggcgaagcgttggatcccaagcacgtgtgcaaccccgctatcttcaggctgatcgcccggcagctggccaagatccatgcgatccacgcgcataacgggtggattcccaagtcaaacctctggctgaaaatgggaaagtacttcagcctgatccctacagggttcgccgacgaggacatcaataagcgattcctgagtgacatcccctcatcccagatcctgcaggaagagatgacttggatgaaagaaatcctgtccaacttgggcagtccagttgtcctctgtcataatgacctcttgtgcaagaatataatctataatgagaagcagggagatgtccagttcatcgattacgagtactctggctacaattacctggcctatgacattggaaaccattttaatgagtttgctggcgtgagcgacgtggactatagcttgtaccccgatcgcgagctgcagtcacagtggctgcgagcctacctggaagcctacaaggagttcaaaggctttggaacagaagtcacagagaaagaagtcgaaatacttttcatccaggttaaccagttcgctctggcgagccacttcttctggggactctgggccttgatccaggcgaagtattcaaccatcgaatttgactttctgggttatgccatagttcgatttaaccagtactttaagatgaagcctgaggtgaccgcactgaaggttcctgagtag

SEQ ID NO: 186907 - DNA, 777 bp, synthetic construct
  misc_feature 1..777: note = Description of Artificial Sequence: Synthetic coding sequence
  source 1..777: mol_type = other DNA
atgctgtgcggccggccccggagcagcagcgacaaccggaacttcttgagggaacgagcaggtctgtcatccgccgccgtgcagacacgaatcggtaactcagccgcctcccggcgtagccctgcggcccgccccccagtgccggccccccccgcgctgccgagaggccggcctggaacagaaggatccaccagtctttcggcgccagccgttttggtcgtggctgtggccgtcgtcgtggtagttgtgtcagccgtcgcctgggctatggccaactatatccatgtgccccccgggtcgcctgaagttccgaagctcaatgtcaccgtccaggaccaggaggagcaccggtgccgcgagggagctttgtcactattgcagcacctgaggccgcactgggatccacaggaggtcaccctccagctgttcaccgacggaattaccaataaactgataggttgttatgtggggaacactatggaggatgtggtgctggtccgtatctacggaaataaaacagaattgctggtcgacagggacgaggaggtcaaatcgttccgagtgcttcaagcacatggctgtgcacctcagctctattgcacatttaacaatggattatgctatgagtttatacagggggaggcattggaccctaaacacgtgtgcaaccctgcaatattctcactgagttccctgacactgtgtaagggcaagactaccaggtgctttggcctcacagggtgcagaggtagtcgtctgcttttgagcttcttctag

SEQ ID NO: 186908 - DNA, 1305 bp, synthetic construct
  misc_feature 1..1305: note = Description of Artificial Sequence: Synthetic coding sequence
  source 1..1305: mol_type = other DNA
atgctgtgcggccggccccggagcagcagcgacaaccggaacttcctgcgggagagggccggtctctccagcgctgctgttcaaactagaataggtaacagcgccgcatcacgccggagtccagccgctcgcccaccggttcccgcccctccagccttgccgagggggagaccgggaaccgaagggtccaccagtttgtccgcacctgcagtgctggtcgtagctgtcgctgtggtcgttgtggttgttagtgccgtggcctgggccatggcgaattatattcacgtgccccctggaagcccggaggtgccaaagttgaacgttaccgtgcaagaccaagaggaacataggtgtcgtgagggggccctgtcactcctgcagcacctgcggccacattgggacccccaggaggtcaccctccaactgttcacagatggaataacaaataagctgatcggctgttacgtcgggaataccatggaagacgtcgtcctagtgagaatctatggaaataagaccgagctgttagttgatcgggatgaagaagtcaagtcatttcgagtgctgcaggcccacggctgcgctcctcaactttattgcacctttaataacgggctgtgttatgagttcatccaaggtgaggccttggatcctaaacacgtgtgtaaccccgctatcttcaggctcatcgctaggcagctggcgaagatccatgccatacatgcccataatggctggatccctaaatctaacttgtggctcaagatgggcaaatactttagcctgatccctaccgggtttgcagatgaggacataaataagagattcttaagcgacattcctagttcccagatcctgcaagaagagatgacctggatgaaagagattctcagcaacttagggagtccggtggtgctgtgccataacgacttattgtgcaagaatattatctataacgaaaagcagggcgatgtgcagtttattgattacgaatactctggctataattacctggcctacgatatcggaaaccactttaacgagttcgcgggcgtgagcgatgtcgactattcgctgtatcccgaccgcgagctccagagccagtggctcagagcctacctcgaagcttacaaggagttcaaaggctttggaactgaggttactgagaaagaggtggagatcctattcatccaggttaaccagttcgcgctcggagagaatctgaattttatcatcggtaataagtactgtcagctgttcagcttaaaatggctcctgatctcatttggggactgcggcctctag

SEQ ID NO: 186909 - DNA, 627 bp, synthetic construct
  misc_feature 1..627: note = Description of Artificial Sequence: Synthetic coding sequence
  source 1..627: mol_type = other DNA
atggccaagatccacaccatccacgccaacggcagcctgcccaagcctatcctgtggcataaaatgcataactattttactctggtgaaaaatgaaataaatccctcactgagtgcagacgttccgaaggtggaggtccttgaacgcgagctggcctggctaaaggagcacttaagccagttggagtcacctgtcgtcttttgccataatgacctcctgtgtaaaaacatcatatatgactcaatcaagggtcatgttcgtttcatagattatgaatacgccgggtacaattatcaggccttcgacattggaaatcacttcaacgaatttgccggcgttaatgaagtggattattgtctatacccagcacgggagactcagcttcaatggctccattactacttgcaggcccagaaagggatggccgttacgccgcgcgaagtgcaacgtctgtacgtgcaggtgaataagtttgccctggcatcccacttcttttgggctttgtgggccctgattcaaaaccagtattctaccatagacttcgattttctgagatacgcggtgatccgcttcaaccagtatttcaaagttaagcctcaggccagcgcattagagatgccaaaatag

SEQ ID NO: 186910 - DNA, 954 bp, synthetic construct
  misc_feature 1..954: note = Description of Artificial Sequence: Synthetic coding sequence
  source 1..954: mol_type = other DNA
atggaggagaaggccgccgccagcgccagctgccgggagccccccgggcctccccgggctgctgccgttgcgtactttggcatctcagtggacccagatgatatattgcctggagcactgcgactgatccaggaattgcgacctcactggaaaccagagcaggtgagaactaagcgcttcactgatggaattaccaataagcttgtggcctgctacgtcgaagaagacatgcaggattgtgttttggtgagggtgtacggtgaacggaccgagctactagtagatcgcgagaatgaggtcaggaacttccagctgctaagggctcattcatgcgctcccaaactgtactgtaccttccagaatgggctgtgttatgaatacatgcagggagtggcactggaacctgagcacattcgcgaaccgagactgttctcacttagtgctgatgtccccaaggttgaagtgctggagcgggagctggcatggctgaaggaacatttatcccaactggagagcccagtggtcttctgtcacaatgatctgctctgcaagaacataatctatgacagtattaagggccatgttagattcatagattacgaatacgccggctacaattaccaggcatttgatatcggtaatcactttaacgagttcgcaggtgtcaatgaggttgactattgtctgtacccagctcgcgagacacagttacagtggcttcattactacctccaggctcagaagggcatggccgttactccacgtgaagtccagcggctctacgttcaggtgaacaagttcgccctggcaagtcacttcttctgggctctgtgggctctcatccagaatcagtactccaccatcgatttcgattttctgcgctacgcagtgatccgctttaaccagtactttaaggtgaaacctcaggcctcagcactcgagatgcccaaatag

SEQ ID NO: 186911 - DNA, 1185 bp, synthetic construct
  misc_feature 1..1185: note = Description of Artificial Sequence: Synthetic coding sequence
  source 1..1185: mol_type = other DNA
atggccgtgccccccagcgccccccagccccgggccagcttccacctcagacgccacactccttgccctcaatgttcttggggaatggaagaaaaagctgccgctagtgccagctgcagggaacctcctggtcctcccagggcagctgcggttgcatatttcggtatttccgttgatcccgacgacattctgccaggcgccttacgtctaatccaagagttacgcccccattggaaacctgagcaggtccgtaccaaaagatttaccgatggcatcacaaacaaactggtggcctgctacgttgaagaggatatgcaagactgtgtgttagtcagggtttatggtgagagaaccgagctgttggtagaccgagaaaacgaggtgcgtaattttcagctcctgagggcccatagttgtgctcccaaattatactgtacatttcagaatggcctctgctacgaatatatgcagggcgttgcactggaacccgaacatattcgggagcccagactgtttcggctgatagctctggagatggctaaaatccacacaatacacgccaatggcagtcttcctaaaccaatactatggcacaaaatgcataattacttcactctagtgaagaacgagattaacccttccctgtctgcggacgttccgaaagtcgaagtgctcgagcgagaactggcctggctcaaggagcacctgtcacagctggaaagtcctgtcgtgttttgccataacgatctgttgtgcaagaatatcatctatgacagcataaagggccacgtgcggttcatcgattacgaatatgccggatacaactatcaggcattcgacattggtaaccattttaacgaatttgcaggagttaacgaggtagattactgcctgtacccggcacgtgaaacacagctgcagtggctccactactatttacaggcccagaaggggatggcagtcaccccaagggaagtgcaacgactgtatgtgcaggtcaataagtttgcattggggccgtcctgcgtttcttcgaccatgaccgcttccttacagtgttgtcgggtggggaacagacacggggagattgccaggctcaccttgtcagggttgttcccaggggtgtccttactgctgggaagcctcggcccgcaccccgagccagttctgcaccataggctgtag

SEQ ID NO: 186912 - DNA, 1161 bp, synthetic construct
  misc_feature 1..1161: note = Description of Artificial Sequence: Synthetic coding sequence
  source 1..1161: mol_type = other DNA
atggccgtgccccccagcgccccccagccccgggccagcttccacttgcgccgacacacaccctgtccgcagtgtagttggggtatggaggaaaaggctgcagctagcgcctcctgtcgcgagccgccgggaccccccagggcagcggccgtcgcttattttggtatctctgtggacccagacgatattttgcccggtgctttacggctcatccaggaattaagaccccattggaaaccagagcaagttaggaccaagcgtttcacagatgggatcactaataaactggttgcctgctacgttgaggaagacatgcaggattgcgtgctagtgagggtttatggagaaaggactgaactgcttgtcgacagggagaatgaagtccgcaatttccaattgctgagggcgcattcctgcgcacccaaactttactgcacattccagaacgggttatgttacgaatacatgcagggtgtggctctggaacctgaacatatcagggagccaagactgttcaggctaattgcactcgagatggcgaaaatccatactatacacgctaatggcagtctgcctaagccgatcctctggcacaaaatgcacaactactttacactcgttaagaacgagataaatcctagcctatccgcagatgtcccgaaggtggaagttctcgagagagagttagcatggttgaaggagcacctgagtcagctcgaatcccccgttgtcttctgccataatgacctgttgtgcaaaaacatcatatatgactctattaagggccatgtacgatttatcgattacgaatacgctggatataactatcaggcttttgatattggaaatcattttaacgaattcgccggagtaaacgaagtagactactgtctgtaccccgcaagggaaactcagttacagtggctgcactactatctgcaggcccagaagggtatggccgtgacccctcgtgaggtacagagactctatgtacaggttaacaagtttgcactcgctagccactttttctgggcgctgtgggccctaatccaaaaccaatattctactatcgactttgattttttgagatacgcagtgattaggtttaaccagtactttaaggtgaagccccaggccagtgcacttgaaatgcctaaatag

SEQ ID NO: 186913 - DNA, 759 bp, synthetic construct
  misc_feature 1..759: note = Description of Artificial Sequence: Synthetic coding sequence
  source 1..759: mol_type = other DNA
cggcggctgggcggcggcaccgccgagggcaagaccggccggggcctcggcggtccgagctgggataccggacctagggctatgggctctctgagccggccatcgttcagcgaccggctcatcgcgctggaaatggctaagattcatacaattcacgcgaatggtagcctgcctaagcctatcttatggcataaaatgcacaactatttcacgctcgtgaagaacgagattaatccatctctatcagctgatgttccgaaggtggaggtgttagaaagagaactggcttggctgaaggagcatttaagccaactcgagagccccgtcgtcttctgccacaatgacctcctctgtaagaacatcatatacgacagcattaaaggacatgtgaggtttattgactacgaatatgcgggatataactaccaagccttcgacattggaaaccacttcaacgagttcgctggagtgaatgaagtggactactgcctgtaccctgcaagggaaactcagctgcaatggctgcattattatctgcaagcacagaaaggtatggccgtgacaccccgtgaggtacagaggctttatgtccaggtgaataaatttgccctcgccagtcacttcttttgggctctgtgggccctcatacagaatcagtactctactatagattttgatttcttacgctatgcagtgatccgattcaatcagtatttcaaggtaaagcctcaggcctctgctttagagatgcccaaatag

SEQ ID NO: 186914 - DNA, 765 bp, synthetic construct
  misc_feature 1..765: note = Description of Artificial Sequence: Synthetic coding sequence
  source 1..765: mol_type = other DNA
atggccgaggccgtgctgcgggtggcccggcggcagctgagccagcggggtggatcgggggcgcccatcttgctgcgccagatgtttgaaccggtcagctgtacctttacatatttgctgggggatagggaatcaagagaggctgtgctgattgaccccgtcctggagactgccccccgagatgcacagctgattaaggagctggggctcaggctgctgtatgccgtgaatactcattgccatgctgatcacattactggctctggtttgctgcgtagtttgctcccaggctgtcaaagcgttatctcacgcctctctggcgcccaggctgatctgcacattgaagacggtgactcaataagatttgggaggttcgctctcgaaactcgtgcatctcccgggcacactccaggctgcgtaaccttcgtgctgaatgatcatagtatggcttttacaggagatgccctgcttatccggggctgcggacgcacagatttccaacagggctgcgccaagactctgtaccacagtgtacacgagaaaatcttcactctgcctggtgattgcctgatttatcccgcccatgattaccatggctttaccgtgtccacagtggaggaggagcgcaccttaaacccgcggctgacgctttcctgtgaagagttcgttaagataatgggcaatctgaatctccctaagcctcaacagatcgattttgccgttccagcaaacatgaggtgtggagtgcagaccccaacggcttag

SEQ ID NO: 186915 - DNA, 1020 bp, synthetic construct
  misc_feature 1..1020: note = Description of Artificial Sequence: Synthetic coding sequence
  source 1..1020: mol_type = other DNA
atggccgacagcgtgaagaccttcctgcaggacctggcccggggcataaaggatagtatatgggggatttgcaccatatcaaagctggacgcaagaatccagcagaaacgcgaggaacaacggagaagacgcgcctcttcagtcctggcacagcggcgggcccaatcaatcgaacggaaacaggaatccgaaccacggatcgtttctcggattttccaatgctgtgcctggaatggtggcgtcttttggttttcacttctcctgttctatcgcgtgtttattccagtgttgcaaagtgtcactgcccgaatcatcggcgatccgtcgctccacggggacgtgtggagttggctggagtttttcctgactagcattttctccgccctatgggtgttacctctgttcgtgttatcaaaggtggtgaacgccatctggtttcaggacattgctgaccttgccttcgaagtcagcggcaggaagccgcacccctttccgagcgtgtccaaaatcatcgctgatatgctgttcaatctgctgctgcaggccttgttcctgatccagggaatgttcgtgtccctgttccctatccatctggtcggccagttggtctccctgctccacatgtcgctgctttactccttgtattgcttcgaataccgctggttcaacaagggtatcgagatgcaccagcggctgagtaatattgagaggaattggccttattactttggctttgggttgccactggcttttctcaccgccatgcagtcttcatatattattagcggctgtctgttttccattctgttccctctgttcataatttctgccaatgaggcaaagccgggcaaggcttacctgttccaactccgcctattttcattagttgtgttcctgtctaaccggctgtttcacaagacagtttacctccagagtgcactatcaagctccacctcagcagagaaattccccagcccgcatccctccccggcaaaactgaaagctaccgctgggcactag

SEQ ID NO: 186916 - DNA, 786 bp, synthetic construct
  misc_feature 1..786: note = Description of Artificial Sequence: Synthetic coding sequence
  source 1..786: mol_type = other DNA
atggccgacagcgtgaagaccttcctgcaggacctggcccggggcatcaaagattctatctgggggatctgtaccatttcaaaacttgatgcacgcattcagcaaaaaagagaggaacagcggcggagaagggcatcatctgttctggctcagcgcagagcccagagtatagaaaggaaacaggaaagcgagcctagaattgtgtcacggattttccagtgctgcgcttggaatggcggagtcttttggtttagcctattgcttttctacagagtgtttatacctgtgttacagtcagtgacggcccgaataatcggtgacccttctcttcatggggacgtgtggagctggctagagttttttttaacatcaattttcagcgccctctgggtgctccctctcttcgttctgtcaaaagtagtgaatgccatttggtttcaggacatagctgacctggcgttcgaggtgagcggacgaaagccacatccattcccatccgtgtccaagatcatcgccgatatgctgtttaacttactgctacaggccctatttctgatccaggggatgtttgtgagcctgtttcccattcatttagtgggccaactcgtgagcctcctccacatgtcactcctctacagcctgtactgtttcgagtatagatggttcaacaaggtggcggcattctcattgtctagctttctgtattcactcagcgcgccgatgaaacagaggcccgccaagcatatcagttcaagttgcgccagctcaccttggtggagttcttag

SEQ ID NO: 186917 - DNA, 903 bp, synthetic construct
  misc_feature 1..903: note = Description of Artificial Sequence: Synthetic coding sequence
  source 1..903: mol_type = other DNA
atgatcctggagggcggcggcgtgatgaacctgaaccccggcaacaacttgctgcaccagccgcccgcctggactgacagttatagcacctgcaatgtgtcatccggcttcttcggaggacagtggcacgagatccatccccagtactggactaaataccaggtgtgggaatggctgcagcacctgctcgataccaaccagctggacgcaaactgtattccgttccaggagtttgacatcaacggcgaacatctttgttcaatgtcactgcaggaattcaccagagcagccgggactgcaggacagctgctgtacagcaatctgcaacacttgaagtggaatggacaatgttcttctgacctattccagtctacccacaatgtgattgtaaagactgagcaaactgagccatccataatgaatacttggaaggacgagaactacctgtacgacactaactatggcagcactgtcgatttactcgatagcaagaccttttgccgggcgcagatcagcatgacaaccacatcccatcttccagtcgctgagagccctgatatgaaaaaagagcaagatccaccagccaagtgtcatacgaagaagcacaaccctcgagggacccacctgtgggaatttatccgagacatcctgctaaaccccgacaaaaaccctgggcttatcaagtgggaggaccggtctgagggtgtgtttcgcttcctgaaatctgaggcagtggcacagctttggggaaagaaaaagaacaactcctcgatgacgtacgagaaactctcaagggccatgcggtactattataagcgagaaatcctcgagagggtggacggaaggaggctggtctacaaatttgggaagaacgccagagggtggagagaaaatgaaaactag

SEQ ID NO: 186918 - DNA, 903 bp, synthetic construct
  misc_feature 1..903: note = Description of Artificial Sequence: Synthetic coding sequence
  source 1..903: mol_type = other DNA
atgatcctggagggcggcggcgtgatgaacctgaaccccggcaacaatctcctgcaccagcccccggcatggacagactcttactctacttgtaatgtttcatctgggttcttcggtggccaatggcatgaaatccacccacagtattggacaaaataccaggtatgggagtggctccagcatctcttggacactaatcagctggacgccaattgcattcccttccaggagttcgacatcaacggtgagcacctgtgctcaatgtctctgcaagaatttacacgcgcagcaggtacagctgggcagctcttgtattcgaacctgcaacacctaaagtggaatggccagtgcagctcagatttattccagtccacacacaatgtgatcgttaagacggaacagacagagccctcaattatgaacacatggaaggacgaaaactatctttacgatacaaactacggctccaccgtggatctcttagattccaaaacgttctgccgcgcccaaatatcaatgactacaacatctcacctgccagttgccgaaagtccagatatgaaaaaggagcaggacccaccagctaaatgccacaccaaaaagcacaaccctcgcggtacacacctctgggagtttataagagatatcctactaaacccagacaaaaatcccgggctgatcaaatgggaagatcgttcagagggcgtcttcagattccttaaatccgaggctgttgcccagctgtggggcaaaaagaaaaacaacagctccatgacatacgaaaagctgtctagagccatgcggtattattacaaacgggagattttggagcgcgtggacggtcgtagattagtgtataagttcggcaagaatgcaagagggtggcgggagaacgaaaactag

SEQ ID NO: 186919 - DNA, 969 bp, synthetic construct
  misc_feature 1..969: note = Description of Artificial Sequence: Synthetic coding sequence
  source 1..969: mol_type = other DNA
atgggcctgcccgagcggcggggcctggtgctgctgctgagcctggctgaaattttgttcaaaataatgatattagaagggggaggggtgatgaatctcaatcccggtaacaatctgttgcatcaaccgcccgcttggaccgactcttacagcacttgtaatgtgtcttccggattctttggggggcagtggcacgagatccaccctcagtattggaccaagtaccaggtgtgggagtggctgcagcatctgctggacacaaatcagctcgatgcaaactgcatcccatttcaagagttcgacattaacggtgagcacctttgctcgatgagcctccaagaattcactagagctgcagggactgctggccagctgctgtacagcaatctccagcacttgaagtggaacggccagtgttcatccgacctttttcagtccacccataacgttattgtaaagaccgaacagactgagcctagtatcatgaacacctggaaagatgagaattatctttatgacacgaattatggcagtactgtggacctacttgattctaaaaccttctgcagagcacaaatttccatgacaactacctcccacttacccgtcgccgaatctccagacatgaagaaagaacaagatccacctgctaagtgtcacacgaaaaagcataaccctcggggtacccacttgtgggagttcatcagggacattcttcttaaccccgacaagaatcctggcctgatcaaatgggaagatagatctgagggcgtgttccggttcctgaaaagtgaggctgtggcacagttatggggaaagaagaagaacaactcatcgatgacctacgagaaattgagccgggcaatgaggtactattataagagagagatcttagagcgcgtggacggcaggcgtctggtgtacaaatttggcaagaatgcgcgcggctggagagagaatgaaaattag

SEQ ID NO: 186920 - DNA, 903 bp, synthetic construct
  misc_feature 1..903: note = Description of Artificial Sequence: Synthetic coding sequence
  source 1..903: mol_type = other DNA
atgatcctggagggcggcggcgtgatgaacctgaaccccggcaacaacctcctccatcagccccccgcctggactgactcctactcaacgtgcaacgttagtagtggattctttggcggccaatggcacgaaatccacccgcagtactggaccaagtaccaagtgtgggaatggcttcagcacctgttagacacgaatcagctggatgcaaactgcatcccttttcaggaattcgacataaatggcgagcatctgtgtagcatgagcttacaggagttcacccgcgcggcaggcaccgccggccagttgctgtatagcaatcttcagcacctcaaatggaatgggcaatgtagcagtgatctgttccaatctacgcataacgtgattgtcaagaccgagcagactgaacccagcattatgaacacatggaaggacgaaaactatttgtacgacactaattatggtagcacagtggatctgctcgactccaaaactttttgccgggctcagatttcaatgaccacgaccagccatctgccggttgctgagagtcccgatatgaaaaaggaacaggatcctcctgccaagtgtcacacgaaaaagcacaatcctagagggactcacctgtgggaattcattcgcgacatcttgttgaaccccgacaaaaaccctggcctaataaaatgggaagatcggagcgaaggcgtatttaggtttctgaaatcagaagccgtggcccaattgtggggaaaaaagaagaacaattcctccatgacttacgaaaaactttctcgcgctatgcggtactactataagcgcgaaattcttgaacgagtggatggccgccggcttgtatataagttcgggaaaaatgcaagaggatggagagagaacgaaaactag

SEQ ID NO: 186921 - DNA, 834 bp, synthetic construct
  misc_feature 1..834: note = Description of Artificial Sequence: Synthetic coding sequence
  source 1..834: mol_type = other DNA
atgatcctggagggcggcggcgtgatgaacctgaaccccggcaacaatttgttacaccagccacctgcctggactgatagctacagcacctgcaatgttagctccggctttttcggaggacagtggcatgaaattcacccgcagtactggacgaagtaccaggtgtgggagtggctgcagcatctcctagataccaaccagctagatgctaattgtattcccttccaggagttcgacataaatggggaacacttgtgctccatgagtctgcaggagttcaccagagctgcgggtacagccggccagctgttgtattctaatctgcagcaccttaaatggaacggacagtgtagctcagatctgtttcagagcacgcataatgtgatagtgaagaccgagcagaccgagccttctataatgaatacatggaaagatgaaaactacctgtatgataccaactacggtagcaccgtggccgagtctccagacatgaaaaaggaacaggaccccccggcaaaatgtcataccaaaaagcacaaccctcgcgggacccacctgtgggaatttataagggacattctattgaatccggataagaatcctggactgattaagtgggaagaccggtcggagggcgtgtttaggttcctgaagtcagaggctgtggctcagctttgggggaagaaaaagaacaattcaagcatgacgtacgaaaagctctctcgcgcaatgagatactactataaaagagagatactagagcgggtggatgggcggcgcctggtatacaaattcggcaaaaacgccaggggctggcgcgagaacgagaactag

SEQ ID NO: 186922 - DNA, 555 bp, synthetic construct
  misc_feature 1..555: note = Description of Artificial Sequence: Synthetic coding sequence
  source 1..555: mol_type = other DNA
atggacctgtggaactgggacgaggccagcccccaggaggtgccccctggtaataagctcgccggccttgagggagcgaaattagggttttgctttcccgacttagctctccagggcgacactccgacagccacggccgaaacctgctggaaaggcaccagtagtagcctggcatctttcccccagctcgactggggatccgcacttcttcacccggaagtgccatggggtgccgaaccagacagtcaggctctgccatggtccggagactggaccgatatggcatgcacagcgtgggacagctggtctggcgcatcccaaacacttgggccagccccactgggacccgggccaatcccggccgctggctcagaaggcgcggccgggcaaaattgctcccctcccgccccaggcctgtaccatctcctcgaaccaggggcggcctgcggctggcatcacctattcgaggccgtcccagagctttcctctcaccgcttgctgaggacagagccagcggtcggtccgtgccagttcgggagtatgcctcagaactag

SEQ ID NO: 186923 - DNA, 468 bp, synthetic construct
  misc_feature 1..468: note = Description of Artificial Sequence: Synthetic coding sequence
  source 1..468: mol_type = other DNA
atggacctgtggaactgggacgaggccagcccccaggaggtgcccccaggaaataaactggctggactggagggagcgaagttggggttttgtttccctgatctagctctgcagggagatacaccgactgccactgcagagacatgttggaagggcccgattcaactgtggcagtttttgttggagctgcttcacgatggggcaaggtccagctgcatcagatggaccggcaattcgagagagttccagttgtgcgatcccaaagaggtcgctcgcctgtggggcgagaggaagcggaaacctggcatgaactacgaaaagctgagtagagggctcagatactactaccggcgcgatattgtccggaaaagtggggggagaaagtacacttacagatttggcggaagagtgccatctctggcctaccctgactgtgcaggcgggggccgcggggcagaaacgcaatag

SEQ ID NO: 186924 - DNA, 1029 bp, synthetic construct
  misc_feature 1..1029: note = Description of Artificial Sequence: Synthetic coding sequence
  source 1..1029: mol_type = other DNA
atggacctgtggaactgggacgaggccagcccccaggaggtgcccccagggaacaagctcgcaggattagaaggggctaaacttgggttctgctttcccgatctggcattgcaaggtgacacaccaaccgccaccgccgagacatgttggaagggtacttcaagcagccttgctagcttcccacaacttgactggggaagtgccttgttacaccctgaggtcccctggggtgcggagcctgattcccaagctctgccgtggagtggtgattggactgacatggcttgcacagcgtgggatagctggagtggtgcctcccagaccctcgggcccgcacctctgggccccggacccatccccgctgcgggctcggagggtgctgcaggccaaaattgcgttcccgtggccggtgaagccacatcctggtcgagagcacaagcagccggaagcaacaccagctgggactgctctgttggccctgacggtgacacttattggggttctggcctcggcggcgagcctcggaccgattgtacaatctcttggggcgggcccgccggccccgattgcacaactagttggaacccaggactgcacgcaggtggcaccacaagcctgaagaggtaccaaagcagcgctcttacagtgtgttctgagccctcccctcagtcagatcgagccagtttggcccgctgtccgaagacaaaccaccgtggccctatacagctgtggcagtttctcttggagttactgcatgacggagctcgttccagctgtataaggtggaccgggaattcccgcgaattccagctatgcgacccaaaggaagtggcaaggctgtggggggagaggaagcggaaacccggcatgaattacgagaagttgagcaggggtctccggtattactaccgcagggacatcgtcagaaaatcgggggggagaaagtatacatatcgctttggcggccgagtcccttctttggcatatcccgactgcgccggcggcggacgtggcgcagagacccaatag

SEQ ID NO: 186925 - DNA, 1029 bp, synthetic construct
  misc_feature 1..1029: note = Description of Artificial Sequence: Synthetic coding sequence
  source 1..1029: mol_type = other DNA
atggacctgtggaactgggacgaggccagcccccaggaggtgcccccaggtaataagttagcagggctcgagggagcgaaacttgggttttgcttcccggacctagcactgcaaggggatacgccaacagcaactgcagaaacctgctggaagggcacctcatcctctctcgctagtttcccccaactagattgggggtccgccctcttacatcccgaggtcccatggggggcagaacctgactctcaggccctgccctggtcaggagattggacagatatggcatgcacagcttgggacagttggtctggggccagtcagacactcggtcccgccccgctcggccccgggcccatccccgccgcgggaagcgagggggcagctggtcagaactgtgtgcccgtcgccggcgaagctaccagctggtccagagcccaggctgcaggcagcaacaccagttgggattgtagcgttggcccagacggcgacacctactggggctctgggttgggtggcgagcctagaaccgactgtactattagttggggcgggcctgcgggccccgactgtacgacctcctggaaccctggccttcacgccggtggaacaaccagtcttaaaaggtaccaaagcagtgctctgacggtctgcagcgagccctctcctcagtccgaccgggccagccttgctcggtgcccaaaaacaaaccaccggggcccaattcagctgtggcaattcttactagaacttcttcacgatggagctaggtcctcatgcatccggtggactggaaacagccgcgagttccagctctgcgatcccaaggaagtcgcaaggctgtggggggagagaaaacggaagcccggaatgaactacgagaaactatcgcgcgggcttcgctattactaccgacgggacatagttaggaagtccggggggcgaaaatacacgtatcgtttcggaggacgggtgccttccctcgcatatcctgactgtgcgggcggaggtcggggcgcggagactcaatag

SEQ ID NO: 186926 - DNA, 432 bp, synthetic construct
  misc_feature 1..432: note = Description of Artificial Sequence: Synthetic coding sequence
  source 1..432: mol_type = other DNA
atgaaggccggctgcagcatcgtggagaagcccgagggcggcggcggctaccagttcccagactgggcttacaaaactgaaagtagccccgggagtcggcagatacagctctggcatttcattctggagctgctgcaaaaggaggagttcagacatgtgattgcgtggcagcagggcgaatacggcgaatttgtaataaaggaccccgacgaagtggcccggctgtggggccggcgaaagtgcaagccacagatgaattacgacaaactgtctcgggccctgcgatattattacaacaaaaggatccttcacaaaactaagggaaagcgcttcacatacaagtttaattttaataagctggtgatgcccaattacccctttataaacataagatcatcaggaaagatccagaccctgctagtggggaattag

SEQ ID NO: 186927 - DNA, 1539 bp, synthetic construct
  misc_feature 1..1539: note = Description of Artificial Sequence: Synthetic coding sequence
  source 1..1539: mol_type = other DNA
atgaaggccggctgcagcatcgtggagaagcccgagggcggcggcggataccagtttccagattgggcctacaagacagagagtagccccggttctaggcagattcaactatggcattttatcttagaattgttgcagaaggaggagttcagacacgtgatcgcatggcagcaaggagagtacggggagtttgtgattaaggacccagatgaggtagcccgtctgtgggggcgccggaagtgtaagcctcagatgaattacgataagctcagtagggccctgagatattattacaataagcggattctgcacaagaccaagggcaaaagatttacctataagtttaactttaataagctggtaatgcctaattatcccttcatcaatatcaggtcctccggcgtagtgccccagagcgcgccacccgtgccgactgccagctcccgctttcattttcccccccttgatacacactcgcccacaaacgatgtgcagcctggcaggttctccgcatcaagtcttactgcaagcggccaagagagctcgaacggcacagacaggaaaacagaattgagtgagcttgaggacggaagtgctgcagattggcgcagaggagtggacccggtgtcctcccggaacgccatcggaggagggggcattggacaccaaaagaggaaaccggatattatgctccccctcttcgccagacccgggatgtaccccgatccacacagcccttttgccgtgtcccccataccagggaggggaggcgtgttaaatgtccccatctctcccgccctcagcttgacacctacaatcttttcctactctccctcccctggactgtcaccgttcacgtctagcagctgctttagcttcaatccggaggagatgaaacactacttgcattcccaggcatgttcggtttttaattaccacctatcaccaaggaccttccccagatatccaggcttgatggtgccacccttacagtgccagatgcatcccgaggagtccacacagttttcgattaaattacagccgccacctgtcgggaggaaaaatagggagagagtcgaatcttcagaggaaagtgcgccagtgacaacccccacaatggcctcgatccctcccaggatcaaagtggaaccggcctcagaaaaagacccggaaagtctcagacagtccgccagggagaaggaagagcatacacaagaagaaggcaccgtgccaagtcgaaccatagaggaggagaagggaaccatattcgcccgccctgctgcccccccaatctggccatccgtccctatttccaccccaagcggcgagcctcttgaggtcaccgaggatagtgaagacagacccggcaaagaaccttccgcccccgagaagaaagaggatgctctgatgcctcctaaactgcgcctgaagaggcggtggaatgatgaccctgaagccagggaactatctaagtcggggaaattcttatggaacgggtctggccctcaaggtctggccaccgcagctgctgacgcctag

SEQ ID NO: 186928 - DNA, 1533 bp, synthetic construct
  misc_feature 1..1533: note = Description of Artificial Sequence: Synthetic coding sequence
  source 1..1533: mol_type = other DNA
atggacggcttctacgaccagcaggtgcccttcatggtgcccggcaagagcagaagcgaagaatgtagaggacggcctgtcatcgatagaaagcggaaattccttgacacagacctcgctcatgatagcgaggaactgttccaggacctctctcagctgcaggaggcatggcttgctgaagcacaggtgcctgatgatgaacaatttgtgcccgatttccagtcagataacctggtccttcacgctcctccacctactaagattaaacgggaacttcacagtccgagctccgagctgagctcgtgtagccacgagcaggcacttggcgcaaactacggtgaaaaatgtctgtataactactgcgcctatgatcgcaaacctccttctgggttcaagcccttgactccccctacaacaccactctctccgacccaccagaatccactgtttcctcctccccaggctaccctccctacttccgggcatgcccctgccgccgggccagtgcaaggcgttggccctgctccggctccacactctcttcccgagccagggcctcaacaacagacgttcgccgtccctcgccctccgcaccaacctttacagatgcctaaaatgatgccagaaaaccaatacccctccgagcagagattccaaaggcagctgtcagagccatgtcaccccttccccccgcagccaggagtcccaggggataataggccaagttaccaccgccaaatgagcgagcctatcgtcccggccgccccccccccaccccaggggttcaaacaggaataccatgaccccctgtatgagcatggtgtgccaggaatgcctggcccacctgcccacgggttccagtctccaatgggtattaagcaggagccaagagactactgcgtggacagcgaggtccctaactgccagtcctcatatatgagaggaggttacttctcatccagtcacgaagggttctcctatgaaaaagatcccaggttatacttcgacgacacgtgtgtggtgcctgagagactagagggaaaagtgaaacaggaaccgaccatgtacagggaggggcctccttatcagcgacgtggatctctgcaactgtggcagtttctagtcacgctactcgacgaccctgccaacgcacactttattgcctggactggcagaggcatggaatttaagttgattgaacccgaggaagttgcccgccggtggggaattcagaagaaccggccggcaatgaactacgacaaactgtctcgctccctgaggtactactacgagaaaggcataatgcagaaggtcgccggtgagcggtacgtgtacaaatttgtgtgcgacccagatgccctgttctctatggcttttcctgacaaccaaagaccttttctaaaggccgaaagcgagtgtcatctgagtgaagaggacacgctgcccctcactcatttcgaggatagccccgcttatctcctggacatggacagatgttcttccctcccctatgctgagggcttcgcctactag

SEQ ID NO: 186929 - DNA, 399 bp, synthetic construct
  misc_feature 1..399: note = Description of Artificial Sequence: Synthetic coding sequence
  source 1..399: mol_type = other DNA
atggacggcttctacgaccagcaggtgcccttcatggtgcccggcaaatcccgaagcgaggagtgccggggacggcctgtgattgaccgcaaacgtaagtttttggatactgacctggctcacgactctgaagaacttttccaggatctctctcagcttcaggaagcgtggttggccgaggcccaggtaccggacgatgagcagttcgtgcctgatttccagtccgataacttggtgttgcacgcacccccaccaacaaaaatcaagagggagctgcactcgccttcttctgagttgagcagttgttcgcatgaacaggcattgggcgccaactatggtgagaaatgcctttataattactgcgcttacgataggaagcccccgtccgggtttaagtag

SEQ ID NO: 186930 - DNA, 423 bp, synthetic construct
  misc_feature 1..423: note = Description of Artificial Sequence: Synthetic coding sequence
  source 1..423: mol_type = other DNA
atggacggcttctacgaccagcaggtgcccttcatggtgcccggcaaatcccggtccgaggaatgcaggggacggcctgttatagacagaaaacgcaagttccttgatacagaccttgcacacgactctgaggaactgtttcaggatctgtctcaactgcaagaagcatggctggccgaagctcaagtccccgatgatgagcaatttgtccctgactttcagtccgacaatctggttctgcatgcacccccccccacaaaaattaagagagagcttcactcacctagctccgagctttctagctgctcccacgaacaggccctcggagccaattacggcgagaagtgcctgtacaactattgtgcttacgacaggaaaccaccaagcggattcaaacccctcactccaccgaccaccccatag

SEQ ID NO: 186931 - DNA, 1533 bp, synthetic construct
  misc_feature 1..1533: note = Description of Artificial Sequence: Synthetic coding sequence
  source 1..1533: mol_type = other DNA
atggacggcttctacgaccagcaggtgcccttcatggtgcccggcaaatcccggtccgaagagtgtcgtggtagacccgtgatagataggaagagaaaattcctggataccgatctcgcccacgattctgaggagctgtttcaagatttgtcccagctgcaagaggcctggctggctgaggcacaagtgcccgacgacgagcagtttgtgccagacttccagtccgacaatctagtgctgcacgcccccccacctaccaagattaaacgcgaactgcattcaccaagcagcgagctgtccagctgtagccacgaacaggccctgggagctaattatggcgaaaagtgcttatataattattgcgcatatgaccggaagccaccttctggatttaaaccgcttactcctccgacgactccactctcacccacccatcagaacccccttttcccaccaccacaagcaaccctgccgacatccggccatgcccccgctgctgggccggtgcagggtgtggggcccgcgcctgctcctcactccctcccggaacctggcccacaacaacagacattcgcagtgcctagaccgcctcatcagccactccagatgcccaaaatgatgcctgagaaccagtaccctagtgaacaacgttttcagaggcagcttagtgagccttgccaccctttcccccctcagcctggggtgcctggcgataatcgaccttcttaccaccggcaaatgtcagaaccaatagtgcccgctgccccacctcccccgcagggctttaagcaggaataccacgatccgctctacgagcatggggtaccaggaatgcctggaccaccagcgcacggtttccaatctccaatggggatcaaacaggagcctcgggactactgcgtggatagcgaagttccaaactgccagagtagctacatgcgaggcggctactttagcagtagtcatgaagggttttcctatgagaaggatcccaggctatacttcgacgatacttgcgtggtaccagagaggttagagggaaaagtgaagcaagagcctaccatgtatcgggaaggccctccttatcagcgccgcggatcactgcagttatggcagtttctggtcactctcctggacgatccagcaaacgctcatttcatagcctggaccgggaggggaatggagtttaagttgatcgaacccgaggaagtggctaggcgctgggggatccagaaaaatcggccggcaatgaattacgataaattatctcgcagcctgaggtattactacgagaaaggtattatgcagaaggtggctggggaaaggtatgtgtataagtttgtgtgcgaccccgacgccctgttctcgatggccttcccagataatcagcgccctttcctaaaagccgaaagcgaatgccacctttccgaggaggacacactgcctttgacccacttcgaggacagtcccgcttacttactggatatggaccggtgttcaagcctcccatatgctgaggggtttgcatactag

SEQ ID NO: 186932 - DNA, 453 bp, synthetic construct
  misc_feature 1..453: note = Description of Artificial Sequence: Synthetic coding sequence
  source 1..453: mol_type = other DNA
atggacggcttctacgaccagcaggtgcccttcatggtgcccggcaagagcaggtcggaggaatgcaggggccgtccagtgattgatagaaagcgaaaatttctcgacactgatctggcacacgatagtgaagaattgttccaggacctgagtcaacttcaggaagcctggttagcagaggctcaggttcccgacgacgagcagtttgtccccgactttcagtccgacaatttggtcctgcacgctccccctccaacgaagattaaaagagaactgcacagcccgagctcggagctatcaagctgctcccatgagcaggcgctaggcgcaaactatggggaaaagtgcttatataattactgcgcttatgataggaagccccctagcgggtttaagccattaacccccccaacaaccccgttaagccccacccaccagaaccccctcttttag

SEQ ID NO: 186933 - DNA, 1659 bp, synthetic construct
  misc_feature 1..1659: note = Description of Artificial Sequence: Synthetic coding sequence
  source 1..1659: mol_type = other DNA
atgagcgagcggcggtgcccccccgagcaccgggagggcgtgaacgatacaggaggcagcctctttccccagaagctgctgaacgccgaaacatcccagtccggaatcagagatgcggagagtactatggacggtttttacgatcagcaagttccattcatggtccctgggaagtcccgctctgaagagtgccgaggacggccagttattgacaggaagcgtaaatttctcgacactgatctggcacacgatagcgaggagcttttccaggatctgtcccagttgcaggaagcttggctggctgaggctcaggtgcccgacgatgaacaatttgttcccgatttccagtccgataacctggtcctgcacgcgcctcccccaaccaagatcaaacgcgaactgcactcccccagctctgaattatcttcttgctctcacgagcaagcattgggcgcaaactacggagagaaatgtttatacaactactgtgcctatgatcggaaaccgccatccgggttcaagccactcacaccccctaccacccccctctctccaacacaccagaacccactctttccaccgccacaagccacgctgccaacctcaggccatgccccagctgcagggcccgtccagggtgtcggcccggccccagccccccactctctaccagaacccggccctcaacagcaaacgtttgctgtgccaaggcccccccatcagcccttacaaatgccaaaaatgatgccagagaatcaatacccgtccgaacagaggttccagcgacaacttagtgagccatgccaccctttcccacctcagccgggggttcccggagataacagaccttcctatcaccgtcaaatgtctgagcccatagtgcccgctgcacctccgccaccccagggcttcaaacaggaataccacgatcctttgtacgagcatggagtccccggaatgccaggacctccagcacatggatttcaaagccccatgggcatcaagcaggaaccaagagactattgtgtggacagtgaggttccaaactgtcagtcatcatatatgcggggtgggtacttctccagttctcacgaaggattctcctacgaaaaagaccccagattgtactttgacgacacgtgcgtggtgccagaaagactggaaggcaaggtcaaacaggagccaaccatgtatcgggagggccctccttatcagaggaggggctctttacaactttggcaatttctggtgacgctgctggacgatcctgccaatgcacacttcatagcctggacaggaagagggatggaattcaagctgatcgaacccgaagaggtcgcccggaggtgggggatacagaaaaaccgtcctgcaatgaactatgataagctgtctaggtcactgaggtactactatgaaaagggtatcatgcaaaaggtggcaggtgaacgctacgtctacaaattcgtgtgcgacccagatgctcttttctccatggcttttcccgataaccagcggccttttcttaaggctgagagtgaatgccatctctccgaagaggataccctgcctcttacccattttgaagattccccagcttacctgttggatatggatagatgctcttcactgccctacgcggagggttttgcttactag

SEQ ID NO: 186934 - DNA, 1359 bp, synthetic construct
  misc_feature 1..1359: note = Description of Artificial Sequence: Synthetic coding sequence
  source 1..1359: mol_type = other DNA
atgagcgagacccccgcccagtgcagcatcaagcaggagcggatctcgtataccccccccgagtccccggtcccctcatacgcgtcttcgacacctttgcacgtccccgtacctagagcccttcggatggaagaggatagtatccgcctcccggctcacttgcgcttgcagccaatttactggtccagggatgacgtcgcccagtggctgaagtgggctgagaatgagttctctctccggccgattgactctaacacttttgagatgaatggtaaagccctgctgctgctcaccaaggaggacttccgatacaggtccccccactcaggcgacgtgctgtatgagctcctccagcacattctgaagcagagaaaaccccggatcctgttttctccttttttccacccaggcaactcaatccatacgcagcctgaggtgatcctacatcagaatcatgaggaagataattgcgttcagcgcactccgcggccctccgtcgataacgtacaccacaacccacctacaattgaattattacataggagcagaagccccattaccacaaatcaccgaccctctcctgatcctgaacaaagacccttgcggagcccactcgacaacatgatccgcaggttgtctcctgccgaacgcgcccaggggccacgcccccaccaggagaataatcaccaggagtcttaccctttgagcgtgtctccgatggagaacaaccactgccctgccagctccgaaagtcacccgaagcctagtagcccaaggcaggagagcacacgtgtcattcagctgatgccttccccaatcatgcacccactcatcctgaatccaagacactctgtggatttcaagcagagccgcctgagcgaagatggcctgcatcgagaaggaaagccaatcaatctgtcccaccgggaggacctcgcctacatgaaccacataatggtgtccgtttcaccacctgaggagcacgctatgccgattggcaggatcgccgactgtagactactctgggactatgtatatcagcttctgtctgatagccgctatgaaaacttcatcagatgggaggacaaggagagcaagattttcagaatcgtggacccaaacggcttggctagactgtgggggaatcataaaaaccgcactaatatgacctacgaaaagatgagtagagcactgagacactattataagttgaacatcatcagaaaagaacctgggcaacggctgctgttcagattcatgaaaactcccgacgagattatgtcagggcgaactgataggcttgaacatctggaaagtcaggagctagacgaacaaatctaccaagaagacgaatgctag

SEQ ID NO: 186935 - DNA, 954 bp, synthetic construct
  misc_feature 1..954: note = Description of Artificial Sequence: Synthetic coding sequence
  source 1..954: mol_type = other DNA
atgcaggagggcgagctggccatcagccccatcagccccgtggccgccatgcctcccctcgggacacacgtacaggcgagatgcgaggcccagataaatctgctgggagagggtggaatctgcaaactgcccggacgcttgcgcatacagcctgcactgtggtctagggaggatgtgctccactggttgcgatgggcagaacaggaatacagcttaccctgtactgctgagcacgggttcgagatgaatggcagagcgttatgtatcctcaccaaggatgattttcgccatcgggccccgtcaagcggagacgtgctttacgaactgctgcagtacatcaagacccagcgccgggctctggtttgcgggcccttcttcggtgggatcttcaggctgaaaacccccactcagcattcaccagtaccacctgaggaggtgacaggaccttcccagatggatactagacggggtcacctattgcagccgcccgatccgggtctgacatcaaacttcggacacctggatgaccccgggctggcgcgttggacacccgggaaggaagaaagcctcaacctctgtcactgtgccgagcttggttgtaggacccagggggtttgttctttcccagcaatgcctcaggcaccgattgatgggcgcatcgcagactgtcggttgctgtgggactatgtgtaccagctgcttctggacacaagatatgaaccctacataaagtgggaggataaggatgccaagatctttagggtggtggatcccaacggcctagcaaggctgtggggtaaccacaagaaccgggtgaacatgacatacgagaagatgtctcgtgctctgcgacattactataagctgaatattatcaagaaagagcccggacagaaactgctgttccgcaacggactccagttgattttcatctttatctggagcttccaatag

SEQ ID NO: 186936 - DNA, 1026 bp, synthetic construct
  misc_feature 1..1026: note = Description of Artificial Sequence: Synthetic coding sequence
  source 1..1026: mol_type = other DNA
atgcaggagggcgagctggccatcagccccatcagccccgtggccgctatgccccccctcggcacacacgtccaggcccggtgtgaggcgcagataaatttacttggagaaggcgggatctgcaaacttcccggacgactgagaattcagcctgccctttggagcagggaggatgtgttacattggttgcgttgggccgaacaggaatacagtctgccctgcactgccgagcacggcttcgagatgaatggccgtgccctgtgcatattgactaaagatgactttagacaccgcgcaccttctagtggcgacgtgctgtatgagctccttcagtatatcaagacacagaggcgggctttagtgtgcggaccattttttggaggaatcttcagacttaaaacgcctactcagcacagtccagtacccccagaagaagtaactggcccctcacagatggacacgcggcgaggccatctgcttcagcccccagacccgggcctgacatccaacttcggccatttggatgatcctgggctagctaggtggacccccggcaaagaagagtcgctaaatctctgccactgtgcagagcttggatgtcgtacccagggggtgtgcagtttccccgccatgccccaggcaccaattgacggaaggatcgccgattgtcggctgttgtgggattacgtttatcagctgctgctggacacacggtacgagccatatattaaatgggaagacaaggacgcaaaaattttcagggtagtcgacccaaacgggctggccaggctgtgggggaaccacaaaaatcgggtaaatatgacctatgagaaaatgtctagggctctccgccactactacaaattgaatattattaaaaaggaaccagggcagaagctgctgtttagatttctgaagactccagggaaaatggtgcaggacaagcactcccacttggagcctctggaatcacaggagcaggaccgcatcgaatttaaagataaacggcccgagatttcaccctag

SEQ ID NO: 186937 - DNA, 795 bp, synthetic construct
  misc_feature 1..795: note = Description of Artificial Sequence: Synthetic coding sequence
  source 1..795: mol_type = other DNA
atgcaggagggcgagctggccatcagccccatcagccccgtggccgcaatgccccctctcgggactcacgtgcaggcgagatgtgaagcccagattaatctgctgggggaggggggaatttgcaagttacccggtcgactccgcattcaaccggcgttatggtcgcgagaagatgtgctgcattggctgcggtgggcggagcaagaatactccctcccgtgtacagctgaacatggatttgagatgaatggtagagcgctctgcatcctgacgaaagacgattttcgtcatagagccccaagctcaggggacgtcctctatgagctgctgcagtacatcaagacccaacggagggcgctcgtttgcgggccctttttcggaggcatattcaggctgaaaacccccactcagcatagtccggtaccccccgaggattgtagactattgtgggattatgtctatcagctactgctcgatacccggtatgagccatacatcaaatgggaagacaaagacgcaaagatcttcagagtagttgatcctaacggactggcccgtctctggggaaatcacaagaacagggtgaatatgacctatgaaaagatgtccagggctctcaggcactactacaaattaaatatcatcaagaaggaaccgggacagaagctgctgttccgcttcctcaaaactcccggcaagatggtccaggacaaacactcccatttggagccccttgaatctcaggaacaagataggattgaattcaaggataagagacccgaaattagcccttag

SEQ ID NO: 186938 - DNA, 861 bp, synthetic construct
  misc_feature 1..861: note = Description of Artificial Sequence: Synthetic coding sequence
  source 1..861: mol_type = other DNA
atgcaggagggcgagctggccatcagccccatcagccccgtggccgctatgccccctctcgggactcacgttcaggctcgctgcgaggcccaaattaaccttttgggtgagggagggatctgcaagcttccaggtcgcctgagagacgtgctctatgaacttctgcagtatataaaaacacagcgccgggctctagtatgtggaccattctttggcggtatatttaggctaaagactcctacacagcacagtcctgtaccccccgaggaagtaactgggcccagccagatggacacgagacgtggacaccttctgcaaccaccggaccccggactgacttctaactttgggcacctagacgatccagggctcgctagatggactccgggcaaggaagagtccctgaatctgtgtcactgcgccgagctgggctgtcgaacccagggcgtctgctcattccccgcaatgcctcaagcccctatagacgggcgaattgcagattgtagacttttgtgggactatgtataccagctgcttttggacactcgctatgagccctacatcaagtgggaggacaaggacgcaaaaatttttcgcgtagtcgacccaaacggtcttgccaggttatggggcaaccataaaaatagggttaatatgacctacgagaagatgagcagggctctgcgccattattataagctgaacattattaaaaaagagcccggccagaaactccttttcagattcctaaagacacccggtaaaatggtgcaggacaaacatagccacttggagcccctggagtctcaggagcaggacagaattgaatttaaagacaaacgcccagaaatttcgccttag

SEQ ID NO: 186939 - DNA, 573 bp, synthetic construct
  misc_feature 1..573: note = Description of Artificial Sequence: Synthetic coding sequence
  source 1..573: mol_type = other DNA
atggacacccggcggggccacctgctgcagccccccgaccccggcctgacctctaatttcggtcatttggacgatccaggactggctcggtggacgccgggaaaggaggagagcctgaatctgtgccactgtgcagagctcgggtgcaggacacagggcgtgtgttccttccctgcgatgcctcaggcccctatcgatggtcgaatcgccgactgtcgcttgttgtgggattacgtctatcagttgttgttagacactcggtacgagccttacatcaaatgggaggataaagacgctaagatattcagggttgtcgatccaaatggtctggccaggctgtggggcaatcacaagaatcgcgtgaatatgacctacgaaaagatgtccagagcactgagacattattacaaactcaacataattaagaaggagccaggtcaaaagctgttgttccggtttctcaagactcccggcaaaatggtgcaagacaaacactcacacctcgagcctctggaatctcaggagcaggatcgcattgaattcaaggataagcgccctgaaatatccccctag

SEQ ID NO: 186940 - DNA, 1242 bp, synthetic construct
  misc_feature 1..1242: note = Description of Artificial Sequence: Synthetic coding sequence
  source 1..1242: mol_type = other DNA
atggccagctgcgccgagcccagcgagcccagcgcccccctgcccgccggcgtgccacccctcgaggacttcgaggttctggacggcgtggaagatgccgagggtgaggaggaggaggaggaagaggaggaggaggaagatgatctcagcgagctgccccctctcgaggacatgggccagcctcccgcggaagaagccgagcagccgggggccctagcgagggagttcctcgccgcgatggagcccgagcccgcccccgctccagcccccgaagaatggcttgatatacttggaaacggtctgctgcgcaagaaaactctggttcccgggccaccaggctctagccgacctgtcaagggacaagtcgttacagtgcacttacagacttcactggaaaacggcacgcgcgttcaggaagaacccgagctggtgtttacactgggggactgcgatgttatacaggccctcgacctgtcagtaccccttatggatgtgggcgaaacggcgatggtcactgccgactctaagtactgctatggtccacagggaagccgcagcccatatattccaccccacgctgcactgtgtctggaagtcacactgaaaaccgctgttgacggaccggaccttgagatgctgacaggacaggaacgtgtggcccttgccaaccggaaacgcgagtgtggtaacgcacactaccagagagcggatttcgtgctggcggccaacagttatgatttagcgataaaagccatcacatcgagcgccaaggtggacatgacctttgaggaagaggcccaactcctgcagctgaaagttaagtgcttgaacaaccttgccgcttcccaactcaagctggatcactaccgggccgccctgcgatcatgcagtctggttctggagcatcaacccgacaacataaaggcacttttcagaaagggtaaggtactggcgcagcaaggagagtactctgaagccattcctatcctgcgagccgccttgaagctggagccgtctaacaagacaattcacgccgaactgtcaaagctcgtgaaaaagcacgctgcccagcggagtacggaaacagccctttatcgcaagatgctgggtaatccttcacgcctcccagccaagtgtccgggtaagggcgcctggtccataccctggaaatggctgttcggggccaccgctgtggccctaggcggcgtggcactctccgtcgtgattgcagctagaaattag

SEQ ID NO: 186941 - DNA, 1422 bp, synthetic construct
  misc_feature 1..1422: note = Description of Artificial Sequence: Synthetic coding sequence
  source 1..1422: mol_type = other DNA
atgaactacgacaagctgagccgggccctgcggtactactacaacaaaaggatcctgcacaagacaaagggcaagcggttcacgtataagttcaatttcaacaaactggtgctggtcaattatcctttcatcgacgtgggactggctggcggagccgttccccagagcgccccgccagtccctagcggaggcagccacttcagattcccaccctcaacaccttctgaggtcctgtctccaacagaggaccctcggtcccctcctgcctgcagcagttcatcctcaagcctgttttccgccgtggtcgcacgtagattgggacgggggtcagtctcagactgcagtgacgggacatcagagctggaggaacctctcggtgaggatcctagggctcggcctcccggaccccccgacttaggggccttccgcggtcctcctctcgccaggttacctcatgaccctggagtcttcagagtgtaccctcgcccacggggaggaccagagccattgtcccccttccccgtcagccccttagcaggtccaggcagcttacttccacctcaactgtcccctgcactgcctatgacgcccacccaccttgcatatacaccatcaccaaccctaagccccatgtatcctagtggaggtggggggccatctggatctggcggggggtcccacttttcctttagccccgaggatatgaagcgctacttgcaggcccacactcagtctgtgtacaactatcacctgtcgcccagagcgttcctgcattacccagggctcgtggttccacagcctcagaggcccgacaagtgccctcttccgccaatggcccccgagacgccgccggtgccaagttccgcatctagctcaagcagctcatcttcctcaccattcaaattcaagttacaacccccccctctggggcggcgccagcgggcagctggagagaaggcagtggccggtgccgataaatccggcggaagcgccgggggcctagccgagggcgccggggccttggccccaccaccgcccccccctcagatcaaagttgagccaatctctgagggtgagtctgaggaggtggaagtcaccgacatctctgatgaagacgaggaggacggagaggtgtttaaaacaccgagagcccctccggctcctccgaaacccgaaccaggcgaggctccaggagcatcccagtgcatgcctttgaagctgcgctttaagcgccggtggagcgaggactgtaggcttgaaggaggagggggcccagctggcggctttgaggatgaaggcgaggacaaaaaagttcggggggaaggacctggagaagcagggggccctctgacacccaggagagtttctagcgatctgcaacatgctaccgcacagttatcattagagcatcgcgatagctag

SEQ ID NO: 186942 - DNA, 2478 bp, synthetic construct
  misc_feature 1..2478: note = Description of Artificial Sequence: Synthetic coding sequence
  source 1..2478: mol_type = other DNA
atggccgccgacgagggcagcgccgagaagcaggccggcgaggcccacatggctgctgacggggagaccaacgggagttgcgagaattctgatgcaagttctcatgcaaatgccgccaagcacacccaggattccgctcgcgtaaacccccaggatggcacaaataccctgacaaggatagctgagaatggagtatcagaacgggactccgaggcggccaagcagaatcatgtcaccgcagacgatttcgtccagacgagcgtcattggttctaacggatacatattaaacaaacctgccttacaggcacagcccctgcgcacaacttcgaccttggcttcctccctgccaggacatgccgcaaaaacactccctggcggtgccggaaagggccgaactccttcagcctttccacagactccagccgcacctcctgccactttgggagaaggctccgcagataccgaagacagaaagttgcccgcacccggggccgacgtaaaggtccacagagcaaggaagacgatgcccaaatctgtcgtgggactgcacgccgcatcaaaagatccaagagaggtccgagaggcacgagatcacaaagagccaaaggaggaaatcaacaagaatatttctgattttgggaggcagcagctactaccgcccttccccagccttcaccaaagcctgccccagaaccagtgctatatggccacaaccaaaagtcagactgcgtgtctgcccttcgtattggcagctgccgtgtctaggaaaaagaagcgccgtatgggtacatattctctggtccccaaaaagaagacaaaggtcctgaaacaaaggaccgtcattgagatgttcaagagtattactcacagtactgtgggaagcaagggcgaaaaggatctgggtgcttcttctttgcacgttaatggagagagcctggagatggatagcgacgaggatgattcagaagaactcgaagaggatgatggtcatggcgcggagcaggctgccgctttccccacagaagacagtaggacaagcaaagagtccatgtctgaggctgatagagcccagaagatggacggggagagcgaggaggaacaagagtctgtggataccggagaggaggaggaggggggagacgagagtgacttatcttctgaaagctctatcaaaaaaaaatttctgaaacgaaaaggaaaaacggacagtccttggattaagcccgcccggaagcggcggagacgttcacgtaagaagccctccggagccctgggctctgaatcatataagtcgtccgccggttcagccgagcagacagcaccaggggacagcacaggctatatggaggtgagcttggactcactggacttacgtgtaaaagggattttaagttctcaagcagagggcttggccaatggaccagatgtcctagagacagatggtctgcaggaggtgcccttatgttcttgccggatggagacacccaaatcccgggagatcactacacttgctaataatcagtgtatggcgacagagtcagtcgaccacgagctgggaaggtgcactaactccgtggttaagtacgaacttatgcggccgtctaataaggcaccacttcttgtgctgtgcgaggaccaccggggaaggatggtgaaacaccaatgttgccccggctgcggctatttctgcacagccgggaactttatggaatgtcagcctgaatcaagcatcagccacagattccacaaagactgtgcatcacgggtgaacaacgcctcttactgcccccactgcggtgaagaaagcagcaaggccaaagaggtgaccatagctaaagcagacacaaccagcactgtcacaccggtgcctggacaggagaagggctcagctctcgaaggccgggcagatactaccaccggcagcgctgctggaccccctctgagcgaggatgacaagctgcaaggtgccgcctctcacgttcccgagggcttcgatcctacagggccagctggtctgggccgacctactcctggattgagtcagggaccaggaaaggagacacttgaaagtgccctcatcgcgttggactcagaaaaaccgaaaaaactgagatttcacccaaagcagctgtatttttccgctagacagggagagctgcagaaagtgttattgatgctggttgacggcatcgatcctaacttcaaaatggaacatcaaaataagcgttcacccttgcacgctgccgccgaggccgggcatgtcgacatctgccacatgctcgttcaagccggggcgaatatagatacttgcagcgaggaccagcgcaccccactgatggaggccgcagagaataatcacctcgaggcagtcaaatacctcataaaggcaggagctcttgtggatcccaagatccagaagacatccaaagtatacactgaatctcaggagactcagcgatcacagaccatcttgtag

SEQ ID NO: 186943 - DNA, 3462 bp, synthetic construct
  misc_feature 1..3462: note = Description of Artificial Sequence: Synthetic coding sequence
  source 1..3462: mol_type = other DNA
atggccgccgacgagggcagcgccgagaagcaggccggcgaggcccatatggctgcagatggagagaccaacggctcatgcgaaaactcagacgcctcttctcacgccaacgctgcaaagcacacccaggactcggcccgggtcaatcctcaggatggtacgaacacccttacgcggattgctgagaacggggttagcgaacgcgatagcgaggcagcaaaacagaatcatgtgactgccgacgatttcgttcagacatctgttatcggcagtaatggctatattctcaacaagcctgccttgcaggcgcagcctttacgtaccacatccaccctcgcctcctcgctccccggtcacgccgccaaaaccctcccgggcggagccggcaaaggaagaactccctctgctttccctcagactccagctgcccctccagctacactaggtgaggggagcgccgatacggaggacagaaagttacccgcccccggtgcggatgtgaaagtccacagggcccgcaaaaccatgcctaaaagcgtggttggactgcacgccgcctcaaaggaccctcgcgaggtgcgcgaggccagagaccataaagagccgaaggaagagataaacaaaaacataagcgattttggacgccagcagttgttgcctccattcccttccctgcaccagagccttccacagaatcagtgctatatggccactaccaaaagccaaaccgcttgcttgccctttgtccttgccgccgccgtgagccgcaaaaagaagagacgcatgggtacctattctctggtgcccaagaaaaagaccaaagtgttaaagcagcgcactgtgatagagatgttcaaatcaatcacccacagcactgttggatcgaaaggggaaaaggacctgggtgcctcctccttgcacgtgaacggggagtctctggagatggactccgacgaggatgacagcgaagagctagaagaggacgatggacacggggccgaacaggctgctgcctttcctaccgaagattcccgcacaagtaaggaaagtatgtccgaggccgatagggcacaaaagatggacggcgaatctgaagaggaacaggaaagcgtagatactggggaggaggaagagggaggcgacgagagcgatctgagctctgagtcctcaatcaagaaaaaatttttgaagagaaaggggaaaaccgactctccgtggatcaaaccagcgaggaagcggcgtaggcgcagccggaaaaaaccgtcgggagccctgggatccgagagctacaaaagcagtgcagggtctgctgagcaaaccgctcccggcgacagcacggggtatatggaagtttctctggactcactggatctccgagtgaagggtattctgagtagccaggcggaaggactcgccaacggccctgatgtgctggagactgatggtcttcaggaggttccgctttgtagttgtcgaatggagacacctaaaagcagagaaatcacaacgctcgctaataatcagtgtatggctacggaatcagtcgaccatgagttgggccgttgtactaactctgtcgtgaaatacgagctgatgcggccatccaataaagctcctctgctagtgctatgtgaagatcataggggccgaatggtgaagcaccagtgctgtcccggctgcggatatttctgtacagccgggaattttatggaatgtcagcctgagagctccatctcacacagatttcataaagactgtgcctctagggtaaacaacgccagctactgccctcactgtggcgaagaaagctcaaaagctaaggaggtcaccatcgctaaagccgacacaacttccaccgtgactcctgtcccaggccaggagaagggatccgctctcgaaggccgagctgatacgactactggctcagcagccggacctccactatccgaggacgacaagctgcaaggcgccgcttcccacgttccagaggggttcgaccctacggggcctgcgggactggggcggcctactcccgggctaagtcagggccctggtaaagagaccctagagagcgcgctgatcgcactggattccgagaagcctaagaaactgagattccaccccaagcagctctacttctccgccaggcagggtgaattgcagaaagtgctgctcatgttagtcgacggaatcgaccctaattttaagatggagcaccagaacaaacggtctcccttgcatgcagccgctgaggctggccacgttgatatatgccacatgctcgtccaggcgggtgctaacatcgacacctgtagcgaggaccagagaacccctctgatggaggcagcagagaataatcaccttgaggcggtgaaatatctgatcaaagctggagcgctggttgatcccaaggacgctgagggctcaacgtgtctccatttggcggccaaaaaaggacattatgaagtggtgcagtatcttctttccaacggccaaatggatgttaattgtcaagacgacggcggttggacccccatgatttgggctacagagtacaagcatgtagatctcgtgaagcttttgctctcaaaggggtccgacatcaatattcgtgataatgaagagaatatctgcctgcattgggccgctttttccgggtgtgtcgacattgctgagatattactcgccgccaagtgcgacttgcacgccgtgaacattcatggtgattctcctttgcacatcgccgcacgggaaaaccgctacgattgtgtggtgcttttcctctcccgggacagcgacgtgacgctgaaaaataaggagggtgagacccctcttcagtgtgcctctctgaactctcaggtttggtccgcgctacagatgtccaaggccctccaagattccgctccggatagaccaagcccggttgaacggattgtttcacgggatatcgcacgaggctacgagagaattcccatcccttgcgttaacgccgttgactccgagccgtgcccttccaactacaagtacgtcagccagaattgtgtcacatcccccatgaacattgaccggaacatcacgcatctccagtactgcgtgtgtatagacgactgcagttcaagcaactgtatgtgtgggcagctgtccatgcggtgttggtacgacaaagatggccgactactcccggaattcaatatggccgaaccccccctgatctttgagtgtaaccacgcttgttcatgttggagaaattgtcggaatagagtcgtgcagaatgggttgcgggctcgcctccagctctacaggacaagggatatgggttggggtgtcaggtccctacaggacatcccaccaggaaccttcgtgtgcgagtacgtgggagagttgatcagcgactcagaggccgacgtcagagaggaagacagctacctctttgacctggacaacaaagtgattagcgcatag

SEQ ID NO: 186944 - DNA, 3897 bp, synthetic construct
  misc_feature 1..3897: note = Description of Artificial Sequence: Synthetic coding sequence
  source 1..3897: mol_type = other DNA
atggccgccgccgacgccgaggccgtgcccgcccggggcgagccccagcaggattgctgcgttaagaccgaactgcttggggaagaaactcctatggccgcagacgaagggtccgctgagaaacaggccggcgaggctcacatggccgcagacggtgagacaaacggatcttgcgagaatagtgacgcctcctctcacgccaatgcagccaagcacacgcaggacagcgctcgggtgaatccacaggatggaacgaatactttgaccagaatcgcagagaacggcgttagtgagagagacagtgaggcagccaaacagaaccatgtaactgcagacgactttgtccagaccagtgtcattggatccaacggctacatcctgaataaaccagctctccaggcccagcccctacggacaacttccaccttggcaagtagtttaccagggcacgccgcgaagactcttcctggtggcgccggtaaagggcggactcccagcgcattccctcagacccccgcagcgcccccggcaacgttaggcgagggttctgctgataccgaagatagaaagttgccggcgcccggcgctgacgtcaaggtgcatcgtgccagaaagactatgcctaaaagcgtggtgggtctgcacgccgcaagcaaggatcctcgagaagttcgggaagcccgggatcacaaagaaccaaaagaagaaattaataagaacatttccgatttcgggcgccagcagttgctgcctcccttcccttcactacaccaatccctaccacagaaccaatgttacatggctaccaccaagagtcagacagcctgcttaccatttgtcctcgctgccgccgtcagccgcaagaaaaagcggcgcatgggcacctactccttagttccaaagaaaaagacaaaggtgttgaagcagcgaaccgtcatcgagatgttcaaaagcatcacacacagtacagttggtagcaagggtgagaaggaccttggggcaagctcactccacgtgaatggagagtcattagagatggattccgacgaggatgatagcgaagaattagaggaggatgatggccacggagccgaacaggctgctgcattcccaacggaagattctcggactagcaaagaaagcatgagcgaggccgaccgtgcccagaagatggatggggagagtgaggaagagcaggagagtgtcgacaccggcgaggaggaagaaggcggtgacgaatcagatctctcaagcgagtcatctatcaagaaaaagtttcttaaacgaaaggggaagaccgactctccatggatcaagccagcaaggaagcgccgtcgcagatcaaggaagaagccatcgggagctctcggatctgaatcttacaaatcctcggctggctctgctgagcagaccgctcctggcgatagcaccggctacatggaggtgtcgcttgattccttggacttgcgagtaaaaggcatcctctcctcgcaagccgagggactcgctaatgggccagacgtactcgaaacagacggccttcaggaagtgcctttgtgttcctgccgaatggaaactcccaaatcaagagagataaccaccctggctaataaccaatgcatggctaccgagtcagttgatcatgagttaggacggtgtacgaattcagttgtgaaatacgaactgatgcggccctcaaacaaagcccccctgctcgtcctgtgtgaggatcaccgcggccgaatggttaagcatcagtgttgccctgggtgtgggtatttttgtactgccggaaacttcatggagtgtcaacctgagagctcgattagccaccgctttcacaaggactgtgcctccagagtgaacaatgcaagctactgtccacattgtggtgaggagagtagtaaagcaaaagaggtgaccatcgctaaggcggacacgacgtcaacggtgactcctgtgcccggccaggaaaaagggagtgcactagagggacgcgcggacaccaccactgggagcgccgcgggccctccattgtctgaggatgacaaattacagggggctgcctcccacgtcccggaaggttttgatcctactggaccggccgggctcgggcgacctaccccagggctgagccagggcccagggaaggaaaccttggagagtgcccttatcgcactggactccgagaaacctaagaagctaagatttcaccctaaacagctgtatttcagcgcacgccaaggagagctgcaaaaggttctcctcatgctcgtagatggcatcgatccaaactttaaaatggaacatcaaaataaaaggtcccccctccacgcggcagctgaagctggtcacgtcgatatttgtcatatgctggtgcaggccggcgcaaacatagatacctgttcagaggaccagcgcacaccattgatggaagctgcagagaacaaccacttggaggccgttaagtatctcatcaaggctggggccctggtggatccaaaagatgctgaggggtccacatgcctgcacttggcagccaaaaaaggacactacgaggtggtgcagtacttgctctctaacggacaaatggatgtcaattgtcaggatgacggcggttggactcctatgatctgggctacagaatacaagcacgtggacttagtgaagctcctcctctcaaaaggaagcgacatcaatatcagagacaatgaagaaaacatatgcctgcactgggccgccttttcaggatgtgtggacattgcagagattcttctcgcagcgaagtgtgacctgcacgctgtcaacattcatggcgacagtcccttgcacatagcagctcgggagaaccggtacgattgcgttgttctcttcctctcaagagatagcgatgtaaccctgaagaataaagaaggcgagacgcccctccaatgcgcttcattgaattcacaggtgtggtccgccctccaaatgtccaaggccttgcaggattcagcaccggaccgcccatcgcccgtcgaaaggatcgtttcccgcgacatcgccagagggtacgaaagaatacccatcccatgtgttaatgctgtggattcagaaccttgcccttcgaactataagtatgtgagccagaattgcgtcacctcccccatgaacattgataggaacattacacatctccagtattgtgtatgtatcgacgattgttcatcatctaattgcatgtgtggccagctcagtatgaggtgttggtacgataaggatgggaggttgctgcccgagtttaatatggccgagccacccttgatcttcgagtgcaaccacgcttgtagctgctggaggaactgccgcaaccgcgtcgttcagaacggcttaagagcccggctgcagttatataggacccgcgatatgggctggggcgtgaggtcactgcaagacattcctccggggactttcgtgtgcgagtacgtgggcgagctgatttccgattccgaagcagacgtgcgtgaggaagatagctacctttttgacctagacaacaaggacggagaggtatattgtatcgatgccaggttttatggcaatgtaagcaggtttatcaatcaccactgcgagccgaatcttgtgcctgtcagagtcttcatggcacaccaggatctgcgattccccaggatcgccttcttctccacacgtctcatcgaagccggggagcagcttggttttgattacggcgaacggttctgggacatcaaaggaaaactgtttagctgccgatgcggttctccaaaatgtaggcactcctcagccgcattggcccagcgccaggcctcggctgcacaggaggcccaggaagacggtctgccagatacttcctcagccgccgccgcggaccctctgtag

SEQ ID NO: 186945 - DNA, 2427 bp, synthetic construct
  misc_feature 1..2427: note = Description of Artificial Sequence: Synthetic coding sequence
  source 1..2427: mol_type = other DNA
atggccgccgccgacgccgaggccgtgcccgcccggggcgagccccaacaggattgctgcgtcaagactgaacttctgggtgaagagactcccatggctgctgatgaagggtccgccgaaaagcaggcaggcgaggctcatatggccgcagatggcgagaccaatggttcctgtgaaaactctgacgccagctctcacgccaatgctgccaaacatactcaggacagtgctagggtgaaccctcaggatggcactaacaccctaacacgtatcgctgaaaatggcgtgtccgagagggactcagaagcagcgaagcagaaccacgttacagcagatgactttgtgcagacttccgtaattggtagcaatgggtacatcctgaacaagcccgcactgcaggcgcagccactgcgcaccaccagtacactcgctagttctctgcctggtcacgcagcaaaaactctgccagggggtgctgggaagggtcgcaccccttcagcgttcccccagacccctgctgcaccaccagccacactgggcgaaggaagcgccgatacggaggatcgcaaactcccggcaccaggggccgatgtaaaggtgcatcgggccaggaagaccatgcctaaaagcgtggtgggcctccacgccgccagcaaagacccacgtgaagtccgggaagcacgggatcacaaagaaccaaaggaggaaatcaacaaaaatatctccgatttcggtcgccagcagcttctgcccccattcccctcactccaccagagtttaccacagaaccaatgctatatggcgacgacaaagtcgcaaactgcctgccttcctttcgtgctggcagcggccgtgtcgcgcaagaaaaagcgccggatggggacatattctttggtacccaaaaagaagacgaaggtgctaaagcagaggactgtaattgagatgttcaaatccataacccactctactgtgggctctaagggtgagaaagacttaggggcttcttccctgcatgtgaacggcgagtcactggagatggatagcgacgaagacgactccgaggaactcgaagaggacgatgggcacggagctgagcaggccgctgcctttcccacggaggacagcaggacgagtaaagaatcaatgtcggaagccgatcgtgctcaaaaaatggatggcgagagcgaggaggagcaggaatcagtcgatactggcgaggaggaagaaggtggagacgaatccgatctgtccagcgagagctccattaaaaagaagttccttaaacgaaaaggcaagactgatagcccttggataaagccagctcgaaagcgcaggaggcgaagccggaagaaaccttctggcgcactgggcagtgagtcctacaagagcagcgcgggcagcgcagaacagaccgcaccgggggatagcaccggctacatggaggtgagccttgatagtctggacctccgagttaagggtatcctaagttcacaagccgagggtctggccaacggaccagatgtactggaaactgatgggttacaggaggtcccgttatgtagttgtagaatggaaactccaaagagtcgggaaattactaccttggctaataatcaatgtatggcaaccgaaagcgtggaccacgaactaggccgatgtaccaactctgtagtcaaatacgaactgatgagaccctctaataaggcccctctccttgttctctgcgaggatcatcgcggcaggatggtgaagcatcagtgctgtcccggctgcgggtacttctgcactgctggaaattttatggaatgccagccagagtcctctatttctcaccgcttccataaggattgcgccagtagagttaataacgcctcttactgcccgcactgtggggaggagagttcgaaagctaaagaggtcactatcgccaaagctgacacgacttcaacggtgacgccagtgcctggtcaagaaaagggttcggcccttgagggtcgcgcagataccaccacggggagcgccgcgggaccccctctcagtgaggatgataaattacaaggagcagcttcgcatgttcctgaagggtttgaccctactggcccggccggactgggaaggcccacccctggattgagccagggcccaggcaaagaaactctggagtctgccctgatcgcactcgatagcgaaaaaccaaagaagctgagattccatccaaagcagctgtacttcagcgctcgacaaggcgaactgcagaaagttctgcttatgcttgtagatggtatcgatccaaatttcaagatggagcatcagaataagaggagcccactgcacgccgccgccgaagctgggcacgtggacatctgccatatgctcgtgcagttctgccgactggggagtccgcgttctcgtggatgcttatggtag

SEQ ID NO: 186946 - DNA, 3702 bp, synthetic construct
  misc_feature 1..3702: note = Description of Artificial Sequence: Synthetic coding sequence
  source 1..3702: mol_type = other DNA
atgcggggcctgccccggggccggggcctgatgcgggcccggggccggggaagggccgccccaccagggagtcgaggacggggaagggggggcccacaccggggtcgcggtcggccaagatctctgctttccttgcccagggctcaagcatcatggacgccgcagctatccaccggccttactagtccccctgtaccttgcttgccctcccagggcgaagccccggcggagatgggggccctactgttggaaaaggagactcgtggggccaccgaacgggtccatggatcattaggcgacactccccgatcagaggagacgctccccaaggcaacccctgacagcctggaacctgcaggtcccagtagccccgcctcagtgacggtgacagtgggagatgaaggcgccgacaccccagtgggcgccactccattaatcggcgacgagtcagaaaacttggaaggagacggggatttaagaggggggcggatcctgctcggacacgccacgaagtcctttcccagctccccctctaagggcggcagttgtccaagcagagccaaaatgtccatgactggcgcaggcaaatcaccaccctctgtgcagagccttgctatgaggttattaagcatgcctggtgcacagggtgcggctgccgcggggtctgagcctcctccagccacaaccagccccgaaggccagccaaaagtgcatagagcacggaaaacaatgtctaagccagggaatgggcagccacccgtgcctgagaagagaccccccgagatacagcatttcaggatgtccgatgatgtgcattccttgggaaaagtaactagtgacctggctaaaaggcgcaaactgaacagcggaggcgggctgtcagaagaacttggctccgctagacggtctggagaggtcacactcacaaagggggatcccggttcactcgaggagtgggaaacggtggtcggcgacgatttctctctgtactacgacagctactcagtcgacgagcgggtggacagcgattctaaatctgaggtagaagcactgaccgaacagctcagcgaggaagaggaggaggaagaagaagaagaggaagaagaggaggaggaggaagaggaggaagaggaagaagaagacgaagaaagcggtaatcagtcggataggtccggatccagtgggcgacgtaaagctaaaaaaaagtggcggaaagactctccctgggtgaagccctcacggaaaagacggaagagagagcccccacgagcaaaagagccgaggggggtatctaatgatacttcatcactggagacagaaagaggcttcgaggaattaccactgtgttcttgtcgaatggaagcacccaaaatcgacaggatctcggaacgggccgggcataagtgtatggccactgaaagcgtagacggcgagctcagtggctgtaatgccgccatcctgaagcgcgagacaatgagaccaagctcccgagttgcgctgatggtcttgtgcgagacccaccgggcaagaatggtgaagcaccactgctgtccggggtgtgggtacttctgcaccgccgggaccttcctcgagtgccacccagacttccgcgttgcacatcggttccataaggcgtgtgtttcacaattaaatggcatggtgttctgccctcattgcggagaggatgcttcagaggctcaggaggttaccatccccagaggcgatggggtcacaccaccggccgggacagccgcccctgccccccctcccttgagtcaggatgtgcctggaagagctgatactagccagccatccgccagaatgcggggccacggcgagcccagaaggccaccttgcgaccccttagccgacaccattgactccagcgggccttctttgaccctgccaaacggcgggtgtctgagtgcagtgggcttgccgctcgggcctggtagagaggcccttgagaaagcgctagtgattcaagagtctgaacggcggaagaagctgcggtttcaccctaggcagctgtacctatccgtcaaacagggcgagctgcagaaggtgatcctgatgctcctggacaacttagaccccaatttccaatctgatcagcaaagtaagcgaacccctctccatgcagctgcacagaagggcagcgtcgaaatatgccatgtgctactgcaagctggcgctaatatcaatgctgtcgacaaacagcagcgcactccattaatggaagcggttgtgaacaatcatcttgaggtggctcggtacatggtccagagaggcggttgcgtgtatagcaaggaggaagacggcagcacatgcctgcaccacgcggccaaaatcggcaatttggaaatggttagcctgctgctgtccaccgggcaggtcgatgttaatgcccaagattctggggggtggaccccaatcatatgggccgctgaacataagcacatcgaggtaatccgtatgctcctaacacgcggagccgatgttacactgacagacaacgaggaaaatatatgcctgcactgggcctcctttacaggatctgccgccattgccgaagtactccttaacgcgcgctgcgacttgcacgccgtgaactaccatggcgacactccactgcatattgccgcccgcgagtcgtatcacgattgcgtcctactgttcctgtcacgaggtgccaatcctgagttgagaaacaaggagggggacaccgcctgggacctgaccccagaacgttccgacgtgtggtttgcacttcagcttaatagaaagctgcggctcggggtaggaaaccgggccatcagaactgaaaagattatttgtcgggatgtagcgcgtgggtacgaaaatgttccgattccttgtgtcaacggggtggacggggaaccgtgtcccgaagactataaatatatttccgagaactgtgaaacatctaccatgaatattgacaggaatatcacacacctccagcactgcacgtgcgttgatgactgcagtagctcaaattgcctctgcggacagctatcgatccgatgttggtatgataaggatggccggctgctccaggagtttaacaaaattgagccccctctgatattcgagtgtaaccaggcatgctcctgctggcggaactgcaagaaccgggtggtacagtccggaattaaggtgaggttgcagctgtatcggacggcaaaaatgggttggggtgtccgtgctctgcagactatccctcagggcacttttatttgcgagtacgtaggggaactaatctctgacgccgaagcagacgtgcgcgaggacgactcttatctgtttgacctggataataaggacggcgaggtgtattgcatcgacgcacgttattacgggaatattagccggtttatcaaccatctgtgcgatcccaacatcatccccgtgcgggtgttcatgctgcatcaggacctgcggtttccacgaattgccttctttagctcaagggatattaggacaggcgaagagctgggctttgattatggtgatagattctgggatattaaatcgaagtattttacttgccagtgcggcagcgaaaagtgcaagcactctgctgaggccatcgcgctggagcagagtcgtcttgcccgactcgaccctcatccggagctcctgccggaactcggatcattgcctcccgtcaatacatag

SEQ ID NO: 186947 - DNA, 3531 bp, synthetic construct
  misc_feature 1..3531: note = Description of Artificial Sequence: Synthetic coding sequence
  source 1..3531: mol_type = other DNA
atggccgccgccgccggcgccgccgccgccgccgccgccgagggcgaggcacctgctgagatgggcgctctacttttagagaaagaaaccaggggagcgacggagcgagtgcacggctcactgggagacaccccgcggtcagaggaaacactcccgaaggcaacccccgacagcctggaaccggcaggcccatcttctccagcatctgtcaccgttaccgtgggtgatgaaggagctgacacccctgtaggtgctactcccctgatcggagatgagagtgagaatctagagggagatggggacctcagaggtggccgcatcctcttggggcacgcgacaaagtccttcccatcctcccccagtaaaggggggtcgtgtccttcgagagcaaaaatgagcatgacaggcgcaggtaagagcccaccaagtgttcagagcttagccatgcggctactgtctatgcccggggcacagggcgcggccgccgccggaagtgaaccacctccagctactacatcgcccgaggggcagccaaaagtccatagagccagaaagacaatgagcaagccaggtaacggtcaacctcccgtgcccgaaaagaggcctcctgagattcaacatttcaggatgtcagatgatgtgcacagcttgggcaaagtgacaagcgatctagctaaacggagaaaacttaattccggcggaggactgtccgaggaattgggctccgcacgcaggtccggcgaagtgacgctgactaagggtgatccaggaagtttagaggagtgggaaactgtggtgggtgacgatttcagcctgtattatgactcttatagcgtggatgagagggtggactcggattctaaaagtgaagtggaagctttgaccgagcagctctctgaagaagaggaagaggaggaggaggaagaggaagaggaggaggaggaggaggaggaagaggaagaggaggaggacgaagagtctggaaaccagtctgatcggtctggctcaagcggaagacggaaggccaagaaaaagtggcgtaaagatagcccctgggttaaaccaagccgcaagagaagaaaaagagagccacctcgagcaaaagagccccggggggtgagtaatgatacttcctcccttgagactgagcggggcttcgaggagctcccattatgtagttgcagaatggaggcccctaagattgaccgcataagcgaacgcgccggtcataaatgtatggctactgaaagtgttgacggggagctctctggttgcaacgcggcaatcctaaaaagggagacaatgaggccatctagtcgggtagctctgatggtgttgtgcgaaacacacagagctagaatggttaagcatcactgttgccctggatgtggctacttctgcactgctggcacattcctggaatgtcacccggactttagggttgctcatcgatttcacaaggcctgtgtttctcagttgaatgggatggtgttctgccctcactgcggcgaggacgctagcgaagcacaagaggttactatcccccggggtgatggggtgacccctccagctgggacagcggcgcctgcaccccctccactgtcgcaggatgtgcccggccgggccgacacatcacaacccagtgcgcgtatgcgcggccacggagagccaaggaggccaccctgcgatcccctcgctgatacaattgatagtagcgggccatctcttaccctccctaacggcggttgtctgtctgccgtgggtctcccactgggtcccggaagagaagctctggaaaaagcccttgtgattcaggagtccgagcgcaggaagaagctccgcttccatcctcggcaactgtacctgagcgtgaaacaaggggagctccagaaagttattttgatgctgctagataacctcgaccccaactttcaatcagatcagcagtccaaacgcacaccgctgcacgctgccgcacaaaagggatctgtggaaatttgtcatgtgttactgcaggcgggggcaaacatcaatgccgtcgataagcagcagaggacacccctcatggaagctgtggtgaataatcatctggaagttgctcgctacatggtgcaacgcggaggatgcgtgtatagcaaggaagaggatgggtctacatgtctacatcacgctgcaaagatcggcaacctggaaatggtaagccttctgctatcgaccggccaggttgacgtgaacgcccaggatagcggggggtggactccaattatctgggcggcggaacacaaacacatcgaggtcatcagaatgttattgaccagaggggccgacgtaaccctgactgacaacgaagaaaatatctgtctgcattgggcctctttcactggatctgctgcaatcgcggaagtcctgttgaatgctcgctgcgatctccacgctgtgaactatcatggagatactccgctacacattgctgcccgggagtcataccacgattgtgtgctgctctttctcagtagaggtgccaaccctgagctgaggaacaaggagggcgataccgcctgggacctcacaccggagagatccgacgtctggttcgccttgcaactgaatcgcaaattgcgccttggagttggcaacagagcaatccggactgaaaaaatcatctgcagagatgtggctagggggtatgagaacgttccaattccatgtgtgaacggggtggatggggagccatgcccagaagactacaagtacatctctgaaaactgtgagacgagcaccatgaacatcgaccggaacataactcacttgcaacattgcacatgcgtagacgattgttcctcatccaactgcctgtgcggccaactgagcatcaggtgctggtacgacaaagatggccgactgctgcaggagttcaacaagatagaacccccactgatctttgaatgcaaccaggcatgctcttgttggcgcaattgtaagaaccgggtcgtccagtcgggcatcaaggtgcggctgcagctgtaccggacagccaagatgggatggggagtcagggccctgcaaacaattcctcaaggaaccttcatctgcgaatacgtgggggaacttatcagtgacgcggaggctgatgttcgcgaggacgactcttacctttttgaccttgataacaaggacggtgaagtttactgcatcgatgctagatactacggcaacatctcaaggttcatcaaccacctgtgcgatcctaacataatccccgtgagggtgtttatgctccatcaagacctgaggtttccgcgtatcgcctttttcagctcacgagatatacggactggcgaggagctcggcttcgattatggggatcggttttgggacattaagtcgaaatacttcacatgccaatgcggctccgagaagtgtaagcatagcgcagaggctattgcactggaacagagtcggctagcacggctggacccacaccctgagctgctgcctgagctggggtccttgcctcctgttaatacttag

SEQ ID NO: 186948 - DNA, 3633 bp, synthetic construct
  misc_feature 1..3633: note = Description of Artificial Sequence: Synthetic coding sequence
  source 1..3633: mol_type = other DNA
atggccgccgccgccggcgccgccgccgccgccgccgccgagggcgaagcaccagccgaaatgggcgcactgctcttggagaaagagactaggggcgcgactgagagagtgcacgggtcactgggtgacactccacggagcgaggaaacgctgcctaaggccacccctgattcactggagcctgccggaccctcgagtccagcctccgtgacagtgacagtaggggacgaaggagcagacactcctgtcggcgcaacgcccctgattggcgatgaatcagagaatctggaaggggacggcgatctacggggagggagaattctgctagggcatgcgacgaagtcttttccgagctcacccagcaaaggcgggtcatgcccctctagggcaaagatgtcgatgacaggggcaggaaaatcccccccgtctgttcaatcgctcgctatgcgtctgctgtccatgcccggcgctcaaggagcagcagccgccggcagcgaacctcctcctgctaccacatcccctgaaggtcagcccaaagtgcaccgggcaaggaagaccatgtccaaacccggcaatggccaaccccctgtgcctgagaaaaggcctccagaaatccagcatttccggatgagtgatgatgtccactcgttaggcaaggtgactagtgacctggccaagcggaggaaactgaactcaggcggtggcctgtcagaggagctcggcagcgcccgccggtccggtgaggttaccttgactaagggcgatccaggatccctggaggaatgggaaactgttgtgggggacgacttttctttgtattacgatagttactctgtggatgagcgcgtcgattccgattctaaaagcgaagttgaagcattgacagaacaactctcagaggaagaggaagaagaggaggaggaagaggaagaagaggaggaggaggaggaggaagaggaggaagaagaggacgaagagtccgggaatcaatctgacagaagcggatcaagcggcagacggaaggccaagaagaagtggaggaaggatagcccatgggtaaaacctagccggaaacggcgtaagcgagagccccctagagctaaggaaccacgcggagtgaatggcgtcggctcctccggtccttctgagtacatggaagtgcccctcggatccctggagcttcctagcgaaggcaccctgtcgccaaatcacgccggtgtttcgaatgatacatcttcccttgagacagaacgggggtttgaggaactccctctgtgctcctgccggatggaagctccaaaaattgacaggatctctgagagggctggacacaaatgtatggcaaccgaatctgtggacggcgagttgagcggttgtaatgccgccatacttaaaagggaaaccatgagaccctcttccagggtggcacttatggtgctgtgtgagacacaccgggctaggatggtcaaacaccactgctgcccaggctgtggatacttctgtactgccggcacattcttggaatgccatcccgatttccgcgtcgcccacagattccataaggcgtgtgtgtcccagctgaatggcatggtgttctgcccccattgtggggaggatgcttcagaggcacaggaggtgacaatcccaagaggggacggagtgacccccccagcaggaactgctgcccctgctcccccccctctatcccaggacgtcccaggaagggcagacacatcgcagcctagtgcacggatgagggggcacggggaaccacggcggccaccatgcgatccattggctgatactattgatagctccggccccagcttaactctgcctaacgggggctgcttgtctgcagtaggactgcccctgggacctgggcgggaggccctggaaaaggccttggtcattcaggaaagtgaaaggcggaagaaactgaggttccacccaagacagctctacctgtctgtaaaacagggggaattgcaaaaggtgatccttatgcttctggataatctagatccaaactttcaatccgaccagcagtccaagaggacaccactgcacgccgccgcacaaaaaggttcggttgagatttgtcacgtgttgctgcaggccggggcaaatatcaatgccgtagataaacaacagaggacccccctgatggaggcagtagttaataatcatctcgaggttgcaaggtatatggtccagcgcggtggctgtgtgtattctaaggaggaagatggctccacctgtctgcaccatgcagccaagattggtaacctcgaaatggtcagtctcctgttatccaccggacaagttgatgtgaacgctcaggattcgggcggttggacacccatcatttgggcagccgaacacaagcatatcgaagtgattagaatgctgctgacgcgaggtgctgacgtgactctcactgacaacgaggaaaacatatgtcttcactgggcttcttttaccggatcggctgcaatagccgaggttctgctgaacgcccgctgtgacctgcacgctgttaattaccatggcgacacccctctgcatattgccgctagagaaagctaccatgattgcgtgctgctgtttctgtcccgcggggcaaatcctgaactgcgcaataaagagggcgatactgcttgggacctcacaccagagcggtccgatgtctggttcgcactgcagctcaatcggaagcttcggcttggcgtcggcaatcgcgctatccgcaccgaaaaaataatttgccgagatgtggcccgcggctacgaaaacgtgccaatcccatgtgtgaatggagtggacggagagccatgccctgaggattataagtacatttctgaaaattgcgagacatccaccatgaacatcgaccgcaacattacccacctccagcactgtacttgtgtggatgactgtagcagtagcaactgcctctgtggccaactttccatccgatgctggtatgacaaagacggccggcttttgcaggaattcaataaaattgagccgcctctgatctttgagtgcaaccaggcttgtagttgctggcgtaattgtaaaaacagggtagttcagtccggaatcaaagtccggctgcaactctaccgaacagccaagatgggctggggggtgcgggcattacagaccatccctcagggcacatttatctgcgagtacgtgggggagcttatctcagatgccgaggccgacgtccgggaagacgacagctatctgttcgatttggataacaaggacggcgaggtatactgtattgacgctcggtactatggaaacatcagcagattcatcaaccacctctgcgatcctaatatcattcccgtaagggtatttatgctccatcaggatctaaggtttccacgaatagccttctttagctcgcgggacatccggactggcgaggaactgggattcgattacggcgatcgcttctgggacattaaaagtaaatacttcacttgccaatgtggcagtgaaaaatgcaagcactctgccgaagctatagctcttgaacagagtcggcttgctaggcttgatccccatccagagctattgcccgagctcggctcgctaccccctgtgaatacctag

SEQ ID NO: 186949 - DNA, 3531 bp, synthetic construct
  misc_feature 1..3531: note = Description of Artificial Sequence: Synthetic coding sequence
  source 1..3531: mol_type = other DNA
atggccgccgccgccggcgccgccgccgccgccgccgccgagggcgaggccccagcggaaatgggcgccttactgctcgaaaaggagacgcggggtgccaccgagagggtgcatggaagccttggcgacactcctcgttcagaagaaaccctgcctaaagctacgcccgactcgctggaacctgcagggccaagcagtcccgcatcagtgaccgttactgtaggtgatgagggggcggacacaccagttggcgccactcccctcatcggcgatgagtccgaaaacctagaaggggacggcgatcttcgcggtgggagaatattgttaggacacgctacgaagagtttcccaagcagcccgtctaaaggtggctcctgcccaagccgggccaaaatgagtatgaccggagccggcaagagccccccgtcggttcagtcgttggcgatgcggttactctcaatgcctggggctcagggtgcagcggccgccggaagcgagccaccacccgccacaacatctcctgagggccagcccaaagtacaccgtgctcgaaagaccatgagcaagcctggcaatggacagccccccgtgcctgagaaaagaccaccggaaatccagcacttccgcatgagtgacgatgtgcatagcttgggaaaagtgacaagcgatctggccaaaaggcgaaaactgaattccgggggcggtttgagcgaagagctgggttcggcacggcgcagtggtgaggtgacactcaccaaaggggacccaggctctctggaggaatgggagacggtcgtgggagatgatttctctctctactatgattcatactctgtggatgagagggttgattctgacagcaagagcgaggttgaggccctaaccgagcaactctcagaagaagaagaagaagaagaggaggaggaagaagaagaagaagaagaggaggaagaagaggaggaggaggaggatgaagagtcaggtaaccaatccgatcggtcaggctccagcggccgcaggaaagcaaagaaaaaatggcgcaaagattcaccatgggttaagccttccaggaaacggcgcaagagggagcccccccgggccaaagagcccaggggtgtctctaatgacacttcttctctggagactgagaggggatttgaggagctccccctctgctcctgtcgcatggaggccccgaaaatcgatcgaatctcagagagagctgggcataagtgcatggcaaccgagagcgtggacggtgagctctccgggtgtaatgcagcaattttaaagagggaaactatgagacctagttctcgcgtggccctgatggtgctctgtgagactcacagagctcgtatggtgaagcaccattgctgcccaggctgcggttatttttgtactgctggcacatttcttgagtgccaccccgacttccgggtagcgcatagattccacaaggcctgcgtttctcaactcaatggcatggtgttttgtccccactgcggagaggacgcctccgaggcccaggaagtcaccatccccaggggggacggagttactccccccgcaggaacggcagcacccgcaccaccccccctctcacaagacgtccctggacgggccgatacatcccagccttccgcgaggatgcgcggccacggcgaacctcggaggcccccgtgtgatcccctcgccgacacgatagattccagcggccccagtctcacgctccccaatgggggttgtctctccgcagtaggtctccctcttggccccggaagagaagcactggaaaaggccctggtcattcaggaatctgagcgtcggaagaagttgcgttttcaccccaggcagctgtacctgtcagtcaaacaaggcgagctgcagaaggtcattctgatgctcctggacaatctggaccccaattttcagagcgatcagcagtcgaagagaactcccctgcatgcggcagcgcagaaaggcagtgtggaaatttgccatgtgctcctacaggcaggcgctaacatcaacgctgtggacaagcaacagagaactccacttatggaagctgtggtaaataatcacctagaggtggccagatatatggtgcagaggggaggctgcgtctatagcaaggaagaagacggcagcacatgcctccatcacgccgctaagataggcaacctcgagatggtgagtttactattgtccaccggccaggtggacgttaacgcccaggattctggcggatggactcccattatttgggctgccgaacacaaacatatcgaagtgatccgaatgctgctcacgagaggggccgacgtcaccttgaccgacaatgaggagaatatatgccttcactgggcctctttcaccgggagcgcagctatagcagaagtgctcctgaacgcacgatgcgacttgcatgctgttaattatcacggcgacacccccctgcatatagcagctagggaatcttaccatgattgcgtcttactgtttctgagtaggggcgctaatccagaactgaggaacaaggagggtgacactgcatgggacctaacccctgagagaagcgatgtgtggtttgcgcttcaactcaatcggaagttacgactaggggtcggcaatcgagccattcgcacagagaagatcatctgcagggatgtcgctcgaggatatgagaacgtcccgattccttgcgttaacggcgtagacggagaaccatgtcccgaagattataaatatatctccgaaaattgtgaaacttccaccatgaacatcgaccgcaatattacacacctccagcactgcacctgtgtcgatgactgttcatcctccaactgtctgtgcggtcaactctctatccggtgctggtatgataaagatggccggctgctccaggaatttaataagattgagcctcccctaatttttgaatgcaaccaggcttgctcctgctggcgcaattgcaaaaatcgcgtggtgcagagcggcatcaaggtcagacttcaactctatcgaactgccaaaatgggctggggagtccgagccctgcagacgatcccacagggaacatttatctgcgagtacgtcggtgaactaatcagcgacgctgaggcggacgtgagagaggatgacagctatctgtttgaccttgataacaaagatggggaggtttattgtatcgatgctcgttattacgggaacattagccgtttcattaaccatctctgcgatcctaatataattcccgtgcgcgtgttcatgctgcatcaggatctacggtttcctcggattgcattctttagcagccgtgacattcggaccggcgaggagctggggttcgactatggagatcgtttctgggatattaaaagcaagtatttcacatgccagtgtggcagcgagaagtgtaaacatagcgccgaagctattgccctggagcaaagtcgcctggcccggctcgatccgcaccctgagcttcttcccgaacttggcagcctcccccctgtgaacacatag

SEQ ID NO: 186950 - DNA, 3633 bp, synthetic construct
  misc_feature 1..3633: note = Description of Artificial Sequence: Synthetic coding sequence
  source 1..3633: mol_type = other DNA
atggccgccgccgccggcgccgccgccgccgccgccgccgagggcgaggcccccgccgaaatgggagccttgctgctggagaaggagacccgtggtgctaccgagcgggtgcatggttcattaggtgataccccccgttcagaagagactctgcccaaggcgactccagactcactggaacccgcaggcccatcttcaccggcatccgtgactgtgactgtcggcgacgagggcgctgatacccccgtgggggctactcccttgatcggcgatgaatctgagaaccttgaaggagacggagacttgcgcggtggccggatccttcttggtcatgctacgaaaagttttccttcatccccaagcaaaggaggctcttgccctagccgcgcaaagatgtccatgacaggcgccgggaagtctcctccttctgtccaaagcctggctatgcgtctgctgagcatgcctggcgcccagggtgcagccgccgccgggagtgagcctccccctgcaacgacttccccagaaggccagccaaaggttcatagagcgcgcaagacgatgtccaagcccgggaacggccagccaccggtcccagaaaagcgccctccagagattcagcacttccgtatgagcgatgacgtccacagccttgggaaggtgaccagcgatctggccaagcgaaggaaactaaactctggggggggactctccgaggaactaggaagcgcaaggcggagcggcgaagtgactctgacaaagggtgatccagggtccctcgaggaatgggagactgtggtgggcgatgatttcagcttatattacgactcatacagtgttgacgagcgggtagattctgactccaaaagcgaagtggaggcccttactgagcagctgagcgaagaggaagaggaagaagaagaggaggaagaggaggaggaggaggaggaggaggaagaggaagaggaggaagacgaggagtcaggcaaccagtctgaccggtccgggtcatccggcaggcgaaaggccaagaagaagtggagaaaggactctccttgggttaagccgagcagaaaacgcaggaagcgcgaacccccaagggctaaagagccaaggggcgttaacggagtgggctcatccgggcccagcgaatacatggaggtgccgctcggatctctggagctcccctcagagggcactctaagtcctaaccatgccggcgtgtcaaatgacacaagctcattggaaaccgagcggggtttcgaagaactaccactttgcagctgcagaatggaagcccctaagatcgacaggatatctgagcgcgcagggcacaagtgcatggctacggagtcagttgacggggaattaagcggctgcaacgccgctattttaaaaagggagactatgaggccttcttcccgtgtggccctgatggttctgtgtgagactcatagagctcgaatggtaaagcatcactgctgtcccggatgtggctatttctgtacagcgggcacctttctggaatgtcacccggatttccgggtggcgcataggttccataaggcctgcgtgtctcaattgaatgggatggtgttctgcccacactgtggcgaagatgcatctgaggcacaggaggtgaccatccccagaggagatggggtgacgccacccgcgggaaccgccgcccccgccccgccacccctcagtcaggatgtcccaggaagagccgatacttcccaaccttcggccagaatgcgcggccatggtgaaccacggcggcctccatgtgatcccctcgctgatacaatcgatagctcagggccatctcttacgctgcccaacggaggctgtctatctgccgtgggactgcctttgggccctggcagagaagccttggagaaagcgcttgtgatccaggaatctgagcgacggaaaaagctgcgcttccatccaaggcagctttacctctccgtaaagcagggagaattacagaaagtgatactgatgttgcttgacaatctggaccccaatttccagagcgaccaacagtctaagcgcacgccactgcatgctgcagcccagaaggggtccgtggagatttgccatgttctgctgcaggccggagccaacatcaatgctgttgacaaacaacagagaacccctctcatggaggccgtcgtgaataaccatctggaggttgcccgctacatggtccagagagggggctgcgtgtattccaaagaggaagatggatccacctgcctgcatcacgccgcaaaaattggaaacctcgaaatggtgtccctcttgctgagtactgggcaggtcgatgtaaacgcccaggatagcggaggttggactcctattatctgggccgcggagcataagcatatcgaggtgatcagaatgctgctgactcgcggcgctgacgtcacactgacagacaacgaggagaatatctgtctgcactgggcctcttttacagggagtgcagccatcgcggaagtcctgctaaacgccaggtgtgacctccatgccgtgaattaccatggagacacacccctgcatattgccgcccgcgaaagctatcacgactgtgtgttgttgtttctttctagaggggcaaacccagaactcagaaacaaggaaggtgacactgcctgggatctgacccctgaacgctccgatgtatggtttgccctccagctcaaccgcaagctaagattgggggtgggcaatcgagcaattcgcacagagaagatcatctgcagagatgttgccagagggtatgagaatgtgccaatcccctgtgtgaatggggtagatggggagccttgtcctgaggattataaatacatatccgaaaactgtgagacaagcacaatgaatattgatagaaatataacacacctgcagcattgtacatgtgtggacgattgctccagcagcaactgcttgtgtggccaactgtccattcggtgctggtacgacaaggacggaaggctgttacaggagttcaacaagattgagccccccctgatatttgagtgtaaccaagcctgctcatgttggagaaactgtaaaaatagggtcgtccaatcaggtattaaggtcaggctccagctgtatcggactgctaaaatgggctggggagtgcgagcactccaaactatcccccagggcactttcatctgcgagtatgtgggggagctgatctcggacgcagaagccgatgtccgggaggacgactcctatctgtttgacctggacaacaaggacggcgaagtgtactgtattgatgctagatactatgggaacatctccaggtttattaatcacctctgcgaccctaacatcataccagtgcgcgtgtttatgttgcaccaggaccttaggtttccacgcatcgcgtttttctcctccagagacattagaacaggggaggaactgggttttgactacggggaccggttttgggatattaagtcaaagtattttacttgtcagtgtggttccgagaagtgtaagcatagcgctgaagcgatcgcattagaacagtcgcgactagctcggttggacccccatcccgagcttttgccagaactggggtcactgccaccggttaatacctag

SEQ ID NO: 186951 - DNA, 3804 bp, synthetic construct
  misc_feature 1..3804: note = Description of Artificial Sequence: Synthetic coding sequence
  source 1..3804: mol_type = other DNA
atgcggggcctgccccggggccggggcctgatgcgggcccggggcagaggcagggctgctccccccggctcacgcgggagaggacgcggggggccgcatagggggagagggaggcccagaagccttctttccctgcctcgagcccaagcctcctggactccccagctgagtaccggccttacgtcaccacccgtcccctgtttaccctcccaaggtgaggcccctgccgaaatgggagctttactgcttgagaaagagaccaggggggccacagagagagtacatggctcattgggagataccccacgcagtgaagagactttgcccaaggccaccccggacagtctcgagccagccggtccaagctcgcccgctagcgtgaccgtcacggtaggagacgagggtgctgatactcctgtcggcgccacaccattaattggggacgagtcagaaaacttggaaggcgatggggatttacggggcgggcgcatcctcctggggcatgcaactaagagttttccgagtagcccgagcaaaggcggatcttgtccaagtcgagctaagatgtctatgactggtgcaggaaaatcaccaccttctgtgcagtccctggctatgcgcctcttgtcaatgcccggagcgcagggagcagcggcagccgggtctgagcccccaccagcaacgacgtcaccggagggccagcccaaagtgcacagggccaggaagactatgagtaagccaggcaatggccaaccccccgtcccggaaaaacgcccacctgaaatccagcacttccggatgtctgacgatgtccattctcttggcaaagtgacaagtgatttggccaaacgcaggaagcttaattctggcggaggactcagcgaagagctagggtctgcccgccgctcaggagaagtcacacttaccaagggagatcccggctccctggaagagtgggagaccgtggtcggcgatgacttttcactgtactacgattcatatagcgtcgatgaaagggtggactccgatagcaaatctgaggtagaggcccttacagagcagctctccgaggaagaagaggaggaagaagaagaagaagaagaagaagaggaagaggaggaggaggaggaggaagaggaagatgaagaaagcggaaaccagtcagaccggtccggctcctcggggcggcgcaaggctaaaaaaaagtggcggaaggatagcccctgggtaaaaccaagcagaaagaggaggaaaagagagcccccacgcgccaaggagccacgtggggtgaacggcgtagggtcttccgggccttccgagtacatggaggtgcccttgggaagtctagagctccccagcgagggcaccttgagcccaaaccacgctggtgttagtaacgatacttcaagccttgagacggaacgagggttcgaagaactacctttatgtagctgccgtatggaggcaccgaaaatcgaccgcataagcgagcgcgcagggcacaaatgcatggccacggaatccgtggacggtgaacttagcggatgcaacgcagcgatactcaagagagaaacaatgaggcctagcagcagggtcgctctcatggtgctctgcgagacccatcgtgcacgcatggtgaagcatcactgctgtcctggatgcgggtacttttgtacggctggtacttttctcgagtgtcacccagattttcgcgtggctcacaggttccacaaggcttgcgtctcccagttgaatggaatggtgttttgcccccactgtggcgaggatgcttcggaggcccaggaggtgacaatcccccgaggtgacggtgtaacccccccggctggcaccgccgcccctgccccacccccactgtctcaggatgtgcctggcagagcagataccagtcagccttctgcccgaatgcgaggacacggggagcctcgccgcccaccttgcgatccgttagccgacacgatcgactctagcggaccttcgctgacactcccaaacgggggttgtttgtccgcggttggattgcccctgggccctggtcgggaagcacttgagaaagcccttgttattcaggaaagcgaacggcgcaaaaagctccgctttcatccccgccagctgtacttatcagttaaacagggcgagctacagaaggttatcctgatgctgttagataatctcgatccaaactttcaatccgaccagcagtctaagaggacacctctgcatgcagccgcacaaaagggctcggtggaaatttgtcacgtgctcctacaggccggagcaaacatcaatgccgtggacaaacagcagcggaccccactgatggaagccgtggtaaataatcatctggaagtagcgagatacatggtgcagagaggcggatgtgtgtactccaaagaggaggatggcagcacctgcttacaccacgccgccaagatcggaaatctggagatggtgagcctcctcctctccaccgggcaggtcgatgtgaacgctcaggactctggcggatggactcccattatctgggcagcggaacacaaacatatcgaggtgatccggatgctcctcactaggggcgccgacgtgaccctgactgacaatgaagagaacatctgcctgcactgggcttcttttacggggagtgccgcgatcgcagaagtactccttaatgcgcggtgcgacctgcatgccgtaaactaccacggcgacacacctttacatatcgctgcccgagagtcttaccatgattgcgttctgctattcttatctcgaggggccaaccccgagctgcgcaataaggaaggggatactgcctgggatctcacgcccgagcgatctgacgtgtggtttgcactacagctgaacagaaaactgcggctgggcgtaggcaatcgcgccatcagaactgagaagattatctgccgtgacgtagcgaggggctacgagaacgtgccgataccttgtgtaaatggggtggacggggaaccatgtccagaggattataaatatatttccgaaaattgcgagacttcaactatgaacattgataggaacatcacacatctccagcactgtacatgcgtggacgattgctcctcttcaaactgcctctgcgggcagctgtcaattcggtgctggtacgacaaagacggccgtctgctgcaggaattcaataagattgaacccccactcatctttgagtgcaaccaggcatgctcttgctggaggaattgcaagaaccgcgtggtgcaatcagggatcaaagtaaggctccagctgtatcggaccgcgaagatggggtggggagtgcgggccctgcaaactatcccccaaggcacctttatttgtgagtacgtcggggagctgatttcagacgccgaggcagatgttagagaagatgattcttatctattcgatctcgataataaggatggggaagtgtattgtatcgacgcgaggtactatggtaatatctccagatttattaaccacctgtgcgatccaaatattataccagtgcgggtcttcatgctgcaccaggatctccgcttccctaggatcgcatttttttccagcagggacattagaaccggtgaagaactgggattcgactacggcgacagattttgggatatcaaatcgaaatactttacatgtcagtgtggcagcgaaaagtgtaagcactctgctgaggccatcgccctggagcaatctcggcttgctcggctcgatccacatccggagctgctgccggaattgggctcgctacccccagtgaacacctag

SEQ ID NO: 186952 - DNA, 3804 bp, synthetic construct
  misc_feature 1..3804: note = Description of Artificial Sequence: Synthetic coding sequence
  source 1..3804: mol_type = other DNA
atgcggggcctgccccggggccggggcctgatgcgggcccggggccggggacgcgctgctccccctggtagtcgaggccgtggacggggagggccccaccgcgggagaggcaggccacgcagtctgctttcgttaccaagggcccaggcctcctggacaccacagctttccacgggcctcacctcgccccccgtgccttgtcttccgtctcagggagaagcaccagctgaaatgggggcactgctgctggaaaaggagacgaggggagccaccgaacgagtgcatggcagtctgggagatactcccaggtcagaagagaccctgcccaaggcgacgccggatagcctcgagccggccggaccatcgtcgccggctagcgtgaccgttaccgtgggtgatgagggagccgacactcctgtgggggctacacccctgatcggagacgaatctgagaacctggaaggggatggagacctacgcggaggtcgtatccttcttggtcacgccactaagagttttccaagttctccttcaaaaggcggcagttgtccatcccgcgcaaagatgtctatgaccggggcaggaaaaagcccacccagcgtccagtcattggccatgcggcttttatctatgcctggcgcccaaggtgctgccgccgctggttccgaacccccgcctgccaccacaagcccagaggggcagccaaaggtgcacagggcacggaaaacaatgagcaagcccggaaacggacagccccccgttcccgagaagcggcccccagagatccagcactttagaatgtccgacgacgttcactccctgggaaaggtcaccagtgacctcgcaaagcgcagaaagctgaatagtggcgggggtctaagtgaggagctgggttctgcccggcggtctggggaggtaacccttaccaaaggcgatccagggtccctggaagagtgggaaacagtggtgggggacgatttctcgctctattacgattcttacagcgtagatgaacgtgtggactccgactccaaatctgaggtggaagctcttactgagcagctgagcgaggaggaagaggaggaagaggaagaggaggaagaggaggaagaagaagaggaagaggaagaggaagaggaagatgaggagagcggcaaccaatctgaccgcagtgggtcctccggaagacgtaaagctaagaaaaagtggaggaaggatagcccatgggtgaagccatccagaaagagaaggaagcgtgaaccccctagagctaaggagcccaggggagtgaacggcgtgggttcttccggaccctcagagtatatggaagtgcccttgggcagtctagagctgccctctgaagggactctctccccaaaccatgccggtgtttctaacgatacctcgagtctggagaccgaacgtggctttgaggagctgccactatgcagttgtaggatggaagccccaaagatcgacaggatctccgagagggccgggcataaatgcatggcaaccgaatctgttgacggggagttatccggttgtaacgctgcaatcctaaagcgagagaccatgcgaccctcttctcgagtagcactgatggtgctgtgcgagactcaccgcgcgagaatggtgaagcaccactgttgtccaggttgcggttacttttgcactgcaggcacgttcctggagtgccaccccgattttcgtgtcgcccatcgattccataaggcgtgcgtgagtcagctcaatgggatggtattttgcccccactgcggcgaggacgctagtgaagcacaggaagttacgattccgcgaggggatggtgtcaccccccctgctggcaccgcagcccctgcacccccccctctatcacaagatgtgcccggtagggcagacacaagccagccaagcgctcgcatgaggggacacggggagcctagaagaccaccctgcgaccctctcgcagatacgattgactcctccgggccctctctgacactgccgaacggcggttgtctgtccgccgtgggactcccactgggccctggacgcgaggcactggaaaaagctttggttatccaagaatcggaaaggcggaagaagctcaggttccatcctcgccagctgtatctgtctgttaaacagggggagttgcagaaggtcatcctgatgctgctggataacctcgaccctaactttcagagcgaccaacagtctaagcgtacaccacttcatgccgcagcgcagaaaggatcggtcgagatttgccacgtgctcttgcaagctggggctaatatcaacgccgtcgacaaacagcagaggacacccctcatggaggccgtcgtgaacaatcaccttgaggtggccagatacatggtccagaggggaggttgtgtctattctaaggaggaggatggcagcacttgtttgcaccatgcggccaagattgggaacctggagatggtcagtctgcttctgtccactggccaagtggatgtcaacgcgcaagactcaggcggttggacacccatcatttgggctgctgaacataagcatatcgaagttattaggatgctcctaacccggggggccgatgtgactctcaccgacaatgaggagaatatctgtctacactgggcatcctttactggatcagccgccatcgctgaggtactgctcaacgctaggtgcgatttgcatgccgtaaactatcacggggacacacctctgcatatcgcagccagagagagttatcacgattgtgttctgttattcttgagccggggcgcaaacccagaactgcgtaataaagaaggggatactgcttgggatctgacacctgaaagatcagatgtttggttcgcactgcagttaaatcggaagcttcgacttggagtgggaaaccgcgcaatcagaacggaaaagattatctgcagagacgtagctaggggctatgagaacgtgccaataccatgtgtcaatggagttgatggtgagccatgcccagaggattataaatatatctctgaaaactgtgaaacatcaaccatgaacattgatcgaaatatcacccacttgcagcactgcacttgcgttgatgattgcagctcctctaactgtctgtgtgggcaattgtccatccgatgctggtacgacaaggatggaagactgctccaggagtttaataagattgaacccccactgatctttgaatgtaatcaggcatgttcttgctggcgcaactgcaagaacagagtcgtgcagtcggggatcaaggttcggctgcaactgtaccgcacagcgaagatgggatggggggtgcgcgcgctccagactatcccccagggcacattcatctgcgagtacgtgggggagcttatctctgacgcggaggccgatgtgagagaagatgattcctatctatttgacctagataataaagacggcgaagtctattgtatagacgcacgctactacggcaacatctcgcggttcattaatcacctgtgtgacccaaacattatccccgtgcgcgtttttatgctgcaccaagacctgcgctttcctaggattgcgttcttttcgagccgagatataaggacgggggaggagttgggctttgactatggcgatcgcttctgggacatcaagagcaagtatttcacgtgccagtgcgggagcgaaaaatgtaagcacagcgctgaggctatcgctctggaacagtcccgcttggcgcgcctggacccccaccccgagcttctccccgaactgggtagtttacctcccgtgaacacttag

SEQ ID NO: 186953 - DNA, 3702 bp, synthetic construct
  misc_feature 1..3702: note = Description of Artificial Sequence: Synthetic coding sequence
  source 1..3702: mol_type = other DNA
atgcggggcctgccccggggccggggcctgatgcgggcccggggccggggacgagccgcgccaccaggctcaaggggacggggaaggggtgggcctcacagaggacgaggcagacctaggagcttactgtccctgcccagagcccaggccagctggacaccacaactgtctactggccttacctctccccctgttccgtgcctaccctctcaaggtgaggccccagcggagatgggcgcgttactgctggagaaggaaaccaggggggcaaccgagagggttcatggatcccttggcgacacacccagatctgaggagaccctgccaaaagcgactccagactccctggagccagctggccctagctctcccgcctccgtcactgtgaccgtgggggacgaaggagccgacacccctgtcggggccaccccccttatcggggatgagtccgaaaatctggaaggcgatggagacctgagaggcggccggatcctgctgggccacgctactaaaagctttccatcgagtccatccaagggcgggtcgtgcccaagtagagccaagatgtccatgacaggcgcaggcaaatcacctccatctgtgcagtctctggcaatgaggttgctgtctatgcctggagctcagggggccgccgccgccggctccgagccgcctcctgccaccactagcccggaagggcagccaaaagtgcaccgggctaggaaaacgatgtcaaaaccgggtaacggtcagccccctgtgcctgaaaagcgtcccccagaaatccagcacttccgcatgtctgatgacgtccactctctcggaaaagtgacttctgatctggccaagcggcggaagctgaatagcggtggcggcttatctgaggagcttggatcagctaggagaagtggcgaggtgactctgactaaaggcgatcctggcagtctcgaggaatgggaaacagtcgttggggacgacttctctctatattatgacagctatagcgttgacgagcgtgtagactccgattccaaatcggaagtggaggccctaacagaacaattgtccgaggaggaagaagaagaagaggaggaggaagaggaggaggaagaggaggaagaagaggaggaagaagaagaggacgaggagagcggaaaccagagcgatagaagcggtagtagcgggcgccggaaagctaagaagaaatggcgcaaggactcgccgtgggtcaaaccatcccgcaagcgacgtaagcgagagcctccaagagccaaagaaccgaggggcgtgtctaacgataccagttcgctggaaactgaacgcggtttcgaggagcttccactctgctcatgccggatggaagcccctaagatcgacagaatctctgaacgcgccggccacaaatgcatggctaccgaatccgtggacggcgaactgtccggctgtaacgccgccatactcaagcgggaaacaatgaggcctagctctcgggtggctcttatggtactttgtgagactcatcgagctcgtatggtcaagcatcactgttgtccgggttgtggatacttttgtacagcaggtacctttcttgaatgccacccagatttcagagtggcgcaccggttccacaaggcctgtgtctctcagctgaacggtatggtattttgccctcactgcggagaggacgctagcgaggcgcaggaggtgacgattccaagaggagatggggtgaccccccctgctggcacagccgccccggcccctcctcctctgtcccaggacgtcccggggcgtgctgatacaagtcagccaagcgcccggatgagagggcacggggagccgagaagacctccctgtgaccccctggcagatacaatagacagttccggcccgtctctaaccctgcccaatggcggatgcctctcagccgtaggcttgccactgggacccgggcgcgaggccctagagaaggctctggtcatacaggaaagtgaacgacggaaaaagctccgttttcatccccgccaattataccttagtgtgaaacagggggagctgcagaaagtgattctgatgctcttggacaatctggaccctaacttccagagtgaccagcagtctaaaagaactccactacatgccgcggcccaaaaaggcagcgtggagatctgccacgtgttgctccaggccggtgccaacatcaatgccgtcgataaacagcagcggacgcctcttatggaggccgtcgttaacaaccacctggaagtcgcaaggtacatggtccagcggggagggtgtgtgtatagcaaggaagaggatggcagcacctgtcttcaccacgcggccaagatcggtaacttagaaatggtgagtctcttgctgtccacaggccaggttgatgtgaatgcacaagacagcggcgggtggactccgatcatctgggccgccgaacataagcacatcgaagtgattcggatgctgctgacgaggggcgcagatgttacactgacagataatgaggagaacatttgtctgcattgggcctccttcaccggaagcgccgctatcgccgaagtgctgctcaacgccaggtgtgacctgcatgccgtaaattatcacggtgatacacctcttcacatcgctgcacgcgagtcgtatcacgattgcgtactcctgtttctcagcaggggcgcgaaccctgagctgaggaacaaagagggtgatacagcctgggacctgacgcctgagcggtctgatgtatggttcgcactccagcttaatcggaaactacggcttggggtcgggaatcgggcgatccgaactgaaaagattatttgtcgcgacgtagctagagggtatgaaaacgtgccgattccgtgcgtcaatggcgtggatggggaaccttgtccagaagactataagtatatctctgaaaactgtgagacctccaccatgaacatcgatcggaacatcactcacctacaacactgcacttgcgttgacgactgctctagctctaattgcttgtgcggccagctctccatccgatgctggtatgacaaggatggacggttgctccaagagtttaataagatcgaaccacctctgatttttgagtgcaatcaggcctgctcttgttggcggaactgcaagaatagagtggtgcaaagtggaattaaggtaaggctccaactgtatcggactgctaagatgggttggggggttcgggctctgcagacgattccccagggaacatttatctgcgaatacgttggggagctgatctcagatgcggaagcagatgtgagagaagacgactcatatttattcgatctagataacaaggatggggaggtttattgtatcgatgctcgttattacggtaacatttcccgcttcatcaaccacttatgcgacccaaatattatccccgttcgcgtgttcatgctgcaccaggacctccggtttcccaggatcgctttctttagctcccgggatatcagaactggcgaagaactggggttcgactacggagacaggttctgggatattaaatctaaatacttcacgtgtcaatgcggttccgagaaatgcaaacatagcgctgaagccatagccctggagcagtctcgcctggcccggctggacccccatccagagctcttaccagaactaggctctctgccaccagtgaatacctag

SEQ ID NO: 186954 - DNA, 3804 bp, synthetic construct
  misc_feature 1..3804: note = Description of Artificial Sequence: Synthetic coding sequence
  source 1..3804: mol_type = other DNA
atgcggggcctgccccggggccggggcctgatgcgggcccggggccgagggcgggcagcacctcccggatctcgaggtcggggccgagggggccctcatagggggcgaggtcgccctagatctttactgagtttgccccgagcccaggcctcttggaccccccagctgtcgacggggctcacaagtcctccagtgccatgcctccctagccagggggaggcacctgccgaaatgggagctctgttacttgagaaggaaaccaggggtgccactgaacgggtgcacggctccctcggtgacactccaagatccgaagagacgcttcccaaagccaacccagactcgctggaaccggcaggacccagctcacctgcctcggtgactgtcaccgtcggagatgagggcgcggataccccagtcggggccacgccccttattggggacgagagcgagaacttggagggcgacggcgatttgagagggggaaggattctactgggacacgccactaaaagtttcccatcaagcccgtctaagggcggatcatgtcctagcagagcaaagatgtctatgaccggagcaggtaagtcacccccctctgtgcagagtttagccatgcgactcctaagcatgccgggtgcccagggagccgcggctgccggatcagagcccccccctgcaacaaccagccccgaggggcaaccgaaagtacacagggctcgtaagactatgtcaaagcctggaaatggtcagcctcccgtgcctgagaagcgcccacccgaaattcagcattttaggatgtccgatgatgttcattctctaggcaaagtgacaagtgacctggccaaacggagaaagctgaactctgggggcggtctctcagaagaacttggcagcgccagaaggagcggggaagttactttgactaaaggcgatccggggagcctggaagagtgggagacagttgtgggtgatgacttttcactttattacgattcctattctgttgacgaacgcgtcgactccgattctaagtctgaagtcgaagccctgacagaacaactctcggaagaggaggaagaggaggaggaggaggaggaggaggaagaggaagaggaggaggaggaagaggaagaagaagacgaggagtccggcaatcaatcagatcgttctggatcctccggtcggcggaaagccaaaaagaagtggaggaaggactccccatgggtcaaaccttctaggaaacgcagaaagcgggagccccctcgcgccaaagagcccagaggcgtcaatggagtcggaagcagtgggccgtccgaatatatggaagttccattagggtcgttagagctgccgtccgagggcacgctaagccctaaccacgccggcgtatctaacgatacatcctccctggaaacagaaaggggctttgaagagcttcctctgtgcagctgccggatggaggcacctaaaattgaccggatcagcgaacgcgcaggacataaatgcatggcaaccgaaagcgtagacggcgaactcagcggatgcaatgccgccattctcaagagagagacaatgcgcccatcctcccgggtcgcgctaatggttctctgcgaaactcatcgggccaggatggtgaagcatcattgctgtcctggatgcggctacttctgtaccgcaggcacgttcctggaatgccacccagacttccgggtcgcacatcggtttcacaaggcctgtgtctctcagttgaatggaatggtattctgtccgcactgtggggaggatgctagtgaagcacaggaggtgactatccctaggggggacggggtaacgcctccggcaggcactgctgcaccggccccccctcccctcagtcaggacgtccccgggagggcagacactagccagcctagtgcacggatgcggggacatggcgagccgcggcgcccgccctgcgaccctttagccgacacgatcgactcttcggggcccagccttacattaccaaatgggggttgcctttccgcggtgggtttgcccctgggacccggccgcgaggcactcgagaaagccttggttattcaggagtctgaacgtcgcaagaagctgagattccatcccagacagctgtacctttccgtgaagcagggcgagttacagaaggtcatcctcatgctgctggacaatctggacccaaatttccagagcgatcagcaatctaagcgaacaccgctccatgccgcagcccagaagggaagtgttgagatctgccacgtgctcctgcaggctggggctaacattaatgccgttgacaagcaacagagaacacctctgatggaggcagtcgtgaacaatcacctggaagtggctcggtacatggtgcaacggggtgggtgcgtgtatagcaaggaagaggatggctctacgtgcctgcaccatgcagccaaaatcggtaaccttgagatggtgagccttctgctgtcaacgggacaggtagacgtgaatgctcaggacagtgggggttggacacccatcatctgggccgctgagcacaagcacattgaggtgatccggatgctgctcacacggggcgcggatgttaccttgacggataatgaagaaaacatatgcctgcattgggcgagcttcactggttccgcggccatcgcagaggtgctgctgaacgcacgctgcgacctccacgcggtgaattatcacggcgataccccgcttcatatcgccgcccgcgagagttatcatgactgcgtccttctatttctgtcaaggggagcaaatcctgagctcaggaacaaagagggcgataccgcatgggatctgacacctgagcgatctgacgtttggttcgctttacagctgaatagaaagctgcgcctaggtgtcggcaatcgagccattcgtactgaaaaaatcatttgtagagatgttgcccgaggttacgaaaacgtgcctatcccatgtgtgaatggcgtggacggagaaccttgcccggaagactataagtacatttccgagaattgtgagacatcaaccatgaatatagatagaaatataacgcaccttcaacactgtacgtgtgtggacgactgcagcagctccaattgtctttgtgggcagctttctatccggtgctggtacgataaagacggaaggttgttgcaggagttcaataaaatcgaacctccgctgatatttgagtgcaatcaggcttgctcgtgttggcggaattgcaagaatcgagtggtgcagtccgggataaaagtccgcctgcaactatatcgcacagccaaaatggggtggggcgtgagagcactccagacaatcccacaaggaacgttcatctgcgagtatgttggcgagctgatcagtgatgctgaagccgatgtgagggaggatgacagttacctgttcgacctggataataaagatggcgaggtgtattgcatcgatgcccgctactacggcaatatctcgcgttttattaaccacctttgtgatcccaacatcattcccgtgcgggttttcatgcttcaccaggacctgaggttcccaagaatagccttttttagcagccgtgacatccgcaccggggaagagttgggatttgactatggggataggttctgggacatcaagagtaagtactttacctgccagtgtggttctgaaaaatgtaagcacagtgcagaggcaatcgccctagaacagtcccggctggcgcgcctggaccctcatcctgagctcctacccgaactcgggtccctgcccccggtcaacacgtag

SEQ ID NO: 186955 - DNA, 897 bp, synthetic construct
  misc_feature 1..897: note = Description of Artificial Sequence: Synthetic coding sequence
  source 1..897: mol_type = other DNA
tgaagcaagcggacccccctgcacgccgccgcccagaagggcagcgtcgaaatttgtcacgtcctgctccaagcaggggcaaatatcaatgctgtggataagcagcagaggactcctcttatggaagcagtagtcaacaatcatcttgaggtcgcccggtacatggtgcagcgcggcggctgcgtgtactccaaagaggaggatgggtcaacatgcctgcaccatgctgccaagatcggaaaccttgagatggtgagcctcttgttgtctacaggccaggtggacgtgaatgcccagggccagctgccaccgccaagcttaccatcccatccgcaggatagtggcgggtggaccccaataatctgggccgctgagcacaagcatatcgaagtcattcgcatgttgttgacaagaggcgccgatgtgacccttacggacaatgaagaaaatatttgtctgcactgggcctcatttaccggctcggccgcaatcgctgaggtgctcctgaacgctcggtgtgatctgcacgccgtgaattaccacggcgatacaccgctgcacatcgcagcacgggagtcctaccatgattgtgtcctgctgtttctcagccggggtgccaatcccgagctaagaaacaaagagggggataccgcctgggacctgacacctgagaggagtgacgtgtggtttgcactgcagctcaacagaaaactgagactgggggtcgggaacagggcaattcgcaccgaaaaaatcatctgccgggatgtggcgcgggggtatgaaaatgtgccaatcccatgcgtgaacggggtggacggagagccttgtcctgaggactacaaatacataagcgaaaattgcgaaacgtccaccatgaacattgaccgcaattag

SEQ ID NO: 186956 - DNA, 3633 bp, synthetic construct
  misc_feature 1..3633: note = Description of Artificial Sequence: Synthetic coding sequence
  source 1..3633: mol_type = other DNA
atggccgccgccgccggcgccgccgccgccgccgccgccgagggcgaggcccctgctgagatgggcgctctgcttctggagaaggaaacaagaggagctacggagcgggtgcatgggagccttggagacactccccgttcagaggaaactctgccaaaagcaaaccctgatagcctggaacctgctgggccgagctcccctgcgagcgtgaccgtgactgtcggagatgaaggcgctgacacaccagtcggggccactccgctcatcggggatgagtctgaaaacctggaaggggatggcgaccttagaggaggccggattctgctgggacatgccactaaatccttccctagcagccccagtaaaggcggctcatgtccctcccgcgcaaagatgagcatgactggcgcgggtaagtccccccctagcgtccagagcttggctatgaggctcttatccatgcccggggcccagggagcggctgcggccggcagcgaacccccacctgcaactacatctccagagggacagcccaaggtgcatagagctcgcaagaccatgtccaagccaggtaacggacagccccctgtcccggagaagaggccccctgagattcagcacttcaggatgtctgatgatgtacattcgctgggcaaggtgacctccgatttagccaaacgccgaaaattaaactccggaggtggtctgtctgaggaactgggctctgccaggcggtctggagaggttacgctgacaaagggagaccccgggtctctggaggagtgggagactgtggttggagacgacttttcattgtactacgactcttatagcgtcgatgagcgagtagatagtgatagcaagtctgaagtcgaggccctgacagaacagctgtctgaggaagaggaagaagaagaggaggaggaggaagaagaagaagaggaagaggaagaagaagaagaggaggaggacgaggaatcaggaaaccaatcagaccggagtggatccagcggccgtagaaaggctaagaagaaatggaggaaagactccccttgggtgaagccctctcgcaaacgtcggaagagggagccgccccgcgccaaagagccccgcggcgtgaatggggtgggatccagtggcccgtcggagtacatggaggtgcctctgggctctctagagctcccctcagaggggacgttgagccccaatcatgccggcgttagtaatgatactagctccctcgaaaccgaaaggggattcgaggagttgcctttgtgctcttgccggatggaagccccaaaaattgatcggatatccgaacgcgctggacacaagtgcatggctacagaaagtgtggacggagagctgagcggctgcaacgctgccatcctgaagagggagacgatgcgcccttcttcccgggttgcactgatggttctgtgtgagacccatcgtgcccgcatggtaaagcaccattgttgccctggttgcggttatttctgtacagcgggcacttttctggagtgtcatccagacttccgcgtggctcacagattccataaggcatgcgtgtcacagctaaatgggatggtgttctgccctcattgcggagaagacgcaagcgaggctcaggaggtgactattccaagaggcgatggagtgaccccccccgcaggcacagctgctcctgccccccccccactctcacaggacgttccaggccgagccgatacttctcagccttccgcacgtatgagaggccacggcgaaccacgccgtcccccatgtgatcctctggctgacacgatcgacagcagtggccctagccttaccctgccgaacggcggctgtctgtcagcggttggcctgcctttagggccaggcagggaagcgttggagaaggccctggttatccaggagtctgaacgccgcaagaaactccggttccaccctagacaactctacctctccgtaaaacagggcgaacttcaaaaggtaattctcatgttgcttgataacttagatcctaactttcaaagcgaccagcaatcgaaacggacccccctgcacgcagccgcccaaaagggcagcgttgagatttgccatgtactgctccaggcgggtgccaatattaatgctgtagacaagcagcagcggactccactcatggaagctgtagtgaacaaccatttggaggtagccaggtatatggtgcagaggggtggatgcgtctactcaaaagaggaggatggatctacatgcctgcatcacgctgcaaaaatcggcaacctcgaaatggtatcccttttgctatccacaggccaggtcgatgttaacgcccaggattctgggggctggaccccgatcatttgggctgccgaacataaacacattgaggtcatacgaatgctcctgacacgtggggcagacgtcaccctcactgataatgaggagaacatctgcctccattgggcttcctttaccggttctgctgcaatcgcagaggtgctgctgaatgccagatgcgacttgcacgctgtcaattaccacggagacacacccctgcatatagccgcccgcgaatcctaccacgactgcgtcttgttgttcctctctcggggcgctaatcccgaactgaggaacaaagagggcgatacagcgtgggatcttactcctgaacgatccgatgtatggttcgcgctgcaattaaaccggaagctgcgtctgggggttggaaatcgggctattagaactgagaaaattatttgcagggatgtcgctcgtggttacgagaacgtccctattccttgtgtgaacggcgttgatggagaaccgtgccctgaggattacaagtatatctctgaaaactgtgaaacttcgacaatgaatatcgatcgtaatatcacccatctccaacactgtacatgtgttgacgattgttctagttctaactgtttatgcggacagctgtcaattcgctgttggtacgacaaggacggacggttgctgcaggaatttaataaaatagaaccacccctgatctttgaatgtaatcaagcgtgcagttgctggcggaactgtaaaaaccgagtagtgcagagcgggattaaagttaggcttcagctctatcgaacagctaagatgggttggggcgttagggcgttgcagactataccccagggaacctttatctgcgagtacgttggcgaattgatctcagacgcagaggctgacgtgcgcgaggatgattcatacttgttcgacctggataacaaagacggcgaggtgtactgcatagacgcgcgttattacgggaatatcagcaggtttataaaccatctctgtgatcctaatattattccagtgagagtgtttatgttgcatcaggatctgaggtttccccggatcgcctttttcagcagtagagacatccgcactggcgaggagttaggctttgactacggcgataggttttgggacatcaagagcaaatacttcacgtgtcagtgtggcagcgaaaagtgcaagcactcagcagaagccattgccctcgagcaaagccgacttgcgagacttgacccacacccagagttgctgccagagttgggcagcctgccacctgtaaatacttag

SEQ ID NO: 186957 - DNA, 897 bp, synthetic construct
  misc_feature 1..897: note = Description of Artificial Sequence: Synthetic coding sequence
  source 1..897: mol_type = other DNA
tgaagcaagcggacccccctgcacgccgccgcccagaagggcagcgttgaaatttgtcatgtactgctacaggccggcgctaacatcaacgctgttgacaaacaacagcgcacccccttgatggaagctgtggtcaataaccacctggaggttgcaaggtatatggtgcagcggggcgggtgtgtgtattcgaaggaagaagatggcagtacctgtcttcatcatgcggctaagattggaaacttggagatggtgtctttgctgctctccacaggccaggtggatgtgaacgcccagggtcagttacctcctccatccctaccttcgcaccctcaagactcaggtgggtggaccccgatcatctgggcagccgaacacaaacacatagaagtaatcaggatgcttctaacacggggcgcagacgtgacactgaccgataatgaggaaaacatttgtcttcattgggcatctttcaccggtagtgctgcgatcgctgaggtcctgcttaacgcccggtgtgatctgcatgctgtgaactaccacggcgataccccattgcatattgcggccagggaatcataccacgactgcgtgctactgttcttatctcgtggagccaaccctgagctgagaaataaggaaggcgacacagcctgggatctgacccccgaacggtcagatgtatggtttgctctccaattgaatcggaagttgagactaggagtcgggaatcgagcaatccggaccgaaaaaattatctgccgcgacgtggctcgaggctatgaaaatgtccccataccttgtgtcaatggtgtagatggagagccctgccctgaagactataaatatatcagcgagaactgcgagacatctacaatgaatatagaccgcaactag

SEQ ID NO: 186958 - DNA, 3531 bp, synthetic construct
  misc_feature 1..3531: note = Description of Artificial Sequence: Synthetic coding sequence
  source 1..3531: mol_type = other DNA
atggccgccgccgccggcgccgccgccgccgccgccgccgagggcgaagcaccggcagaaatgggagccctcctgttagaaaaggaaactagaggggccacggaacgagttcacggatcattgggggatacaccaaggtctgaggagactttgccaaaagcaacaccagattcattggaacccgcgggaccctccagtcctgcctcagtgactgtgacagtgggcgatgagggagcagacaccccagtgggtgctactcctctgattggggacgagagtgagaacctcgagggcgacggggacctgagaggaggcagaatcttgctggggcacgcgacaaaaagtttcccctcgtcacctagtaagggaggttcatgtcctagtcgcgcaaagatgagcatgacaggagccggtaaatcaccccccagtgttcagagcctcgctatgagactcttaagtatgcctggcgctcagggtgctgcggccgctggctcagagcccccccccgctactacatcaccagagggccaacctaaggtccaccgcgccaggaaaacaatgtcaaagccgggtaatggtcagcctccagtgcccgaaaaaaggccaccggaaatccagcatttcaggatgagtgacgacgtgcactccctgggcaaagtgacatccgatttggccaagcgacgcaaactgaattctggaggcggattaagcgaagagttaggcagcgctaggagatccggtgaggtgacgcttacaaaaggagatcccggctcactggaagagtgggaaactgtggtaggggacgatttctcgctgtactatgactcctactcagtggatgagagagtagatagtgattctaagtctgaagttgaggcgcttacagagcagctgagcgaagaggaggaagaggaggaggaggaagaggaggaggaggaagaagaagaagaggaggaggaggaagaagaagacgaggagagtggaaatcagtcggacagaagtggaagctctggtagacggaaggcaaagaaaaaatggagaaaggattccccgtgggtcaagccgtctcggaaacggcggaaacgggagccccctcgggccaaagagccccggggagtcagcaacgatacgtcctcactggagacagagcgaggcttcgaggaactccccctgtgcagctgtcgaatggaagcacctaagattgatcggatcagcgaaagagccggacacaagtgtatggctactgaatccgtggacggcgagctgagcggttgcaacgcagccattctcaaaagggagaccatgcgaccatcctctcgggtagcccttatggtgctctgcgagactcatcgcgcccgaatggttaaacaccattgctgccccgggtgcggctatttctgcacagccggaaccttcttagaatgccaccccgacttcagggtggcgcaccggttccacaaggcgtgcgtttcacagctaaatggtatggtgttctgccctcactgcggcgaggatgctagtgaagcccaggaagttactatcccgaggggagacggcgtgacccctccagccggtaccgcggcaccagctccacctccactgtctcaagatgtccccggtcgggcggacacatcccagcccagcgctcgcatgcgcggacatggagagccacggaggccgccatgcgaccccctggcagacacaattgacagcagcggaccttctctcacgctgccgaacggcggttgcctttcggctgtgggcctgccattgggtccgggacgggaagctttagagaaggctctggtgatccaagagagcgagcgccgcaagaagctgagatttcatccccggcaattatacttgtctgttaagcagggggaactgcaaaaggtaatactgatgctcctagacaaccttgaccccaacttccagtctgaccagcaaagtaagcgcaccccactgcatgcagctgcacagaaagggtccgtggaaatttgccatgtcctgttgcaggctggagccaacatcaatgccgtggataaacagcagaggaccccgcttatggaagctgtggttaacaaccatctggaggtcgcccgctatatggttcagcgcgggggctgcgtatattctaaggaagaggacggatcaacatgcttacaccatgcagccaagattggaaacctagaaatggtgtctctgctgctgtctactggccaggtggacgtgaacgcccaggatagcgggggctggacccctatcatctgggccgccgaacataagcatatagaagtcattcggatgttgctgacacgtggagctgatgtcacactaaccgataacgaagagaacatctgcttgcattgggcctcctttactggatctgccgcaatagctgaggtgctcctgaatgctagatgcgatctccacgctgtgaactatcatggcgacacccccttgcatatcgcagcaagagaaagctaccacgactgtgtactgctcttcctgagtcggggagccaaccctgagctgcgcaataaagagggtgacaccgcttgggacttgaccccggagcgttccgacgtgtggtttgcactacagttgaaccgcaagctgagactgggggtgggaaatcgcgcaatcagaaccgaaaaaatcatatgtcgcgacgtggctcgggggtatgaaaacgtgcccatcccctgtgttaatggggtagacggtgagccttgtcccgaagactacaaatacataagcgaaaactgcgagacctctaccatgaacattgataggaacataactcatctgcagcactgtacatgcgtggatgactgtagcagctctaattgtctatgtgggcaactgtccattcggtgttggtacgataaagacgggaggcttcttcaggaattcaataaaatagaaccacctctgatttttgaatgcaaccaggcctgctcatgttggcgaaactgcaaaaaccgcgtggttcagtcgggcatcaaagttagattgcagctctacaggactgcaaaaatgggatggggagtacgagccttacaaacaataccccagggcacgttcatttgcgaatatgtaggggagcttatctcagacgctgaggctgatgtgagagaagatgactcctacctgtttgatctggacaataaagatggcgaggtgtactgtattgacgcaagatactacggaaatattagtaggttcattaaccacctctgcgaccctaacataataccggttagggtgttcatgctgcatcaagatctgcgattccctcgtattgcctttttcagttccagggacatcagaactggcgaggaactcgggttcgattacggggaccggttctgggatattaagtcaaagtacttcacatgccagtgtggatcagagaagtgtaaacattccgccgaggccatagccttggaacaaagcaggttagcgaggctagatccgcaccccgagttgctccccgaactcggttcactcccccccgtcaatacttag

SEQ ID NO: 186959 - DNA, 3804 bp, synthetic construct
  misc_feature 1..3804: note = Description of Artificial Sequence: Synthetic coding sequence
  source 1..3804: mol_type = other DNA
atgcggggcctgccccggggccggggcctgatgcgggcccggggccggggaagagccgcacctcctggctcccgaggccgaggccggggcggacctcatagaggcagaggccgtccaaggagcctactcagtctacctcgtgcccaggcatcttggacgcctcaattgtccaccggactgacaagccctccagtgccatgcttgccatcccagggagaggctcccgccgagatgggggcgctcctgctggaaaaggaaacaagaggagccactgagcgtgtgcatggctctctgggagacacacctcgatccgaggagactctgccgaaagcaacaccagatagccttgaacctgcgggcccatccagcccagcctccgtcacagtgacagtgggcgacgagggagctgacacacctgtgggggccacccccctgataggggacgaatcagaaaacctggaaggcgatggcgatctccgaggtggccgtatcctgttgggccatgccacaaagtcttttccatccagtccatctaagggcgggtcttgcccttctcgcgcaaagatgagtatgaccggcgcagggaaatcacctccgtccgtccagagcctggccatgaggctattgagcatgccaggcgcccagggggccgccgccgcaggtagcgagcctcctcccgccacgacttctccggaggggcagcccaaagtgcatcgcgcgcgcaagaccatgtctaaaccgggcaatgggcaacctcccgtccccgagaagcgaccgcccgaaattcaacactttagaatgagtgacgatgtacattctcttggaaaggtgacatcagacctggccaaacggcgcaaactgaactcgggtggagggctgtccgaggagctgggctccgccagaagatccggggaggttaccctgaccaagggtgaccccggcagcctggaagaatgggaaacagtcgtgggagatgactttagtctgtactacgactcctacagtgtagacgaacgcgtggactccgactctaagtccgaggtcgaagcactcaccgaacagctctccgaggaagaggaggaagaagaagaagaagaggaggaggaagaagaggaggaagaagaggaggaagaagaggaagatgaggagtctgggaatcagtctgatcgatccggctccagtggaagacgcaaggctaaaaaaaaatggcggaaggatagcccatgggtgaaaccctcaaggaagagaaggaagagggagcccccccgggctaaagagcctcggggcgtcaacggtgtgggctcgtcaggaccgtcggagtacatggaggtgcccttggggtctctggaacttccttccgaagggacgctctcaccaaatcatgcaggggttagcaacgacacatcgtccctcgaaactgaacgtggattcgaagaactgccactttgcagttgccggatggaagcgcccaaaattgaccgaataagtgagagagccgggcataaatgtatggcgaccgagtctgtggatggcgagctgtccggctgcaatgctgcaatccttaagcgggaaaccatgcgtccctcatcacgggtggcgctcatggttttgtgcgaaactcatagggctcggatggtaaaacatcactgttgtcccggatgtggttatttttgtaccgccggcacatttcttgagtgtcacccagacttcagagtcgcccataggtttcacaaggcgtgtgtgtctcagctcaatgggatggtgttttgtccacattgcggcgaggacgcttccgaagcacaagaagtgacgattccccgaggggatggtgtgaccccgcctgccggtaccgcagccccagcccctcccccactgtctcaggacgtgcccggacgagccgatacatctcagccttcagcacggatgcgcgggcatggagagccacgccgccctccctgcgatcctctcgcggatacaatagattcctccgggccctccctgactcttcccaacggcggttgcctatcggctgtgggcctgcccctcggtcccgggagagaagccctggaaaaggccctcgttattcaagaatctgaacgtcgcaaaaagctgcgatttcacccgcgccaactctacctgtcagtgaaacagggtgagctgcagaaggtcattttgatgttgctggataacttagaccctaattttcagtcagaccagcagagtaagcgaactcccctacatgctgcggcgcaaaaaggttcagtcgagatatgccatgtcctgctccaggctggggcaaatatcaacgccgtagacaaacagcaacgcacccctctcatggaagcagttgtgaataaccatcttgaggtcgccagatacatggttcagcgagggggttgcgtgtacagtaaagaggaagacggtagtacctgtttgcatcacgcagctaagatcgggaacctggagatggtgagccttctgctcagcacgggccaagtggacgtgaacgctcaggacagcggcgggtggacgccaatcatatgggccgcagaacacaaacatatcgaggtgatcagaatgcttctcacccgaggcgcggacgtaaccctaaccgataacgaggagaatatctgcctccactgggcttccttcactggctccgcagcaatcgcagaagtactgcttaatgcaaggtgtgacctacacgcagtaaactatcacggcgacactccacttcacatcgcagctcgggaaagctaccatgactgcgtgctgctgttcctgagtcggggtgcaaatcccgaactacgcaataaggaaggagatacagcgtgggatctgactcctgagcgaagcgatgtctggttcgccctccaactgaatagaaagctgcggctcggagtaggcaaccgcgccattaggacagagaagataatctgcagagacgttgcacggggatacgagaatgtccccatcccctgtgtaaacggggtcgatggtgaaccctgcccagaggattataaatacattagcgagaactgcgaaacttctacgatgaatatcgatcgcaatatcacacacctgcaacattgtacctgtgtcgacgactgttcctcttcaaactgtctctgtgggcaattatccatccgctgctggtatgacaaagacggccgactgctgcaggagtttaacaaaatcgagccccccctcatcttcgagtgcaatcaggcctgctcttgctggaggaactgcaagaacagagtggtgcagagtggaatcaaggtacggcttcagctgtatcgtactgccaaaatgggttggggtgtgcgtgctctccagaccatcccgcaaggcactttcatttgtgaatatgtgggcgaattgatctccgacgcagaggctgacgttagagaagacgactcatatctcttcgatctcgacaacaaagatggggaggtctattgtatcgacgctagatactatggcaatattagccgcttcattaaccatctttgtgatcccaacataataccggtgagagtcttcatgctccatcaggatctgaggttcccccgaatcgcctttttttcaagtagagacattagaacaggagaggagttgggtttcgactatggagatcggttttgggacatcaagagcaaatacttcacttgccagtgcgggagcgaaaaatgtaaacattcggcagaggccatcgccttggaacagtccaggctggcccggttagatccccacccagaactgctgccagagttaggctcgctgccaccagtgaatacatag

SEQ ID NO: 186960 - DNA, 3633 bp, synthetic construct
  misc_feature 1..3633: note = Description of Artificial Sequence: Synthetic coding sequence
  source 1..3633: mol_type = other DNA
atggccgccgccgccggcgccgccgccgccgccgccgccgagggcgaggctccagctgaaatgggagccctgctgctggaaaaggagacccgcggtgccaccgagcgcgtgcatggatccctgggggatactccgagatcagaggaaaccctacccaaagctaacccggacagtctggaacccgccggcccgagtagtcccgcaagtgtgacagtgaccgtgggcgatgagggtgctgataccccagtaggggcaacaccattgattggtgatgagtcagaaaatctggagggggacggggacctccggggtggcaggattttactgggccatgcgacaaagtccttcccctcttcaccgtcaaagggcgggtcatgtccgagccgtgccaagatgagcatgacaggcgctgggaagtcccccccttccgtacagagcctagccatgcggctactttccatgcccggcgctcaaggagcagctgccgctggcagcgaaccccccccagccacaacctcaccagagggccaaccgaaagttcacagggccagaaagacaatgtctaaacccggaaacggccagcccccagtgcctgagaagaggccccctgagattcaacattttaggatgtcagatgacgttcactcgctgggaaaagttacatctgacctggctaagcgaaggaaacttaatagcggaggcggcctcagcgaggagctcggttccgctcgtcgtagcggggaggtgacactcacaaaaggcgaccctggaagccttgaggaatgggaaaccgtcgttggcgacgatttctcgctttattatgactcctattcagtcgacgagcgagtagattccgacagtaagtccgaagtggaggctctcaccgagcagctgtcggaagaggaggaggaggaggaggaggaagaagaggaagaagaggaagaagaggaggaggaagaagaggaggaagatgaagagtcaggcaatcagagcgacagaagtggatcctcaggtcgcaggaaggcgaaaaaaaagtggaggaaggatagcccctgggttaagccatctcggaaaaggcgcaagagagagcctcctagggccaaggagccccgcggcgtgaacggcgttggctcctcaggtccaagcgagtacatggaggtgccactggggagcctggagctcccatccgaggggaccctgagccctaaccacgctggcgtatccaatgataccagtagcctggaaacagagagaggttttgaagagctgccactctgctcatgccggatggaggcccccaaaattgatcggataagcgagcgcgccggacataagtgtatggcaactgagtccgtggacggggaactgtctggctgcaacgcagcaatcctgaagagggagaccatgcgaccttcctcccgagtcgctctaatggtgttatgtgaaacccaccgggcgcgcatggtaaaacatcactgctgtccagggtgcggatacttctgtacagctggaacattcttggagtgtcatcccgacttccgggtggcccatcgatttcacaaagcttgcgtgagtcaactcaacgggatggtcttctgcccacactgtggcgaggacgcttccgaagcacaagaggtgaccataccacgcggagatggagtcacccccccagcaggtaccgccgcgccagcccctccaccactgagccaggatgtgcctgggagggccgacacttctcagccaagcgcacgcatgcggggccacggtgagccacggagaccaccttgcgacccactggcagatactatagattcctccggcccatccctgactttacccaacggagggtgcctgagcgccgtcggccttcctttgggccccggacgggaagctctcgaaaaggctcttgtgatccaggagagcgagcgcagaaaaaagcttcgctttcatcccaggcaattatacctcagcgtcaagcaaggcgaactgcagaaggttatcttgatgctgctcgataatctcgatcccaatttccagtccgaccagcaaagtaaaaggacacctcttcacgctgctgcacagaaaggatcagtcgaaatctgccatgtcctcctgcaggctggagcaaacattaatgcggtggacaagcagcaacgaaccccccttatggaggcagtcgtgaataaccatctcgaagtagcacgctacatggtccagcgtggaggctgtgtgtacagtaaggaagaggatgggagcacctgcctgcaccacgccgcaaaaattggtaatctcgaaatggtctccctcctattgagcacagggcaagtagatgttaacgctcaggactcaggggggtggacacccatcatttgggctgcagaacacaagcacatagaggtgatccgtatgctacttacacgcggggctgacgtgacgctcaccgacaatgaagaaaacatttgtttgcattgggcctcctttactggctcagctgctatagccgaggtgttgctgaatgctagatgtgacttacatgcagtcaactaccacggtgacacacctctgcatatcgcagctagagagagctaccacgactgtgttctcctgttcctgtcacggggcgccaaccccgagctacgaaacaaggagggtgacactgcctgggatctaactcctgaacgctccgatgtgtggtttgctttacagctcaacagaaagctgagactgggagtaggtaaccgtgccatacgtacagagaagattatttgtcgagatgtggcaagaggctatgaaaatgtgcccatcccatgcgtaaatggcgtggacggtgagccatgccctgaagattacaaatatatctctgagaactgtgagacgtctactatgaacattgataggaatataacacatttgcagcactgtacatgcgtcgacgattgctctagctccaactgtctatgtggccagctttcaatccgttgctggtacgataaggatggtcgacttctccaggagtttaacaagattgaacctccactgatattcgaatgtaatcaggcttgctcttgctggcgcaattgcaagaatcgtgtcgttcagtcagggatcaaggtccggcttcagttataccgcacagccaagatgggctggggcgttcgagcccttcagactattcctcaggggacttttatctgtgagtatgtgggcgaactcattagtgacgcagaggcggacgtaagggaggacgacagctacttatttgatctggacaataaggacggggaggtgtattgcattgacgcgcgttactacggtaacatttccagatttattaatcatttgtgtgatcctaatattattccggtgcgggtctttatgctgcatcaggacctgagattcccacgcatcgcctttttctcctctcgtgacataagaaccggggaagaactaggctttgattatggagatcggttctgggacatcaagtctaaatattttacttgccaatgtggttctgagaaatgtaagcattcagcagaggcaatcgccctcgagcagtcgagacttgcgcgactggatcctcacccagaacttcttccggagctaggctcactgccgcctgtgaatacgtag

SEQ ID NO: 186961 - DNA, 897 bp, synthetic construct
  misc_feature 1..897: note = Description of Artificial Sequence: Synthetic coding sequence
  source 1..897: mol_type = other DNA
tgaagcaagcggacccccctgcacgccgccgcccagaagggcagcgtcgagatctgccatgtcctcctccaagcgggtgctaatataaacgctgtggataagcagcaacggactccgttgatggaagctgtggtgaataatcacttagaggttgcacgctatatggtgcagaggggtggctgcgtgtactcgaaggaggaggacggttccacttgtctgcaccatgccgcaaagattggtaacctcgagatggtcagcctgctgctgtccactggccaggtagacgtgaacgctcaggggcagttgcctccgccttccttgccgtcccatccacaggacagcggaggctggacaccaatcatctgggccgcagagcataagcatattgaggtcattcggatgttattaacaaggggagcagatgtaactctgaccgacaacgaagaaaacatctgcctgcattgggccagtttcacgggatctgctgcaattgccgaggtgttgttgaacgctagatgcgacctgcatgccgtgaactatcatggcgacactccactccatatcgctgccagagaatcttatcacgattgtgttttactcttcctatccagaggagccaatcctgagttgcgtaacaaagagggtgacacagcatgggatctgacccctgagaggtccgatgtgtggttcgccctgcagcttaacagaaaactcaggctgggagtcggaaacagagccatcagaacagagaagataatttgtcgcgatgtggcgagaggatatgaaaatgtgcctatcccctgtgtgaacggggtcgacggggaaccatgcccagaggactataagtatattagcgagaattgcgagacatccaccatgaatatcgacaggaattag

SEQ ID NO: 186962 - DNA, 2769 bp, synthetic construct
  misc_feature 1..2769: note = Description of Artificial Sequence: Synthetic coding sequence
  source 1..2769: mol_type = other DNA
agcgaggtggaggccctgaccgagcagctgagcgaggaggaggaggaggaagaagaagaggaggaggaagaggaggaagaggaagaggaggaagaagaagaggaagacgaagaaagcggaaatcaaagcgatcgctctgggtcctccggaaggagaaaagccaagaaaaaatggaggaaagacagtccctgggtaaagccatctcgaaagagacggaagcgggagcctccgcgggctaaggagcctcgtggcgttaacggcgtcggatcatcagggccctcagagtatatggaggttcctttgggttctttagaattgcctagcgaagggaccctctcacctaaccacgcgggagtgagtaacgacacctcttctcttgagaccgagcgcggtttcgaggagcttccgctgtgttcctgccgtatggaggctccaaaaatcgaccgcatctcagagcgggccggccacaagtgtatggccactgaaagtgtcgatggggagctcagcggctgcaatgccgcgattctcaaaagagagaccatgagaccatcatcacgggtggcactcatggtgctctgtgagactcatcgggcgcggatggtcaagcaccattgttgccctggctgcggatatttttgcaccgcaggaacattcctcgagtgccatccagatttcagggtggcacaccgtttccacaaagcttgtgtgtcccagctcaatggcatggtgttctgcccccactgcggagaggacgcatccgaagctcaggaagtgaccatccctcgaggagacggagtaacgccccccgctggcaccgccgcccctgcaccacctccactgtctcaagacgtgcctgggcgcgcagatacctctcagcccagtgcccgcatgcgtggtcatggggagccccgaagaccaccgtgtgatccattagccgatactattgattcctctgggcctagtcttactctgccaaacggggggtgcctgtccgctgtcggccttcctctggggcccggaagagaagccctggaaaaggcccttgtcatccaggagtccgaacggcgcaagaagcttcggtttcaccctagacagctctatctttcagtgaaacagggtgagctgcagaaagtcatcctgatgctcctcgataatctagacccaaatttccagtctgaccagcaatcgaaacgcacccccctgcatgcagcggctcagaaaggcagcgtggaaatatgtcacgtccttcttcaggccggtgccaacatcaacgccgttgataaacaacaaagaacaccattgatggaagccgtcgttaataatcatttggaggtggcccgatatatggtgcaacgtggcgggtgcgtgtattccaaagaggaggatggaagcacttgtctgcaccacgcggccaagatagggaatcttgaaatggtttctctgctactttccaccggccaagtcgacgtcaatgctcaggattcggggggttggacacctattatttgggctgccgagcacaaacatatagaagttatcaggatgctgctgacccgaggagccgatgtcacacttaccgacaacgaagaaaacatttgtctacactgggctagctttaccggaagtgccgctatcgctgaggttctgctaaacgctagatgcgacctgcacgcagtaaattatcacggcgatacccccctgcacatagctgcccgtgaaagctatcacgactgtgtcctgctgttcttatcaagaggtgccaatcccgagctccgcaacaaagaaggggatactgcatgggacttgacgccggaaaggagtgatgtgtggtttgctctgcagttgaatcgcaagctccggcttggcgttggaaaccgcgcaatccgcacagagaaaattatctgtagagatgtggctagaggctatgaaaacgtccccatcccttgcgttaacggcgttgacggcgaaccctgtcctgaggactacaagtacatctcagaaaactgcgaaactagcactatgaatatcgatcggaacatcacccatcttcagcactgtacatgcgtcgacgactgctccagctcaaattgcctgtgcgggcagctctctattcgctgttggtacgacaaggatggccgccttcttcaggagttcaacaagattgagccacccctgatcttcgagtgtaaccaggcatgcagctgctggaggaactgcaagaatagggtggtgcagtccggcattaaggtccgccttcagctttatagaacggccaagatgggatggggggtgagagctttgcagaccattcctcagggaacgttcatttgtgagtatgtcggtgagctcattagcgatgccgaggccgacgtgagagaggacgactcttacctgtttgatctggacaacaaggatggggaggtttattgtatcgacgcccgatattatggcaacatctctcggtttatcaaccatttgtgcgatccaaacataattccggttagagtctttatgctgcatcaggatctcagatttccgcggatcgcattttttagtagtcgcgatattcggaccggtgaggagctcggctttgactatggagaccgattttgggacatcaagtctaagtactttacttgccagtgcggctctgagaaatgcaaacattccgctgaggccatcgccctggaacagtcacgtcttgcgcgactggacccacaccctgagctcttgccggagctaggctcgctgcctcccgtgaacacgtag

SEQ ID NO: 186963 - DNA, 3702 bp, synthetic construct
  misc_feature 1..3702: note = Description of Artificial Sequence: Synthetic coding sequence
  source 1..3702: mol_type = other DNA
atgcggggcctgccccggggccggggcctgatgcgggcccggggccgcggtcgcgccgcgccccccggatcacggggcagaggacgggggggcccccatcgtggcagaggacggcctcgaagtctcctgtctttaccccgagcccaagcatcctggactcctcaactatctacaggtctgacgagcccacccgtgccctgtctccctagccagggcgaagcccccgccgaaatgggcgctctcctgcttgaaaaggagaccagaggggccacagagcgggttcacggctccctaggagataccccaaggtctgaggaaacactgcctaaggccaatcccgactcgctggaacccgctggaccaagcagccccgcatccgtgaccgtcacagtgggagacgaaggagccgacacgccagtcggcgccacgcccctgatcggagacgagtccgagaacctcgaaggggacggggatcttcgcggcggaaggatccttttgggacatgctacaaagagcttccccagcagcccttctaagggcggatcttgtccttctcgggccaagatgtcaatgactggtgccgggaaaagcccaccctccgttcaatcactggcgatgcggttgctctccatgccaggcgcacagggagccgccgccgccggctctgagcctccacctgccacaacgtcccccgaaggacagccaaaggtgcacagggccaggaagacaatgtccaaacctggcaacgggcagccccccgtgccggagaaaagaccgcccgaaattcagcacttcagaatgagcgacgatgtgcacagcttggggaaggtcacatccgacctggcaaaaaggcgtaagctgaactctggcggagggctcagcgaggaattgggtagcgctaggcgcagtggcgaggtgacgttgactaaaggagaccccggctcgctggaggagtgggagacagtggtgggtgacgactttagcctgtattatgactcatattctgtggatgagcgagtggactccgacagcaagtccgaagtggaggccctcacagagcagctgtccgaagaggaagaagaggaggaggaggaggaagaggaggaagaggaagaggaagaagaggaagaggaggaggaggacgaagaatcaggcaatcagtccgaccggtcaggaagtagtgggaggcgaaaggctaagaaaaagtggaggaaagactctccctgggtgaagccctccaggaagcgaaggaaacgagaacctccccgagccaaagagcctagaggggtatcaaatgacacgagctccctggaaaccgaaagagggttcgaggagttgccactgtgcagttgtcgcatggaagctccgaagattgaccgtatttctgagcgggccggacataaatgcatggccacggagtccgttgacggtgaattatctgggtgtaatgctgccatcttgaaaagggagactatgcgtccttcgtccagggtcgccctgatggttctgtgcgaaacccaccgggctcggatggtgaagcaccattgctgtcctggatgcggatacttctgcaccgctggtacttttctagagtgccatcctgattttagagtggcacacaggtttcataaggcttgcgtgagtcagctgaatggcatggtgttttgtcctcattgtggtgaagacgctagtgaagcccaggaggtgaccatccccagaggggacggtgtaaccccgcccgccgggacagccgcaccggcccccccgcccctttcccaagacgtgcccggaagagcagatacctcacagcctagcgcgcgcatgagagggcatggggagccccgcaggcctccatgcgatcccctagcggatacaatcgattccagcggcccgtctcttacattgcctaatggaggctgcttgagtgctgtgggattgcccttggggccagggagggaggctctggaaaaggccctggtgatccaagagtctgagcggcggaagaagctgcgctttcatccacgacagctatatctctcggtgaagcagggtgagctgcagaaagttatcttgatgctactggataacctagatcccaacttccaatccgatcagcagtctaagagaacgcccctgcacgctgctgcccagaagggctccgttgaaatctgccacgtgctgctgcaggccggggcaaatattaatgccgtcgataaacagcaaagaactcctcttatggaagccgtcgtcaataatcatctggaggtggccagatacatggtccagcgcggtggttgtgtgtatagcaaggaagaggacggttcaacatgcctacatcatgccgccaagatcgggaacttagagatggtatctctcttactgtccacaggacaagtggacgtgaatgctcaggactccgggggatggacgcctattatatgggcggctgaacataaacatatcgaggtgatcagaatgttgctgacacgcggtgctgatgtgacgctgaccgataacgaagaaaacatttgcctccattgggcttctttcaccgggtccgctgccattgcagaagtactgctgaacgcccgatgtgatctgcacgccgtcaattatcacggtgacactcctcttcatatagcagcccgagagtcttaccacgattgtgtgctgttgtttctgtctcggggggcaaatcccgaactgaggaacaaagagggagatactgcatgggacttaacacctgagaggtccgatgtgtggttcgccctacagctcaaccgcaagctgcgtctcggtgtaggcaatcgagcaattcgtaccgagaaaatcatttgccgcgacgtggcccggggatacgaaaacgtacccataccttgtgtgaatggggtggacggcgaaccatgcccagaagattacaagtacatcagcgaaaattgtgagacttctacgatgaatattgatcggaatatcacccacctgcaacactgtacatgtgtagacgactgctctagcagcaactgtctgtgcggacagcttagcattcggtgttggtacgataaagatggtaggctgctgcaggaattcaacaagatcgagccacccctgatctttgaatgcaatcaggcatgttcatgttggcgcaattgcaaaaaccgcgtcgttcaatcaggcattaaagtccggctgcagctgtatcgtacagcaaagatgggctggggggtgagggctctgcagaccattcctcaagggacatttatttgtgagtatgtgggggaattaatcagcgatgccgaggccgatgttagagaggacgactcatacctgtttgacctggataataaggatggagaggtgtattgtatcgatgcccgttattatggtaacatcagccggttcatcaaccatttatgcgatcctaatatcatccccgtgagagtgttcatgctgcaccaagacttgaggttcccccggatcgcttttttttcatcccgagatatccgaactggtgaagagctgggatttgattatggtgaccgattctgggatataaagtccaaatacttcacctgccaatgtggtagcgagaagtgcaaacattccgctgaagcaatagccctggaacagtctcggctggcgcggttggatccacatccggaactactgccggagttggggtctctgccaccagtgaacacatag

SEQ ID NO: 186964 - DNA, 3702 bp, synthetic construct
  misc_feature 1..3702: note = Description of Artificial Sequence: Synthetic coding sequence
  source 1..3702: mol_type = other DNA
atgcggggcctgccccggggccggggcctgatgcgggcccggggccgaggccgggcggcccctcctggttctagaggacgcggacggggtggcccccataggggccgcggcagaccccgctctcttttgtctttgcccagggcgcaggcttcctggacacctcagcttagcactgggctcacttcacctccagtcccctgtctgcccagccaaggagaggcacctgctgagatgggtgccctgctactggagaaagagacacgcggtgcaaccgaacgggtgcacgggagccttggtgatacccccaggagtgaggaaactttgcccaaggcaacccccgacagcctggagccagcggggccttcatctcccgccagcgtaacagttacagtgggagacgagggcgccgacacccccgtcggcgccactcctcttatcggggatgagtctgagaacttggagggtgatggggacctccgcggaggaagaatcctactgggacatgctactaaaagtttcccttcttcaccgtctaagggtggcagctgtccttcccgtgctaagatgtcaatgacaggtgctggcaagtcaccgccctccgtgcaatctctcgcgatgcggctgctgtcaatgcccggagcccaaggggcagccgcagctggctccgagccacctcctgccacaaccagccctgagggccagcccaaggtgcaccgggcaaggaaaactatgtctaaacctgggaacgggcagccccctgtgcccgaaaaacgaccaccggaaatccaacacttccggatgtcggatgatgtacactccctgggcaaagtgacttccgacctagcgaagcggcgcaaactgaattccgggggcggcctcagtgaagagctgggctctgcccggaggtctggcgaagtcaccctaacgaagggcgaccccggatccctcgaggaatgggaaacggtcgtgggggacgatttctccctctactatgatagctactctgtagatgagagggtggacagcgactccaagagcgaagtcgaagctctcaccgagcaactgagtgaggaggaagaggaggaagaagaagaagaggaggaagaggaagaggaggaagaggaggaggaggaagaggaagacgaggagtccggtaaccagagcgatagaagcggcagctcagggagacggaaggccaaaaagaagtggagaaaggatagtccctgggtgaagccctctcggaagcgcaggaagcgagaaccgccccgggcgaaggagcctcgcggagtgtccaatgatacttcctctctggagacagagcggggctttgaggagctgccactgtgttcttgtcggatggaggctccaaaaatcgatcgcatctccgagcgagctggccacaagtgtatggcaacagagagcgtggatggagaactaagcggttgcaatgctgccatcctcaaacgggaaactatgcgcccatccagccgggtggcactgatggtgctgtgtgaaacccaccgcgcgcgtatggtcaagcaccactgctgtccagggtgcggatacttttgcaccgcagggaccttcctggaatgtcacccagattttcgagtggcacaccgatttcataaagcctgtgtcagccagctgaacggtatggtgttctgccctcactgtggcgaagacgcttcggaagctcaggaagtgacgatcccgcgcggggatggcgttacaccacccgcggggactgccgcccctgctcctcccccactctcccaagacgtgcctggacgagccgacacatcacaaccgtccgcaagaatgcgaggacatggagagccccgacgacctccttgcgatccactagccgacacaatcgactcctctggccctagtctgacgttgccaaatggcggttgcctctccgctgttgggctgcccctgggacctggacgggaagcactggaaaaggccctggtcattcaagaatccgagaggcggaagaagctacgcttccatcctcggcaactgtatctttccgttaaacagggcgagctgcagaaggttatcttaatgctgctcgacaatttagatcctaacttccagagcgatcagcaatctaagcgcactcccttgcacgccgctgctcagaagggcagcgtggagatttgccacgttctgttgcaggctggcgcaaacatcaacgctgtggacaagcagcagaggacacctctcatggaagcggttgttaataaccatctcgaggtcgctaggtatatggtacaaagaggaggttgcgtctattctaaggaggaggacggatcaacttgtctccaccatgccgctaaaataggtaatctggaaatggtaagcctgttactgtcaacggggcaggtcgatgtaaatgcccaggactcaggaggttggacgccaatcatctgggcagcagagcacaagcacatagaggtgatcaggatgctgctcactaggggtgccgatgtaacattaacagataacgaagagaacatttgcctccactgggcctcttttactggatctgccgcgattgccgaagtgctacttaatgcgcggtgcgaccttcacgctgttaattaccatggggacactccccttcatatcgcggctagagagtcatatcatgactgcgtcctcctgttcctgagccgcggtgcaaaccctgaattacgcaataaagagggggataccgcttgggacctaacacccgaaagatctgacgtctggtttgcacttcaattgaataggaagcttaggttgggcgtcggaaacagggccatacgcacggaaaaaatcatctgtcgggacgttgcaaggggttatgagaatgtgccaatcccttgcgtgaatggtgtggacggtgagccgtgtccagaggattacaagtatattagtgaaaattgtgagaccagcaccatgaacatcgacagaaatattacacacctccagcactgtacttgtgtcgatgattgtagctcgagcaattgcttgtgtggacagcttagcatcagatgttggtacgacaaagacggccgcttgttacaggaatttaacaagatcgagcctcccctcatctttgagtgcaatcaagcctgttcctgttggcgcaactgtaagaatcgagtcgtccagtcaggcattaaagttagattgcaactgtaccggacagcaaaaatgggatggggtgtccgcgctctccaaaccataccgcagggtacattcatttgcgaatacgttggcgagctgatctctgatgcggaagctgatgtgagggaggatgacagttatctttttgacctcgataacaaagacggcgaggtgtattgtatcgatgctcgatattatggaaacatttcccggtttatcaatcatctctgcgaccctaacattatcccggttcgggtctttatgttgcaccaggatctcagattccctaggatcgctttcttttcctcgagggacataaggaccggtgaagagcttgggttcgattacggtgacaggttctgggacatcaagtccaagtactttacatgtcagtgcggcagcgagaagtgcaaacacagcgcagaggccatcgcgctggagcaatctcgcctggctaggctcgacccgcatcctgagctgcttcctgaactgggaagtctacctcctgttaatacatag

SEQ ID NO: 186965 - DNA, 3633 bp, synthetic construct
  misc_feature 1..3633: note = Description of Artificial Sequence: Synthetic coding sequence
  source 1..3633: mol_type = other DNA
atggccgccgccgccggcgccgccgccgccgccgccgccgagggcgaggccccagccgagatgggcgcattgcttctggagaaggaaacccgaggggctactgaaagagtccacggtagtctgggtgacacaccgaggtcagaggagaccctcccaaaagctactcccgattccttagaaccggcaggacccagttctccagcttctgtcacagttacagttggcgacgagggagctgacactcctgtcggcgcgacccccttaattggagacgaaagtgagaatttggaaggcgatggggacttgcgggggggtaggattctgttaggccatgccacgaagtctttcccatccagcccctccaaggggggttcctgcccatccagggccaaaatgagtatgacaggcgccggcaagtcccctcccagcgtgcagtctttggccatgagactgctctcaatgccaggagcccagggggcggccgctgcgggttcggagcctcctcccgcaaccacatctcctgagggtcagcctaaggtacacagagcaaggaagaccatgagcaaacccgggaatggccagcccccagttccagaaaagcgaccacctgagatccagcattttagaatgagcgacgatgttcattccttgggaaaagtcacatctgacctcgccaagcgcagaaaactgaatagcgggggaggcctctccgaggagttgggaagcgcccgccgctctggtgaggttaccctcacaaaaggcgatccaggaagtctggaggagtgggaaactgtggtgggtgacgatttttcattatactatgactcctattccgttgatgagcgggtggattctgatagcaagagcgaggttgaagccctgaccgaacaactgagcgaggaggaagaagaggaggaagaggaggaggaggaagaagaggaggaggaggaggaagaggaagaggaggaagacgaggaatctgggaaccaatctgacaggtcaggctcatccggacgccggaaagccaagaagaagtggcgaaaagactccccatgggtcaagccaagcagaaagagaagaaaacgggaacccccacgggccaaggaaccacggggcgttaacggagtgggaagctcgggacctagcgaatatatggaggttcccctgggaagcctggagctgccgtcagaagggaccctgtcgccaaaccatgccggggtgtcaaacgacacgtcctctctggagaccgagagaggattcgaagaactcccactatgctcctgtcgaatggaagcacccaaaattgatcggatcagcgaaagggcaggccacaagtgcatggccacggaaagcgtggacggggaattgtccggctgtaacgcagccatattgaagagagagaccatgcgcccctctagccgcgttgcattgatggtattatgtgagacacaccgtgcgaggatggtcaagcaccactgttgcccagggtgtggttatttttgcaccgccggcaccttcctcgaatgtcacccggacttccgagtggcacatcgctttcacaaagcctgtgtgtcccagctcaatggcatggtgttttgtccacattgcggggaggatgcttccgaggcacaggaggtgaccattccacgaggagacggagtgacacctcccgctgggacagctgccccagcccctccacctttgagccaggatgttcctggacgggctgacacgtctcagccttccgcccgcatgcggggccacggtgagccgagacggcccccgtgcgatccactagccgataccattgattcgtctgggccatcattgactttgccaaacggaggatgtctcagcgctgtgggtctccctctggggccaggcagagaggcactggaaaaggccttagtgatccaggagagcgaacgacggaaaaaactgcggtttcacccaaggcagctgtacctgtccgtgaaacagggcgaactgcagaaggttatccttatgctcctcgataacctggaccccaactttcagtctgatcaacagagtaagcgcactccattacatgccgccgctcagaaggggtcagtcgagatttgccatgtactgttgcaggccggcgcaaatatcaatgcggttgacaaacagcagcgaactccgctcatggaggccgtggtgaacaatcatttagaagtggcccggtacatggtgcagaggggcgggtgtgtgtacagtaaggaagaagacggatccacatgcctccatcatgccgccaagataggcaacctcgagatggtttcccttctattatccaccggtcaggtcgacgtgaacgcccaggacagtggcgggtggacgcctatcatttgggctgctgagcataagcatatagaagtgattcgcatgctgttaacccgtggggccgacgtcactttgaccgataacgaggaaaatatttgtttgcactgggcatcttttaccggaagcgccgctattgctgaggtgctgctgaacgcacgttgcgacttacacgccgtaaactaccatggtgacactcccctgcacatcgccgctagagaatcgtatcatgactgtgtgcttttattcttgtcacgaggcgcaaatcccgagctaaggaacaaagaaggagatactgcgtgggatctgacaccagaacgctccgatgtgtggttcgcacttcagcttaatcgcaagttgcgcctcggcgtcggcaaccgggcaatccggacagagaagatcatctgccgggacgtagcacggggatatgagaacgtccccattccttgcgtaaacggagtggatggggagccgtgcccggaggactataaatacatttcagagaattgcgagacctctactatgaacatagaccgcaatatcactcacctccaacattgcacatgcgtcgacgattgctcaagctctaattgcctgtgtggccagctttccataagatgttggtacgataaggacggaagattgttgcaagagttcaataagattgagcctccactcatctttgagtgcaatcaggcatgttcttgctggcgtaactgtaaaaatcgtgtggtgcagtccggaatcaaggtgaggttacaactataccggacggcaaaaatgggttggggcgtgcgagccttgcagaccattccccagggaactttcatctgtgaatatgtgggggagctgatttcggatgctgaggccgacgtccgcgaggatgatagctacttgtttgatcttgacaataaagatggcgaggtgtactgtatcgacgccaggtactatgggaacatttcaagattcattaaccacctgtgcgaccccaatatcattccagttagggtttttatgctacaccaggatctaaggttccctcggattgccttcttttccagccgggatattagaactggcgaggagctggggttcgactatggcgataggttttgggatatcaagtccaagtactttacttgtcagtgcggatccgaaaagtgcaagcactcagctgaagccattgcattagaacaaagtcgtctggctcggctggacccacaccccgaattactgccagagcttggctccctgccacctgttaacacctag

SEQ ID NO: 186966 - DNA, 897 bp, synthetic construct
  misc_feature 1..897: note = Description of Artificial Sequence: Synthetic coding sequence
  source 1..897: mol_type = other DNA
tgaagcaagcggacccccctgcacgccgccgcccagaagggcagcgtcgaaatctgccatgtcttactgcaggccggcgcaaacattaacgccgttgacaaacaacaacgaaccccgctgatggaagccgttgtcaacaatcacttggaagttgcgagatatatggttcagcggggcgggtgtgtatatagcaaggaggaggacggtagcacatgtttacaccacgctgcaaaaattggcaacctcgagatggtgagccttctgctgagcaccggccaggttgatgtcaatgcccaggggcagctgcctccaccttcgctcccctctcacccacaagatagcgggggctggactccaattatctgggccgcggaacataagcacatcgaggtgattaggatgttgttgacacgtggtgctgacgttacccttaccgacaacgaagagaacatatgcttgcactgggccagttttacaggaagcgcagcgattgccgaggtcctcctgaacgcacggtgtgacctgcacgcagtgaattatcatggcgacacccctctgcacatagcggcaagggagagttatcacgactgtgtcctgctcttcctctcccgcggcgctaacccggagctgaggaataaggaaggtgatactgcatgggaccttacccctgagaggagcgatgtgtggtttgccttacagctaaaccgcaagctacgtttaggcgttggaaacagggctattcgcactgaaaaaatcatttgccgggatgtggcaagaggatatgaaaacgttcccatcccctgcgtaaacggggtggacggagagccttgtccagaagattataagtacatctccgagaattgtgagacttcaactatgaacattgaccgaaattag

SEQ ID NO: 186967 - DNA, 3804 bp, synthetic construct
  misc_feature 1..3804: note = Description of Artificial Sequence: Synthetic coding sequence
  source 1..3804: mol_type = other DNA
atgcggggcctgccccggggccggggcctgatgcgggcccggggccgcggtagagccgcaccccctggatctcgaggtcgaggcagaggcggcccccacagaggcagaggaagaccacgctcactgcttagtttaccacgggctcaggctagttggactccacagctgtccactggcctcaccagtccgcccgtgccttgtctgccctctcagggagaggcacccgccgaaatgggtgcgctactcctggagaaagaaaccagaggtgctaccgagagggtacatggtagcctgggcgatactcctcggtctgaggaaactctcccaaaagccaccccagatagtctggaacctgctggacctagctctccagcatctgttactgtcactgtgggagacgagggcgcagatacgccagttggcgccacccctctgatcggggacgaatccgaaaacctggagggcgatggcgacctacgcgggggaaggattctgctgggacacgcgacaaagtcatttccttcttctcctagtaagggcggcagctgcccttcaagggctaaaatgtcaatgactggggcagggaaatctccaccttctgttcagtctctggccatgcggctgctctctatgcccggagctcaaggagccgcagctgctgggtcagaaccgccacccgcaacgacctctcctgaaggccagccaaaggttcatagggcacggaaaacaatgtccaaacctgggaatggccaaccacctgtgcctgagaaacgcccgcctgagatccagcactttcgaatgagcgatgacgttcattctctaggtaaagtcacgagcgacctggcaaagagaagaaaattgaattctggtggtggcctctctgaggagttgggatctgccagacgcagtggtgaagtgaccctgaccaaaggcgacccgggctccctggaggaatgggagaccgtggtcggtgatgacttttccttgtactacgactcatattccgtcgacgagagagtggactctgactccaagagcgaggtggaggcattgacagaacaactatctgaggaagaagaggaagaagaagaggaggaggaggaagaggaggaagaagaagaggaggaagaagaagaggaagacgaagagtctgggaatcagtccgatcgatccggtagctcaggcagacggaaggccaagaagaaatggaggaaagatagtccctgggttaagccatctcggaaacggaggaagcgggagcccccacgggcaaaagaaccccgaggtgtcaacggggtcggatcatccggaccctccgagtatatggaagtgccattgggatccctcgagctgccctcagaaggtacactttcccccaatcacgcgggcgtctcaaatgataccagctctctggagacagaacgcggttttgaagaactaccactttgctcttgcaggatggaggcacctaagattgaccggatcagcgagcgggctggccataagtgcatggccactgaatctgttgatggagagttatcagggtgtaacgctgcaatcctgaagagggagaccatgcgtccaagctcacgtgttgcgctcatggtactgtgcgagacccaccgggcacgcatggtaaagcatcactgttgtcccggatgcggatatttttgtaccgccggaaccttcttagaatgtcatccggactttcgagtcgcccaccgatttcacaaagcctgtgttagtcagctcaacggcatggtgttttgcccccactgcggcgaagacgcttccgaggctcaggaagtgactattccccgtggcgacggggtgacaccacccgccggtacagcagctcctgcacccccaccactaagccaagatgtccccggacgcgcagacacatcacaaccctctgcgagaatgagagggcacggagagccgaggcgcccgccttgtgaccccttggcagacacaattgactcctctggtccgagcttaacactcccaaatggaggttgcctcagcgccgtcggattgcccctcggcccaggacgcgaagctctagaaaaggcactggtgattcaggagagtgagcggcggaaaaagttgagattccatccgcgtcagctgtatctgagcgttaaacagggggagctgcagaaagtgatcttgatgctcctcgacaatctggaccccaacttccagagtgatcaacagagcaaacgcacccccctgcatgccgccgcccagaaaggaagcgtcgaaatctgccatgtactcctccaagctggcgcaaacatcaatgccgttgataagcagcagcgcaccccactcatggaagccgtcgttaacaatcacctagaggtggcccgttatatggtacagagaggtgggtgtgtctactcaaaggaggaagacggaagtacatgtctgcaccacgctgcaaagattggcaatctggaaatggtgagcctgctcctgtccacaggccaagtcgatgtgaatgcgcaggacagtggcggctggacgcccataatttgggcggcggagcacaaacacattgaggtgatcagaatgctcctgacgaggggagccgacgtcaccttgacggataatgaggagaatatttgcctgcactgggcctcctttaccgggtcagcggccattgctgaagtgctgctcaacgcccggtgtgacttacatgcagtgaattatcatggggatacaccactccacatcgctgctcgggagtcataccatgactgcgtcctgctgttcttgtctcgtggagcgaatcccgagctacggaacaaggaaggtgatactgcctgggatctgactccagagcgttcggacgtatggttcgctctacagttaaaccgaaagctcaggttaggggtggggaacagggctatacgcaccgagaagataatatgccgtgacgttgctcggggttacgaaaacgttccaattccctgcgtgaacggggtggacggggagccttgcccagaggactataaatacatctccgagaactgcgaaacatctactatgaatatcgatcggaacatcacacaccttcagcactgcacttgtgttgacgattgtagctcgagtaattgtttgtgcggccagctctctattagatgctggtacgacaaagacggaagactgctccaggagttcaacaagatcgagccacccctcattttcgagtgcaaccaagcttgtagttgctggagaaattgcaagaaccgcgtggtgcaatcaggcattaaggtaaggctacagctgtacaggacagcgaagatgggatggggggtgcgcgcattgcaaactatccctcaaggaactttcatctgcgagtacgtcggcgagctgataagtgatgccgaggccgacgtgagggaggatgatagttatcttttcgatctggataataaggacggagaggtatattgtatcgatgcccgctattacgggaatatcagcaggtttatcaaccatctgtgcgaccctaatatcattccggtgagagtgtttatgctacaccaggacttgaggttcccaaggatagccttttttagttcaagggacattcggaccggggaggaattaggctttgactatggtgatcggttttgggacatcaaaagtaagtatttcacgtgccagtgcggcagcgagaaatgcaaacattccgcagaagccatcgctcttgaacagagtagattggccaggctcgacccacaccccgagctgttgccagagctgggaagcttacctccagtgaacacttag

SEQ ID NO: 186968 - DNA, 2667 bp, synthetic construct
  misc_feature 1..2667: note = Description of Artificial Sequence: Synthetic coding sequence
  source 1..2667: mol_type = other DNA
agcgaggtggaggccctgaccgagcagctgagcgaggaggaggaggaggaggaagaggaagaagaggaagaggaggaggaggaagaagaagaagaggaggaggaggatgaggaaagtggaaatcagtcagatcggtcaggatctagcgggcgccggaaggcaaaaaagaaatggagaaaggactccccttgggttaaaccctccagaaagcggagaaagcgagagcccccaagggccaaagagccacgtggggtctctaacgatacaagtagcctcgaaaccgagaggggcttcgaggaactaccgctctgtagttgccgcatggaggcccctaagattgatcggattagcgagcgcgcaggacacaagtgtatggccacagagagtgtagacggtgaactgtctgggtgtaatgcggcgatcttgaagcgtgaaactatgcggcccagtagcagagttgccctcatggtcctgtgtgagacacaccgcgcgcggatggtgaaacatcactgctgtcctggctgtggatatttctgcaccgccgggactttcttggagtgtcatcctgactttagagtcgcccacagatttcacaaagcctgcgtttctcaacttaatgggatggttttttgcccacattgcggcgaagacgctagtgaggcacaggaggtgacaatccctagaggagacggggtgacgccgcctgcaggcactgctgccccagcaccccccccattgagccaggacgtgcctgggcgcgccgatacaagtcaaccttcggctcgcatgcggggccacggtgagccacgccgccctccatgtgacccgctagccgacaccattgacagctctgggcctagcctcacgcttccaaatggcggctgcttatctgccgtaggcctgccactcggtccaggaagagaggccttggaaaaagctctggtgatccaggaatcagagagaagaaaaaaactgcgttttcacccacgccagctctacttaagcgtgaaacagggagagttgcagaaggtgattttgatgttgcttgataatttggatccaaacttccagtccgatcagcagtcaaagcggactcccctccatgccgccgcccagaaagggagtgtcgagatctgtcacgtgctccttcaggctggcgccaacattaacgcagtcgataagcagcagcggacacccctgatggaagccgtggttaataatcatctcgaggtggctcggtatatggtgcaacgaggcggatgcgtttattccaaggaggaagacggatcaacatgtctgcaccacgccgctaaaattggcaacctcgaaatggtgtcccttctcctaagcaccggccaggtggatgtcaacgctcaggacagcggcggctggacccctatcatctgggcagccgagcacaagcatattgaggtcatcagaatgttactgactaggggagccgacgtgaccctcaccgacaatgaggaaaacatatgcctgcactgggcgtcattcacaggatctgctgcaattgccgaggtactgctgaacgcgaggtgcgacctgcatgctgtgaactaccatggcgacactccactgcacattgctgctagagagagttaccatgattgtgtgttgctcttcctttctcgtggagccaacccagagctacgaaacaaagagggcgacacggcttgggatctaactcctgaacggtctgacgtgtggttcgcactccagctgaaccggaagcttcgcttgggggtcggtaatcgcgccatacgaacagagaagatcatttgccgcgatgtggccagagggtatgagaatgtgcctatcccatgcgtgaacggtgtggacggggagccatgcccagaagactataaatatatatcggaaaactgtgagacgtcaactatgaatattgacagaaatattacccacttgcagcactgcacatgtgtggatgactgtagctcctcgaactgtctctgtggacagctgagcattaggtgttggtacgacaaggacggtcgattactgcaggaattcaacaagattgagccaccactgatatttgagtgcaaccaggcatgtagttgctggaggaattgcaaaaaccgggtggtgcaatccggcatcaaggtcaggcttcaactctatagaaccgctaagatgggctggggcgtgcgggcgctgcagacaattccccagggcacttttatttgtgaatacgttggagaactcatctccgatgcagaggcagacgtacgcgaagacgacagctacctgttcgatctcgataacaaagatggcgaagtgtactgtattgatgcccgttactacggaaacatttccaggtttattaatcatctttgcgatccaaacattatcccagtgagggtgttcatgctgcaccaggacctgaggtttccgcgtatcgcatttttcagtagccgagacattcggactggagaggagcttggctttgattatggagaccggttttgggatatcaaaagcaaatactttacatgtcagtgtggaagcgaaaagtgtaagcattcagccgaggcaattgcgctggagcagagccgcctcgcacgcttagacccacaccccgagctactcccggagctcggcagtctacctccggtgaatacctag

SEQ ID NO: 186969 - DNA, 3531 bp, synthetic construct
  misc_feature 1..3531: note = Description of Artificial Sequence: Synthetic coding sequence
  source 1..3531: mol_type = other DNA
atggccgccgccgccggcgccgccgccgccgccgccgccgagggcgaggcaccggccgaaatgggagcactgcttcttgaaaaggaaacgcgaggagccacggaacgggtccacggatccctgggcgacactccccgctccgaggaaacactgcccaaagccaaccccgatagcctcgagccagcagggcctagctcgccagcaagcgtgactgtcacggttggtgacgagggcgcagacactccagtgggtgctacccctcttatcggagatgaatccgaaaacttggagggagatggcgatctccgcggtgggcggattttactcggccatgctaccaagagcttcccaagttctccaagcaaaggcgggtcctgccccagccgcgctaaaatgtccatgaccggggctggcaagtcaccaccgtctgtgcaatctttggccatgcggcttttgtctatgcccggcgcccagggcgcggctgctgctgggagcgagcctcctcccgctaccacatcccctgaagggcagcccaaagtacaccgcgcaagaaagaccatgtcaaagccgggaaacggtcagccccctgtcccagaaaagcggccacctgagatacagcactttcggatgtctgacgacgtgcattcgctaggcaaagtgactagtgatcttgcgaaaaggaggaaactgaatagcggcggcggactatcagaagaattgggctctgcacgtcgatccggcgaggtcacactcactaaaggcgatcccgggtctctggaagaatgggaaacagtggtcggcgacgacttcagcttgtactatgactcctattcagtcgacgaaagagtggacagtgatagtaaatccgaagtcgaggccctcaccgagcaattgtctgaggaagaagaagaggaagaggaagaagaagaagaagaggaagaagaagaagaggaagaggaggaggaagaagacgaggaaagcggcaatcagagcgaccggtccggctcatccggacgacgcaaagccaagaaaaagtggagaaaggattcaccatgggtgaagccgagccggaaacggcgaaaacgcgagcccccaagagctaaagagccccggggagtatccaatgatactagtagtctggaaaccgaacggggattcgaagagctccctttatgctcctgtagaatggaggctcctaagattgaccgcataagcgaacgtgccggacataaatgcatggccaccgagagcgtcgacggagaactgtcaggatgtaatgcagcaatactaaagcgagaaactatgaggccttcctcaagggtggcccttatggtactctgtgagactcaccgtgcacggatggtgaaacatcactgctgcccaggctgcggatacttttgtactgccgggacattcctggagtgtcaccccgatttccgggtcgcccaccgatttcacaaagcttgcgtgagccagcttaacggaatggttttctgtcctcattgcggggaggacgccagtgaggcacaggaggtgacaatccctcgaggggatggtgttacacctcccgccggcacagccgcaccggcccccccaccattgtctcaggacgtacctggaagggctgacacatctcagcctagtgcccgcatgcgcggccacggagagccacgacggccgccctgtgaccctctcgctgataccattgattcatctggtccctctctgacactgccaaacgggggctgcctgtcagctgtgggtctgccacttgggcctggacgtgaggctttggagaaggcgctggtcattcaagagtccgagcggcggaaaaagctgagattccaccctcgccagctatatctgtcagtcaaacagggggagctgcagaaggttatcttgatgctgcttgataatttggatccaaactttcagagtgatcagcaaagtaagcggactcctctccacgctgctgcacagaagggatctgtcgagatctgccacgtcctgctgcaggccggggccaacatcaatgccgtggataagcagcagcgaactccactgatggaggccgtggttaataaccacttagaagtggctagatacatggtccagcgtggcggctgtgtttatagtaaggaggaagatgggtccacctgcttgcatcatgcagcaaagatcgggaatttggagatggtgtcccttctgttgagtacaggacaggtggatgtgaacgcccaagactccggcggctggactcctatcatatgggccgctgagcataagcacatcgaagtcattcggatgctgctgacgagaggtgcagatgtgaccttgaccgataatgaagagaatatctgcctgcactgggcctcttttaccgggtcagccgctatagcagaggtgctccttaatgccagatgcgaccttcatgcagttaattaccatggtgatacgccgctacacatcgctgcacgggagtcataccacgactgcgtgctgctgtttttgtctcgcggagcgaacccggagctgcgcaacaaggagggcgatactgcctgggatttgacaccagaaaggtctgacgtgtggtttgccctgcagctgaatcggaagctgcgtctcggagtgggaaacagagctatccgcacagagaagattatctgtcgggacgttgctcgcggctacgagaacgtgcccattccatgcgtgaacggcgtcgacggggaaccatgcccggaagactataaatatatctcagaaaattgcgagacttcaaccatgaatattgaccggaacatcacacatctccaacattgtacgtgcgtggatgactgtagcagcagcaattgcttgtgcgggcagctgtcaatcagatgctggtatgacaaagatgggcgcctgcttcaagagtttaacaagatagagcctccactgatctttgaatgtaatcaagcctgctcctgctggaggaactgtaagaacagagtggtgcagagtggaatcaaggtgagattgcagctgtacaggacagccaaaatgggctggggggtacgcgcattacagacaattcctcaaggcaccttcatatgcgaatatgtaggcgaattaatttccgatgcagaagctgatgtacgcgaggatgacagctatctgttcgatttggacaacaaggacggcgaggtgtactgcattgacgcccggtattatggcaacattagtaggtttatcaaccatctgtgtgaccccaacatcatccctgtgcgggtgtttatgcttcaccaggatttacgattcccaagaattgcattcttttctagtcgagatattaggaccggggaggaattaggtttcgattacggagataggttctgggatatcaaaagcaagtacttcacttgtcagtgcgggagcgaaaaatgcaaacactctgccgaagcgattgcccttgaacagtctcgattagcgcgtctggacccacaccctgagctcctgcctgagctgggttcattaccacctgtaaacacctag

SEQ ID NO: 186970 - DNA, 3096 bp, synthetic construct
  misc_feature 1..3096: note = Description of Artificial Sequence: Synthetic coding sequence
  source 1..3096: mol_type = other DNA
agctgccactgcacccccagctggccccccgtgcccgagaagcggcctccagaaattcagcacttccggatgtccgacgatgtgcacagcctcggtaaagtcacctctgacctagctaagcggcgcaagcttaacagtggaggggggctgagcgaggagctgggatccgctcggcgttccggcgaagtgaccctcactaagggtgacccaggctccctggaggaatgggagaccgtggtcggcgatgacttcagtttatattacgattcctactctgttgacgagcgagtggattctgacagtaaatccgaagttgaagccctcacggaacagctgagtgaggaggaggaggaggaagaagaggaggaggaggaggaagaggaagaggaggaagaggaggaggaggaggaggatgaagagtccggcaaccagagtgatcggtcagggtccagcggtagaaggaaggccaagaaaaaatggcgcaaggactcaccctgggtgaagcccagtcggaagcgccggaagcgcgagccccctagagcaaaggaaccgcgcggcgtgaacggagttggcagctccggtccaagtgaatatatggaggtccctttggggtccctggagctgccctctgaaggcacacttagtcctaatcacgccggcgtgagtaacgacacttcctctttggaaactgaacgtggatttgaggagttaccactgtgtagttgccggatggaagcccccaagattgatcgcatcagtgaacgggcaggacacaagtgtatggctactgagtcggttgatggcgaactctctggctgtaacgctgcaatactgaagcgggagaccatgaggccatcctctcgggtcgcccttatggttctgtgcgagacccacagagctaggatggtcaaacaccactgctgccctggctgcggatacttttgcaccgccgggaccttcttggaatgccacccagattttagagtggcccataggttccataaggcatgcgtcagtcaactaaatggaatggtgttttgtcctcattgtggggaggacgcgtcagaggcacaggaagttactatacctcgcggagacggggtcaccccccctgccggcacggctgcaccagctccccctcctctgagccaggatgttccgggcagagcagacacctcccagccctcagctcggatgagggggcatggggaaccaagacggccaccttgtgatccgctcgccgataccatcgattccagcggcccctctctcacacttccaaatggcgggtgcctgtctgcggtgggcctgcccctgggccccggccgtgaggcactcgagaaggctcttgtgatccaggagtccgaacggcgtaaaaaactgcggttccaccctcggcagttgtatctgtcagtgaagcagggagagctccaaaaggtaatcctgatgttgctggataatctcgaccccaactttcagtctgaccagcagtcgaaaagaacccctctgcatgctgcggcccaaaaaggaagcgtggaaatctgtcatgttctcttacaggctggagcaaatattaacgcagtggacaagcaacagcggacacccctcatggaagcagtcgtaaataaccatctagaggtagcaaggtacatggtgcaaagaggggggtgcgtctactccaaagaggaagatggcagtacctgccttcaccatgccgcaaaaatcgggaacctggaaatggtgtcccttctgttatctactggacaggtggatgtaaacgctcaggattcaggcggatggacgcctattatctgggctgcagaacacaagcatatcgaagttatccggatgcttctgacccggggcgccgatgtgactctgaccgataatgtgagcgagaggctggtggaggaggagaatatttgcctgcactgggcgtcctttaccggttcggctgcgatagccgaggtgctgctaaatgcccgctgtgatctacacgccgtgaactatcatggcgacactcccttacacatcgctgctcgcgagtcctaccatgattgtgtgctgctcttcttatctagaggcgcgaatccagaactgcggaacaaagagggggacacagcttgggatctgactccggagcggagcgacgtttggttcgccctccagctcaacaggaaactccggctgggagtaggaaacagagccattcgcactgaaaagattatctgcagggatgtggccagggggtacgagaatgtgcctatcccctgtgtgaatggagtggatggtgagccgtgccctgaggactacaaatacatctctgagaattgtgaaacgagcacaatgaacattgaccgcaatataacacacttgcagcattgcacgtgcgttgacgattgctcttcatctaactgtctgtgcggacagctaagtatcaggtgttggtacgataaggacggacggttgctgcaggagttcaacaagatagagccccccttgatcttcgagtgcaaccaggcttgtagttgttggagaaactgtaaaaatcgggtggtgcagtctggtatcaaagtcaggctacagctctatcgcaccgccaagatgggatggggtgtgcgggctctgcagaccatccctcagggtacgttcatatgtgagtatgtgggtgagttgatcagcgacgctgaagctgacgtcagagaagacgatagctacctgttcgatttggataacaaggacggcgaagtgtattgcatcgacgccagatactacggcaacatttcccgctttattaaccacctgtgcgacccaaacatcattccggtgagagtatttatgttacatcaggacttaaggtttccccgcattgcattcttctccagtagagacattagaactggcgaggagctcggatttgattatggcgacaggttctgggacatcaaaagcaagtactttacctgtcagtgtgggagcgagaagtgtaagcactctgcagaggccattgcactggaacagtccaggcttgctcgcctcgatccccaccccgaattactccccgaactcggcagcctgcctcccgttaatacttag

SEQ ID NO: 186971 - DNA, 3702 bp, synthetic construct
  misc_feature 1..3702: note = Description of Artificial Sequence: Synthetic coding sequence
  source 1..3702: mol_type = other DNA
atgcggggcctgccccggggccggggcctgatgcgggcccggggcaggggacgcgcagcacctccaggttcccggggaaggggccgggggggcccccatcgcggacggggtaggcctcggtctctgttgtcgctgccgagggcacaagcctcgtggactccgcagttaagcacaggcctgacatcccccccagtgccttgtctgccctcacagggagaagccccagctgagatgggcgctctgctgctggagaaggaaactagaggcgccacggagagagtgcatggatccctgggtgacacacctcgtagtgaggagaccttgcccaaagcaacccccgattctttagagcctgctggtcccagtagtcccgcctccgtgactgtcacagtgggggatgagggagcggatacccccgtgggcgcaaccccactgatcggcgacgagagcgaaaaccttgaaggcgacggcgacctccgaggaggaaggatactcttgggtcacgcgactaagtccttcccctcctcacctagtaaaggcgggtcatgtccttcccgcgccaaaatgtcgatgacaggcgctggaaaatcaccgccgtctgtgcagagtctggccatgagactgttatccatgccaggagcccaaggcgctgcagcggctggctcggaacctcctccagcaaccacatctccggaaggccagccaaaggtgcacagggccaggaagactatgagcaaacctgggaacggccagcccccagtgcccgagaagaggccccctgagattcagcatttcaggatgagcgacgacgtgcacagtttaggaaaagtcaccagcgacttggccaagcggaggaaattaaactccggaggcggactgagcgaggagctgggatccgcccgcaggtctggggaagttacactgactaaaggggaccctggctccttggaggaatgggaaacagtggtgggggatgattttagcttatattatgattcctacagtgtcgacgaacgcgtagactccgacagtaagtccgaagttgaagccctgacagagcaactttccgaagaagaggaggaagaagaagaggaggaggaagaggaggaggaggaggaagaggaggaagaagaggaagaggacgaagagagtggtaatcagtcagaccgcagcggatcttctggacggcggaaggctaaaaagaagtggcgcaaggatagtccctgggtcaagccatctcggaagcgtcgcaagcgcgagcctccaagagcaaaagaaccacgcggggtgtccaacgacaccagctctttagagacagaacgcggattcgaagagctgcccctgtgtagttgtagaatggaagcgccaaaaattgatagaatttctgagagagccggacataagtgcatggcgacagaaagtgtggatggcgagttgtcgggatgcaatgccgccatcctcaagagagagactatgaggccaagtagtagagtggccctcatggttctgtgcgaaacacaccgtgctcgaatggtaaaacatcactgctgtcccggctgtggctatttctgtaccgccggcacttttctcgaatgccacccagactttcgggttgcgcaccgctttcacaaagcctgcgtgtcccagcttaacggaatggtcttctgtccacattgcggtgaagacgcgtcagaagctcaagaggttacgattccacgaggggatggggtaactcctccagctgggacagccgcccccgcgcctccaccgctttcccaggatgtgcccggtcgcgctgatactagccaaccctcggcgcggatgcgaggccacggagagcctcgaaggccaccctgcgatcccttggccgacacgattgactcaagcggcccgagtttgacactgcctaatggaggatgcctatctgccgttggcttaccactcggcccagggcgcgaggcactcgaaaaagcgctggtgatccaggagagcgaaaggcggaagaaattgcgctttcacccccgccagctctacctgtccgtgaagcagggagagttgcagaaagttatattgatgcttctggataacctagacccaaatttccaatctgaccagcaaagcaaaagaacccccctgcacgcagccgcccaaaagggttctgtagagatttgccatgtgctcctccaggctggcgctaacatcaatgctgtagataaacagcaacgtacccccctgatggaggctgttgttaacaaccaccttgaagtggcaaggtatatggtacaaagaggcggctgcgtgtatagcaaggaagaggatggctctacttgccttcaccacgctgctaagattggaaatttggagatggtgtcacttctgttgtctaccggacaagtagatgtgaatgcacaggatagtggcggatggacgccaatcatttgggcagccgagcacaagcatatcgaggttatccggatgcttctaacccggggagctgacgtaacgctgaccgataacgaggagaacatatgtttacactgggcaagctttactggctcagctgccatagccgaagtcttactgaacgcccgatgtgatctgcatgccgtgaattaccacggagataccccattacacattgccgcaagagaatcctatcacgactgcgtccttctatttctgtcccgaggcgccaacccagagctccggaataaagagggcgacactgcgtgggatctgacacctgagagatccgacgtatggttcgcattgcagcttaaccgtaagctcaggttaggagttgggaaccgggctattcgcacggagaaaattatatgccgcgacgtggcacgtggatacgagaatgtgcccatcccctgcgtgaacggagttgatggggagccctgtcccgaagattacaagtatatttcagagaactgtgagacatctacaatgaacatcgacaggaatattacccatctgcagcattgcacttgtgtagacgattgcagcagcagcaattgtctctgcgggcagttatccatccgttgctggtacgataaagatggaaggctgctgcaagagtttaataagattgaacctcctctcatcttcgaatgtaaccaggcctgcagctgttggaggaactgcaaaaacagggtggtccaatctggcatcaaggtcaggcttcagctataccgcaccgccaagatgggctggggagttcgggctttacagacaatacctcagggcacctttatctgtgagtatgtaggcgagctcatttccgatgcggaggcagacgttagggaggatgactcatatctgtttgacctggacaataaggatggggaggtgtattgtatagacgcaagatattatggaaatattagcagatttatcaaccatctgtgtgatcccaatataattcctgtgcgcgtttttatgcttcaccaagacttgcgttttccaaggatcgcttttttctccagccgagatatccggaccggagaggaactgggcttcgattatggcgatcgtttttgggatattaagtccaagtattttacctgtcagtgtgggtcagagaagtgcaagcattcagcagaagcaatcgcactggaacagtcacgactggcgcgcttagatccccaccccgagttattgcccgaactgggctcactcccccccgtaaatacgtag

SEQ ID NO: 186972 - DNA, 3804 bp, synthetic construct
  misc_feature 1..3804: note = Description of Artificial Sequence: Synthetic coding sequence
  source 1..3804: mol_type = other DNA
atgcggggcctgccccggggccggggcctgatgcgggcccggggccgcggccgcgcagccccccccggatcccgagggcgcgggcggggaggtccccaccgtggcagaggacggcccagatctctgctctcactgcccagggcacaggcttcctggacccctcagcttagtaccggtcttacgtctccacctgttccgtgtcttcccagtcaaggtgaagctcccgctgagatgggcgcactgctcctagagaaagagacaaggggtgctaccgagcgggtccacggatcgcttggcgacaccccaaggtctgaggaaacgttgcctaaggcgaatccagactcactcgagcctgccggccccagttcacctgcgagcgttacggtaacggtaggggatgagggagccgatacccccgtgggcgctacacccctgattggcgatgagtcagagaatctggaaggcgatggggatctgcgcggcgggaggatattgttaggtcatgcaaccaaaagttttcccagctccccaagcaagggcggatcatgcccgagccgcgccaaaatgtctatgaccggagcaggcaaatcacccccgagcgttcagagcctcgccatgcgcctgctctcaatgcccggcgcccaaggtgccgctgccgccgggtccgaacctcctcctgccacaacatcgcccgaaggtcaaccaaaggtccaccgcgctcgcaaaacaatgtctaagcctggcaatggccagccacctgtcccagagaagaggccaccggagattcagcactttcggatgtctgacgacgtgcattccttgggtaaagtgactagcgaccttgccaagagacggaaactgaactccggtggtgggctgagtgaagagttgggaagcgcccgacggtcaggtgaagttactctcaccaaaggcgatccagggagtctggaggagtgggaaactgttgtgggagacgattttagcctgtactacgattcttactcagtcgacgaaagagttgactctgacagcaaatcagaagttgaagccctcactgaacagctcagtgaagaggaggaggaggaggaggaagaagaggaagaggaggaggaggaagaagaagaagaggaagaagaggaggacgaagaatccgggaaccaaagcgatcgatccggcagctcgggcaggcgaaaggccaagaaaaagtggagaaaggactccccatgggtgaagccttcaagaaagcgcagaaagcgggaaccgccacgcgctaaagaaccaaggggagttaacggtgttggttcctcaggcccttccgagtatatggaggtgcctctggggtccctcgagttaccctcagaaggcactctatcccctaatcacgctggggtgagtaacgatacaagctctctggaaacggaaagaggctttgaagaactgccattgtgcagttgtcggatggaagctcccaagattgacaggatctctgagagggccggccacaaatgcatggcaactgagagtgtcgacggcgaactgtcaggatgcaatgcagccatcctgaagagggagacgatgaggccttcatctcgggtcgctttaatggttctgtgtgaaactcacagagctaggatggtgaagcaccactgctgcccaggttgcggctatttctgtacagctggcaccttcctggaatgtcacccagactttagagtggcacatcggtttcataaagcgtgcgtctctcagctaaacggaatggttttctgtccgcactgtggagaggacgcaagtgaggctcaggaggttaccataccacgcggggatggagtgacaccccctgcaggcacagccgcccctgctcctcctccgttgtcccaggatgtgcccgggcgcgctgataccagccagccttcggcaagaatgcgcgggcacggggaaccccgacgcccaccatgtgacccattggccgatacaatcgattccagcgggccctctctaacgttgcccaatgggggatgcctgtcagcagtgggcctacccctgggcccaggacgcgaagccttagagaaagccctggttatacaggagtccgaaaggcgtaagaagttgagatttcacccaagacagctgtatttgtctgtgaaacagggagagcttcagaaagttattcttatgctgcttgataacctggacccaaactttcagagcgatcagcagagcaagcggaccccgctgcacgcagccgcacaaaaagggtctgtggagatctgccatgtactcttgcaggcaggcgccaatatcaacgcagtggacaaacaacagaggacgccacttatggaggcagtcgtcaacaatcatctggaggtcgctcgttacatggttcagcgcggtggatgtgtatacagtaaagaagaagatggctcaacctgcctgcaccatgctgcaaaaatcgggaacctcgaaatggtatccctcctccttagcaccgggcaggtagatgtgaatgcgcaggatagcggaggttggacaccaatcatctgggcagccgaacataaacatatcgaagtgattcggatgctactgactcgaggggcagacgtaaccctcacagacaacgaggagaatatatgtctacattgggctagcttcaccggaagcgctgcaatagcagaggtgctgctgaacgctcggtgcgaccttcacgctgttaactaccacggcgatacacctctgcacattgcggctcgcgagtcttatcatgattgtgttctcctgtttctgtcccgaggggcgaaccccgagctgcgcaataaggaaggagacacggcttgggaccttacccccgagcgatctgacgtgtggtttgccctgcagctgaataggaagctgagactaggagtgggaaatcgggccattagaacagagaaaattatctgcagagacgtcgcacgaggctatgagaatgtgcctattccatgtgtgaacggcgtggacggcgaaccctgtccagaggactacaaatacatcagtgaaaactgtgagaccagcacgatgaatattgataggaacatcacccacctccaacactgtacttgtgtcgatgactgcagtagcagcaactgtctatgcggtcagctctccattcgttgctggtacgataaagacggccgcctgctacaggaattcaacaaaattgaaccaccccttattttcgaatgtaatcaggcttgtagttgctggcgtaactgcaaaaatcgagttgtccaatctggcattaaggtgcgcctgcaactgtataggaccgcaaaaatgggctggggtgtgcgggcactgcagactatcccccagggaacatttatctgcgagtacgtaggagagctgatctctgacgccgaagctgacgtgcgcgaggatgattcctatctctttgacctggataacaaggacggggaggtttactgcattgatgcccgttattacggcaatatttcacgattcatcaaccacctgtgtgacccaaacataatccccgtccgcgtctttatgttgcaccaggatctcagattcccccgaattgcctttttttcaagccgggacattagaactggtgaggagctggggtttgattacggcgatagattctgggatatcaagagcaagtatttcacttgccagtgcggatctgaaaaatgtaagcactctgcagaagcaatagccctagaacagagtaggctcgcaaggctggacccgcaccctgagcttctgcccgaactgggatctctgcctcctgtaaatacttag

SEQ ID NO: 186973 - DNA, 897 bp, synthetic construct
  misc_feature 1..897: note = Description of Artificial Sequence: Synthetic coding sequence
  source 1..897: mol_type = other DNA
tgaagcaagcggacccccctgcacgccgccgcccagaagggcagcgtggaaatctgtcatgtgctcctgcaggcaggagctaacatcaacgctgttgacaaacaacagcggacccctttaatggaggcagttgtgaacaaccacttggaagtcgcacgatacatggtgcagcgtggaggatgtgtttatagtaaggaagaggacgggtctacttgtctccatcatgccgctaaaattgggaatttggaaatggtatcattgctgttatctacagggcaagtcgacgtcaacgcccaggggcagctaccccctcccagcttgccctctcacccccaggattccggcggctggacccctattatctgggcagcagagcataaacacattgaagtcattaggatgctcctgacccgaggcgccgacgttaccctaaccgacaacgaggagaatatctgtctacattgggcatccttcaccgggtctgctgctattgcagaggtgctgctcaatgccagatgcgatctgcatgctgtaaactatcacggcgacacgcctttacatatcgccgcccgggagtcctaccatgattgcgttctgctgtttctgtcccgcggcgctaacccagaactccgaaacaaagagggcgacaccgcttgggacctcacgccagagcgatcggacgtttggttcgctctccagctcaacaggaagctcaggctcggcgttggcaaccgagccatacgaaccgagaaaattatctgtcgggacgtcgcgcggggctacgagaatgttcccattccatgtgtgaatggcgtggacggcgaaccgtgccctgaggattataagtacatctccgagaactgcgagacaagtaccatgaatatcgaccgaaactag

SEQ ID NO: 186974 - DNA, 897 bp, synthetic construct
  misc_feature 1..897: note = Description of Artificial Sequence: Synthetic coding sequence
  source 1..897: mol_type = other DNA
tgaagcaagcggacccccctgcacgccgccgcccagaagggcagcgtggaaatatgtcacgttctactgcaagccggagctaacataaatgccgtagacaagcagcagcgcacgccccttatggaagcagtcgtgaacaatcatctagaggtcgctagatatatggtgcagagagggggttgtgtatatagcaaagaggaagacggaagcacctgtctgcaccatgctgcgaaaatcggcaaccttgagatggtttccctactcctgtccacggggcaagttgatgtgaacgcgcaaggacagctcccccccccctctctccccagccatccacaggattcaggcggctggactcctatcatttgggccgccgaacataagcatattgaagttattcgcatgttactcacccgtggcgctgacgttacgttgacggataacgaggagaatatctgcctccactgggccagtttcacggggagcgccgcgatcgcggaggtgttactgaatgcgcggtgcgacctccatgcagttaactaccatggagacactccgcttcacattgctgcccgggagagctaccatgactgtgtcctgctgtttctgtcccgaggcgccaatcctgaacttcgaaataaagagggcgacaccgcctgggatctcacccccgagcggtcggatgtgtggttcgctctgcagcttaacaggaaactccgcctcggggttggcaacagagccatcaggaccgagaagatcatctgcagagacgttgctcgcggctatgagaacgtgcctatcccctgcgtcaacggggtggatggggaaccatgcccagaggattataagtatattagcgagaattgcgagacatccacaatgaatatcgatcgcaattag

SEQ ID NO: 186975 - DNA, 3633 bp, synthetic construct
  misc_feature 1..3633: note = Description of Artificial Sequence: Synthetic coding sequence
  source 1..3633: mol_type = other DNA
atggccgccgccgccggcgccgccgccgccgccgccgccgagggcgaggcccctgctgaaatgggtgccctgctcctcgagaaagagacgcgcggcgctaccgagagggtgcatggtagcctcggggatacaccccgttctgaagagaccctgccaaaagccacacctgactccctcgagcccgcaggcccgagctcacctgcgtccgtgactgttaccgtgggcgatgagggagccgatacgcccgtgggcgcaactcccctaatcggagatgaaagtgagaatctggaaggggatggagatttacggggcgggcgcatcctgctcggacatgctacgaagagcttccccagctccccttccaaaggtggaagttgtccctcgcgtgcaaaaatgagcatgaccggcgcaggcaagagtcctccgtcagtgcagtccctcgcgatgcgcttactctctatgcccggggcgcaaggcgcagctgcagctggctccgaacccccccccgcgaccacctcccccgaggggcaaccaaaggttcatcgcgcgagaaagaccatgagcaaacccggcaacggtcaaccccctgtccctgagaaaagaccccccgaaattcaacatttcagaatgagtgatgacgtgcacagcctagggaaggtgactagcgatttggccaaaaggagaaagttaaatagcgggggcgggctgagcgaagagctgggctccgcaaggcgttctggcgaggtgacattgaccaaaggagatcctgggtcccttgaggagtgggagaccgtggtaggagacgacttttccttatattatgattcatactccgttgatgaacgcgttgacagtgacagcaagtcagaagtggaagcgctcacggaacagttatctgaagaagaggaagaggaagaggaggaggaggaggaggaggaggaggaggaagaggaggaggaggaagaggaggacgaagagtcaggaaatcagtcggatcgttcaggatccagtggccgacggaaggccaagaaaaaatggcgcaaagacagtccctgggtgaagccatcaaggaaaaggcgtaaacgagagccaccaagggctaaggagccccgtggagtgaacggcgtgggatcctcaggaccttccgaatacatggaggtgcccttggggtccctcgaactgccatcagaaggtacactatccccgaatcatgccggagtgtctaacgacacctctagcctagagaccgagcggggttttgaagagctgccactctgtagctgcaggatggaggcacccaaaattgaccgcatttctgagcgagctgggcacaaatgtatggccacagaaagtgttgatggcgaactctccgggtgtaacgctgccatcttaaagcgggagaccatgcgaccttctagtcgggttgccctgatggttctgtgcgagacgcaccgggcccgcatggtgaaacatcactgttgtcctgggtgtggttatttttgtacagccggtacgtttctggagtgccacccagattttagggttgctcaccggtttcacaaggcttgtgtgtcgcaattgaacggaatggtattttgtcctcattgtggagaggatgcctccgaagcccaagaggttactatcccgcgcggcgacggcgttacccctccggctggaactgccgccccagctcccccacccttgtctcaggatgtccctgggcgggccgacacaagccagccctccgcacggatgcgtggacacggagagccgcgccggcccccctgcgaccccctggctgacactatagattcaagcgggccgtcattgacgctccccaacgggggttgcctgagcgcggttggcctgccattggggccagggagggaggcactggagaaggccttagtgatacaggaaagcgaaaggcgcaagaagttgcggttccaccctagacaactgtacttgtctgtgaagcaaggagagctacagaaggtgatcctcatgttgctcgacaatctagacccaaattttcagagtgaccagcagagcaagaggacgcccctgcatgccgcggcccaaaaaggctctgtggagatctgccacgtgcttctccaggcgggagctaacataaacgccgtggacaagcagcagcggaccccgcttatggaggcagtagtgaataatcatctcgaggttgcccggtacatggtgcagcgaggcgggtgtgtatactccaaagaggaggatgggagcacttgtctgcaccacgcagctaagatcggcaacctcgaaatggtgtctttgttgctgtccactggccaagtcgacgtcaatgcccaggattcaggaggttggacaccaatcatatgggccgcggagcacaagcacatcgaggtgatccggatgctgctgacacgcggagcagacgtgactctcactgacaatgaggagaacatctgtctgcattgggcaagtttcaccggatctgccgccatcgccgaagtcctgttaaatgcacggtgcgacttgcacgcggtgaattatcacggcgacacgccccttcatattgcggctagggaatcgtaccacgactgcgttctcctgttcctttcaaggggagccaatcctgagctgcggaacaaggagggcgatacagcctgggaccttacacctgagaggagcgacgtatggttcgcactccaacttaaccgaaaactccgcctcggggtagggaaccgggccatccgcaccgaaaagatcatttgccgtgatgtggcacgtggatatgaaaatgtacctattccgtgcgtgaacggtgtcgatggcgaaccatgcccagaggattataagtacatcagcgagaattgcgagacatctactatgaacatcgaccgtaacatcacccatctgcagcactgtacgtgtgtcgacgattgttcatcttctaactgtctgtgcggccaactctctatcagatgttggtacgataaagatggcagactgctgcaggaatttaataagatcgagccaccactgatattcgagtgcaatcaggcatgtagctgctggcgcaattgcaagaaccgagtggttcagagtggcatcaaggtccgtctccagctctacaggaccgcaaagatgggttggggggtgcgcgctttacagactattccccaggggacatttatatgcgaatatgtcggcgagctcatctccgatgccgaagccgacgtgcgtgaggatgattcctatttatttgatctcgacaacaaagacggcgaggtgtattgcatcgatgcgcgctattacggtaatatcagcagattcattaaccacctgtgcgaccctaatattataccggttagggtgttcatgcttcatcaagacttgcggttccctcgaattgcttttttctcatcccgcgacatcaggaccggcgaggaactgggatttgactatggcgatcgattctgggacatcaaaagtaagtattttacatgccagtgcggaagcgagaagtgcaagcactccgcagaggctatcgccctggagcaatcaaggttagcacgcctcgacccacaccctgaattgctgccagaactgggcagtttgcctccagtgaacacctag

SEQ ID NO: 186976 - DNA, 3531 bp, synthetic construct
  misc_feature 1..3531: note = Description of Artificial Sequence: Synthetic coding sequence
  source 1..3531: mol_type = other DNA
atggccgccgccgccggcgccgccgccgccgccgccgccgagggcgaagcccccgctgaaatgggggctctgctgctcgagaaggaaacacggggcgctaccgagcgggtccacggctcactcggagacaccccccgaagcgaggagacactgccgaaggccactcctgattctctggagccggctggtccttcctctccggcgagtgtgacggtgacggtgggggacgaaggagctgacacccccgttggagccaccccgcttattggcgacgagtctgaaaacctcgagggagatggagatctcaggggcggcagaattctcttagggcacgctaccaaatcgttcccatcctcccctagcaaggggggctcctgtccctctcgggcaaagatgtccatgacaggcgctggcaagagtcccccaagtgtccagtccctggccatgcggctgctgtctatgcctggcgcgcagggcgcagccgccgccggtagtgaaccccctcccgccaccaccagcccagagggccagcccaaggttcatagggccagaaagaccatgtccaagcccgggaacggccaaccgcctgtgcctgagaaaaggccaccagaaatacagcattttcgtatgtccgatgacgtgcactccctgggaaaagtcacgagtgatttagccaagcgccgtaaacttaattcaggcggtgggttatctgaagaattgggcagtgccaggagatccggagaggtgaccctgaccaaaggcgatcctggcagcctggaggaatgggagacagtcgtgggagacgacttctcactgtactacgacagttactctgtggacgagagggtggatagcgactccaagagcgaggtagaggctctgacagaacagctgtccgaggaagaagaagaggaagaagaggaggaggaagaggaggaggaggaagaagaggaagaagaagaggaagaagacgaagagtcaggaaaccagagcgatcgttcaggcagcagtggcaggcggaaggccaagaaaaagtggcgaaaggacagcccatgggtaaagccatcccggaagcgcaggaagcgtgagccacctcgggctaaagagccaaggggtgtaagcaacgacacgagttctctggaaactgaacgcggctttgaagaactgcctctgtgttcttgtagaatggaagcccccaagatcgaccgcatatctgaacgagccggccacaagtgcatggcaacagaaagcgtcgatggtgaactgagtggctgcaatgcagccatactcaaacgggagacaatgcgcccgtcgtcacgcgtcgccctaatggtcctttgcgaaacccatcgcgcccggatggtgaagcaccactgttgtccagggtgcgggtatttttgtacagcggggacatttctggagtgtcaccccgattttagagtggctcacagatttcataaggcatgtgtctctcaacttaatggaatggtgttctgtccccattgtggagaggacgcttcagaagcgcaggaagttacaataccaaggggagacggcgtgactccacccgcaggcacagccgcaccagcaccgcctcccctgtctcaagatgtgcctggcagggccgataccagtcagccctcagcgaggatgaggggccacggtgagccaaggaggcccccatgcgacccgttggcagataccattgattcttcagggcccagcttgactctgccaaacggaggctgtctctctgccgtcggattacccctcggccccggtagggaggccctagagaaagcactcgttatccaggagtccgaaagaaggaagaagctaaggtttcaccccagacagctgtatttaagtgtgaagcagggggagttacagaaagttattctgatgctgctagacaatctcgaccctaattttcagtcagaccagcagagcaagcgcaccccattacatgcagcggcacagaaaggtagtgtggagatctgtcatgtactgctccaggctggagcaaacatcaacgccgttgataagcagcaaaggactccacttatggaggccgtggtaaataatcatctcgaagtggctagatacatggtgcaacgcggcggctgtgtgtattcgaaagaggaggacggctctacttgcctccatcacgctgcaaagatcggcaatctcgagatggtgtccttgctgttatccaccggacaggtcgatgtcaacgcccaggactccggagggtggacacctataatctgggccgccgagcacaaacacattgaggttatacgaatgttgctcacaaggggtgcagacgtaacattgactgataacgaggagaacatctgcctgcattgggccagttttaccggaagcgccgccatcgccgaggtgctgttgaacgctagatgcgacttgcatgccgtgaactaccatggtgatacgcctttacacattgctgctcgagaatcctaccatgactgcgtgctgttgttcctgtcaaggggagctaatcctgaactccgaaacaaagagggggacaccgcatgggatctgactcctgagcggagcgatgtctggtttgctttgcagctaaaccgaaagctgcgcctgggagtcggaaatagagcgatacgcactgaaaaaattatatgtagggatgtcgcccgaggctacgagaacgtaccaatcccctgtgtcaacggagttgacggcgagccttgcccagaagactacaagtacatctccgaaaactgtgaaacctcgacaatgaatatagatcgcaacattactcatctgcagcactgcacctgtgtggacgattgttccagttccaattgcctctgtgggcaactgtccatccgttgctggtatgacaaagacggcagactgctgcaggagttcaataagatagagccaccgctcatctttgaatgtaaccaggcgtgctcttgttggcgtaactgcaaaaatcgcgtagtgcaatcaggtatcaaagtccgtctgcagctgtaccggactgcaaaaatgggttggggcgtgcgggcccttcagacgattcctcagggtacatttatctgtgaatacgtgggagagctcatttctgatgctgaggctgacgtgcgggaagatgactcttatctcttcgatctggacaataaagacggggaagtctattgtatcgatgccaggtattacggtaacatttcgcggtttattaaccacctctgtgaccctaacataattcccgttcgggtcttcatgctccaccaggatttacggtttcccaggatagcatttttcagtagccgagacataaggaccggtgaggaactgggattcgattatggcgatcggttttgggatatcaagagtaaatacttcacatgccagtgtggcagtgagaagtgcaagcattcagctgaagcaatcgcactggagcaaagcagactggcccgcctggacccccatcccgagctgctccccgagttaggtagtctccctcctgtgaatacatag

SEQ ID NO: 186977 - DNA, 3702 bp, synthetic construct
  misc_feature 1..3702: note = Description of Artificial Sequence: Synthetic coding sequence
  source 1..3702: mol_type = other DNA
atgcggggcctgccccggggccggggcctgatgcgggcccggggcaggggcagagccgccccgcctggttcgcgggggagagggagaggaggtccccaccgcgggcgaggcaggccacgctcgctcctgagcctgccccgcgcccaggcaagttggacgccccagctgagcaccggactcaccagtcccccggtcccctgcctgccaagccagggtgaggcccccgccgaaatgggagcgctgctgttggagaaagagacgcggggcgctacagagagggttcacggctccctcggcgacactcctaggtcagaagaaaccctccccaaggctaatcccgactctctggaaccggcagggccttcctctccagcaagtgtgactgttactgttggcgatgaaggagcagatactcccgtcggagccaccccacttatcggagatgagtctgagaatctggagggtgatggcgatctgagagggggccggattctgcttggccatgcaaccaagagcttcccaagtagcccgtccaagggcgggtcttgcccgtcacgggccaagatgagtatgaccggagccggcaagagcccccctagcgtacagtcactggctatgagactgctgtccatgccaggcgcgcagggggccgcggccgcaggatctgagcccccacctgctaccacctctccagagggacagccgaaagtccacagggccaggaaaaccatgtctaaaccaggtaatggccaaccaccggttcccgaaaagcgacctccagagattcagcattttcggatgtccgacgacgtccattcccttggaaaggtgacctccgatttggctaaacggagaaagctgaattcaggcggcgggttatctgaagaactcggtagtgctagacgttccggcgaggtgacactaacaaaaggagatcccggaagcctggaagaatgggaaaccgttgtgggtgacgacttctcgctgtattacgactcgtacagtgttgatgagagagtggactcagacagcaagtcggaagttgaagctctcactgaacagctgtccgaagaggaggaggaagaggaagaggaagaggaggaagaagaagaggaggaagaagaagaggaggaggaggaggacgaggaatccgggaatcagtcagaccggtctggtagttcaggcagacgaaaggccaagaagaaatggaggaaagactcaccttgggtgaaaccttctaggaagcggcggaagagggaaccacccagagccaaggagccgcgtggggtgtccaatgatacctcgagcctagagaccgagcgcgggttcgaagaactgcctctttgcagctgcaggatggaggctcccaagatagaccgtatcagcgaacgcgctggccacaagtgtatggccaccgagtcagtcgacggcgaactgtccggatgtaatgccgccattttgaagcgagaaactatgagacccagttcaagagtcgcattaatggtgctgtgcgagactcaccgggcccgaatggtgaagcaccactgctgccctgggtgtggatacttttgtacagcaggcaccttcctggagtgtcaccctgatttccgtgtggcccatcgttttcacaaagcctgcgtcagccagctcaacggtatggtgttttgcccacactgcggcgaggatgcttccgaagctcaggaagtcaccatcccaaggggcgatggagtgacacctcctgcagggaccgccgcaccagctccccccccccttagccaggatgtgccggggagggctgacacaagtcaaccatcagctcgcatgcgcgggcacggcgagccccggcgcccgccgtgtgacccgctcgctgacaccatcgattccagtgggccctctctgaccctccccaacggtggatgccttagcgcagttggtctgcctctgggacccggccgcgaagcactcgaaaaggccctggtgatccaggaaagtgaacggcgcaagaagctccgcttccaccctagacagctttacctgagcgtgaagcagggagaactgcagaaagtaattctgatgctccttgacaaccttgacccgaatttccagtcggaccagcagagcaagcgtacccccttgcacgccgctgcacagaaaggcagcgtcgaaatttgtcatgtactccttcaggccggggcaaacatcaatgcagtagacaaacagcagcgcactccactgatggaagctgttgtgaataaccacttagaagtggctcgctacatggtgcaacgcggcgggtgtgtatatagcaaagaagaggacggtagcacatgtcttcatcatgccgcaaaaataggcaacctcgaaatggtcagtctgctcctctctacaggtcaggtcgacgttaatgcccaggattccggcggctggacacccattatctgggctgctgaacataaacatatcgaggtgattaggatgctcctgacacgcggagccgatgtgactctgaccgataatgaagagaatatttgcctccattgggccagctttacagggtcagccgccattgcagaggtgctgctgaacgcgcggtgcgatctccacgctgttaactaccacggggacacacccctccacattgccgcaagagagtcgtatcatgactgtgttttgttgtttctcagcaggggggcaaaccccgagctgcgaaataaggagggtgacacggcttgggacctaacccccgaacgcagtgacgtgtggtttgcactgcaacttaaccgcaagctccggctgggtgtcggaaatcgcgcaattcggactgaaaagataatttgtcgtgacgtcgcccgcggatacgaaaatgtacctattccttgcgtcaacggtgttgacggggagccttgcccagaagattacaagtacatctctgaaaactgtgaaacttctacaatgaatattgatcgtaatattacccacctgcaacactgtacttgcgtggacgactgttcctccagtaattgcctgtgtggtcagttgtcgatacggtgctggtacgacaaagatggcaggctcctgcaggagttcaataagattgaaccacctctgatcttcgagtgcaaccaggcatgctcttgttggcgtaactgcaaaaaccgggttgtgcagtctggcattaaggttaggttgcagctgtataggaccgctaaaatgggttggggggtgcgcgcacttcagactatacctcagggtacattcatttgcgaatacgtcggtgaactgatctctgacgccgaggcagatgtcagagaggacgactcctatttatttgatcttgacaacaaagacggggaggtctattgcatcgacgcaagatattacggcaacatttcacggttcattaaccacttgtgtgaccccaacattatcccggtgagagtctttatgctgcatcaggatctacgatttcctcggatcgcctttttctccagccgggacatcaggacaggcgaggaactggggttcgactatggagacagattctgggacatcaagagcaagtacttcacatgtcaatgtgggagcgagaaatgcaaacacagtgccgaggccattgctctggaacagtctaggcttgcccggcttgacccccaccccgagctcttacccgaactcgggtctctgccacccgtgaacacctag

SEQ ID NO: 186978 - DNA, 897 bp, synthetic construct
  misc_feature 1..897: note = Description of Artificial Sequence: Synthetic coding sequence
  source 1..897: mol_type = other DNA
tgaagcaagcggacccccctgcacgccgccgcccagaagggcagcgtagagatctgccacgtgttgttgcaagccggcgccaacataaatgcagttgacaagcagcaacgcacaccactgatggaagccgtcgtgaataaccaccttgaagtcgctcggtatatggtccagagagggggctgtgtgtattccaaagaagaagacggaagcacatgtctgcatcatgcagcaaagatcggcaacctggaaatggtctctctcctgctgtcgactggccaggtcgatgtcaatgcgcagggacagctgcctcctccctctttgcccagtcatccccaggactctggcgggtggacccctataatatgggcggcagaacacaaacacatcgaggtcattagaatgctgctgaccagaggagccgacgtcactttaaccgataatgaagaaaacatctgccttcattgggcgagcttcaccggatctgccgctattgctgaagtgctgctcaacgcacggtgcgaccttcacgcagttaattaccatggtgacactcctctgcatatcgcagcccgtgagagttaccacgattgtgtactcctgttcttgagccgcggcgccaaccccgagctgcgtaacaaagaaggtgatacggcttgggacctgacgcccgagagaagcgatgtgtggtttgcccttcagctgaatagaaagttacgcctcggagtcggtaatagagccatccgaactgaaaagattatatgcagagatgttgctcgagggtatgagaatgttccaataccctgtgtgaatggcgtggacggggaaccttgtccagaggattataagtacatctcagagaattgtgagaccagcactatgaacattgatcgaaactag

SEQ ID NO: 186979 - DNA, 3531 bp, synthetic construct
  misc_feature 1..3531: note = Description of Artificial Sequence: Synthetic coding sequence
  source 1..3531: mol_type = other DNA
atggccgccgccgccggcgccgccgccgccgccgccgccgagggcgaagcgcccgccgagatgggagcattactcctcgaaaaagagacacgtggcgctaccgaaagagtgcatggctcattgggtgacactcctagaagtgaagagacactccccaaagccaaccctgattctctcgagcccgccggaccgtccagtcctgcctccgtcacagtgaccgtgggggacgagggggccgatacacccgtaggagcgacgcccttaataggagatgaatccgagaacctagaaggcgatggagacctaaggggggggcgcatactgctggggcacgccaccaagtcttttcccagttccccatccaaaggcggaagttgtccctctcgtgccaaaatgtccatgactggggccgggaagtctcccccctccgtccagtcactagctatgcgcctgctcagcatgcccggggctcagggcgctgctgcagccgggtctgagccacctcctgccaccacctcgccagagggccaacccaaggtacaccgcgcccggaaaactatgtccaagccaggaaacggtcaaccgcctgtccccgagaagcggcccccagagattcaacacttcaggatgtccgacgatgtacattcactcggaaaggtgacatcagatcttgctaagaggcgaaagctgaattccggtggcggtttaagtgaagaactggggtcggctaggcggagcggagaagtgaccctcaccaagggagaccccggaagtctagaggagtgggaaacggtcgtgggagatgatttctctttgtactatgattcctacagcgtggacgaacgagtggacagcgattccaagagtgaagttgaggctctgaccgagcagcttagcgaagaagaggaggaagaggaagaagaagaagaggaggaggaggaggaggaggaggaggaggaggaggaggaggatgaagaaagtggcaaccaatcagaccggagcggaagttctgggcgacggaaggctaagaaaaagtggcggaaagacagcccttgggtgaagcccagcaggaagcgccgaaagcgggagcccccacgggcaaaagaaccgagaggcgtttctaacgacacctccagcctcgaaacggaaaggggctttgaagagctcccgctctgttcttgccgcatggaagcacccaagatcgacagaatttctgaaagggccggtcacaaatgcatggctactgagagtgttgatggcgaactgtctggctgcaacgcagccatcctgaagcgagaaacaatgcgaccctcctctcgcgtggcactaatggtgctatgcgagactcaccgcgccaggatggtaaagcatcactgttgtccaggctgcggttatttttgtaccgccggaaccttcctcgagtgtcatcctgattttcgcgttgcccatcgatttcacaaggcttgtgtgtcccagcttaacggaatggtcttctgtccgcactgcggagaggatgcatccgaagcacaagaagtcacgatccctaggggcgacggggtcaccccgcccgctggtaccgccgcacctgcgcctccacccttgagccaggacgtacctggccgggcagatactagccaaccatcggcacggatgagagggcacggcgaacccagacgacctccttgcgacccgctggctgacacaattgattctagcggaccctctctgactcttcctaacggtggatgtttgagcgccgtagggctgcctctgggtccaggccgcgaagctctcgagaaggcccttgtgattcaagaatccgagcgtagaaaaaagctgaggtttcacccacgccagttgtatctctccgtgaagcagggggagcttcaaaaggttattctgatgttattggacaaccttgatccaaacttccagagtgaccagcaatcaaagaggactcccttgcatgcagcagcccagaagggctccgtcgagatctgtcatgtcttgctccaggccggagccaacatcaacgccgtcgataaacagcagcgcactcctttgatggaggctgtggtgaacaaccaccttgaagtggcccgttatatggtgcagagaggggggtgtgtgtatagcaaggaagaggacggtagtacatgtctgcatcatgccgctaaaattggtaaccttgagatggtcagtctgctgctgagcactgggcaggtcgacgtgaacgcacaggactcaggaggctggacacccatcatctgggctgctgaacataagcacatcgaggtcataagaatgcttctgacaaggggagccgacgtgaccctgacagataacgaagagaatatttgcttacattgggcatcattcaccggcagcgccgccatcgcagaagtgttactaaatgcaagatgcgacctgcacgccgtcaactaccacggagataccccactgcatattgcagcaagagagtcatatcacgactgcgtcctcctgttcctgtcccgtggggccaaccccgaattgaggaataaggagggggataccgcttgggacctgaccccagagagatccgatgtttggttcgcacttcagttgaacagaaagctgcggcttggggtaggaaaccgtgcgatcaggacagaaaaaattatttgtcgggacgttgcaaggggctatgaaaatgtgcctatcccatgcgtcaacggcgtggatggtgagccctgccccgaagattataaatatataagtgagaactgtgagacttctactatgaacatagatagaaatatcacccacttgcagcattgtacttgcgtcgatgactgtagttcatcgaattgcttatgcggacagctctctatacggtgttggtacgacaaggatggcagactgctgcaggaatttaataagattgaaccgccattaatctttgaatgtaatcaggcttgctcatgctggcgcaattgcaagaaccgggtggtccagagtggtattaaagtacgcctgcagctctacagaactgcgaagatgggctggggggtgagagcactccagaccataccacagggaaccttcatatgcgaatatgttggcgaacttatttccgacgccgaagcagacgtaagggaggatgatagctatcttttcgatctggacaataaagatggagaggtgtactgtatcgatgccagatattatggcaacatctctcgtttcattaaccacctgtgcgaccctaacattattcccgttagggtgttcatgctccaccaggatctccgctttcctcggattgcttttttctccagcagggacatacgtacaggcgaggaactaggattcgactatggtgatcgattttgggacatcaagagtaaatacttcacatgccagtgcggatcggagaaatgcaaacactccgccgaggctattgcactggaacagtcccggctggccaggctcgacccccaccccgagttactccccgagctaggcagcctgcctccggtgaatacctag

SEQ ID NO: 186980 - DNA, 2667 bp, synthetic construct
  misc_feature 1..2667: note = Description of Artificial Sequence: Synthetic coding sequence
  source 1..2667: mol_type = other DNA
agcgaggtggaggccctgaccgagcagctgagcgaggaggaggaggaggaggaagaagaagaagaggaggaagaggaggaggaagaggaggaagaggaagaagaggacgaagagtcaggcaatcagtccgaccgatctgggtcatctggccggcggaaagcaaaaaagaagtggcggaaggatagtccctgggtaaagccaagcaggaaaagacgcaagcgagagcccccacgagccaaagaaccacgcggagtgagcaatgatacctcttctctagaaaccgaacgggggtttgaagaactgcccctctgctcatgtcgcatggaggccccaaaaatcgacagaattagcgagcgggccggccataaatgcatggccaccgagagtgtggatggagagttgagcgggtgcaatgcagcgattttgaaacgggagacaatgcggccctccagcagggttgcgttaatggtcctgtgtgagacacacagagccagaatggtgaagcaccactgctgtccaggctgtggctacttctgtaccgctgggacttttctcgaatgccatcccgacttccgggtagctcatagatttcataaggcatgcgtctcccagctgaacggcatggtgttttgtccacattgtggggaggacgctagcgaggcacaggaggttacaattccacgcggcgacggcgtgacccctccagccggaacagcagccccagctccaccccctctctcccaggacgttcctggcagggccgacacttcacagccttcagcaaggatgcgcggtcatggcgagcctaggcgaccaccctgcgacccccttgcggataccattgactcttctggcccttcacttacattgccgaatggcgggtgcttatcagccgtgggcttacccttgggtccaggccgggaggccctggagaaggcactcgtgattcaggagtccgaacggcgcaagaaacttcgtttccacccccgccagctctacctgtcagtcaagcaaggcgaactgcagaaagtgatcctgatgctgctagataatttagacccgaactttcaatcagaccagcagtccaagcgtactcctctccacgccgccgcgcagaaagggtccgtggaaatctgccacgtgctgctgcaagcaggggctaacataaacgccgttgacaagcagcagagaacgcctctgatggaggcggtggtgaacaaccatttggaagtggccagatatatggttcagcggggaggctgcgtctatagtaaggaggaggacggatccacttgtctgcatcacgcggctaaaatcgggaacctcgagatggtctccctcctgctgagcactggacaggtcgacgtgaatgctcaggactctggcggttggactcctattatttgggcagccgagcataaacatattgaggtgattcgcatgctgctcaccaggggcgctgacgtgaccctcacagataacgaggagaacatatgcctacactgggccagcttcacgggaagcgccgcaatagctgaagtgttactcaacgcacgctgtgatcttcatgccgtgaattaccacggggacaccccccttcacatcgccgccagggaaagttaccacgattgtgtgctgctgtttttgtcccgcggcgcaaaccctgagctgcgcaataaggaaggggacacagcttgggatctaacccccgagcgcagcgatgtttggtttgcgctccagctgaacagaaagttacgccttggagtcggcaacagagcgatccggactgagaaaatcatctgccgggacgtggcaaggggctatgagaatgtccccattccctgtgtgaatggagtggacggcgaaccctgcccagaggattacaaatatatctcagagaattgcgagaccagcactatgaacattgaccgtaatatcactcacctgcagcattgtacgtgtgttgacgattgcagtagctctaattgtctctgtggccaactttccatccgttgctggtatgataaagacggaaggttgctgcaggagtttaataaaatcgaacctccacttattttcgaatgtaatcaggcctgctcttgctggcgcaattgcaaaaatagagttgtacagagcgggatcaaggttagactacaactttataggactgcaaagatggggtggggggttcgggccctgcagactatcccacagggaaccttcatttgcgagtacgtgggcgaattgatcagtgacgctgaagcagacgtaagagaagatgattcctacctatttgatttagataacaaagacggtgaagtttactgcatagatgcccggtactacgggaatatctctcgttttatcaaccatctctgcgatcctaatatcatcccagtgagagtttttatgctgcaccaggatctgcggttccccagaattgctttctttagttctagggacattcgcaccggtgaggaactcgggttcgattacggagatagattctgggatatcaaatccaaatacttcacatgccaatgtggctccgaaaagtgcaagcatagcgccgaagcgattgccttagaacaatcaaggttggctagactcgaccctcacccggagctactaccagagttgggatccctgccgcccgttaacacctag

SEQ ID NO: 186981 - DNA, 2769 bp, synthetic construct
  misc_feature 1..2769: note = Description of Artificial Sequence: Synthetic coding sequence
  source 1..2769: mol_type = other DNA
agcgaggtggaggccctgaccgagcagctgagcgaggaggaggaggaagaggaagaggaagaggaagaggaggaggaggaagaggaagaagaggaggaggaggaggacgaagagagcggtaaccagtctgaccgatctgggagttcgggacgcaggaaagccaagaaaaaatggagaaaagacagtccatgggtgaagcccagtcgcaagcgtcggaaacgggaaccccctcgggccaaggagcccagaggcgtcaatggagttgggagttcaggcccttccgaatacatggaggtgcctctcggttccctggagcttccctccgagggaaccctctcacctaatcacgccggtgtgagcaatgacacttcgagtctggaaaccgagaggggcttcgaggaactgccactgtgcagctgtcgcatggaggcacctaagatcgatcggatttccgagcgggcggggcataagtgtatggcaacagaatctgttgacggggagctttccggatgcaacgccgctattctgaagcgcgaaactatgaggccttcttctcgggtagccctgatggtcttgtgcgaaacacatcgggcgagaatggttaaacaccactgttgtccaggatgtggctacttctgtacagcgggtacattccttgagtgccatcctgactttcgggtcgcacacaggtttcataaagcgtgcgtctcgcagcttaatggaatggtgttctgccctcactgcggagaagacgcctcggaggcgcaggaggtaaccattccacgtggtgatggagtaacacctcctgctggtacagcagcccctgcccccccaccactgagtcaggatgttcctggccgggctgacacatctcagccctctgcacgtatgaggggccacggtgagccccggaggccgccttgtgaccctctggcagacaccattgactcttccggaccgtctcttacgctgccgaatggtggttgcttgagcgccgtcggcctcccgctgggtcctggccgggaagcgctggaaaaagcgctcgttatccaagaatccgagcggagaaagaagctgaggttccatccaagacaactgtatctatctgtgaagcaaggagagctacagaaggtgattttaatgttgcttgataacctggatccaaattttcagtctgatcagcagagcaaaaggaccccgctgcacgccgccgcacagaagggctctgtggagatctgccacgtactgctccaggcaggcgcaaatattaacgctgtcgacaagcagcaacgcacgccactgatggaagcggtggtgaacaaccacctcgaggttgctagatacatggtgcaaagaggaggctgcgtgtattcaaaagaggaagacggaagcacatgcttacatcatgcggccaagatcgggaacctggaaatggtttcgctcctcttgagcaccggccaagtagacgttaacgcacaggattcaggcggctggacccctatcatctgggcagctgaacacaagcatatcgaggttatccggatgttgctgaccagaggagctgatgtgactctgaccgacaacgaggagaatatctgtcttcactgggcgagttttacagggtccgctgcgatcgccgaggtgctgttgaatgctagatgtgacctgcatgccgtcaattaccatggtgatacacccttgcacatagcagctcgagagtcttaccacgactgcgttcttctgtttcttagcaggggtgctaatccggagttacgcaacaaggagggcgacacagcgtgggacctaacaccagagcgaagcgatgtctggttcgctttacagctgaaccgcaaactgagactcggcgtgggaaatcgagcaatcaggaccgaaaaaattatctgtcgtgatgtcgcacgaggttatgagaacgtaccaatcccctgcgtgaacggcgtggatggcgaaccatgtcccgaggattacaaatatatctctgaaaattgcgagacttccaccatgaacatcgacagaaacattactcacctgcagcattgcacttgcgtggacgattgtagctcaagtaactgtctgtgcggccagctgtccatcaggtgctggtacgataaggatggcagactgctccaggagtttaacaaaatagagccaccgctgatctttgagtgtaaccaggcctgcagctgctggaggaactgcaagaacagggtggttcagtctggaattaaggtccgcctccagctttaccgcaccgcgaagatgggatggggggtcagagccttacagacaatcccccagggaacatttatttgtgagtatgtaggggagctcatttccgacgccgaggccgatgtgagagaggatgactcctacctattcgacctcgacaacaaggacggcgaagtttactgcatcgacgccagatactacggcaatatatcccgctttatcaaccacctatgcgatcctaacataataccagtccgagtgtttatgctgcatcaagatcttcggtttccccgcatcgcatttttctcgagtcgagacatcagaactggggaggaactcggctttgattacggcgacagattttgggacatcaagagcaagtacttcacctgtcaatgtggtagcgaaaagtgcaaacattcagccgaggctatcgcactagaacagtctagactggcacgcctggacccccaccctgaactgctcccggagctgggcagcctgccgcccgtgaacacttag

SEQ ID NO: 186982 - DNA, 3096 bp, synthetic construct
  misc_feature 1..3096: note = Description of Artificial Sequence: Synthetic coding sequence
  source 1..3096: mol_type = other DNA
agctgccactgcacccccagccggccccccgtgcccgagaagcggccacccgaaatccagcactttagaatgagcgatgatgtgcattccctgggaaaggtgacctccgatctggccaagagacgaaagctgaattccggaggagggttgtctgaagaactgggcagtgcacggcgctccggggaggtcacgttaacgaagggcgatccaggctctcttgaggagtgggaaacggtcgtcggggacgacttttccctgtactatgactcttactccgtcgatgaaagagtggattctgattccaagagcgaagtggaggccttgactgaacagctctcggaagaagaggaggaggaagaggaagaagaggaagaagaggaagaagaggaagaggaggaagaggaggaagaagatgaggagtccgggaaccagagtgacaggtctggttcctctgggcgtagaaaagcaaagaagaagtggcggaaagacagcccctgggtgaagccctcacgcaagaggcggaagagagagccgcccagagccaaggaacctcgaggcgtgaatggtgtgggtagcagcggcccgagcgaatatatggaggtgcccttagggtcactcgagctgcccagtgaaggtactctgtctccaaatcacgctggagtcagtaatgacacttctagcctggagactgaacgggggttcgaggagctgcctctgtgttcatgcaggatggaggccccaaagatcgatcgcattagcgagcgcgccggacacaagtgcatggcaacagagtctgtggacggcgaattatctgggtgcaacgctgcaatcctgaaacgcgaaaccatgaggccgagctcacgagtggctcttatggttctatgtgagacacacagagctaggatggtcaagcaccactgttgtcctggctgcggctatttctgcaccgccggtacttttttggagtgccaccccgacttccgtgtcgcacatagattccataaggcttgcgtgagccagctaaatggaatggttttttgtcctcattgcggtgaggacgcttctgaagcccaggaggtcaccataccaagaggtgatggggtaacccctccagccggcactgccgcacccgctccgcctcccctgtcgcaggacgtccctggacgagccgataccagtcagcccagcgcacgcatgcggggacatggcgaacctagacgtcctccttgcgaccccctggccgacactatcgactcctcgggaccctccctgactctccctaacggtggctgcctgtcagcagtcggcttgccattgggacccgggcgcgaggccctcgagaaagcgttggtcatccaggaatctgagaggaggaagaagttgcgattccacccccgccagctgtatttgtcagtcaagcagggtgagctgcagaaggttatcttgatgctcttggacaacttggaccctaactttcagtcagaccagcagtccaagcgcactcccctccatgcagcagcccagaagggctccgtagaaatctgccatgtacttctccaagccggtgcgaacatcaatgctgtggacaagcagcagcggactcccctgatggaggccgttgtgaataaccatctggaggttgccaggtacatggtgcagaggggcgggtgcgtgtattctaaagaggaggatgggtccacttgtctgcaccatgctgccaagattggcaatttggagatggtgagcttattgcttagcaccgggcaggtagatgttaacgcccaagactctggaggatggactcctattatttgggcggctgagcataaacatatagaagtaatcagaatgctgctgacccgcggtgctgatgttacactgactgacaacgtttctgagcgcctggtggaagaggagaatatttgcctacactgggcttcattcactggcagcgcagcaatcgctgaggtgttacttaatgcgaggtgtgacctccacgccgtaaactatcatggagatactccacttcacattgccgcccgcgagagttaccatgactgcgtgctgctgttcctttcgcggggggcaaatcccgaactgcggaataaggaaggcgacacagcctgggatctaacccctgagcggtcggatgtctggtttgccctgcagctgaatcggaagctgaggctcggcgtcgggaacagggccatcagaaccgaaaagattatctgtagagacgtggcacggggctatgagaacgttccaatcccctgcgtcaacggcgtcgacggggagccctgtcctgaagattataaatatataagcgaaaattgtgaaacttcaactatgaatattgaccgcaacataacacatcttcaacattgtacttgtgtggacgactgctcttctagcaattgcctgtgtggtcagctctctattagatgttggtacgataaagacgggagactcctccaggagtttaacaaaatcgaaccccccctcatctttgagtgcaaccaagcctgcagctgctggaggaattgcaaaaatcgtgtggtccaatctggcataaaggtccgtctccagctctatcgtactgcaaaaatgggttggggggtgcgggctctccagaccatcccccagggcactttcatttgcgagtacgtcggagaactcattagcgacgccgaggccgatgtgcgcgaagatgattcctacctctttgatttagacaataaggacggagaggtgtattgtatcgatgccaggtattatggaaatatctcccgcttcataaaccatctgtgcgacccgaacattatccccgtgagggtgttcatgctgcaccaagaccttagattccccagaatcgcttttttttcctcccgggacatcaggacgggagaagagctgggattcgattatggcgaccggttctgggacataaagagcaaatattttacatgtcaatgtggttcggagaaatgcaagcatagcgctgaagccattgctttggagcagagtaggctggctaggttagatcctcatcccgagttgctgccagaattaggtagcctcccgcctgtgaatacatag

SEQ ID NO: 186983 - DNA, 3096 bp, synthetic construct
  misc_feature 1..3096: note = Description of Artificial Sequence: Synthetic coding sequence
  source 1..3096: mol_type = other DNA
agctgccactgcacccccagctggccccccgtgcccgagaagcggccccctgagatccaacacttcaggatgagcgacgacgtgcactctctcggtaaagtgacttcggacttggccaaacgcaggaaactcaatagcggcggcggattgtcagaagagctgggctcagctcgccgatccggcgaggttacattgacgaagggcgacccgggatccctcgaagaatgggaaaccgtagtcggtgatgatttttctctgtattatgactcctattctgtggacgagcgtgtcgatagtgactctaagtccgaggtggaggctctcactgagcagctgtcggaagaagaggaagaagaggaggaggaggaagaggaggaggaagaggaggaagaggaggaagaggaggaggaagacgaggaatcaggcaatcagtcagatcggagcgggtccagcgggaggaggaaagcgaaaaagaagtggaggaaagatagcccttgggtcaaaccctccagaaaaaggcgtaagagagagcctcctagggctaaggaaccccgaggggtgaatggggtgggaagcagcgggcctagcgagtacatggaagtccccctggggtcacttgaactccctagcgaaggaactctcagccccaaccatgccggtgtatcaaatgatactagctccctggaaacggagcgtggatttgaggagcttccactgtgttcctgtcggatggaggctcccaaaatcgaccgtatctctgagcgtgccggacacaaatgtatggcaacggagtcagtggatggtgaactctctggctgtaacgcggctatactgaagcgtgagaccatgaggccctcttccagagtcgctctgatggtgttgtgtgaaacgcaccgggctcgtatggtgaaacaccactgctgccccggctgcggatatttctgcacagccggcaccttcttggagtgccatcccgattttagggtcgctcatcgctttcacaaagcttgcgtgtcacaattgaacggtatggttttttgccctcattgcggagaagatgccagcgaggcccaggaggttactatacctaggggcgatggcgtgactcccccagctggcactgctgccccggcgcccccgcctctgtcccaagacgtgcccgggcgggccgacacctcccagccctctgcacggatgcgaggtcacggggagccccgccgcccaccttgcgaccccttggccgacactatcgatagctcaggaccttccctgaccttacccaatggtggctgtctatccgccgtcgggctgcctctcggacctgggcgtgaggccctggagaaagcactggttattcaagagagtgaacgccgcaaaaagctcaggttccatccccggcaattgtatctgtctgtgaaacaaggggagcttcagaaggttatactgatgttattggacaacttggacccaaacttccaaagcgatcaacaaagtaagaggaccccactacatgctgccgcccaaaaaggctctgtggagatttgtcacgtgcttctccaggctggagccaacattaacgccgtggataagcagcagcggacacccttgatggaagccgtagttaacaatcatctggaggtggcccggtacatggtgcaacgtggagggtgcgtctactctaaggaagaagatggttccacgtgtctgcaccacgccgctaaaatcggtaacttggaaatggtttccctcttgttgtccaccggacaggtggacgtgaacgcccaagatagtggaggatggacaccaatcatctgggcagctgagcacaaacacattgaggtcatacgtatgctgctgacacgcggtgcagacgtgaccctgacggacaatgtgtctgaacgtctcgttgaagaagagaacatctgtctacattgggcctcattcacggggtctgcagcgattgctgaagttctgttgaatgctcgctgtgacctgcacgccgttaactatcacggggacacccccctgcacattgctgcccgtgagtcctatcacgattgcgtgctcctgttcctgagtcggggggcaaaccccgaactacggaacaaggaaggagatacagcgtgggacctgactcccgagagatccgacgtctggttcgcactgcagcttaatagaaaactgaggttaggagtgggcaacagagccatacggaccgaaaaaatcatatgccgggatgtggcaagagggtacgagaacgtgcctattccatgcgtgaacggtgtggatggggaaccctgtccagaggattacaagtatatctctgagaactgcgaaacatccacaatgaacatcgatcgaaatattacacacctgcagcactgtacctgcgtcgatgactgctcctcctctaattgtctgtgtggacagctttccattcgttgttggtatgataaagacgggcggctcctgcaggagttcaataaaatcgagccccctttaatcttcgagtgcaaccaggcgtgttcttgttggcgcaattgtaagaacagggtcgtgcaaagcggtattaaagtgaggctgcagctctatagaacagccaagatgggatggggagtccgcgcactgcaaactatcccccagggcacatttatctgtgaatacgtgggtgaactgatatcggatgcggaagcagatgtgcgagaagatgactcttatctgtttgatctcgacaacaaagatggcgaggtctactgtatcgacgcaagatattacggcaacatatctcggttcatcaaccatttatgtgacccaaacataatccccgttcgggtgtttatgctgcaccaggacctccgattcccccgcatcgcattcttttccagtagagatatacggaccggcgaggagctcggcttcgactacggcgaccgtttttgggacataaagtcaaaatactttacatgtcagtgtggctccgagaagtgtaaacattccgccgaggcaatagctttggaacagagtcgtttagcaagattggacccccacccagaacttcttcccgagttaggaagccttccccctgtcaacacctag

SEQ ID NO: 186984 - DNA, 3096 bp, synthetic construct
  misc_feature 1..3096: note = Description of Artificial Sequence: Synthetic coding sequence
  source 1..3096: mol_type = other DNA
agctgccactgcacccccagctggccccccgtgcccgagaagcggcccccagagattcagcacttccggatgtccgatgatgtgcattcactcggtaaggtaacctctgatctcgccaaaaggaggaagttaaactctggcgggggactgtccgaagagcttggctctgcccgccggtccggggaggtgaccttaaccaagggagacccagggtcacttgaagagtgggagacagttgtgggcgatgatttctccctgtactatgattcttactcagtcgatgaacgggtggactctgactccaagtcagaagtggaagctctaacagaacagctctccgaggaggaggaggaggaggaggaagaggaggaggaggaagaggaggaggaggaggaagaggaggaggaggaagatgaggaaagcggcaaccagagtgatcggtcaggaagcagcggtcgtcgcaaggcaaagaaaaagtggcgcaaggattcaccctgggtgaagccgagcagaaaacgccgaaagcgcgagccaccacgagcgaaggagcctcggggtgtaaacggtgtgggctccagcggacccagtgagtatatggaagttccactggggagtctggagctgccctctgaggggaccctctcacccaaccatgctggtgtgtccaacgacacatcctctctcgagacggagcgaggcttcgaagaacttcccctgtgtagctgcagaatggaagctccaaaaatcgatcgcattagcgaacgcgctggccacaaatgcatggctaccgagagcgtggacggagagctctctggctgcaacgctgcaattttgaagcgcgagacaatgcgtccttcttctcgggtggctttaatggtgctgtgcgaaacccatcgcgcaaggatggtcaaacaccactgctgtccaggatgtgggtatttctgcaccgctgggacctttttggagtgccatccagattttagggttgcacaccgctttcacaaagcttgtgtctctcagctgaacggaatggtgttttgcccccactgtggagaggacgcttcagaggcccaagaagtcaccataccccgcggggacggggtcacgccgccagctggcactgccgccccagctccgccccccctttcgcaagacgtccctggacgcgccgatacaagtcagccctccgcccggatgagaggccacggcgagcctaggaggccaccttgcgatccactggcagacacaattgactcctctggcccatctctgactctgcctaatggaggatgcctgtccgccgtgggactgcccctgggccctgggcgggaggctcttgagaaagctctggtgatccaagagtcggaaaggaggaagaagctcaggtttcatcccaggcagttgtacttatcagttaaacagggtgaactccagaaggtgatcttgatgctgcttgacaatctggacccgaattttcagtctgaccagcaatccaagcggacaccactgcacgcagcagcccagaagggaagtgtggagatatgccatgtcttgctccaagccggtgccaacatcaacgcagtggacaagcaacagagaacacccctcatggaggctgttgtaaacaaccaccttgaggttgctcgctacatggtgcaacgcggtgggtgcgtgtattctaaagaagaagatggcagcacctgtcttcatcacgcagcaaaaatcggaaacctcgaaatggtgtctctgttgctcagcaccggtcaggttgacgttaacgctcaggacagcggagggtggacacccatcatttgggcagcagagcataagcacatcgaggtgatcagaatgctcctcacccggggagcagacgtgacactgacagacaatgtgtctgagagattagttgaggaagagaacatctgccttcactgggcttctttcacaggaagcgcagccatcgccgaggtcctcctgaacgcccggtgcgacctacacgccgttaattaccacggagacactccattgcacattgcagcgcgggaatcatatcacgattgcgtgctgctgttcctgtccaggggcgctaatcccgagctgagaaataaagagggcgacaccgcctgggacctcacccctgagcgcagcgacgtgtggtttgccctccagctgaatcgcaagttgagactgggggtcgggaaccgtgctattaggacggagaagatcatctgtcgtgatgttgcccggggctatgaaaatgttccaatcccctgcgtgaatggcgttgacggtgagccatgccccgaggactataagtatatcagtgagaattgcgagacaagcaccatgaatattgaccgcaacatcacccacctacagcactgtacgtgtgtggatgattgttcaagcagtaactgcctgtgcggacaactgtctatccgctgttggtacgataaagatggtcggctgcttcaagaatttaataagatcgaaccacccctcatctttgagtgtaaccaggcgtgtagctgctggaggaattgcaaaaatagggttgtccagtctggcattaaggttcggctccagctatacaggaccgccaaaatgggatggggggtgcgagcgttacaaacaattcctcagggcactttcatctgcgagtatgtgggggagctgatttctgatgctgaggctgatgtgcgcgaagacgattcatacctcttcgacctggacaataaggacggggaggtgtactgcatcgacgctcggtactatggaaacatctccagattcattaatcatctctgtgaccccaacattatccctgttagagtctttatgctgcaccaggacctgagatttccacgcattgcgtttttttcttcaagggatatcaggactggcgaggagcttgggttcgactatggtgatagattttgggacattaaaagcaagtacttcacctgccagtgcggttcggagaaatgcaagcattccgccgaagccatagccctggagcagagtcgcttagctcgtttggacccccaccccgagctgctgcctgaattgggctctttgcccccggttaacacgtag

SEQ ID NO: 186985 - DNA, 3096 bp, synthetic construct
  misc_feature 1..3096: note = Description of Artificial Sequence: Synthetic coding sequence
  source 1..3096: mol_type = other DNA
agctgccactgcacccccagccggccccccgtgcccgagaagcggcctcccgagattcagcattttaggatgagcgacgacgtccattcattgggtaaagtaacctcggacctcgcaaagcgacggaaacttaattctgggggcggactgtccgaagaactgggctctgcgagaaggtccggggaggtgaccctgaccaagggagaccccggtagcctggaggaatgggagacagttgtgggcgacgatttctcgttgtattatgactcatacagcgtcgacgaacgcgtggattccgactccaagagcgaagttgaggctctgacagagcagctcagcgaggaggaagaagaggaggaagaagaggaagaagaagaggaggaagaagaggaggaggaggaggaggaagaggatgaagaatccggcaatcagtccgaccgatctggatcatcagggcggcgaaaagcaaaaaaaaaatggcgtaaggactcgccgtgggtgaaaccctctagaaagagacgaaaaagagaaccaccccgcgccaaggagcccaggggagtgaatggcgttggttcatccggtccttcggagtacatggaagtcccactggggtctctggaactaccctcagagggaacactgagcccgaaccacgcaggagtctctaatgacacctccagccttgagaccgaaaggggctttgaagagctgcctttatgctcatgccggatggaggcccctaagatcgaccggatatccgaacgtgccggtcacaaatgtatggcaactgagtctgttgacggggagctctcaggatgcaatgccgccatcctaaagagagaaaccatgcggccttcctcaagagtcgccttgatggtcttgtgcgagactcatcgagccaggatggtgaagcaccattgttgccccgggtgtggttacttttgcactgctgggaccttcctggaatgtcaccctgactttcgcgtcgcccacagatttcataaggcgtgtgttagccaactcaacggaatggtgttctgcccccactgcggtgaagatgccagcgaggcccaagaagtcaccataccacgtggtgatggggtcacaccccctgctggcactgccgccccggctccacctcccctctcccaagatgtgcccggcagggccgacacctcacagcccagtgctcgaatgcgggggcatggggaacctagacggcccccctgtgaccctctggcagacaccattgattcaagtgggcctagcctgaccctaccaaacgggggctgtctgtccgcagtcggcttacccctggggccgggccgcgaggccctggaaaaggcactcgtcattcaggagtccgaacgtcgcaagaagctcagattccaccccaggcagctgtatttgagcgtgaagcagggagagctgcagaaagtgatcctcatgctgctggacaacctggatcctaactttcaaagtgaccagcagtcaaagagaacgcctctccacgctgccgcgcagaaaggatccgttgagatctgccacgtgctgctccaggccggagcaaatataaatgccgttgataaacagcagcgtacacctttgatggaggccgtggttaataatcacctggaggtcgctagatatatggtccagagaggcggctgcgtgtactctaaagaggaagacggtagcacgtgccttcaccacgccgccaagataggtaatctggagatggtgtctcttctgctttctaccggccaagtcgatgtgaacgcacaggatagcggagggtggactcctatcatctgggcagcagagcataagcatattgaggtcatccggatgctccttacccggggtgcggacgttacacttacagacaacgtgagcgaaaggcttgtggaagaagaaaatatttgtcttcactgggccagcttcacaggcagcgcagccatagccgaggtcctgctcaacgctcgatgcgatctgcacgctgtaaactaccatggcgacactcctttacatattgctgcccgcgaatcttaccacgattgcgtgttgctgttcctgtcaaggggagcaaatcctgaacttaggaacaaagagggtgacactgcgtgggacttaactcctgagagaagcgacgtgtggttcgcactccagttaaataggaagctacgtctgggagtgggtaatcgagccataagaaccgaaaaaattatatgccgggacgtagcccgcgggtacgaaaatgtgcccatcccttgcgtgaatggagttgatggcgagccctgtcctgaggactacaagtacattagtgaaaattgtgaaacatcaacgatgaatatcgacaggaacatcacacaccttcagcactgcacttgcgtggatgactgcagctctagtaactgcctgtgtgggcagctgtcgattaggtgctggtatgacaaagacggccgtctgttgcaggaattcaataaaatcgagccccccctcatatttgaatgcaaccaagcgtgctcatgttggcgcaattgcaagaacagggtggtgcagtctggaattaaggtaaggttacagctctatagaaccgctaaaatggggtggggagtgagagctctgcagacgattccgcagggcaccttcatatgcgagtacgtgggggaactcatttctgacgccgaggccgacgtgcgcgaggatgattcctacttgtttgaccttgataataaggatggggaggtgtactgtatagacgctcggtactatggcaatatcagtagattcatcaatcacctctgtgaccccaatattattccggtgagagtgttcatgctgcatcaggacctcagattcccaagaatcgcattttttagctctcgggacatccgaaccggcgaggaactggggtttgattacggcgaccgattctgggatattaagtcaaagtattttacgtgtcagtgtggctccgagaagtgcaagcactctgctgaggctattgccctggaacagagtcgcctggctcgacttgacccacaccccgaattactcccagaactgggcagtctgcctcctgtaaacacatag

SEQ ID NO: 186986 - DNA, 3096 bp, synthetic construct
  misc_feature 1..3096: note = Description of Artificial Sequence: Synthetic coding sequence
  source 1..3096: mol_type = other DNA
agctgccactgcacccccagctggccccccgtgcccgagaagcggccacctgagatccaacacttcaggatgagtgacgatgttcactcccttgggaaagtgaccagtgatctggcaaaaagacgcaagctcaattcaggaggcgggctctccgaagagcttggtagtgcgcggaggtccggtgaagtgaccctgacgaaaggcgacccaggttcactggaagagtgggaaacagtcgtgggggacgattttagtctatattatgactcctacagcgtcgatgaacgagtcgactcagactctaaatcagaggttgaagctctgaccgagcaactgtccgaagaagaggaggaagaagaggaagaagaggaggaggaagaggaagaggaggaagaagaggaggaagaagaggacgaggagtcgggcaatcagtctgataggagcggttcttctggacgtagaaaggctaaaaagaagtggcgaaaggatagtccttgggtcaagcctagtagaaaaaggcgcaaaagagagcctcccagagctaaagagcctcgcggtgttaatggtgttggctcctccggaccttctgagtacatggaagtgcccctgggatctttggagctgccctcagaggggactctgagtccaaatcatgctggcgtgtctaatgatactagttccttggaaaccgagaggggattcgaggaactgcccctgtgcagctgcagaatggaggcccctaagatagaccggatttccgaaagggctggccacaagtgcatggccaccgaaagcgtggacggagaactctccggctgtaatgccgcaattctgaagcgcgaaacaatgaggcccagcagtagagtcgcattaatggtgctatgcgagacccaccgggccagaatggtgaaacaccattgttgtcctgggtgtggctatttctgcaccgccggcacttttctggaatgccacccagacttccgggtagcccatcggtttcataaagcctgcgtctcacagctcaatggaatggtcttttgccctcactgcggagaggacgctagcgaagctcaggaggtcactatccctagaggtgacggggtgacccctccagccggcactgcagcgccagcaccccctccgctcagccaggatgttccgggccgtgcagacactagccagccatccgcgagaatgagaggacacggtgaacccagaaggcctccatgtgatcctctcgcagacactatcgattctagcggtccaagcctcacactccctaacggcggttgcctaagtgccgtggggctccctctcggacccggccgcgaggccctagagaaagcgcttgtcatccaggaaagcgagcgccgtaaaaagttacggttccacccaagacagctgtacctcagcgtgaaacagggagaactccagaaagtgattttaatgctgctagacaacttagatccaaactttcaatccgatcagcagtctaagcgcacgccgctgcatgctgcagctcagaagggctccgttgagatctgccatgtgcttctacaggccggagcaaacatcaatgctgtggacaagcaacaaagaacacccttgatggaagctgtggttaataaccacctggaagtcgccaggtacatggtgcagcgcggcgggtgcgtatatagcaaggaggaggatgggtccacttgtctgcaccacgccgccaaaattggcaatctcgaaatggttagcctcttactgtccaccggacaggtagacgtaaacgcccaggatagcggcggttggactcccatcatctgggccgctgagcataaacacatagaggtcatacgcatgctgctcactcgaggtgctgatgtgactctaacagacaacgtgtccgagcgattagttgaagaggagaatatatgcctgcattgggcttctttcaccgggtccgctgcgatcgctgaagtgctgctcaacgcccgatgtgatctacatgccgtgaactaccatggcgacacgccgcttcatatcgctgcccgcgagtcttatcacgactgcgtcctgttgttcctctctcggggggctaaccctgagctcaggaacaaagaaggggataccgcatgggaccttactcctgaacgtagtgacgtctggttcgcgttgcagctgaaccgaaagctgcgcctgggcgttgggaacagagccatccgaacagaaaaaataatatgtcgggatgtcgcacgggggtacgaaaatgtccccataccttgtgtcaatggggtagatggcgaaccttgccccgaagattataagtacatcagtgagaattgtgaaactagcaccatgaacatcgaccgcaatattactcatctgcagcattgcacctgtgttgatgattgctcttcctccaattgtctgtgtggccagctgagtattcggtgttggtacgacaaagacggccgcctgctgcaggagtttaacaagatcgagccccccttaatctttgagtgcaaccaagcctgcagctgctggaggaactgcaaaaaccgggttgtgcaatccggcattaaggtccgccttcagctgtatcggacagccaagatgggctggggtgtgagagccctgcagaccataccccagggcactttcatctgtgagtacgtgggagagttgatctccgatgctgaggccgacgtccgcgaggatgactcatacctcttcgatctcgataataaagacggagaggtgtattgtattgacgcacgctattacgggaacatatctagattcattaatcatctgtgcgatcccaatattattcccgtgcgcgtgtttatgcttcaccaggatctgaggttccctcggatcgccttcttttccagccgcgatattcggaccggggaagagctgggattcgattatggcgaccgtttctgggatataaagagcaagtacttcacgtgtcagtgcggcagtgaaaaatgtaaacattcagcggaggcgattgcccttgagcaatctagactcgcacgcttggatcctcaccccgagctccttcccgagcttggttctctgccacctgtgaatacatag

SEQ ID NO: 186987 - DNA, 2178 bp, synthetic construct
  misc_feature 1..2178: note = Description of Artificial Sequence: Synthetic coding sequence
  source 1..2178: mol_type = other DNA
atggccgacgaggacctgatcttccggctggagggcgtggacggcggccagagtcccagggctggccatgacggcgatagcgacggcgactctgacgacgaagagggctattttatctgccctataactgacgatccaagctcaaaccaaaatgtcaactccaaggtgaacaaatactactcaaatctcactaaatcagaaagatatagcagctccggttcccctgctaatagcttccacttcaaagaagcatggaagcacgctatccagaaggctaagcacatgcctgacccctgggctgaatttcacttggaggacatcgccacagaacgggcaactcgccaccggtacaatgccgtgacaggggaatggctggatgacgaggttcttattaagatggcaagtcagccctttggcagaggagctatgagagagtgttttaggaccaagaaactgtccaattttcttcatgcccagcagtggaagggggcatcaaattacgtcgcgaaacggtacatcgaaccagtggaccgtgacgtctattttgaggacgtgagattacagatggaagctaagctttggggagaagagtacaataggcataaacctccaaaacaggtagatatcatgcagatgtgcattattgaattgaaggataggcctggcaagcctctctttcacctcgagcactacatagagggaaaatatatcaagtacaatagtaacagcggctttgtgcgtgacgataacatacgcctcaccccacaggctttttcccatttcacctttgaaagaagtggacatcaactgatcgttgtcgatatccagggggttggagacctttatactgatccccagattcacacagaaactggtaccgacttcggagacggcaacctgggggtccggggcatggctctcttcttctacagtcatgcatgcaatagaatttgcgaatctatgggactggccccattcgacctttctccaagagaacgagacgcagtgaatcagaacaccaaactactgcagagtgctaaaacaattctgagggggaccgaagagaagtgcggctccccacaagtgagaacactttccggttccaggccaccattgctcaggccattatctgaaaattcgggagacgagaatatgtctgacgtgacctttgactcactcccctccagtcctagttctgcaacccctcatagtcagaaactagatcacctgcactggccagtattttctgaccttgataacatggccagtcgtgatcatgatcacctggacaaccatcgggagtcagagaattccggcgactcaggttatccaagcgaaaagagaggcgaactggatgaccccgagccgcgggaacatggacactcctactcaaacagaaaatatgagtccgatgaggacagcctggggagcagcggccgggtgtgtgttgagaagtggaacctcctgaacagcagccgcctccacctgccacgcgcatctgccgtggcgctggaggtgcagaggcttaacgccctggaccttgaaaaaaagatagggaagtctattcttggtaaggttcacctcgcgatggtgagataccatgagggaggaaggttctgtgaaaaaggcgaggaatgggaccaagaatccgccgtattccaccttgagcatgcagcaaacctcggcgaactggaggctattgtcggacttggccttatgtatagtcaactgccccaccacattctcgcagacgtttcgttgaaggagaccgaagaaaataagaccaagggatttgactacctcctgaaagccgcagaggccggcgatcgccagagcatgattctggttgctagagcctttgactctggccagaatctctcaccagataggtgtcaagactggttggaggccttgcattggtacaatacagccctggagatgaccgactgtgacgaaggaggagagtacgatgggatgcaggacgagccgcggtacatgatgctcgctagagaggcggaaatgcttttcactgggggctatgggttggaaaaggacccccaaagatccggagatctgtacacgcaggcggccgaggccgctatggaagctatgaagggaagactggccaatcagtattaccagaaggcggaggaggcatgggcccagatggaggagtag

SEQ ID NO: 186988 - DNA, 1389 bp, synthetic construct
  misc_feature 1..1389: note = Description of Artificial Sequence: Synthetic coding sequence
  source 1..1389: mol_type = other DNA
atgggcaaggagaagacccacatcaacatcgtggtgatcggccacgtggactctggcaaatcaacaacaaccgggcatctgatttacaaatgcggtggcatcgataagagaacaatcgagaagtttgagaaggaagctgctgaaatgggcaagggctcgttcaaatacgcttgggtcctggacaaactcaaagccgagcgcgagaggggtatcacaatcgatatcagcctatggaagttcgagacgagcaaatactacgtgactattatcgatgcccccggacacagggatttcattaagaacatgattacaggcacatcccaggcagactgcgccgtcctgattgtggctgctggtgtaggggaatttgaggccgggatttcgaagaatgggcagacaagagagcacgctctcctggcctatacgctcggagttaagcaacttatcgtgggagtgaacaaaatggactcaacagaaccaccttactcgcaaaaaagatacgaggaaatcgtgaaggaggttagtacatacatcaagaagatcggctacaatccagacacggttgccttcgtccctatctctgggtggaacggggataacatgctcgagcccagcgctaacatgccttggttcaagggctggaaagtcacacggaaggatggaaacgcatctggtacaacattgctggaagcgctcgattgcatcctcccccccacacgcccaaccgacaagcccttaagattgccacttcaggacgtctacaaaatcggaggaattgggacagtgcctgttgggcgagtggagactggcgttcttaagccaggtatggttgtcaccttcgcaccagtaaacgtgaccacggaggtaaaaagcgttgagatgcatcatgaagcgctctctgaagccctaccaggcgataatgtcggattcaatgtgaaaaacgtatctgttaaagatgtaagacggggaaacgtggctggtgacagcaaaaatgaccctcctatggaagccgcaggattcacggctcaggtcatcatactgaatcatccaggccaaatttctgcaggctacgcgccagtgctcgattgccacacagcacatatcgcgtgcaagttcgctgaattgaaggagaaaatcgaccggaggtcgggaaaaaaactagaggatggcccgaagttcctaaaatccggcgatgccgccatagtggacatggttcctgggaagccaatgtgtgttgagagtttctccgattacccgccactggggcgattcgcggtgcgcgatatgagacagaccgttgctgtgggggtcattaaagccgtcgacaagaaagctgccggggcaggcaaagtcacaaagagtgcccagaaagcccagaaagcaaagtag

SEQ ID NO: 186989 - DNA, 1389 bp, synthetic construct
  misc_feature 1..1389: note = Description of Artificial Sequence: Synthetic coding sequence
  source 1..1389: mol_type = other DNA
atgggcaaggagaagacccacatcaacatcgtggtgatcggccacgtcgattccgggaaatcaacaaccacagggcacctcatttataaatgcggcggaatagataagaggacaatcgagaagttcgagaaggaggcggctgagatgggtaaggggagctttaagtacgcctgggttttagataagctgaaggccgaacgggaacgcggcatcaccattgatatcagtctgtggaagttcgaaaccagtaagtattacgtcacaatcatcgacgctcctggccaccgggactttatcaagaatatgattacgggaacatcccaggccgattgcgcagtccttatcgtggccgccggtgttggtgagttcgaggccggcatctccaaaaacggacaaaccagagaacatgccttactggcctatacacttggggtgaagcagctgatcgtcggcgtgaacaagatggatagtaccgagcctccgtattctcagaaaaggtacgaagagatagtgaaagaagtatccacctacataaaaaagattggatataaccctgatacggtagcatttgtccctatttccgggtggaacggagacaacatgctggagccctctgctaatatgccttggttcaagggatggaaggtgacccgcaaagacggaaacgcatctgggactacccttctggaagccctagactgtatactgcctccgactaggcccacagataagcctctccggctgcctctccaggatgtttacaagatcggggggatcggcaccgttccagtggggagagtcgaaacaggcgtactaaaacctggaatggttgtcacattcgcaccagttaatgtgacgacggaagtgaagagtgtggagatgcaccacgaagccctttccgaggcactcccaggagataacgtgggatttaacgtgaagaatgtgtccgtgaaagatgtccggcgcggaaacgtcgccggagactccaaaaacgatccacctatggaggctgccggcttcactgcccaagtgatcattctcaatcatccaggccaaattagtgccgggtacgctcctgtgttagattgtcataccgcccacattgcctgcaaattcgctgagctcaaagagaaaattgatcggcgatctggaaaaaaactcgaggatggccctaaatttttgaagagcggggacgcagcaatcgtcgatatggtgccaggaaagcctatgtgcgtggagtctttcagtgattaccctcccttgggcagatttgctgtgagagacatgagacaaactgtagctgtcggagttataaaggcagtagacaaaaaggctgccggcgctggcaaagtcaccaaatcagcccagaaggctcaaaaggccaaatag

SEQ ID NO: 186990 - DNA, 1389 bp, synthetic construct
  misc_feature 1..1389: note = Description of Artificial Sequence: Synthetic coding sequence
  source 1..1389: mol_type = other DNA
atgggcaaggagaagacccacatcaacatcgtggtgatcggccacgttgacagtgggaagagtactaccaccgggcacctgatttataaatgcggcggtatagacaagagaacaatcgaaaagtttgagaaggaggcagctgaaatgggcaaaggatctttcaagtatgcctgggtgctggataagttgaaggccgaacgcgaaaggggcatcacgatcgacatatccctgtggaagttcgaaacaagcaaatactatgtgaccatcatcgatgccccagggcaccgggattttatcaaaaatatgataacaggaacctcccaggccgattgcgcagttctgattgtcgccgcaggggtgggtgaattcgaggctggtataagcaagaatggacaaacccgggaacatgcactgctggcctacacactcggcgtgaaacagctgatagttggggtgaacaaaatggattctaccgagccaccctactcacagaagcggtacgaggagatcgtaaaggaagtaagtacatacatcaaaaaaataggctataacccggatacggtcgcgtttgtgcctatatccggatggaatggtgacaacatgctcgagccttccgctaatatgccttggttcaaaggttggaaggtcacccggaaagatggaaatgcttctggaacgacgttgttggaggccctggactgcatcctgcctccgactcggcctaccgataaacccctacgactgcccctccaggacgtctataaaatcggcggtatcggaaccgtgccggtcggccgcgttgagacaggcgtcttaaagccagggatggtggtgacctttgctcccgtgaacgtgacaacggaggtgaagtcagtggagatgcaccatgaggccctgagtgaggcgctccctggtgataacgtgggctttaatgttaagaatgtttctgtcaaggatgtccgccgtggcaacgtggccggagactccaaaaacgacccccccatggaagcagccggttttaccgcccaagtgatcatactaaatcaccccggtcaaattagcgcaggctacgctcctgttctggattgtcacacagcacacatagcttgtaagttcgcagagttaaaggagaaaattgaccgacgatcaggcaaaaagttagaggacggtccgaaattcctgaagagcggcgatgctgctattgttgatatggttcctgggaaaccaatgtgtgtagaaagctttagcgattaccctcccctgggtagattcgcggtcagagacatgcgtcagacggtggctgtgggggtgataaaagcagtggataagaaagccgcgggcgccggaaaggttaccaagtcagctcagaaagcccagaaggctaagtag

SEQ ID NO: 186991 - DNA, 438 bp, synthetic construct
  misc_feature 1..438: note = Description of Artificial Sequence: Synthetic coding sequence
  source 1..438: mol_type = other DNA
atgggcaaggagaagacccacatcaacatcgtggtgatcggccacgtggatagcggtaaaagcacgacaacggggcatttgatctacaaatgtgggggtatcgataaacgcaccattgaaaagtttgagaaggaggcagccgagatggggaagggcagctttaaatacgcatgggtgctggataaactaaaggctgagagggagcgggggattaccattgatattagcttgtggaaattcgaaacatcaaagtactacgttaccattatcgatgcccccggccatagggacttcataaaaaacatgattaccggcacctcccaagcggactgtgctgtgttgatagtggccgcgggcgtgggagaattcgaggctgggatcagtaagaatggacaaacacgggagcatgccttgctggcatataccctgggcgtttag

SEQ ID NO: 186992 - DNA, 1281 bp, synthetic construct
  misc_feature 1..1281: note = Description of Artificial Sequence: Synthetic coding sequence
  source 1..1281: mol_type = other DNA
atgggcaaggagaagacccacatcaacatcgtggtgatcggccacgttgattcaggaaagagcacgacaactgggcacctgatctacaagtgtggcggcattgataagcggacgattgagaaatttgagaaagaggccgcggagatgggaaaaggctctttcaagtacgcctgggttcttgataagcttaaagctgaaagagaacgaggcataaccattgacataagcttatggaaatttgagacatccaaatattacgttactatcatcgacgccccaggtcatagagatttcatcaaaaacatgattacaggcacatctcaggcagactgtgccgtcctcattgttgcagccggggtcggcgaatttgaggccgggatctcaaaaaacggacagacgagggaacacgctcttttggcatacacgttgggcgtgaaacagttaatcgtgggtgtgaacaaaatggacagcactgagcccccctattcccagaaacgatacgaagaaattgtgaaggaagtgtctacttatattaaaaaaattggatacaatcctgatacagtggctttcgtgcccatatctggttggaatggcgataatatgctggagccgagcgcaaacatgccttggttcaaaggctggaaggtcaccaggaaagatggtaacgcctctggcaccacactactggaggcgttagactgtatcctgccccctactcggcctactgataagccgctccgtctgcccctgcaggatgtgtataaaatcgggggcatcggtacagtgcccgtcccatcaggcgactggtgctctcctggcatggtagtgacattcgctcctgtgaatgttactaccgaagtgaaatcggtcgagatgcaccacgaagccctcagtgaggctctgccaggcgataacgttggttttaacgtcaaaaacgtgtccgtgaaagacgtgcggagaggcaatgtggctggggattcaaagaacgatccccccatggaggctgccggcttcaccgcgcaagtcattatactaaatcacccggggcaaatcagcgctggatacgctcccgtcctcgattgccacacagctcatatagcatgtaaatttgccgaactaaaggagaagatcgatcggagaagcgggaagaaactggaagacgggcccaaatttctgaaatcgggcgacgccgccatcgtggacatggtgccaggaaagccgatgtgcgtggagtcgttctccgactaccccccactaggtaagtcactctgttgctcatag

SEQ ID NO: 186993 - DNA, 1326 bp, synthetic construct
  misc_feature 1..1326: note = Description of Artificial Sequence: Synthetic coding sequence
  source 1..1326: mol_type = other DNA
atgggcaaggagaagacccacatcaacatcgtggtgatcggccacgtggacagcgggaagtccaccaccacgggccacctgatttacaaatgcggcggtatcgacaaaaggactatcgagaagttcgagaaggaagctgccgagatgggtaaaggatccttcaaatatgcttgggtcttggacaagctcaaggctgagcgcgaaagaggaatcacaattgatattagcctctggaagttcgaaacaagcaaatattatgtgaccatcatagacgcccccggtcatcgagatttcatcaagaacatgataacagggacatctcaggcagattgtgccgtactgattgttgctgctggtgtgggagaatttgaagctgggatttccaagaacggccagacaagagagcacgctctgctggcatatagccaaaagagatacgaggagatagtaaaagaggtgtctacatatatcaagaagatcgggtataaccctgataccgtcgcattcgtcccaatctcaggctggaatggcgataacatgcttgaacccagtgccaatatgccgtggtttaagggttggaaagtgactcgcaaagatggaaacgctagtgggactacactgttggaagcccttgactgcattttgccgccaacccggcctacagataaacctctgaggctgcccctacaggatgtgtacaaaatcggagggataggtacagtgcccgtaggtcgcgtggaaacaggcgtgttaaagccaggtatggtggtcacattcgcccctgtcaacgtgaccactgaagtgaaatccgtggagatgcaccatgaagcgttgtcagaagctctccctggagacaacgtgggcttcaacgtcaagaacgtgagcgttaaagacgtgcgtcgcggaaacgtggcaggagactccaagaatgatccccctatggaggctgcaggttttactgcacaggtaatcattctgaaccacccgggccagatctccgcagggtatgctcccgtcctcgactgccacacggcccacatcgcttgtaaattcgcagagctgaaggaaaaaattgaccgccgatcgggaaagaaactggaggacggacccaaatttcttaagagcggggatgccgccatcgtggatatggtaccaggcaaacccatgtgcgtggaatcgttcagcgactatccacctcttgggcgtttcgccgtgcgggacatgaggcagaccgtggctgtgggcgtgatcaaggccgtggataagaaggcagctggcgcagggaaggtgaccaagtcagcacagaaagcccagaaagctaagtag

SEQ ID NO: 186994 - DNA, 324 bp, synthetic construct
  misc_feature 1..324: note = Description of Artificial Sequence: Synthetic coding sequence
  source 1..324: mol_type = other DNA
atgggcaaggagaagacccacatcaacatcgtggtgatcggccacgttgactccggcaaatctacaaccaccggacacctcatctacaagtgtggtggaattgacaagcgaacgatagaaaagtttgagaaagaagcggccgaaatgggcaaaggaagttttaaatacgcttgggtactggataaactcaaagccgagcgtgagcggggcatcacaattgatatctcactgtggaaatttgagacatctaagtactacgttacaatcattgacgcacctggacatagggatttcatcaagaacatgattaccggaacgtcgtag

SEQ ID NO: 186995 - DNA, 336 bp, synthetic construct
  misc_feature 1..336: note = Description of Artificial Sequence: Synthetic coding sequence
  source 1..336: mol_type = other DNA
atgggcaaggagaagacccacatcaacatcgtggtgatcggccacgtggacagcggaaagtccactaccaccggtcatctcatttacaagtgtggggggattgacaaacgtactatcgagaaattcgaaaaagaagccgctgaaatggggaagggcagcttcaagtatgcatgggtactggacaagctgaaagctgagcgggaaagaggtatcaccatcgacattagcctctggaagtttgagacaaccaagcagtggacgcgcaggttgctggagctggcaagatctccctctcttccaaggaagttacggagattaaatgagtattacccctag

SEQ ID NO: 186996 - DNA, 1626 bp, synthetic construct
  misc_feature 1..1626: note = Description of Artificial Sequence: Synthetic coding sequence
  source 1..1626: mol_type = other DNA
atggtgatcaacctgtgcctgccccagttccggccccggatccactgtaacaagatcagcgccgacgggtatgaggtggagaacttgatatcagaagatctgactaagcgatcgcacggtttcagaacagagtatttcataaagcctccggtgtatgtcacagtgagctttcctttcaacgtcgaaatatgcagaattaacatcgacttaaccgccggggggggacagaacgtaaccggcctggaaatgtatacaagcgcgtctagctcacgggtatcttggaatacaccccagtgtcgcaccttagggccagccgagccaagcgtgcctgacaaagaggcattcacccttgtggggaaagttctcctgaaaaatcagtcccaggtggtgttctcgcacagaggattcaaagctagaccgccatttggggcaatggaagccactttacctagcccagctgtcgttgcacaggaattgtggaacaaaggagctttaagcctctcacacgtggcccatctcagaatttgcatcacacacgttaccggaggtggcattccctgcatcaagcgcctcgaagtgtggggacaaccagcaaaaacttgcagtcaggaggtcatcgactccattttattagtgacatctgaaaatctgccccaggatgtcgcacttcaagcacccgccctgcctatggaatcagactgtgatcctggcgaccaaccggagtctcagcaggccccctccagtctgcaaaaactcgccgagatcatacaggatgttcctgaggagtttctcgatcctataacgctcgagattatgccttgcccaatgctgcttccttccggaaaggttatcgaccagagcactcttgagaagtgcaacaggtctgaggctacttgggggcgcgtcccaagcgatcccttcactggagtcgcctttacaccccatagccagcctctgcctcatccctctctgaaagccagaattgaccacttcttgctccagcactctatacctggctgtcatctgttggggcgggctcagaccgccttggccgtcattccgtcaagcatagtactgcccagtcagaaaaggaaaattgaacaggctgagcatgtgcctgacagtaatttcggtgttaatgcttcatgcttttcagcaactagtcctctggtgcttcctaccacctctgagcatacagccaaaaagatgaaagccacaaacgaaccctccctgacacatatggactgttcgaccggcccactgagccatgaacaaaagctctcccagtctctggaaatcgcactggcctccacacttggaagcatgcccagcttcacagctaggctcacccggggccagctgcaacatctcggcactcgtggatccaatacttcctggcgacctgggaccggtagcgaacagcctgggagcattctgggaccggaatgcgcttcctgtaagagggtcttctccccttactttaagaaggaacctgtgtatcaacttccctgcggtcacctcctttgtcgcccatgccttggggagaaacagagaagtcttccgatgacgtgtacggcatgtcagcgacctgttgcatcccaggacgtactccgcgttcacttctag

SEQ ID NO: 186997 - DNA, 1392 bp, synthetic construct
  misc_feature 1..1392: note = Description of Artificial Sequence: Synthetic coding sequence
  source 1..1392: mol_type = other DNA
atgggcaaggagaagacccacatcaacatcgtggtgatcggccacgtggattcgggcaagtccacgacaactggccacctgatctacaagtgtggcgggatcgacaaaagaacgatcgaaaagtttgagaaggaagccgctgaaatgggcaagggctcgttcaagtatgcgtgggtccttgacaaattgaaggccgagcgcgagcgcggaattaccatcgatatttctctgtggaaatttgaaacaaccaagtactacattactatcatcgatgcacccggccaccgggacttcatcaagaatatgatcacggggaccagtcaggccgactgtgcagtcctgattgtcgcagctggtgtgggcgagtttgaggctggtatctccaagaacgggcaaacccgcgagcacgctctcttggcctatacacttggagtgaagcaactgattgtaggcgtaaataagatggactctaccgaaccggcatattccgaaaaacggtacgatgaaattgtgaaagaggtgagcgcatacatcaaaaaaatcggctacaacccggcaacagtcccctttgtgccaatttcaggatggcacggtgacaatatgctggaaccatctccgaacatgccttggttcaaaggctggaaggtggaaaggaaagaaggcaacgccagcggcgtcagcttgctagaggccctggatacgatcttgccaccgacgcggcccaccgataaaccccttaggctccccttgcaggatgtgtacaaaatcggtggtatcgggactgtcccagtgggccgcgttgaaacaggtatcctgcgcccagggatggtcgtcacttttgctcctgtcaatatcacgacagaggtgaaatcagttgagatgcatcacgaagcccttagcgaagccctgcctggcgataacgttgggttcaacgtgaagaatgtttcagtgaaagatatccggagggggaatgtctgtggggattcaaagtcggatcccccacaagaggcggcccagtttacttcgcaagttattatcctgaatcatcctggtcaaatttcagccggctattctcctgtgatagattgtcacaccgcccacatcgcctgtaaattcgcagagcttaaagaaaaaatcgatcgcaggagcgggaagaaactagaggacaacccgaaatctctgaaatccggagatgcggctatcgtggagatggtaccgggaaagcccatgtgtgtcgagtccttttctcagtatccacctctggggagattcgctgtaagggatatgcgccaaaccgtcgccgtgggcgtgataaagaacgtcgagaagaagtcgggcggcgctggaaaagttacaaagagtgctcagaaagcccagaaagctggtaaatag

SEQ ID NO: 186998 - DNA, 678 bp, synthetic construct
  misc_feature 1..678: note = Description of Artificial Sequence: Synthetic coding sequence
  source 1..678: mol_type = other DNA
atgggcttcggcgacctgaagagccccgccggcctgcaggtgctgaatgattaccttgctgacaagagctacattgagggatacgtccccagtcaggcagatgtcgccgtgttcgaggccgtgtcttcccccccaccagcagatctctgtcatgcgctccggtggtacaaccatataaagtcctacgagaaggagaaggcttctctgcctggcgtgaaaaaggctctgggcaaatatggcccagccgatgtggaagacacaaccggatcaggcgccaccgactctaaagatgatgatgatatagatctcttcggctctgacgacgaggaggagtcagaagaggccaagcggcttagggaagagaggctagctcaatacgaaagtaagaaggccaagaagcccgcccttgttgccaagtcttctattcttctggatgtgaaaccttgggatgacgaaactgacatggctaaacttgaagagtgtgtaaggagtattcaggccgatggactggtttgggggtcctccaagctcgtcccagtcgggtatggcattaaaaagctgcaaatacagtgcgtcgttgaggatgataaggtagggactgatatgcttgaggaacagatcactgcttttgaggattacgtgcagtccatggacgtggccgcattcaataaaatatag

SEQ ID NO: 186999 - DNA, 678 bp, synthetic construct
  misc_feature 1..678: note = Description of Artificial Sequence: Synthetic coding sequence
  source 1..678: mol_type = other DNA
atgggcttcggcgacctgaagagccccgccggcctgcaggtgctgaatgattaccttgccgacaagagctacattgagggatacgtgccctctcaggccgacgtcgcagtcttcgaagcagtatcaagccctccccctgctgacctttgtcacgctctccgctggtacaaccatattaagagctacgagaaggagaaagcatcactcccgggtgtgaagaaagccttggggaaatacggccctgccgacgtcgaggacactaccggatcaggggcgacagatagcaaggatgacgacgatattgacctcttcggatccgacgatgaagaggaatccgaagaggccaagaggttacgggaggagagactggctcaatacgagagcaagaaagcaaagaagccggctttggtggcaaagagcagcatccttctcgacgtcaagccgtgggacgacgagacagatatggcgaagctcgaagagtgcgtgagatccatccaggccgacgggctcgtttgggggagttccaagctcgtcccagtgggatacggcatcaaaaagttacaaattcagtgtgtggtagaggatgacaaggtcggaacagatatgctggaggagcagatcactgcttttgaagattatgtccagagcatggacgtggccgcctttaacaaaatctag

SEQ ID NO: 187000 - DNA, 678 bp, synthetic construct
  misc_feature 1..678: note = Description of Artificial Sequence: Synthetic coding sequence
  source 1..678: mol_type = other DNA
atgggcttcggcgacctgaagagccccgccggcctgcaggtgctgaatgactatttggcagacaaaagttacatagaagggtacgtgccctctcaggcagatgtagctgtgtttgaggccgtatccagtccaccacctgcggatttatgtcacgccctgcggtggtacaaccatatcaaaagctacgagaaagagaaggcgtccctgccaggcgttaaaaaagcactcggtaagtacggacctgccgacgtggaagacactactgggtctggtgcaacagacagcaaagatgatgacgacatagatcttttcggctccgacgatgaggaagaatccgaagaagccaaacggttacgtgaggaaagactggctcaatatgagtctaaaaaagctaaaaaaccagcactcgtcgccaaaagctccatacttcttgatgttaagccttgggacgatgagacggatatggccaagctggaagaatgtgtgagatcaattcaggcggatggactggtttggggtagcagcaaactggtgcccgtcggttatggcatcaaaaaacttcagatccaatgtgtggtcgaggacgacaaggttggcaccgacatgctggaggaacagataacagctttcgaggattatgtgcagagtatggacgtagccgccttcaacaaaatctag

SEQ ID NO: 187001 - DNA, 372 bp, synthetic construct
  misc_feature 1..372: note = Description of Artificial Sequence: Synthetic coding sequence
  source 1..372: mol_type = other DNA
atgggcttcggcgacctgaagagccccgccggcctgcaggtgctgaatgactacctagccgacaagtcgtatattgagggctatgttccatcacaagccgacgtagctgttttcgaggccgtcagcagccctccaccagcagatctctgtcatgccctgaggtggtacaatcacattaagagctacgaaaaagagaaggcatctcttcctggagtcaaaaaggctctgggaaagtatggtcctgctgatgtggaggatacaaccgggtcaggtgctacggacagcaaggacgacgacgatatcgacttattcggctccgacgatgaagaggagtccgaagaggccaagaggctgcgggaagagcgcctgtag

SEQ ID NO: 187002 - DNA, 846 bp, synthetic construct
  misc_feature 1..846: note = Description of Artificial Sequence: Synthetic coding sequence
  source 1..846: mol_type = other DNA
atggccaccaacttcctggcccacgagaagatctggttcgacaagtttaaatacgacgatgccgaacggcgtttctacgagcagatgaatggtcctgtggctggtgcaagtagacaagagaatggggcctcagtcatcctacgagatatagccagagcgagagaaaacattcagaaatctctcgctggcagcagtgggccaggcgcatcatccggcaccagtggagaccatggagagctcgtggtgagaatcgcttcactggaagttgaaaaccaaagtctgaggggcgtcgtgcaggaactgcagcaggctatcagcaagctcgaggctaggctgaatgtgctggaaaaatccagcccgggacatagagccactgccccacaaacacagcatgtgagccccatgcgccaggtcgagcctcctgccaagaagcctgcgactcccgccgaagacgacgaagatgatgacatcgacctctttggatcagacaacgaggaggaagataaagaggccgcccaattaagggaagagaggttgcgccagtatgcagaaaagaaagcgaaaaaaccagctcttgtcgcaaagtcttcaattctgttggacgtcaaaccctgggacgatgagactgatatggcccagctggaagcatgtgtgaggtcaattcagctggacggactagtgtggggcgctagtaaactagtcccagtggggtacggcatcaggaaacttcaaatccaatgcgtggtcgaagatgacaaagtggggactgatctgctcgaagaggagatcaccaaatttgaggagcatgtgcagtcggtggacattgccgctttcaataaaatttag

SEQ ID NO: 187003 - DNA, 1896 bp, synthetic construct
  misc_feature 1..1896: note = Description of Artificial Sequence: Synthetic coding sequence
  source 1..1896: mol_type = other DNA
atgcggagcggcaaggccagctgcaccctggagaccgtgtgggaggacaagcacaagtacgaagaagccgaacggcgcttttacgaacacgaggcaactcaagccgccgcttctgctcagcaattgcctgccgaaggacccgccatgaacgggcccggacaggatgaccctgaggacgcagatgaggctgaggctcccgacgggggaagcaggagggatcctcgaaaatcccaggactccagaaaaccgttgcagaagaaacgtaagcggagcccgaaatcgggtctgggtccagcagaccttgctcttctaggcctgtctgctgagagagtctggctcgacaagtctttgttcgatcaagcagagtcttcttacagacagaaactggctgacgtcgcagcacaggcggcatggcctccagccctggctccttgggggctgtgtactcacggaaatcaggtcgcctgccaccatgtgacgtggggtatctgggtcaataagagcagttttgatcaggccgagagagcgttcgtagagtggtcacaagctttgctgctcgctcctgatggctctcggcggcagggtacacccaacactgggcagcaggttgccgtacccgacctcgcccaccagccttcaccaccagtgaacggacagcctcctcttggctctcttcaggctctcgtcagggaagtgtggctcgaaaagcccagatacgacgctgcagaaagaggcttctacgaggccttattcgatggccatcctccagggaaggtaaggctccaggaacgcgctgggctggccgaaggcgctagacgcggaaggcgcgataggaggggtagaaacattctaggaaataaacgtgccgggcttaggagggcagatggcgaggccccctctgcacttccttattgttactttcttcagaaagacgccgaggccccgtggctgagtaagccggcctacgattctgcagaatgtcggcaccacgctgctgaagccttgcgggtagcttggtgtctggaagctgcctctctcagtcaccgcccgggtcccaggtccggcttgtcagtctcctcgctgagacccaaccgcaagatggccactaatttccttgcccacgaaaaaatctggtttgataaattcaagtacgatgatgccgagcgtagattctatgagcaaatgaacgggccagtggcgggcgccagtcggcaggagaatggagcctccgtcattctgcgggacatcgcccgcgctcgcgagaacattcaaaaatcgctggcaggatcctcaggccccggagcctcgtctggaacctccggtgatcacggggaattggtggtgaggatcgcttcgcttgaggtcgaaaaccagagtctgcggggcgtggttcaggaactgcaacaggccatatcaaagcttgaagcaagacttaatgtattagagaaatcttcaccaggtcatcgtgccacagccccccagacccaacacgtatcaccgatgcgccaagtggagccaccagctaaaaaacccgctacacccgccgaggacgacgaggacgatgatattgacttgttcggaagtgacaacgaggaagaggacaaggaagcagcacagcttcgcgaggaacggttgcggcagtatgcagagaagaaggcaaagaaacctgcactcgtggcgaagtcctccattctccttgatgtgaagccctgggatgacgaaactgatatggcccaacttgaggcttgcgtaaggtctattcagctggacgggctggtttggggcgcctctaagctggtgcccgtgggctacgggatccgcaagctccagatccaatgcgtgggtggacgccagggaggggatcgccttgccgggggaggagaccatcaggtgtag

SEQ ID NO: 187004 - DNA, 1728 bp, synthetic construct
  misc_feature 1..1728: note = Description of Artificial Sequence: Synthetic coding sequence
  source 1..1728: mol_type = other DNA
atgaacggccccggccaggacgaccccgaggacgccgacgaggccgaagcccccgacgggggttcccgcagagatccacgtaaaagccaggacagtcggaaacccctgcagaagaagcgaaaacggtctccaaagagtggcctcggtcctgctgatctggctctcttgggcctctctgcggaacgggtgtggctagacaagtctctcttcgatcaggctgaatcaagctaccggcagaagttggccgatgtggcagctcaggctgcgtggccccctgccttagcaccctggggcctgtgcacccacggaaaccaagtggcttgccaccacgtcacctggggcatctgggtcaataaatcttctttcgaccaagctgagcgcgccttcgttgagtggagtcaggctttgttgctcgcgccagacggatccaggaggcagggaacgcccaataccggtcagcaggtggccgtccctgacttagctcatcagccctcaccgccagtgaacggtcagccccctctcggatctttgcaggctctggtaagggaggtgtggctagagaagccccgctacgatgcagcggagaggggcttttacgaagctctcttcgacggtcacccgccaggaaaggtccgtctgcaggagagagccgggttggcggagggcgctcgccgtgggagacgagatcgccggggaagaaatatactcgggaacaagcgagccggtctgcgtagagccgatggcgaagccccttccgctctgccctattgctattttctgcagaaggacgccgaggcaccctggctgtctaagcctgcctatgattcggccgagtgccgacaccatgcagccgaagcattacgcgtggcttggtgcttggaggctgcctccctgtcacataggccaggcccacggtctggcctttcggtctcctcactccgacccaacagaaaaatggcaaccaatttcctggctcatgagaaaatctggttcgacaaatttaaatatgacgacgcggagagacggttttacgaacaaatgaatggtccagtggcaggtgcgtcacgacaatcaagtgggccgggggcttcttccggcacctctggagatcacggtgaactagttgtcagaattgcttctcttgaagtggagaatcagtccctgaggggggtggtgcaggagcttcaacaggcaatctccaagttagaagcgcgtctgaacgtgctggaaaaatctagcccagggcacagagccactgccccccaaacccagcatgtctcccctatgaggcaggtggagccacctgcgaagaaacccgctactcctgctgaggatgatgaggatgatgacatcgacctatttggctcagataatgaggaagaagataaagaggccgcccagttaagggaggagcggctgcggcaatatgccgaaaagaaagcaaaaaaacctgctttggtcgctaagtcctccatcctcttggatgtaaaaccatgggacgatgaaaccgatatggctcagctggaggcatgcgttaggtctatacagctggatggactggtgtggggcgccagcaagcttgtccctgtaggctacggcattcgcaagcttcagattcagtgtgttgtggaggacgacaaagttggcactgatctgctggaggaggagattacaaagttcgaggaacatgtacagtctgttgatatcgcggccttcaacaaaatctag

SEQ ID NO: 187005 - DNA, 846 bp, synthetic construct
  misc_feature 1..846: note = Description of Artificial Sequence: Synthetic coding sequence
  source 1..846: mol_type = other DNA
atggccaccaacttcctggcccacgagaagatctggttcgacaagtttaaatacgacgacgcagaacggaggttttatgaacaaatgaacggacccgtggcaggcgctagtaggcaggagaatggggccagtgtcattctgagagacattgcacgcgcccgcgagaacatacagaaatctttggccggttcgtccggcccaggggcttctagtggcacatctggggaccatggggaactcgtggtccgaatcgcttcactggaagtagagaaccagtcactgagaggggtggttcaggagttgcaacaagctattagtaagctcgaggcccgtttgaatgtgttggagaagagttcacccggacatagggccacagcccctcaaacacagcatgtgagtcccatgaggcaggtggaaccaccggccaaaaaaccggcaacacctgctgaggatgacgaggatgacgacatcgacctgtttggctcggataacgaggaggaagacaaagaagccgcccagttgagggaggaacggttgagacagtatgccgaaaagaaggcaaagaagcctgccctggtggctaagagctcgatccttcttgacgttaagccatgggacgatgagactgacatggcccagttggaggcttgcgttaggtccattcagctcgatggcttggtttggggtgccagcaaactggtgccagtcggctatggaatcaggaagctccagatccagtgtgtagtggaagatgacaaagtgggaacagatttactagaagaggagatcactaagtttgaggagcatgtgcagtctgtagatatcgcagcttttaataagatttag

SEQ ID NO: 187006 - DNA, 846 bp, synthetic construct
  misc_feature 1..846: note = Description of Artificial Sequence: Synthetic coding sequence
  source 1..846: mol_type = other DNA
atggccaccaacttcctggcccacgagaagatctggttcgacaagttcaaatacgacgacgctgaacggcgattttatgagcagatgaacgggcccgttgcaggcgcaagccgccaggaaaatggagctagcgtgattctcagagatattgcacgggccagggagaacatccaaaaatctctggcgggcagctcagggcctggagcaagctctggtacctctggggatcacggcgagctggtggtcaggatagcctcgctagaggtagagaatcagagcctgcgtggtgtcgttcaagagctgcagcaggcaatttccaaactggaagcacgcttaaatgttctggagaagagctcgcctggacaccgggctaccgcaccccagacgcagcatgtgtcgcctatgagacaagtcgagccacctgccaaaaagccggccaccccagcggaggacgacgaggacgatgatattgacctctttggtagtgacaacgaagaagaggacaaggaagctgctcaacttcgggaggagcgcctaaggcaatatgctgagaaaaaggcaaaaaagcctgcactggtcgcaaagagttccattctgctcgatgtcaaaccatgggatgacgaaacagacatggctcagctcgaggcttgcgtgcgttcgatccaattagatggactggtctggggtgccagtaaactggtgccagtgggctacggtataaggaagctgcagattcagtgcgtggtcgaagatgacaaggtgggaactgatctgctcgaagaggagattaccaagttcgaggagcatgtgcagtccgtggatattgcggcatttaacaagatctag

SEQ ID NO: 187007 - DNA, 1944 bp, synthetic construct
  misc_feature 1..1944: note = Description of Artificial Sequence: Synthetic coding sequence
  source 1..1944: mol_type = other DNA
atgcggagcggcaaggccagctgcaccctggagaccgtgtgggaggacaagcacaagtatgaggaggccgagcggcgcttctacgagcacgaagccacccaggctgctgcttccgctcagcagctccctgctgagggacctgcaatgaatgggcctgggcaggacgaccccgaagacgccgacgaggcagaggctcccgatggggggtctcgccgcgatccaagaaagtcacaggactccagaaaaccactgcagaagaaaaggaaacgatcccccaaatccggattaggacctgcggacctcgctctgctcggtctttctgcggagagagtttggttagacaaatctcttttcgaccaagccgaatcttcgtatcggcagaagctggctgacgtggccgctcaagcggcgtggcccccggcactcgcaccgtgggggctgtgcacccacggtaatcaggtggcctgtcaccacgtaacttgggggatttgggtgaacaaaagttccttcgatcaggccgaacgtgcatttgtagaatggagccaggcccttttgctggcccctgacggttccaggagacaaggaacacctaacacgggccaacaagtagccgtcccggatcttgcccaccagccatctccacctgtaaacggtcaaccccccctaggcagcctccaggccctggttcgtgaggtatggttagagaagccacgatacgacgcagccgaaagagggttttatgaggcactgttcgacggccacccccctggcaaggtgcgcctgcaagagcgggctggactggccgaaggtgcgcgccggggcagaagagaccgtaggggccgcaacattctgggaaataaacgggcgggcttgaggcgagccgacggcgaagcccctagcgctttaccttactgctacttcctgcaaaaagacgccgaggctccatggttgtctaaacccgcctacgacagcgctgagtgccgccaccatgcggccgaggccttaagggtagcctggtgcttagaggccgcatcactctctcaccgacccggacctcggagcggcctttccgtgtcttcgttacgacccaatcgaaagatggccactaactttcttgctcacgagaagatctggtttgataagttcaagtatgacgacgctgagagacgattttacgaacagatgaatgggccggtcgcaggagcttctcggcaggaaaatggcgctagtgtaattctgagagatatcgccagagcccgagaaaatatccaaaagagcctagccgggagctcaggcccgggagcctccagcggaacaagtggcgatcacggggagctggtggtaaggatcgcatccctcgaggtggagaatcaatcattgcggggcgtggtacaagagctccagcaggcaatctcgaagcttgaggccagactcaatgtactggagaagtcatctcccggtcaccgagccaccgccccgcagacacagcatgtgtcacccatgaggcaagtcgagccccccgcaaagaaacccgcaacacccgccgaggatgatgaagatgacgacatcgatttatttgggtcggataacgaagaggaggataaagaagccgcccaattgagagaagaacggctgagacagtatgccgagaagaaagcaaagaagcctgcgctagtagccaagagctctatcctgctagatgttaagccttgggacgacgagaccgacatggcacagctggaagcatgcgtgcggagtatccagctggatggattagtttggggagctagcaaactggtgccagtaggatatggtattaggaagctgcagatccagtgcgtcgtggaagatgataaggtggggactgacctgctggaggaagaaataacaaaatttgaagagcacgtgcagtctgttgatatagcagccttcaacaaaatctag

SEQ ID NO: 187008 - DNA, 1944 bp, synthetic construct
  misc_feature 1..1944: note = Description of Artificial Sequence: Synthetic coding sequence
  source 1..1944: mol_type = other DNA
atgcggagcggcaaggccagctgcaccctggagaccgtgtgggaggacaagcataagtacgaagaagccgagagacgtttctacgagcacgaggcaacacaggccgccgcaagcgcccagcagttgcctgctgaaggaccagctatgaacggaccaggtcaggacgatcccgaggatgcagacgaagcagaggcaccggacggaggaagcagacgtgaccctagaaagtcccaagatagtaggaagcctctccaaaagaagcggaagagatccccgaagtcaggattgggccccgcagatttggcgctgcttggtctaagtgccgaaagggtatggctggacaagagcctctttgatcaagctgagtcaagctacagacaaaagctcgccgatgtggctgcacaggccgcctggcccccagcccttgcgccttggggtctgtgcactcacggcaaccaagtggcctgtcatcatgttacatggggcatctgggttaacaagagctccttcgaccaggccgagcgcgcatttgttgagtggtcacaagcccttctactggcacctgatggtagccggcggcaaggcacgcctaatactggtcaacaagtggcagttcccgatctcgcccatcagccttctccccctgtgaacgggcagcccccactcggatcgctgcaggccctcgtgagggaggtgtggctggagaaaccccgctacgatgcagccgaaagagggttctatgaggctttatttgatggacaccctcctgggaaggtgagactccaagaaagggctggactggccgagggagcacggaggggacgcagggatagacggggtaggaatatcctggggaataagcgggcaggcctccgaagagcagatggcgaggccccctcagccttgccttattgttactttctccagaaggacgctgaggccccctggctgtctaagccagcatacgactcagctgagtgcagacaccatgctgctgaggctctccgggttgcctggtgcctggaggccgcatcactgtcccacaggcccggccccagatcaggcctttcagtcagttctttaagacccaacaggaagatggcgacaaactttcttgcacacgaaaagatctggttcgacaagttcaaatatgatgatgccgagagacgattttacgagcagatgaatggccctgttgctggcgctagccgccaggagaacggagcctccgtgatactgagagacattgcccgggcccgcgaaaatatccagaaaagtctggccggctcctcaggacccggggccagctctggcaccagtggagatcatggagaactagtcgtcaggatcgcctctttggaagttgagaatcagtctctcagaggagttgtccaggagcttcagcaggccatatcgaaattagaagcccggctgaatgtattggagaagtctagtccaggccaccgtgctacggccccacagactcagcatgtgagccctatgcgccaggtggaaccccccgcaaaaaagcctgccactcctgccgaggacgacgaagacgacgacatcgaccttttcgggtcagataatgaagaagaggataaagaggccgcccagctgcgggaggagaggctcaggcagtacgcggaaaagaaggccaaaaagccagccctggtagcaaagtctagcatcctgctcgacgtcaaaccatgggatgacgagacggacatggcccagcttgaggcttgcgtacgcagtattcaattagatggcctggtttggggtgcatcaaaattagtacctgtgggatacggcatacggaaattgcagattcagtgcgtggtggaagatgataaggttggcactgacttactggaggaagagatcaccaagtttgaggagcatgtgcagtccgttgatatcgcagcttttaataaaatctag

SEQ ID NO: 187009 - DNA, 774 bp, synthetic construct
  misc_feature 1..774: note = Description of Artificial Sequence: Synthetic coding sequence
  source 1..774: mol_type = other DNA
atggccaccaacttcctggcccacgagaagatctggttcgacaagttcaagtatgacgatgcggagcggcggttttatgagcagatgaatggcccagtggctggggcctctagacagagctcagggcctggcgccagcagcggtactagtggggaccatggggagctcgttgtgcgtatagcctccttagaagtcgagaaccaatctttacggggagtagtacaggaactgcaacaggccatcagtaaactggaggcccgcctgaatgtactggaaaaaagcagcccgggccaccgtgccaccgcaccgcagactcagcatgtatccccaatgcgacaagtggaacccccagccaaaaaaccagcaacaccggccgaggacgacgaagacgatgacatcgatctgttcggttctgataatgaggaggaagataaagaggccgcacagctgcgcgaagagcggctgagacagtacgctgagaagaaggccaagaaacccgcgctggtggccaagtcatcaatcctcctggacgtgaagccttgggacgacgagactgacatggctcaacttgaagcctgcgttcgctcaatccagttagatggcctggtgtggggcgccagcaaattggtccccgtcggatacgggatcaggaagctgcagatccaatgtgttgttgaggacgataaagttggcaccgatctcctggaggaagagattacgaagtttgaggaacacgtgcaatctgtggacatcgccgcattcaacaagatctag

SEQ ID NO: 187010 - DNA, 546 bp, synthetic construct
  misc_feature 1..546: note = Description of Artificial Sequence: Synthetic coding sequence
  source 1..546: mol_type = other DNA
atgcggagcggcaaggccagctgcaccctggagaccgtgtgggaggataaacataaatacgaagaggctgagaggagattttacgagcacgaggcaacccaggcggcagcaagcgcacaacagctgccagcagagggaccagccatgaatggtccaggtcaggatgaccccgaagacgctgatgaagccgaggccccggacggaggctcccgtcgcgaccctcgcaagtcacaggactcaagaaaaccccttcaaaaaaaacgaaaacgctcaccaaagagcggcctagggccagccgatttagccctccttggccttagcgcggagcgggtatggctggacaagtcccttttcgatcaagccgaatcaagctataggcaaaagctcgccgatgtggccgctcaggctgcatggccccccgccctggccccatggggcctgtgcactcacggcaaccaggtggcctgccaccacgttacatggggcatctgggtaaataagtcatcattcgatcaggctgagcgggcttttgttgagtggagctag

SEQ ID NO: 187011 - DNA, 192 bp, synthetic construct
  misc_feature 1..192: note = Description of Artificial Sequence: Synthetic coding sequence
  source 1..192: mol_type = other DNA
atgcggagcggcaaggccagctgcaccctggagaccgtgtgggaggacaaacataagtatgaagaagccgaacgaaggttctacgaacatgaggcgacccaggctgctgcctctgctcaacagctgcctgccgaagggcccgcgatgaatggtcccggtcaggatgatcccgaagacgcagacgaggcatag

SEQ ID NO: 187012 - DNA, 120 bp, synthetic construct
  misc_feature 1..120: note = Description of Artificial Sequence: Synthetic coding sequence
  source 1..120: mol_type = other DNA
atggccaccaacttcctggcccacgagaagatctggttcgacaagtttaagtatgatgatgctgaacggagattctacgagcagatgaacggtcctgtggctggtgcgtcaagacagtag

SEQ ID NO: 187013 - DNA, 246 bp, synthetic construct
  misc_feature 1..246: note = Description of Artificial Sequence: Synthetic coding sequence
  source 1..246: mol_type = other DNA
atgcggagcggcaaggccagctgcaccctggagaccgtgtgggaggataagcataaatacgaagaggcagaacggcggttttatgaacacgaagccacccaagcggctgccagtgcacaacaacttccagcggaggggcccgccatgaacggtccgggacaggatgaccccgaggatgccgatgaagcagaagcacccgacggaggctcaagacgcgatccccgcaagagccaggattccaggtag

SEQ ID NO: 187014 - DNA, 114 bp, synthetic construct
  misc_feature 1..114: note = Description of Artificial Sequence: Synthetic coding sequence
  source 1..114: mol_type = other DNA
atgcggagcggcaaggccagctgcaccctggagaccgtgtgggaggataaacataagtatgaggaggcagagaggcgtttttacgaacacgaagccactcaggccgcagcttag

SEQ ID NO: 187015 - DNA, 162 bp, synthetic construct
  misc_feature 1..162: note = Description of Artificial Sequence: Synthetic coding sequence
  source 1..162: mol_type = other DNA
atgcggagcggcaaggccagctgcaccctggagaccgtgtgggaggacaagcataaatatgaagaggccgagcgccgattttacgagcacgaggccacgcaggcagccgcctccgctcagcagctgccagctgagggaccagctatgaacggaccagggtag

SEQ ID NO: 187016 - DNA, 192 bp, synthetic construct
  misc_feature 1..192: note = Description of Artificial Sequence: Synthetic coding sequence
  source 1..192: mol_type = other DNA
atggccaccaacttcctggcccacgagaagatctggttcgacaagtttaaatacgacgacgcagagaggagattttacgagcaaatgaacgggcccgtcgccggggccagtagacaggagaatggtgcgtccgtcatactcagagatatcgcaagagcccgcgaaaatattcagaagagtcttgccggctag

SEQ ID NO: 187017 - DNA, 903 bp, synthetic construct
  misc_feature 1..903: note = Description of Artificial Sequence: Synthetic coding sequence
  source 1..903: mol_type = other DNA
atgcggagcggcaaggccagctgcaccctggagaccgtgtgggaggataaacacaagtatgaggaggccgaaagacgtttctacgaacacgaggcaacacaggcagctgcctctgcccagcagctccccgctgaaggtcctgccatgaatggcccaggtcaggatgatcccgaggacgccgacgaagccgaggccccagatggcggaagtcggcgtgacccccgcaaaagtcaagacagcagaaaaccgcttcagaagaaaagaaaacgctcccccaaaagcggtctgggcccggctgacctagcactcctgggactgagcgccgagcgggtttggctggataagagcctcttcgaccaagccgaatccagctaccgtcagaaacttgcagacgtcgcagctcaggcggcatggcccccagctcttgctccatggggactgtgtacccacggcaatcaggtcgcttgccatcatgtaacatgggggatctgggtcaacaagagtagttttgaccaagcggagcgggcattcgtggagtggtctcaagccctgcttttagccccagatggctccaggaggcaaggtactcctaatacgggacagcaagtggccgtccccgatctggcccatcagccttctccacctgtgaatgggcaaccgcccttgggctccctacaggccttagtccgagaagtgtggctggagaagccccggtatgatgccgctgaacgcggcttctatgaagcgctcttcgacgggcacccccctgggaaagtcaggctgcaagaacgtgctggcctcgcagaaggcgcccggcgcggcaggcgtgaccgccgggggagaaacatcctgggaaacaaacgggctgggcttagacgcgctgatggcgaggctcccagctag

SEQ ID NO: 187018 - DNA, 66 bp, synthetic construct
  misc_feature 1..66: note = Description of Artificial Sequence: Synthetic coding sequence
  source 1..66: mol_type = other DNA
atgcggagcggcaaggccagctgcaccctggagaccgtgtgggaggacaagcacaaatatgagtag

SEQ ID NO: 187019 - DNA, 474 bp, synthetic construct
  misc_feature 1..474: note = Description of Artificial Sequence: Synthetic coding sequence
  source 1..474: mol_type = other DNA
atgcggagcggcaaggccagctgcaccctggagaccgtgtgggaggacaaacacaagtacgaggaagcggagcggcgcttctacgagcacgaggccactcaagcggctgcgtctgctcagcagctcccagccgaagggccagcaatgaatgggcccggccaggatgatcctgaggacgcggatgaggcggaagcccccgacggaggtagccggagggatccgcgcaagagtcaagacagccgaaagccattgcagaaaaaacggaagcggtcccctaagtcggggctcggaccagccgacttagccctgctgggattatccgctgagcgagtgtggctcgacaaatctctgttcgaccaggctgagtcgtcctacaggcagaaactggcggacgtggccgcccaagcggcttggccacccgcactggctccctgggggctctgcacccacggcaaccaggtggcctgtcattag

SEQ ID NO: 187020 - DNA, 774 bp, synthetic construct
  misc_feature 1..774: note = Description of Artificial Sequence: Synthetic coding sequence
  source 1..774: mol_type = other DNA
atggccaccaacttcctggcccacgagaagatctggttcgacaagttcaagtacgacgacgccgagaggcgcttttatgagcagatgaacggtccagtcgctggcgcctcgcgtcagagtagcggccctggagccagcagtgggacatctggcgaccatggagagttagttgtgagaatcgccagcctggaagtggaaaaccaaagtcttcgaggcgtcgtacaggagttacagcaagcgatttccaaattagaagcgcgactgaacgtgttagaaaaatcctcccccgggcatcgcgcgacagcaccccagacccagcacgtgagccctatgagacaggtagagccaccggccaaaaaacccgcaactccagcagaggatgacgaagacgatgacattgacctgttcgggagcgacaatgaagaggaagacaaagaagctgcacagctaagggaggaacgcctccgtcaatacgctgagaagaaggccaagaaacccgctctggtggcgaaatcttcaatcctgctggatgtcaagccatgggacgatgaaaccgacatggcccagctcgaggcctgtgtacgtagcattcaattagatggtctcgtgtggggcgcttctaagctagtgcccgttgggtacggaatccgaaagctgcagatacagtgcgtcgttgaagatgataaggtcgggacagatctgcttgaagaggagattacaaagtttgaagagcatgtgcagtctgttgacattgctgccttcaacaagatctag

SEQ ID NO: 187021 - DNA, 846 bp, synthetic construct
  misc_feature 1..846: note = Description of Artificial Sequence: Synthetic coding sequence
  source 1..846: mol_type = other DNA
atggccaccaacttcctggcccacgagaagatctggttcgacaagttcaaatatgatgacgcagaacgacgtttctacgaacagatgaacggaccggtggcaggagcctcacgtcaggagaatggggctagcgtgatcctccgagatatagcgagggcccgggaaaatatccagaaaagcctcgcaggctccagcggacctggtgccagttcaggaacttccggagatcacggtgagctagtggtacggatagccagtctcgaagtggagaaccaatctctgcggggcgtcgtccaggagttacagcaggcaatatctaagcttgaggccagactcaacgtcctcgagaagtcgtctccaggacaccgggcgaccgcaccacagacccagcacgttagccctatgcggcaagtggagccccctgcaaagaagccagctacccccgctgaggatgatgaggacgatgatatagatctgtttgggagcgacaatgaggaggaggacaaagaagccgcccagctgcgggaagagaggttaaggcagtatgcggaaaagaaggctaagaaacccgcactggtagctaaatctagcatattgctggacgtaaagccatgggacgacgaaacagacatggctcagttagaggcttgtgtccgctcaatccaactggacggactggtatggggcgccagcaagctggtgcccgtcggatatggcattagaaaactgcagatacagtgcgtggtggaagatgacaaagtcgggactgatctcctagaagaagagattaccaaattcgaggagcatgttcagtctgtggacatcgccgctttcaataaaatatag

SEQ ID NO: 187022 - DNA, 441 bp, synthetic construct
  misc_feature 1..441: note = Description of Artificial Sequence: Synthetic coding sequence
  source 1..441: mol_type = other DNA
atgcggagcggcaaggccagctgcaccctggagaccgtgtgggaggataagcataaatacgaggaagccgagcggcggttctacgaacatgaagctacccaggctgctgctagtgcccagcagctgcccgctgagggtcccgccatgaacggacctggccaggacgatccagaggacgcggacgaggcagaagctcctgatggtggctcgaggagagacccacgaaagtctcaagatagccgaaagcccctgcagaagaagcgcaagcggtctccgaaatcaggacttggaccagctgacctggcattattggggttaagtgccgagagagtgtggctcgataaatctttgttcgaccaggccgaatcgtcatatagacaaaagctggcagatgtggccgcccaggctgcctggccgcctgctttagctccctgggggtag

SEQ ID NO: 187023 - DNA, 615 bp, synthetic construct
  misc_feature 1..615: note = Description of Artificial Sequence: Synthetic coding sequence
  source 1..615: mol_type = other DNA
atggccaccaacttcctggcccacgagaagatctggttcgacaagttcaaatacgatgacgccgagcggagattctacgaacagatgaacgggccggtagctggtgcctcacgacaggaaaacggggcctccgtgattctgcgggacatcgcacgtgctcgtgagaacatccagaagagcttagccgggagctccggaccgggggcgtcatcaggtactagtggcgatcacggtgagctggtcgttcgaatcgcttccctcgaggtcgaaaaccagtctttacgaggcgtcgtccaggaacttcagcaagccatttcaaagttggaggcacgtcttaacgtgctagagaagtccagccctggacatcgggcaacagctccacaaactcagcacgtgtccccaatgcggcaagtcgaacccccagccaagaagccagccactccagcagaagacgacgaggatgatgacattgacctctttggatctgacaacgaagaagaggataaggaagcagcacagctgcgggaggaacgcctcagacagtacgctgaaaagaaggcgaaaaaacccgcactggtggccaaatcctctatcctgctagatgtcaagccctag

SEQ ID NO: 187024 - DNA, 390 bp, synthetic construct
  misc_feature 1..390: note = Description of Artificial Sequence: Synthetic coding sequence
  source 1..390: mol_type = other DNA
atgcggagcggcaaggccagctgcaccctggagaccgtgtgggaggacaagcataaatacgaagaggcagagcggcggttctacgaacatgaagccacccaagccgccgccagcgcccagcagctgcccgcagaggggcccgcgatgaacgggcctgggcaggatgacccagaagacgcagatgaggcagaggcccccgacggaggaagtaggcgggatcccagaaaaagccaagactcacgaaaacccttgcagaagaagcgcaaacggagccccaagagtggactgggacccgctgacctggccctgctcggcttgtccgccgagcgtgtctggctcgacaagagcttatttgatcaggcagaaagtagctaccggcagaagctctag

SEQ ID NO: 187025 - DNA, 501 bp, synthetic construct
  misc_feature 1..501: note = Description of Artificial Sequence: Synthetic coding sequence
  source 1..501: mol_type = other DNA
atggccaccaacttcctggcccacgagaagatctggttcgacaagttcaaatacgatgacgccgaaaggaggttctacgagcaaatgaatggtcccgtggccggtgcctctcggcaagagaacggcgcatctgttattcttcgggacattgcacgggcacgggaaaacatccagaaatctttggcaggctctagcggtcctggcgcctcctctgggacctccggtgatcacggcgaacttgtggtgagaatagcttccctggaggtggagaatcagagtctgaggggagttgtccaggaactgcagcaagcgatatctaagctcgaggcccgtctgaacgttttggagaagtcatctcctggccacagggccactgcgcctcagacacagcatgtctcgccaatgagacaagttgaacctcccgccaagaaacccgcgaccccagcagaagatgacgaggacgacgatatcgatctgttcggtagcgacaatgaagagtag

SEQ ID NO: 187026 - DNA, 255 bp, synthetic construct
  misc_feature 1..255: note = Description of Artificial Sequence: Synthetic coding sequence
  source 1..255: mol_type = other DNA
atgcggagcggcaaggccagctgcaccctggagaccgtgtgggaggataagcacaaatacgaggaagcagagcggaggttttatgaacatgaagcaacgcaggctgccgcatcagctcagcagctgcctgctgagggaccagcaatgaatggaccaggtcaagacgaccccgaggacgctgatgaagcagaagctcctgacggaggttctcgccgtgacccaaggaaatcccaggattcaaggaagcccctttag

SEQ ID NO: 187027 - DNA, 600 bp, synthetic construct
  misc_feature 1..600: note = Description of Artificial Sequence: Synthetic coding sequence
  source 1..600: mol_type = other DNA
atggccaccaacttcctggcccacgagaagatctggttcgacaagtttaagtacgatgacgccgaacgccgattttatgagcagatgaacggccctgtagccggagcgtctcgccaggaaaacggcgccagcgtgatactgagggacattgccagagcccgcgaaaacattcagaagagtctggccggcagcagtggtccaggcgcctcctccgggacatctggcgaccacggggagctagtcgtcaggattgctagcctggaggtggaaaatcagtctttacgcggagttgtccaggagctgcaacaggcaatctcaaaattggaagcacgtttgaatgtgttggagaaatcatccccagggcacagggcaacagccccacagacccaacatgtatcccccatgagacaggttgagccccccgccaagaaaccagccaccccagccgaggatgatgaagatgacgacatcgatttattcggctcggacaatgaggaagaagacaaggaggctgcacagctgagggaggagcgcctcaggcagtatgctgaaaagaaggcaaagaagcccgcacttgtcgccaagtcctcaatcctgtag

SEQ ID NO: 187028 - DNA, 774 bp, synthetic construct
  misc_feature 1..774: note = Description of Artificial Sequence: Synthetic coding sequence
  source 1..774: mol_type = other DNA
atgcggagcggcaaggccagctgcaccctggagaccgtgtgggaggacaagcacaaatatgaagaagctgagaggaggttctacgagcatgaagcaactcaggctgccgcttcggcccagcagctgcccgctgaggggcccgcaatgaatggtcccggccaggacgaccccgaggacgctgacgaagccgaggctccggacggaggatcccgaagggacccacggaagagccaggacagtcggaagcccctccaaaaaaaaagaaaaaggtctccaaagagcgggttggggcccgccgatttggccctgctggggctctccgctgagcgagtttggctcgataaatccctctttgaccaagccgagagttcctacagacagaagctcgccgatgtggcggcccaggcagcatggcccccagcacttgccccctggggcttgtgtacgcatggcaaccaggttgcctgccaccatgtgacctggggcatctgggtaaataagagtagtttcgatcaggccgagagggcgtttgtggagtggtctcaagccctgctgctggcacctgatgggtctagaaggcaaggcacaccaaatacaggccagcaagtggcagtcccagatctggctcaccaaccttccccccccgtcaacgggcagcctcctctgggatccctgcaggctcttgttcgagaagtttggctggaaaagcccaggtacgatgctgccgagagaggtttctacgaggcgctctttgacggacatcccccaggatag

SEQ ID NO: 187029 - DNA, 540 bp, synthetic construct
  misc_feature 1..540: note = Description of Artificial Sequence: Synthetic coding sequence
  source 1..540: mol_type = other DNA
atgcggagcggcaaggccagctgcaccctggagaccgtgtgggaggacaaacacaagtatgaagaggctgagcggagattctatgagcatgaggccactcaggcggccgcgtccgctcagcagttgcccgcggagggcccggccatgaacggtcctgggcaggatgacccagaagacgcagacgaagccgaagcacccgacggcggaagccgccgtgaccccagaaagtctcaggactcacgtaaacccctgcagaagaaaaggaagcggtcccccaagagtggcctgggccccgcagatttggcactgctagggctttcagctgaaagagtgtggctcgataagtcactcttcgatcaggcagaatctagctaccgccagaagttggccgacgtggctgcccaagctgcctggcccccagccctggccccgtggggactttgcacccatggcaaccaggtagcctgtcaccatgtgacgtggggcatttgggtcaataagtctagcttcgatcaggcagagcgtgctttcgtagaatag

SEQ ID NO: 187030 - DNA, 108 bp, synthetic construct
  misc_feature 1..108: note = Description of Artificial Sequence: Synthetic coding sequence
  source 1..108: mol_type = other DNA
atggccaccaacttcctggcccacgagaagatctggttcgacaagtttaagtatgatgatgccgagcggcgtttctacgaacagatgaatggacctgtcgctggctag

SEQ ID NO: 187031 - DNA, 150 bp, synthetic construct
  misc_feature 1..150: note = Description of Artificial Sequence: Synthetic coding sequence
  source 1..150: mol_type = other DNA
atgcggagcggcaaggccagctgcaccctggagaccgtgtgggaggacaagcacaaatatgaagaagctgaacgacggttctacgagcatgaagccacacaggcagctgcaagcgcccaacagttacccgctgaaggacctgccatgtag

SEQ ID NO: 187032 - DNA, 120 bp, synthetic construct
  misc_feature 1..120: note = Description of Artificial Sequence: Synthetic coding sequence
  source 1..120: mol_type = other DNA
atggccaccaacttcctggcccacgagaagatctggttcgacaagttcaaatacgatgacgcagaacggagattttatgagcaaatgaatggcccagtcgccggggctagcagacaatag

SEQ ID NO: 187033 - DNA, 573 bp, synthetic construct
  misc_feature 1..573: note = Description of Artificial Sequence: Synthetic coding sequence
  source 1..573: mol_type = other DNA
atgcggagcggcaaggccagctgcaccctggagaccgtgtgggaggataaacacaagtatgaggaggcggagcgtaggttctatgaacacgaagctacccaggctgccgcctccgctcagcaactgcccgccgagggccccgctatgaatggacctggccaggatgatccagaggacgccgacgaggccgaggccccagatggcggtagtcgtagggatccgcgcaagtctcaagatagcagaaagcctttgcagaaaaaacggaaaagatccccaaaaagcggcctgggtccagccgatctcgccctgctgggcttgtcagccgagagggtttggctggataaaagtttgttcgaccaggctgagagctcgtaccgccagaagctcgccgacgtggctgcccaagcagcctggcctccagcccttgctccgtggggactgtgcacccacggcaatcaggtggcttgccaccatgtgacctggggcatctgggtgaacaaaagttcctttgaccaggccgagagggcttttgttgagtggagccaagcgcttctgttggctcccgatggatag

SEQ ID NO: 187034 - DNA, 2094 bp, synthetic construct
  misc_feature 1..2094: note = Description of Artificial Sequence: Synthetic coding sequence
  source 1..2094: mol_type = other DNA
atggaggcccccctgggcagcatcctgagcccctgccccggccgggccgccaccggccgcgcgggcaccggacgggtagggacaggactgagacctccagccgtgttacagctctgccctcttctggctttctaccggtgtgtgaggaagatgagatccggcaaagcctcttgtaccctcgaaaccgtctgggaagacaagcacaaatatgaggaagcggagcggagattttatgagcatgaggctacccaggcagcggccagcgcccagcagctgcccgctgaggggccagcgatgaacggaccgggtcaagacgatcccgaggacgccgatgaggcagaggcccctgatggaggatcccgacgggacccacgtaaatcacaggattcccggaaacctttgcaaaagaagagaaagaggagccccaagagcgggcttgggccagcggatctggccctgcttggtctctcagcagaacgtgtgtggctggataaatctctgtttgatcaggccgaaagtagttacagacagaagctcgccgatgtggcagcccaggcagcgtggccaccagccctggccccctggggactctgtacacacggtaaccaggtagcttgccatcacgtcacatgggggatttgggttaacaaatccagcttcgatcaggcggaaagagccttcgtggagtggtcacaggctctgctgctggccccagatggatcccgtagacaaggaacacccaataccgggcagcaagtggccgtacccgacctggctcatcagccttcaccccccgttaacggtcagccaccactcggctctttgcaggcactggtcagagaggtatggctagagaaaccccggtatgatgccgctgaaagggggttctacgaggccctcttcgatggtcacccaccaggtaaggtccgcctgcaggaaagggccggtctggctgaaggcgcgcggagaggacgacgggaccgccggggccgcaatatactggggaacaagcgcgccggactccggagagccgatggagaggcgccttctgcgctgccgtactgttacttcttacaaaaggacgcggaggccccatggctgagcaaacctgcctacgactccgctgaatgcaggcaccacgccgctgaggctctgagagtagcatggtgtctggaggccgctagccttagtcacaggcctggcccaagatcgggtttgagcgtctccagcctccggcccaatcgcaagatggcgacaaactttcttgctcacgaaaaaatctggttcgataagttcaaatacgatgatgccgaaagacgattctacgagcagatgaacgggcccgttgccggcgcttctcggcaggaaaacggagctagtgtgatcctcagagatattgcacgggcaagggagaatatccagaagtccctcgcaggctcttcgggacccggagcatcttctgggaccagcggagaccacggcgagctagttgtaaggatagcctccctcgaggtggaaaaccaatccctccgcggagttgtccaggaattgcagcaagcgatctctaaattggaagctagacttaatgtgctggaaaaatctagccccgggcaccgagcaacagctcctcagacgcagcatgttagccccatgagacaggtagagcctccagcgaagaagcctgccaccccagcggaggacgacgaggacgacgatatagatttgttcggatccgataatgaggaggaggataaagaagctgctcagctccgggaggagcggctcagacaatatgccgaaaaaaaggcgaaaaaaccagcccttgtcgccaagagtagtatcctgctcgacgtcaagccctgggacgatgaaaccgatatggcacagctagaagcttgtgtcaggtccattcagctggatggcctggtgtggggtgcctctaagctggttcctgttggctacggaattcgcaagctacagatccagtgcgtggtggaagatgataaggtgggcaccgatctgctggaagaggagattacaaagttcgaagagcatgtgcagagtgttgatattgctgcttttaataaaatttag

SEQ ID NO: 187035 - DNA, 615 bp, synthetic construct
  misc_feature 1..615: note = Description of Artificial Sequence: Synthetic coding sequence
  source 1..615: mol_type = other DNA
atggccaccaacttcctggcccacgagaagatctggttcgacaagttcaagtatgatgatgccgaaagaaggttttatgagcagatgaatgggccggtcgcgggggccagccgccaggagaacggggccagtgtgatactccgtgacatcgccagggcccgagaaaacatacagaagtcactcgcggggagtagcggccccggcgcctcctcaggaacctcaggggatcatggagagctcgttgtgcggatcgccagtctggaggttgaaaaccagagccttcggggcgtggttcaggaattgcagcaggctatttctaagctggaagctcgtctcaatgtactagagaagtcatctcctgggcatcgagccactgcccctcagacgcagcatgtcagcccgatgaggcaggtagaacccccggcaaaaaaacctgccacccccgctgaggacgacgaggacgacgacatcgacctgtttgggtccgacaacgaagaggaggacaaagaagctgcgcagctgagagaggaacgtctgcgccaatacgctgaaaaaaaggctaaaaagcctgcgttggttgctaagtcctccattctgttggacgtaaagccatag

SEQ ID NO: 187036 - DNA, 507 bp, synthetic construct
  misc_feature 1..507: note = Description of Artificial Sequence: Synthetic coding sequence
  source 1..507: mol_type = other DNA
atggccaccaacttcctggcccacgagaagatctggttcgacaagtttaagtacgacgatgccgagagaagattctacgagcaaatgaacggaccagtggccggcgcatcacgccaagaaaatggggcaagcgtgatactccgagacattgctagagcacgggaaaatatccagaagtctcttgcagggtcttctggcccaggagcgtcctccggcacaagcggggaccatggcgaactggtggtgcgcatcgcaagccttgaggtggagaatcaatccttgcggggggttgtgcaggagttgcaacaggccatatccaagctcgaagcacggcttaacgtgctggagaaatcctctccaggtcatagagccaccgcacctcaaacccagcacgtcagccccatgcgacaggtcgagcctccagcaaagaagccggccacccccgcagaggacgatgaggacgatgatatcgatttatttggctccgataacgaggaagaagattag

SEQ ID NO: 187037 - DNA, 786 bp, synthetic construct
  misc_feature 1..786: note = Description of Artificial Sequence: Synthetic coding sequence
  source 1..786: mol_type = other DNA
atggccaccaacttcctggcccacgagaagatctggttcgacaagtttaagtacgatgacgccgagaggagattttatgaacagatgaatggtccggtggctggggctagtaggcaagagaacggcgcctcggtgatcctccgtgatatcgcacgggccagggagaatatacagaagagtctggccgggagctcaggtccgggcgccagcagcggaacaagtggagatcacggagagcttgtggtacgtatagcttcgttagaggtagagaaccagagtctcaggggcgtggtgcaggagttacaacaggctatatcaaagctggaagctaggctgaacgttttggaaaaatcgtctccaggtcacagggctaccgcaccacaaacccagcacgtgtctcctatgagacaggtggagcccccagctaaaaaacccgcaacaccagccgaagacgatgaggacgacgatatagatctattcggctccgacaacgaggaggaagataaggaagccgctcagctgcgtgaggaacggctccgtcaatatgccgagaagaaagccaagaagcccgccttggtagccaagtcaagcattctgctcgacgtgaaaccgtgggacgatgagaccgacatggcacaactggaggcatgtgttaggtcaattcagttggatgggctggtatggggagcctcaaagctggtaccagtgggatacggaatacggaagttgcagatacagtgtgttgtcgaagacgataaggttggaactgatctgctggaagagtag

SEQ ID NO: 187038 - DNA, 96 bp, synthetic construct
  misc_feature 1..96: note = Description of Artificial Sequence: Synthetic coding sequence
  source 1..96: mol_type = other DNA
atgcggagcggcaaggccagctgcaccctggagaccgtgtgggaggacaagcacaaatacgaggaggctgagcgtaggttctacgagcacgagtag

SEQ ID NO: 187039 - DNA, 207 bp, synthetic construct
  misc_feature 1..207: note = Description of Artificial Sequence: Synthetic coding sequence
  source 1..207: mol_type = other DNA
atgcggagcggcaaggccagctgcaccctggagaccgtgtgggaggacaagcataagtacgaagaagcggagaggaggttctatgagcatgaggcaacccaggccgcagcctctgctcagcagttacctgcagaaggtcctgcaatgaacgggcctgggcaggacgacccggaagatgccgacgaggcggaggctcctgacgggtag

SEQ ID NO: 187040 - DNA, 789 bp, synthetic construct
  misc_feature 1..789: note = Description of Artificial Sequence: Synthetic coding sequence
  source 1..789: mol_type = other DNA
atggccaccaacttcctggcccacgagaagatctggttcgacaagtttaaatatgacgatgccgaacggagattctacgagcagatgaatggacccgtggcgggggcctcaaggcaagaaaatggggcctctgtcatcctgagagatatagcaagagcccgggagaatattcagaagtcccttgctgggtcatctggtcccggtgcatcaagtggcacaagcggggaccacgtggtgcaagaattacagcaggctatctcaaaactcgaggcgaggctgaacgtactcgagaaatcatccccgggtcaccgggctactgcacctcagactcagcacgtgtctcccatgaggcaggtggaacctcccgccaaaaaaccagcaacccccgcggaggatgatgaagacgatgatattgacttattcggcagcgataatgaagaggaggataaagaggccgcacaactgagggaggagcgcctccgacagtacgctgagaaaaaggctaagaagcccgcgctggttgcaaaaagctccattctgttagatgttaaaccttgggatgatgaaacagatatggcccagctggaggcttgtgtgcgctccatccagctcgatgggctggtgtggggagccagtaagcttgtccccgtcggatacggaatccgaaagctccagattcaatgtgttgtcgaggatgacaaagttggaactgacctgttagaagaggagattacaaagtttgaagaacatgttcaaagtgtggacatagcggcgtttaataaaatctag

SEQ ID NO: 187041 - DNA, 525 bp, synthetic construct
  misc_feature 1..525: note = Description of Artificial Sequence: Synthetic coding sequence
  source 1..525: mol_type = other DNA
atggccgccgccgccgagctgagcctgctggagaagagcctgggcctttcaaaaggaaacaagtatagcgctcagggagaaagacagatccctgtgctgcagactaacaacgggccttccttgacaggcctgaccaccatcgccgcgcatctcgtcaagcaagctaataaagagtatttgctgggtagcacagctgaagagaaagcaatcgtgcagcaatggctcgagtaccgcgtgacccaggtagatggtcatagctccaagaatgacatacacactttgttgaaggatttgaattcctatcttgaagataaggtttacttgaccggctacaatttcactctggctgatatccttctttattatgggctgcatcgttttatcgtcgatcttacagtgcaggagaaagagaagtatctgaatgtcagccggtggttctgccatattcaacattaccccgggatccggcagcacctctcttcagttgtttttattaagaataggctgtacaccaacagccactag

SEQ ID NO: 187042 - DNA, 420 bp, synthetic construct
  misc_feature 1..420: note = Description of Artificial Sequence: Synthetic coding sequence
  source 1..420: mol_type = other DNA
atggccgccgccgccgagctgagcctgctggagaagagcctgggcctgagcaaaggtaataaatattctgcccagggggaaaggcagatccctgtgctgcaaaccaacaacggaccctctttgaccggcttaactaccatcgccgcacacttagtgaaacaagctaacaaggaatacttactggggtcgactgccgaggaaaaggctatcgttcagcagtggctcgaataccgcgtgacgcaggtggacggtcattcctcaaagaacgacatccatacgctgctgaaggatctgaatagctacttggaagacaaggtttacttgacgggttataactttactttggccgatattctgctgtattacggacttcacaggtttattataagaaagcttcggcataccgaggtgggaaactag

SEQ ID NO: 187043 - DNA, 1314 bp, synthetic construct
  misc_feature 1..1314: note = Description of Artificial Sequence: Synthetic coding sequence
  source 1..1314: mol_type = other DNA
atggccgccggcaccctgtacacctaccccgagaactggcgggcctttaaagcactgattgccgcccaatatagtggcgctcaagttcgggttttatcagcacccccacattttcactttggacagacaaaccgcacccctgagttcctccggaaattccccgctgggaaggttcctgcctttgagggagacgatggattctgtgttttcgaatccaacgccattgcttattacgtgagtaacgaggagctgcgggggtcaacgcctgaggcagccgcgcaggtcgtgcagtgggtgtctttcgctgactccgatatcgtgccacctgcaagcacttgggtgtttccaacactcggaatcatgcatcacaacaagcaggcgaccgagaacgcgaaagaggaggtaagacggatcctcggattgttggatgcataccttaagactaggaccttcctagtcggggaaagggtaactctggccgatatcactgtggtgtgcaccttattgtggctttataaacaggtgttggagcccagcttccgacaggcatttcctaacactaatcgatggtttttgacatgcatcaaccaacctcagtttagagcggtgctgggtgaggtcaagctttgtgagaaaatggcccagtttgacgctaaaaaattcgctgaaacacagccaaagaaagataccccccgaaaggagaaggggtcccgagaagaaaagcagaagcctcaggcagaaaggaaggaagaaaaaaaagctgccgcccccgcgcccgaggaggagatggatgagtgcgagcaggctctcgcggccgagcccaaggccaaggacccatttgctcatctgccgaagagcacctttgtcctcgatgagtttaaacggaaatacagtaacgaggatacactgagcgtggccctcccctacttttgggagcatttcgacaaagacggatggtctctgtggtactcagaataccggtttcctgaggaattgacacagacttttatgtcttgcaacctcataaccggtatgtttcagaggcttgacaagttgcgaaagaatgcgttcgcctctgtgatcttatttgggacaaataactcctcaagcatttctggtgtgtgggtgttccgaggccaggaacttgcgtttcctctctcacccgattggcaggtggactatgaatcatatacatggcgcaagctggatcctggatctgaggaaactcagacactagtgcgcgaatatttctcttgggagggggcatttcaacacgtgggtaaagcgttcaatcaaggaaagatcttcaaatag

SEQ ID NO: 187044 - DNA, 1464 bp, synthetic construct
  misc_feature 1..1464: note = Description of Artificial Sequence: Synthetic coding sequence
  source 1..1464: mol_type = other DNA
atggccgagcggtgggtggcccccgccgtgctgcggcgggcccggttcgcctctacttttttcctgtcaccccaaatttacgctcataaggatggggacctacgaagtgcctttttcatactgtcgttcaaacggggcgaatttatccccttcttgaactggaccttgtacacatatccagaaaactggcgcgccttcaaagctctgattgccgctcagtactctggagcgcaggtccgggttctgagtgcacctccccattttcactttgggcagaccaaccggacgcctgaatttctcagaaagtttcccgccggcaaagtccccgcgttcgaaggagacgatggattttgcgtcttcgaaagtaacgccatcgcttactatgtcagcaatgaagaattgaggggctctacgccagaggcggccgcgcaggtcgttcagtgggtttctttcgcagacagcgatatcgttcctcccgcgtctacatgggtctttccaactctcggcatcatgcaccacaacaaacaggcaaccgaaaacgccaaagaagaggtacgtcgcatactagggttgctcgacgcctacttgaaaacccgcacgtttctggttggagagagggtgaccctggcagatatcacagtggtgtgtactctgctgtggctatacaaacaggtgctggaaccttcttttcggcaggcctttcccaacaccaatagatggttcctcacatgtatcaaccaaccgcagttcagagcagtgttaggcgaagtcaagctgtgcgaaaagatggcccagttcgatgctaaaaagttcgccgagacacaaccgaagaaagatacacctaggaaggaaaaaggctccagggaggagaagcagaagccccaggccgagcggaaagaggaaaagaaggccgcagctccagcgcctgaggaagagatggatgagtgtgaacaggcccttgccgctgagcctaaggcgaaagaccctttcgcccatctgcctaaaagtacatttgtgctggatgagttcaaacgaaaatattctaatgaggacacgctgagcgtggccctaccatacttttgggagcactttgacaaggacggctggtcactttggtattccgaatataggttccctgaggaattaacccagacctttatgtcgtgcaatctgattacaggaatgttccagcgtttagataagctccgcaagaacgctttcgccagcgtcatcctgtttggtactaacaattccagtagcatttccggagtgtgggttttcagaggacaggagttggcatttcccctgtctccagactggcaagttgattatgagtcctatacttggcgaaagctggatccaggcagcgaggaaacacaaacattggtgagagagtacttctcatgggaaggtgcatttcagcacgtgggcaaagccttcaatcaaggcaagatctttaaatag

SEQ ID NO: 187045 - DNA, 621 bp, synthetic construct
  misc_feature 1..621: note = Description of Artificial Sequence: Synthetic coding sequence
  source 1..621: mol_type = other DNA
atgcaccacaacaagcaggccaccgagaacgccaaggaggaggtgagaaggatattgggcttactggacgcctacctgaagactcgcactttcctggtcggggagagagtgaccctagcagcggagcccaaggccaaggatccattcgcgcacctcccaaaaagtacatttgtattagacgagttcaaacgaaagtactccaacgaagatacactcagcgtcgccttaccatacttctgggagcatttcgacaaggatggctggtccctatggtactccgagtatagattcccggaggaactgactcagacattcatgtcatgtaatttgatcactggtatgttccagcggcttgataaactgcggaagaacgccttcgcctcggtcattctcttcggaacgaataactcctcgagtatcagtggtgtgtgggtgttcaggggccaggagttagcctttccactgtcaccggattggcaggttgactacgaatcatacacctggaggaagctggaccccggatccgaggagacccagacactagtacgagagtattttagctgggagggggcttttcagcacgtgggcaaggcttttaaccaggggaaaatctttaaatag

SEQ ID NO: 187046 - DNA, 2577 bp, synthetic construct
  misc_feature 1..2577: note = Description of Artificial Sequence: Synthetic coding sequence
  source 1..2577: mol_type = other DNA
atggtgaacttcaccgtggaccagatccgggccatcatggacaagaaagccaatatacgcaatatgtccgtaatcgctcatgtcgatcacgggaaatccacactgacagacagtctggtttgtaaagctggtataatagccagcgcaagagctggagagactcgattcacagatacgcgtaaagacgagcaggagcggtgtattacaattaagagcacggccatcagtctgttctatgaactatctgagaacgacttgaactttattaagcagagcaaagacggagccgggtttctgatcaatctcatcgactcccctggccacgttgatttctctagtgaagtgacagccgcactgagagtcactgacggtgcactagtcgtggtggattgcgtttcaggcgtttgtgtccagacagaaactgtgctaaggcaagccattgccgaaagaataaagcccgtattgatgatgaacaagatggatagagcgctccttgaactgcaactggagccggaggagctgtatcagacattccaaaggattgtcgaaaatgtgaatgtgattatcagcacgtacggcgaaggcgaatccggtcctatgggcaatattatgatcgatcctgttttggggaccgttggtttcggcagcgggctccacggttgggccttcacactgaaacaatttgcagaaatgtacgtggcaaaatttgctgcgaaaggggagggccagttaggcccggcagaaagggccaagaaggtcgaggatatgatgaagaaactgtggggagatcgttacttcgatccagccaacggcaagttttctaaatccgctacgagcccggaaggtaaaaagctgccgcgcactttctgccagctgatcctggatcccatctttaaagtgttcgatgccatcatgaactttaagaaggaggagacagctaaactgattgagaagctggacattaagctggacagtgaggacaaggacaaagaaggaaagccactgcttaaggccgtgatgcgcaggtggctgcctgctggggacgcccttctccaaatgattactatccacctgccttccccagtcactgctcagaaataccggtgcgaacttctgtatgagggtccgcccgacgacgaggcagccatgggaattaagtcatgcgaccctaaagggcctctgatgatgtacatctctaaaatggtccctacaagcgacaaggggcgcttctatgctttcgggcgcgttttctccgggctcgttagcaccgggctaaaggtccgtattatgggcccaaattatacacctgggaagaaagaggacctatacttaaagccgattcagcgtaccattttaatgatggggcggtatgtagagcctattgaagacgtcccgtgtgggaacatagtgggcttagtcggcgtggaccagtttctagtgaaaaccgggacaattacaacgttcgaacacgcccataacatgagagtgatgaaattctctgtgtctcccgtggttcgcgttgcggtcgaggccaagaaccccgcagacctccccaagctcgttgagggcctgaagcgattggcaaagtcagatcctatggtccagtgcatcatcgaggaatcgggagagcatatcattgctggtgccggggagttgcatctcgaaatctgtttaaaagatctcgaggaagatcacgcttgcattcctatcaagaagtcagacccagtggtgtcttacagggagacggttagcgaagaatccaacgtgctatgtttgagcaagagtcctaacaaacataacagactgtatatgaaggcccgccccttcccggatggcctggcggaggatattgataaaggagaagtgtcagcgcgtcaagaactgaagcagagagcgcgctacctggcagagaaatacgaatgggacgtggccgaggctcgcaagatatggtgctttggacccgatgggacgggccctaatatcctcaccgacattacaaagggcgtccaatacctcaatgaaattaaggacagcgttgttgccggcttccagtgggccactaaggaaggcgcactctgcgaggagaacatgcgaggggtgcgctttgatgtccacgacgtcacgctgcacgctgatgctattcacagaggtggtggccagattattccaacagcccgaaggtgtctttatgcctccgtgttgactgcgcagccaaggttgatggaaccaatatatctggtcgagattcaatgtcctgagcaggttgtgggcggtatctatggagtcctgaacagaaaacgggggcacgtatttgaggagagccaggtggctggaacaccgatgtttgtcgtcaaggcctatctgcccgtgaacgagtctttcggcttcacggccgacctgcggtccaatactggggggcaggcctttccccaatgcgtattcgatcattggcagatcttacccggggatccatttgataactcttcccgcccaagccaggtggttgctgagaccaggaaacgcaagggccttaaggaggggattccggcgctggataattttctggataagctgtag

SEQ ID NO: 187047 - DNA, 1752 bp, synthetic construct
  misc_feature 1..1752: note = Description of Artificial Sequence: Synthetic coding sequence
  source 1..1752: mol_type = other DNA
atggtgaacttcaccgtggaccagatccgggccatcatggacaagaaggcaaatatcaggaatatgtctgtaatcgctcacgtggaccacggtaagtccacgctcaccgattccttagtgtgtaaggccggcattatagcaagcgccagggccggcgagacacgttttactgatactcggaaggatgaacaggagcgctgtattactataaagagcactgctatttcactgttctacgagctcagtgagaacgacttgaatttcatcaaacagagcaaagatggagccgggtttttgataaatctgatagattctccaggccatgtcgacttctcctcagaggtgactgctgcccttagggttacagatggggcactggtcgtcgtagattgtgtcagcggcgtgtgtgtgcagaccgagacagtcctgaggcaggccatcgccgaaaggatcaagccagtgctgatgatgaacaagatggatcgagcactgctggaactgcagctggaaccggaggaattgtaccagaccttccagcggatagtggaaaacgtcaacgttatcatctctacttacggtgaaggagagagcgggccgatggggaatatcatgatcgatcccgtactggggacagtcggctttggctcaggactccacggatgggccttcactttgaaacagttcgcagaaatgtacgtagctaagttcgccgcgaagggggaaggacagctcggtcccgctgaacgagcgaagaaagtggaggacatgatgaagaaattgtggggggaccgctactttgacccagcgaatggtaaattcagcaaaagtgctacttcgcctgagggaaaaaaattgcctcgcaccttctgtcagctgattcttgaccctatcttcaaagtgtttgatgcaatcatgaacttcaagaaagaggaaacagctaaattgatcgagaaattggacattaagcttgactcagaagataaggacaaggaaggcaagccattgctgaaagccgtgatgcgccgttggttgcccgccggtgacgccctgctgcagatgattacgattcacctgccaagtcccgttaccgctcagaagtaccgatgcgagctgttgtacgaaggtcctccagacgatgaggccgctatgggcattaaaagttgtgacccgaaaggtcccctgatgatgtacatatctaaaatggttcccacgtcagacaaaggcagattctacgccttcggacgcgtgttttccggtctggtatccacaggattaaaagtcaggataatgggccccaactacactcctggcaaaaaggaggatctgtatttaaaaccgatccagcgaactattctgatgatggggagatacgtcgaacccatcgaagacgtgccctgtggaaacattgtcggccttgtcggggttgaccagttcctagtgaaaacaggcacaatcacaactttcgagcatgctcacaacatgagggttatgaagttctctgtgtccccggttgttcgtgtcgcagtggaggcaaaaaatcccgcagatctgcctaaactcgtagaaggcttgaaacgcctcgccaagtcagatcctatggtccaatgcatcatcgaggaatctggtgaacacataatcgccggtgccggcgagctgcatctcgagatttgcctgaaggatttagaagaggaccatgcgtgtatccctataaagaaagagaccgtctcaaaaaaaaaaaagaagaaaaagtag

SEQ ID NO: 187048 - DNA, 351 bp, synthetic construct
  misc_feature 1..351: note = Description of Artificial Sequence: Synthetic coding sequence
  source 1..351: mol_type = other DNA
atgcccaagaacaaggagtacgcccaggtgatcaagatgctgggcaacggcaggctcgaagccatgtgctttgatggcgtcaaaaggttatgtcatatacgcgggaagttgcgcaagaaggtgtggatcaacacttctgatatcatccttgttggtttgcgggattatcaggacaataaagccgacgtaattcttaagtacaatgccgacgaggctcggtctctaaaggcttacggcgagctgccagaacacgccaagatcaacgaaaccgacacctttgggcctggggacgacgatgaaatccagttcgatgatattggggatgacgatgaggatatcgatgatatctag

SEQ ID NO: 187049 - DNA, 435 bp, synthetic construct
  misc_feature 1..435: note = Description of Artificial Sequence: Synthetic coding sequence
  source 1..435: mol_type = other DNA
atgcccaagaacaagggcaagggcggcaagaaccggcggcggggcaagaacgagaatgaatctgagaagcgggagctcgtatttaaagaggatggacaggagtatgcccaagtaatcaagatgctcggcaacggacgccttgaagctatgtgttttgatggcgttaagaggttatgtcacatacggggcaaattgcgcaagaaggtgtggatcaatacctctgatatcattctcgtgggtcttcgagactaccaagataacaaagcagatgtcatcttaaagtataatgcggacgaggcgcggagcctgaaagcttacggtgaactccctgagcatgccaaaatcaacgaaactgatacgtttggacctggcgacgatgatgagattcagtttgacgatatcggagatgatgacgaggatatcgacgatatttag

SEQ ID NO: 187050 - DNA, 435 bp, synthetic construct
  misc_feature 1..435: note = Description of Artificial Sequence: Synthetic coding sequence
  source 1..435: mol_type = other DNA
atgcccaagaacaagggcaagggcggcaagaaccggcggcggggcaagaacgagaacgagagtgagaagcgagagctagtctttaaagaggacgggcaggagtacgcacaggttattaaaatgttgggtaacggtagactggaggctctttgctttgacggtgttaaacggctttgtcacatccggggtaagttacgcaagaaggtgtggatcaatacttccgatatcattctggttgggctgcgcgattaccaagataataaggcagacgtcattctaaagtacaacgctgacgaggctcgcagtctgaaagcgtatggtgagctccctgaacacgccaaaataaatgaaactgatacgtttggccctggggacgatgatgagattcaatttgacgatatcggcgacgacgatgaggacatcgatgacatctag

SEQ ID NO: 187051 - DNA, 384 bp, synthetic construct
  misc_feature 1..384: note = Description of Artificial Sequence: Synthetic coding sequence
  source 1..384: mol_type = other DNA
atgcccaagaacaagggcaagggcggcaagaaccggcggcggggcaaaaacgaaaacgaatccgaaaagcgcgaattagtgtttaaggaagacggccaggagtatgcacaagtcatcaagatgctcggaaatggtaggctagaagctctctgttttgacggcgttaaacgtctttgccatatccgcgggaagttgagaaagaaagataataaagcggacgtcatactcaagtacaacgcagatgaagccaggtcgctgaaagcttatggggagttgcccgaacacgcaaaaataaacgaaactgacactttcgggcccggagatgatgatgagattcaatttgatgatattggcgacgatgacgaggatatcgacgacatatag

SEQ ID NO: 187052 - DNA, 1419 bp, synthetic construct
  misc_feature 1..1419: note = Description of Artificial Sequence: Synthetic coding sequence
  source 1..1419: mol_type = other DNA
atggccggcggcgaggccggcgtgaccctgggccagccccacctgtctcggcaggatttgacaactctggacgttacgaaactaacaccattaagtcatgaggtcattagccgacaggcgacaattaacatagggactatcggccacgtggctcacggtaaaagcactgtggtcaaggccatctctggtgtccataccgtgcgattcaaaaatgagctcgagcgaaacattaccatcaaactgggctacgcaaatgccaagatctataagctggacgacccatcgtgcccgaggcccgagtgctatcggtcctgcggaagctccacccctgacgaattccctactgatatacccgggaccaagggaaattttaaactggtgaggcatgtgtcattcgtcgattgtcccggtcatgatattctgatggccacaatgctcaacggggccgcagttatggatgccgccctattgctgatcgctggcaacgaatcttgcccacaacctcagaccagcgagcatttggcagccatcgagattatgaaactgaagcatattctcatcctccagaataaaatcgacctggtcaaggaatcacaggccaaggagcaatatgaacaaatcttagcctttgtccagggcacagtagccgagggtgctcccatcatccccattagtgctcagctgaagtacaacattgaagtggtctgcgaatacattgtgaaaaaaataccagtgcccccgcgtgatttcactagtgaacctagactgattgtcattaggagttttgatgtgaataagcctggatgtgaagtggatgatttgaagggaggggtagctggagggagcattctgaagggtgtgttgaaagtgggccaagagatcgaggtgcggcctggaatcgtctcgaaggactctgagggcaagctcatgtgtaaaccgattttctcaaagatagtcagcctctttgccgagcacaatgacctgcagtacgctgcgcctggtggcctgattggcgtgggaacaaaaatcgaccccacactctgcagggctgaccgaatggtcgggcaggttctgggtgccgttggggcacttcctgagatcttcaccgaactggagattagctactttcttcttcggcggttgctgggagtccggactgagggcgacaaaaaagctgccaaggtgcaaaaactcagcaaaaacgaggtactgatggtgaacataggttctctctctaccggagggcgcgtcagcgcggtcaaggccgatctgggcaagatcgtgttgactaatcccgtttgcacagaagtgggggagaagatagccctcagtaggagagtggagaagcactggcgacttattgggtggggtcagatccggcggggcgtgactatcaagccaactgtcgatgacgactag

SEQ ID NO: 187053 - DNA, 552 bp, synthetic construct
  misc_feature 1..552: note = Description of Artificial Sequence: Synthetic coding sequence
  source 1..552: mol_type = other DNA
tgagccggcggcgaggccggcgtgaccctgggccagccccacctgtctaggcaagacctgaccaccctagacgtgacaaagctgacccctttatcccacgaggtgatctcccgtcaggctacaatcaatattggaacaataggtcatgtggcgcacggaaaatcaaccgttgtgaaagccatcagcggtgttcacacagtccgctttaagaacgaactggagagaaacattactatcaaactgggatacgcgaacgcaaaaatttacaagctggatgatcctagttgtccacggcccgaatgttacagaagttgtggtagttcaacacctgacgagttcccaactgacatcccaggcacaaagggcaatttcaaactagtgagacacgtcagtttcgtggactgtccagggcatgatatactgatggccacaatgctcaacggtgctgctgtaatggatgcagcgcttttactaatcggaaaatatctcacaattggacttgacaagtcgatgtggaacaaatcaaagatgaagtaccttaaaggtaactag

SEQ ID NO: 187054 - DNA, 1116 bp, synthetic construct
  misc_feature 1..1116: note = Description of Artificial Sequence: Synthetic coding sequence
  source 1..1116: mol_type = other DNA
atgttccaggaggtgaaggccgacaaggtgaccatgctgtggaacaagaaggccactgctgtgcttgtcatagcaagcactgacgtcgataagaccggcgcgtcatattatggcgagcagacgctgcattacattgctactaatggcgagtccgcagtcgtgcagctgccgaaaaatgggccaatttacgatgtagtgtggaactccagctcaaccgaattctgtgctgtgtacggcttcatgcccgcgaaagcgactatcttcaacttgaagtgtgaccccgtgttcgactttggaacgggaccacgcaacgcggcttactatagtccacacggtcacatattagtgctcgctggattcggcaatctcaggggccagatggaagtgtgggatgtgaaaaactacaagctgatcagtaagcctgtggcgtccgacagcacttatttcgcttggtgcccggatggcgaacacattcttactgccacgtgcgccccccgcttgagggtgaacaacggttacaagatctggcactatacaggcagcatactgcataagtatgatgtgccctcaaacgcggagctatggcaggtttcatggcagccattccttgacggaattttcccagctaagaccataacctaccaggctgtgccttctgaggtcccgaacgaggaacccaaggtcgcgaccgcctacagaccaccggctttacgtaataaaccaattacaaactctaagctgcatgaggaagagccccctcagaacatgaagccccagtctgggaacgataagcccctgtcaaagactgccctgaaaaatcagaggaagcacgaagccaaaaaagcagccaagcaggaggctcgctctgataagagcccggatctcgcccccacacccgcacctcagtctaccccccgtaataccgtgagtcagagtatttccggcgatcccgagatcgacaaaaagatcaagaatctgaagaaaaagctgaaggccatagagcaacttaaagaacaagctgcaacagggaagcagttggagaaaaaccagttggagaaaatccagaaggagactgccctgctgcaagagctggaggatttggagttgggtatctag

SEQ ID NO: 187055 - DNA, 1758 bp, synthetic construct
  misc_feature 1..1758: note = Description of Artificial Sequence: Synthetic coding sequence
  source 1..1758: mol_type = other DNA
atggcccccagcacccccctgctgaccgtgcggggcagcgagggcctgtatatggtgaatggtcctcctcattttactgagagtaccgtcttccctcgcgagtctgggaaaaattgtaaagtatgcatcttctctaaggacggcaccttgttcgcttgggggaatggagagaaggtgaatatcatctcagtgacaaataaggggctattgcactcgttcgaccttctcaaggctgtgtgcctagaattttcaccgaagaataccgtcctggccacttggcagccgtacaccacatctaaagacgggaccgccggaatccctaacctccagttatacgatgtgaaaaccgggacctgcctaaaatcctttatccagaagaaaatgcagaactggtgccctagctggtctgaagatgagacactctgtgctagaaacgtcaataacgaagtccacttctttgaaaataacaactttaatacgatcgcaaacaagttgcacctgcagaagataaatgatttcgtgcttagccctggcccccagccttataaggtggccgtctatgtacccggctcaaagggagccccttctttcgttcggttgtatcagtacccaaatttcgcaggcccccacgcggcgctagccaataaaagtttctttaaggctgataaggtgaccatgctgtggaacaagaaggctaccgcagtgctggtgattgcttccacggacgtggataaaacgggggcctcctactatggagaacaaacacttcattacatcgccacgaacggtgagagtgctgttgtccaactgccaaagaatggcccaatctacgacgtggtgtggaatagcagctctaccgaattctgcgctgtatatggctttatgccagctaaggcaacaatatttaacctgaagtgtgacccagtgttcgatttcgggacaggacccagaaacgctgcctactactccccccacggtcatattctagtcctcgccggttttggcaacctgaggggccagatggaggtttgggatgtgaaaaattacaaattgatatccaaaccagtggcatccgacagtacatacttcgcttggtgtcccgacggcgagcacatcctgactgctacttgcgcgcctcgcctacgagtgaacaacggttataagatctggcattatacaggatcaattcttcataagtacgacgtgcccagcaatgccgaactgtggcaggtgagctggcagccttttttagatgggattttcccagcaaagaccattacctatcaagcagtgccgagcgaggtacccaatgaggagcccaaagtcgctactgcatacagacctcccgctctgcgaaacaaaccgataaccaacagcaagctccacgaggaagaaccaccgcaaaatatgaaacctcagagtggcaatgacaaaccactctccaaaacggctctcaaaaatcaaaggaaacatgaggccaagaaggcagccaaacaggaagcaaggtcagacaagagtccagacttagctccaacgccagccccccagagtacgccccggaatactgtgagtcagagtatctcaggtgaccctgaaatcgataaaaagatcaaaaatttgaagaagaagctgaaagcaattgagcagctgaaggagcaagcagcaaccggcaaacagcttgagaaaaaccaattggaaaagatccagaaggaaacggctctgctgcaagagctagaggaccttgaactgggcatttag

SEQ ID NO: 187056 - DNA, 1893 bp, synthetic construct
  misc_feature 1..1893: note = Description of Artificial Sequence: Synthetic coding sequence
  source 1..1893: mol_type = other DNA
atgcagggcggcaacagcggcgtgcggaagcgggaggaggagggcgatggcgccggcgcagtcgcagccccccctgcaattgatttccctgccgagggcccggacccggagtacgatgagagcgacgtgccagctgagatacaggtgctcaaggaaccactgcagcagcccaccttccccttcgcggtggcaaaccagctactgcttgtttctcttttggagcacctgtctcatgtgcacgagcccaatcccttaaggtctaggcaggttttcaaattactctgtcagacattcatcaagatgggcctgctgagctctttcacttgctctgacgaattttcctccctcaggctccaccacaacagagctatcacccacctaatgaggtctgctaaggaacgagtgcggcaggatccctgtgaggacatctctaggattcagaaaatccgctctcgagaagtcgcccttgaagcacagactagccggtatttgaatgaattcgaggaactggccatcctaggtaaaggcggatatggccgcgtgtataaagtccgtaataaactggatggacaatattatgctattaaaaaaatcttaatcaaaggagccaccaaaacggtctgtatgaaggtcctgagagaggtcaaggtgttagctgggctacagcaccccaatattgtgggataccacaccgcatggatcgagcacgtgcacgtcattcagcctcgcgcggatcgagctgccatagagctcccttcactcgaggtactttccgatcaggaggaggacagagagcagtgtggagtgaaaaacgatgagagctcctctagtagcattattttcgcggaacctaccccggaaaaagaaaaacggtttggagaatcggacacggaaaatcaaaataacaaaagcgtgaagtacactacgaacctcgttatccgtgagagtggcgagttggaatccacattggagttacaggaaaacgggttggcggggctttcagcttctagcatcgtggagcagcagctgccgctgaggaggaactctcacctcgaggaatctttcactagtaccgaggagtccagtgaagagaacgttaatttcctgggccagaccgaagcacagtatcatttaatgctgcacatccagatgcagttgtgtgaactgagcctgtgggactggatagtcgaacgcaataagaggggaagggagtatgttgacgagtccgcttgtccttacgtgatggcaaacgtggctaccaaaatctttcaggagctggtcgaaggcgtgttttatatacacaacatgggaatcgtgcatagggatctgaagccacgcaacatttttctccacgggcccgatcagcaggtgaaaattggagatttcggactggcctgtaccgatattctccaaaagaatacagattggaccaatagaaacggcaagagaacccccacacatacctcaagagtcggcacctgcttgtacgccagtcctgagcagctcgaaggaagcgaatatgacgccaagagcgatatgtacagcctcggcgttgtgctcctggagctgtttcagccgttcgggacagagatggagagggctgaagtcctgaccggactcagaactggacaacttccggaaagtcttcggaagcgatgccctgtgcaggctaaatatatacagcatctgacgcgaaggaactcgtcacagaggcctagcgccatccagctgctccagagcgagctgtttcagaattctggaaacgtgaacttgacactgcagatgaagattatcgaacaggaaaaagagatcgccgaactgaagaagcaactaaatctgctctcccaggacaagggcgtgagagacgacggcaaagatggaggtgttggctag

SEQ ID NO: 187057 - DNA, 1734 bp, synthetic construct
  misc_feature 1..1734: note = Description of Artificial Sequence: Synthetic coding sequence
  source 1..1734: mol_type = other DNA
atgaaccagacccacttcgtgcaggaccggtgcctgagcgacccctgtgaagatatatccagaatccaaaaaattcgctctcgagaggtggcgttggaagcccaaacttcgcgctacctgaatgagttcgaggagttagcaattctcggcaagggcggatatggcagggtatataaagttaggaacaagctggacggccagtactatgccattaaaaagatcctcattaaaggggcgaccaagaccgtctgcatgaaggtgttacgagaggtgaaggtgctggctggcctgcagcatcctaacatcgtgggctatcatactgcatggattgagcacgttcatgtgatccagccacgggccgacagagcagccatcgagctcccgtctctagaagttctgagcgatcaggaggaggaccgagagcagtgcggggtgaaaaacgacgaaagtagctcatcatcaataattttcgccgagccgacacccgaaaaagagaaaagatttggcgaatctgatactgaaaatcagaataataagtccgtgaagtacactaccaacctcgttataagagaaagcggcgagctggaaagcacactggaattgcaggaaaatggactggcgggcctgtctgcttcttcaattgttgaacagcaacttccacttaggaggaacagccacctggaggaatcttttacttcaaccgaagagtctagcgaggagaatgtgaactttctgggtcagacagaggcccagtatcacctgatgctgcacatacaaatgcagctgtgtgagttaagcctgtgggattggatcgtagagaggaacaagagaggtagggagtacgttgacgagtctgcctgcccctatgtgatggccaatgttgcgacaaagatcttccaggagctggtcgaaggagtgttctacatccataatatgggaattgtgcatcgggatctgaaaccacgtaatattttcctgcacggacctgatcagcaagtaaagatcggggacttcgggttggcctgtactgatatcctgcagaaaaacacagactggaccaaccgtaatgggaaacggacacccacacacaccagtagggtgggcacctgcttgtacgccagccccgaacagcttgaaggatcggagtacgatgccaagtctgatatgtatagccttggtgtggtgttgctcgaactcttccagccgttcggaacagaaatggagcgagctgaagtcttgactggtcttcggaccggacagctacctgagagcctcagaaagaggtgcccagtccaggccaagtatatccagcatttgacccgtcgaaactcttctcagcgtcccagcgctatacagttactgcagagcgagctttttcagaattccggaaacgtgaatctgaccctgcagatgaagattattgagcaggagaaagagatcgccgaactcaaaaaacaattgaatctgctgtctcaggataaaggatttagcgtcattccaaagccccacccttgtaaggccctctactctgccccgcagatgatatcaaggcagttgaggtcccttagttgcctctgtcctgcactttttcccggaacgtcatcatttatcgttgcactttcatctcctgcaaacttgtatattccccagcggcaacgctccgacgagctggtgttcgaaagtcagaaggggagcgctatggaactggctgtgataacagtggatggggtttag

SEQ ID NO: 187058 - DNA, 3351 bp, synthetic construct
  misc_feature 1..3351: note = Description of Artificial Sequence: Synthetic coding sequence
  source 1..3351: mol_type = other DNA
atggagcgggccatcagccccggcctgctggtgcgggccctgctgctgttgttgcttctgctcggattagcggcaagaaccgtggcggccgggagggccaggggactgccagcccctaccgctgaggccgcatttggactgggggccgcagctgccccaacgagcgctacgcgcgtgcctgctgctggagctgttgcagcggctgaagttacagtggaggatgcggaggcgttacctgcggctgccggggaacaagagccacggggccccgagccagatgatgagactgagttgcgcccacgcgggaggtctctcgtgatcatttctaccctcgatggtagaatcgctgctctggaccctgagaaccacggaaagaaacagtgggacctggatgtaggatcgggctcgctggtatcttcaagcctctccaagcctgaagtgttcgggaataaaatgatcatccccagtctcgatggggccctgtttcagtgggaccaggatagggagagcatggagactgttcccttcaccgtagaaagtctccttgaatcctcctacaaatttggtgacgatgtggtacttgttggcggcaagagccttacaacctacggcctctcagcatattccggtaaggtgcggtatatctgcagcgccctcggctgccggcagtgggatagcgacgaaatggagcaggaagaagacatcctcctacttcaaaggacccagaaaacggtgcgggccgtaggcccaagaagcggtaacgagaagtggaatttctctgtgggccattttgaacttagatacatacccgacatggaaacgagagcaggatttatagagtcaactttcaagcctaacgagaataccgaggagtccaaaattatatctgatgtcgaggaacaagaggcagcaattatggacatcgtgattaaagtctctgtcgccgactggaaggtgatggcattttctaagaaaggcggacatctcgagtgggaataccagttctgtaccccaattgcgtctgcttggctactcaaggacgggaaggtgatcccgattagtttgttcgacgatacgagttacacatccaatgatgatgttttggaagacgaagaagatatcgtcgaagccgcccgcggagctaccgagaattccgtctacctagggatgtatagggggcaattgtatctgcaaagcagcgtccgcatctcagagaaattcccctcaagcccaaaagccttggaaagtgtgacaaacgagaacgctatcattcccctgcccaccataaaatggaagccactgatacactctccgagcagaaccccagttctcgtcggatccgatgagtttgacaagtgtctctccaacgataagttctctcatgaagagtattccaatggtgccctgtccattctgcagtacccttacgacaatgggtactaccttccttactacaaaagagaaagaaataagcgaagcacgcagatcactgtcagattcttggataatccccattataataagaatattcgcaaaaaggaccctgtattgctgctgcactggtggaaggaaatcgttgctaccatactgttctgcataatcgcaaccacatttatcgtgaggcgactgtttcacccgcatcctcatagacagaggaaggagtccgagacccagtgtcagaccgaaaataaatacgattcggtctccggcgaggcgaatgattcttcgtggaatgatatcaagaacagcggttacatatcgcgctatctcaccgacttcgaacctatccagtgcctgggtagagggggattcggagtggtgttcgaggccaaaaacaaggttgacgactgcaactatgctattaagagaatccgacttcccaatcgggagttggccagagagaaagtaatgagagaggtgaaagctttggcaaaactcgaacatcccggcatagtccgctactttaacgcgtggctggaagcacccccagagaagtggcaagagaaaatggacgagatctggttaaaggacgaatctactgactggcctctgagcagcccatccccaatggacgccccttcggttaaaatcaggcggatggatcctttcgctactaaggagcacattgagattattgcccccagcccacagaggtcgagaagtttctcagtcggcatctcgtgtgaccaaacaagctcatccgagagccagttcagtccgttggagtttagcggaatggatcacgaggatatttcggagtcggtagacgccgcctataatctgcaggacagttgcctcaccgattgtgacgtggaggacggcaccatggatggaaacgacgaaggccacagctttgagctgtgtcccagcgaagcctctccttacgtacggtcgcgggagcgaacaagctcgtccatagtgtttgaggattctgggtgcgacaacgctagctccaaggaagagcccaaaacaaatcggcttcacataggcaaccactgtgcaaacaaactgacagcgtttaagccgactagctctaagtctagttccgaggcgacgctgtccataagtccgcctcgacctaccacgctgtccctagaccttacaaagaatactaccgaaaagctgcagcctagttcccccaaggtgtacctgtatatccagatgcagttatgtaggaaggagaacctgaaggactggatgaacggtcggtgtaccatcgaagaaagggagaggtccgtgtgcctgcatatctttcttcagattgccgaagcagtggagttccttcatagcaagggactgatgcacagagacctgaagccaagcaatattttcttcacgatggatgatgtggtgaaggtaggtgacttcggcctagtgactgcaatggatcaggatgaggaagagcaaactgtgttaaccccaatgcccgcttacgctagacacaccgggcaagtcggaacaaagctgtacatgtcacccgagcaaatccatggtaattcctactcccataaggtggacatttttagcctgggtttgatacttttcgaactgctgtatccttttagcacgcaaatggaacgggttagaacactgactgacgtgagaaacctgaagttccccccactgtttacccaaaaatacccctgcgagtatgtgatggtccaggacatgctatctccaagccctatggagagacccgaagcgataaatattatagagaatgcagtgtttgaagatttggactttcctggtaagacagtgctcagacagcgtagccgtagtttaagcagctctgggaccaagcactctagacagtccaataactctcacagcccccttccgtctaattag

SEQ ID NO: 187059 - DNA, 2898 bp, synthetic construct
  misc_feature 1..2898: note = Description of Artificial Sequence: Synthetic coding sequence
  source 1..2898: mol_type = other DNA
atgatcatccccagcctggacggcgccctgttccagtgggaccaggatagggaaagcatggagactgtaccgtttactgtggagtcactacttgagagttcctacaaattcggagacgacgtggttttggtgggtggcaaatcactgacaacatatggactcagcgcgtattccgggaaggtgcggtatatttgtagcgctctaggctgccgacagtgggacagcgatgaaatggaacaagaagaagatatactgctgcttcagcggacacaaaaaaccgtgcgagctgtgggaccccgatctggcaatgagaaatggaacttctccgtagggcactttgagctccgctatattccagatatggaaacacgcgcaggattcatagagtccacattcaagccaaacgaaaacaccgaagaatccaagatcatctctgacgttgaagagcaagaggccgccatcatggatatcgtgattaaggtaagtgtggctgactggaaagtgatggctttttcaaagaagggcggacacttggaatgggaataccagttttgtacccctattgcctccgcatggctcctgaaggatggcaaagttatccccattagcctgttcgacgacacttcttatacatccaacgatgatgtgctggaggatgaggaggacatcgtggaagcagcccgcggagccacagaaaattccgtatacctgggaatgtacagggggcagctttacctgcaaagcagtgtcagaatctccgagaaatttccctcctcccccaaggcattagagtccgtgactaatgagaacgccattattcctctgccaactatcaagtggaagccgctaatccactctccttcaagaactcccgtcctggtcggctctgatgagttcgataagtgtctatccaatgacaaattcagccatgaggagtattcaaacggcgcattgagcatcttgcagtatccatatgataacggttactatctgccttattacaagagagaacgcaataaacggagcacccaaattacagttaggttcctggataatcctcattataataagaacatcaggaaaaaagacccagtgctgctgctgcactggtggaaagagattgtggccacgatcctgttttgcattattgctacgaccttcatagtgcgccgcctgtttcacccccacccccataggcaaaggaaagagtcggagacacagtgtcagacagaaaataagtacgattcagtgtccggggaggctaacgatagcagctggaacgatatcaaaaatagcggctatatcagtcggtatctgacggactttgaaccgattcagtgcctaggaaggggtggcttcggcgtggtattcgaggccaaaaataaggtggacgactgtaactacgctatcaagagaataagactacccaaccgcgaactcgctcgggagaaggtcatgagggaagtgaaagcactggccaagctggaacatccaggcattgttcgctacttcaacgcctggctggaagcccctcctgagaaatggcaggagaaaatggacgaaatctggctgaaggatgagtccactgattggccactcagcagccccagcccaatggacgcgccttctgtaaaaattcgtcggatggaccctttcgccaccaaggaacacattgagatcatcgccccctctccccagaggtcccgttccttttcggtggggataagttgtgaccagacgagcagctctgagtctcagttttcccctctggaattttccggaatggatcatgaggacatctctgaatccgtagacgctgcttacaatctccaggactcgtgtctgactgactgcgatgtagaagacgggaccatggacggaaacgacgaggggcacagcttcgaattgtgtccttccgaggcatccccgtacgtacgctcccgggagcggactagcagttcgattgtgttcgaggactcaggatgtgataatgcctcatccaaggaggagcccaagactaaccgtctgcatattggaaaccattgtgcgaacaaattgacggcctttaaacccactagttcaaaaagcagttcggaagcaaccttgtcaatttcccctcctagacctaccacactgtctctggatctgactaaaaacacgacggaaaagctgcaaccttcttctcccaaagtttacctatacatccagatgcaactgtgccggaaagaaaacctgaaagactggatgaacgggcgctgcactattgaagagcgcgaacgttccgtctgtctacacattttcttgcaaattgcagaggccgttgagttcctacactctaaggggcttatgcacagggatcttaaaccttctaatatctttttcacaatggacgatgtggtgaaggtgggagactttgggctcgtcaccgctatggatcaagacgaggaggaacaaaccgtcctcactccgatgcccgcatatgccaggcacacaggccaggtgggtactaagctgtacatgtccccggagcagattcacgggaatagctattcccacaaggtagacattttctcattgggcctgatcctttttgaactgttatatcccttctctacacaaatggagcgtgtgagaaccctgactgacgtccgaaacctgaagtttccacctttatttactcagaaatatccttgcgaatacgtcatggtccaggacatgcttagcccctcccccatggaaaggcccgaggccattaatataattgaaaatgcagtttttgaggatcttgatttccctggaaaaacagtcctcagacagcggtctcgctctctgtccagctctgggacaaagcactcgaggcaatccaataattctcattctccccttccctcaaactag

SEQ ID NO: 187060 - DNA, 1569 bp, synthetic construct
  misc_feature 1..1569: note = Description of Artificial Sequence: Synthetic coding sequence
  source 1..1569: mol_type = other DNA
atggccgccgtggccgtggccgtgcgggaggacagcggcagcggcatgaaagccgagctgcctccggggccaggcgccgtgggaagagagatgactaaggaagagaagctgcaactccgcaaagagaagaagcagcagaaaaagaaaagaaaagaggagaagggtgctgaaccagagactggctctgctgtgtccgctgcccagtgccagggtcccacaagagaactccccgagtccggtatccagctcggtacaccccgagagaaagtacctgcagggcgttccaaagctgagctgcgcgcggagcgcagggccaagcaggaggctgagagggctttgaagcaggcgcggaaaggggaacagggaggtccccctcccaaggctagcccctcaactgctggggaaaccccttccggtgtcaagcggctgccagagtatcctcaagtcgacgatctgctcctgagacgcttggtgaaaaagcccgaacgacaacaggttcctacccgcaaagattacggatccaaagtgtcactcttctctcatctcccccagtactcgcggcagaattctctgactcagttcatgagtattccctcctccgtgatccatcctgccatggtacgccttggtctacagtacagccagggcctcgtctctggatctaacgctcggtgtatcgctctgctgagggcgctgcagcaggtcattcaagattacacaacaccacccaatgaagaattgtcacgggatctcgtaaataagttgaagccttatatgtcattcctcacgcagtgtcgcccactatccgcttcaatgcacaatgctataaagttcctgaacaaagagatcacctctgtgggaagctctaaacgtgaggaagaggcaaagtccgaattgagagctgccatcgatcgctacgtgcaggagaagattgtcctcgctgcccaggcaatctccagatttgcctaccaaaagatctcaaatggggacgttattttggtgtatggctgttcttccttagtgtccaggattctgcaggaagcatggaccgaagggcgtaggtttcgcgtcgttgttgtcgattccagaccgtggctggaggggaggcacaccctaagatccctggttcacgccggcgtgccagcatcttacctgctaatcccagctgctagctacgtactgcctgaggtgtcaaaagttctcctcggcgcccacgccctccttgctaacggaagcgtaatgtcccgcgttggaactgctcaactagcccttgttgcccgagcgcataacgtgcctgtcctggtatgttgtgaaacttacaagttctgtgagcgggtgcagactgacgccttcgtgtccaatgagctggatgaccctgatgacctgcagtgtaaacgcggggagcatgtggcgctggcaaattggcagaaccacgcaagccttagattgttaaacttagtctacgatgtgactcccccggagttggtggatctggtgattacagagctgggaatgataccctgttcaagcgtgccagtcgttctgcgggtcaagagttccgaccagtag

SEQ ID NO: 187061 - DNA, 1632 bp, synthetic construct
  misc_feature 1..1632: note = Description of Artificial Sequence: Synthetic coding sequence
  source 1..1632: mol_type = other DNA
atgcccacccagcagcccgccgcccccagcacccgggcccccaagccatctcgaagcctctcaggctctttgtgtgccctgttctccgatgccgactccggttccgggatgaaggcggaactgcctcctggcccaggagccgtgggtcgggaaatgaccaaggaggaaaagctgcagctgcgaaaggagaaaaaacaacagaagaaaaagagaaaggaggaaaaaggggctgaacccgaaacgggcagtgctgtatctgccgcccagtgccagggccccaccagggaacttccagagagtgggatccaactgggcacgcctcgagagaaggtgcccgcagggagatccaaggctgaactcagagctgaacgcagggcaaaacaggaggcagagagggccttaaaacaggccaggaaaggcgagcagggcggtccaccgcccaaggcttcaccatctaccgccggggaaactccaagcggcgtaaaaaggctccctgagtacccgcaggttgatgatttactcttacgccggttggtcaagaagccagaacgccagcaggtgcccactcggaaagactatggctctaaggtctcactttttagtcacttacctcaatactccagacagaactctctgacgcaatttatgagtattccatcgtctgtcattcatcctgcaatggtgaggctgggactgcagtacagtcagggcctggtcagcggctctaacgcgaggtgcattgcactacttcgggctttgcagcaggtgatccaagactacaccacgccacccaatgaggagttgtctcgcgacctggtgaacaagctgaaaccttacatgagctttctaactcagtgccgaccactgtccgcatccatgcacaacgctatcaagtttctgaacaaggagatcaccagtgtcggcagctctaaaagagaggaggaagccaagtcagaactacgtgctgccatcgacaggtacgtccaggaaaaaatcgtcctggccgcccaggctattagccggtttgcttaccagaaaatctccaatggcgacgtcattctcgtgtacggttgctcctcactggtgtctcgcattctgcaggaggcctggacggagggcaggcgtttcagggtggtagttgtggactccaggccgtggctggaaggtaggcacacccttcgctccctcgtgcacgcaggggttcccgctagctatctccttatccccgctgctagctatgtactgccagaggtcagtaaggtgctactgggtgctcacgcgctcctggcaaacggatctgtgatgagcagggtggggacagcacagttggccttggtggccagagcgcacaatgtaccggtgctcgtgtgctgcgagacctataagttttgtgaacgagtccagaccgacgccttcgtgtccaacgagctggacgatcctgacgatctgcagtgtaagaggggagagcatgtagcccttgctaattggcaaaaccatgcttcattaagactgctgaatcttgtgtatgatgttacaccacctgagctggtggatctcgtgatcacagaattggggatgatcccttgtagttccgtgccagttgtcctgcgcgtaaaatccagtgaccagtag

SEQ ID NO: 187062 - DNA, 918 bp, synthetic construct
  misc_feature 1..918: note = Description of Artificial Sequence: Synthetic coding sequence
  source 1..918: mol_type = other DNA
atggacgacaaggagctgatcgagtacttcaagagccagatgaaggaggacccagacatggcgtcggctgttgccgccattcgtactcttttggagtttttgaaacgggacaaaggcgaaacgatccaggggctgcgggccaatctcacgtccgctatcgagaccctttgcggcgttgatagttcagtggctgtgtccagtgggggcgagttgttcctgagattcattagtttagccagtctcgagtactccgattacagtaagtgtaagaaaattatgattgagaggggggaactctttctgagaaggatttcattgagccggaacaagatcgcagatctgtgtcatacattcattaaggacggtgccacgatcttgacacatgcctactcgagagttgttttgcgcgtactggaagccgcagtcgcagcaaaaaaacgattctctgtgtatgttaccgaatcccagccggacctgagcggaaagaaaatggccaaggccctatgccacctgaacgtgcccgtgacggtcgttttagatgctgctgtagggtatatcatggagaaagctgatctggtgattgtcggagccgagggcgttgtggagaatggcgggatcattaacaagattggcacaaatcagatggccgtgtgcgctaaggcccaaaacaagcccttttatgtggttgcagagtctttcaagttcgtacgacttttcccgctgaatcagcaggatgtgccggacaagttcaagtataaagctgacacactgaaggtggcccagaccgggcaggatttgaaagaggaacacccatgggtggattacaccgccccatccttgattactcttttgttcaccgacctgggcgtgctgacccccagtgccgtatctgacgaactgatcaagctatatctttag

SEQ ID NO: 187063 - DNA, 1056 bp, synthetic construct
  misc_feature 1..1056: note = Description of Artificial Sequence: Synthetic coding sequence
  source 1..1056: mol_type = other DNA
atgcccggcagcgccgccaagggcagcgagctgagcgagcggatcgaatcatttgtggagaccttgaaacggggagggggacctagatcctctgaggagatggcccgggagaccctcggattgctgcggcagatcattaccgatcataggtggtccaacgccggagagctgatggagcttatcagaagggagggacgacggatgacagctgcacaacccagcgagacaactgtgggaaacatggtgaggcgggtcctcaaaattatacgcgaggaatatggacgtctgcatggaaggtccgatgaaagcgatcagcaagagagtttacacaagttgttaacaagtggcggccttaatgaagacttctcctttcattatgcccaactgcagagcaacattattgaggccattaatgagctgctggtagaactcgaagggaccatggaaaatattgctgcgcaggcccttgagcacatacactcaaacgaggtcatcatgaccattggtttttctagaacagtggaagccttccttaaggaggccgcccgcaagcgcaagttccacgtgatcgtggctgaatgcgctccattctgccaaggccacgaaatggcagttaatttatccaaggctgggatagaaacgactgtgatgacagatgcagccattttcgcagtcatgagcagggttaacaaggtcatcatcggtaccaaaacaattcttgctaatggagcactcagggcggtgaccggcacacatacattggcactggccgctaagcatcatagtaccccactgatcgtgtgtgctcccatgtttaagctgtcaccgcagtttcctaatgaggaggattccttccacaaattcgtggcccctgaggaagttctcccttttacagaaggggatattttggaaaaggtgtctgttcactgccccgtgtttgattacgtgcccccagaattaataaccctattcatctcaaatattggagggaatgcgcccagttacatatacaggcttatgtctgagctgtaccatcccgacgaccatgtcctgtag

SEQ ID NO: 187064 - DNA, 1359 bp, synthetic construct
  misc_feature 1..1359: note = Description of Artificial Sequence: Synthetic coding sequence
  source 1..1359: mol_type = other DNA
atggagttccaggccgtggtgatggccgtgggcggcggcagccggatgacagacctaacctcctcaattccaaaacctctcttacctgttggtaacaagcccctgatctggtaccctttgaacctcctcgagagggttgggttcgaagaagtgatcgtggtgaccactagagacgtgcagaaagccctatgtgctgagtttaagatgaagatgaaacccgacatcgtctgcatacccgatgatgccgacatgggaactgctgactccctgaggtacatctatcccaaactcaagacagatgtgttagtattatcttgtgacctgatcaccgatgtcgctctgcatgaggtcgttgatctctttcgcgcctacgacgcctcccttgctatgctgatgcgaaaaggccaggattctatagaaccagtgccaggtcaaaagggtaagaagaaggcagttgagcagagggacttcataggcgtcgactctaccggaaagcgactgctgtttatggcgaacgaagcggatctggacgaagagttggtgattaaagggtctattttacaaaagcacccccgcatccgattccataccggtctggtagatgcccacctttactgcctgaaaaagtacatcgttgactttctcatggaaaatggctccataacaagcatccgttcagagctgatcccttacctggtgcggaagcagttcagtagtgcttcgtcacaacagggacaggaagagaaggaagaagacctgaagaagaaggaactgaaaagcctcgatatttactcttttatcaaggaggcaaataccttaaacctagccccgtatgacgcctgttggaacgcttgtcgcggggatcgctgggaagatttatctcgctcacaggtgcgctgttatgttcatataatgaaggagggactgtgcagcagggtcagtacgctgggactgtacatggaggcgaataggcaggtgcctaaactgcttagcgccctatgccctgaagagccccctgttcacagcagcgctcagatagtttccaaacacctcgttggggtcgattccctgatcggcccggaaactcagattggtgaaaagtcctccatcaaaagatctgttatcggttcctcatgtcttatcaaagaccgggtgacaattactaattgcttgctgatgaacagtgtgacagtggaggagggttctaatattcaagggtctgtgatatgtaataatgctgtcatagagaagggagcggacatcaaggactgtcttattgggtccgggcagcggatagaggccaaggctaaacgcgtcaacgaggtgatcgtaggtaatgatcagctaatggagatctag

SEQ ID NO: 187065 - DNA, 594 bp, synthetic construct
  misc_feature 1..594: note = Description of Artificial Sequence: Synthetic coding sequence
  source 1..594: mol_type = other DNA
atggagttccaggccgtggtgatggccgtgggcggcggcagccggatgactgacctaacatcttcaatcccaaagccactcctcccagtgggtaacaaaccgctgatatggtaccccctgaatcttctggagagggtgggttttgaagaagtaattgttgtcacaactcgggacgtccaaaaggctctctgcgcagagtttaaaatgaagatgaaacctgacattgtttgcatccctgatgacgcggatatgggaacagcggactccctccgttacatataccccaagctaaaaacagatgtgctcgtgttatcttgcgatctgattactgatgtggccttacatgaggtagtcgatctgtttcgcgcttatgatgcttcccttgccatgctcatgcgcaagggccaggacagcatcgagcccgtgcctggacagaaaggcaaaaagaaagccgacggagatagcctgtgttgccaagctggcgtacaatggcaccacctgggttctctccagtctccgccacccggcttcaagcattttacatgtctctcattgccttcctcttgggactacatgcacatgcccccacactag

SEQ ID NO: 187066 - DNA, 1239 bp, synthetic construct
  misc_feature 1..1239: note = Description of Artificial Sequence: Synthetic coding sequence
  source 1..1239: mol_type = other DNA
atggagttccaggccgtggtgatggccgtgggcggcggcagccggatgacggatcttactagctctattcctaaacccctgctacctgttggcaataagcccctaatttggtacccactaaacttgctcgagagggtaggttttgaggaagttatagtggtcacaactcgagacgtgcagaaggctctctgcgccgaatttaagatgaaaatgaaacccgacattgtctgtatccctgatgacgccgacatggggactgcagattctctgcgatacatataccccaagctgaagactgacgtgctggtcttgagttgcgacctgatcactgacgttgccctccacgaggtcgtggacttatttcgggcctatgatgctagcttggccatgctgatgagaaaggggcaggattcaattgaaccagtgcctggtcagaaaggcaagaaaaaggccgtggagcagagagacttcattggcgtcgattctaccggtaaaagactattgtttatggcaaacgaggcggacctggatgaagagctagtcatcaaaggatctattctccagaaacacccgagaataaggtttcacaccgggctggtggatgcacacctttattgcctgaagaaatatattgtggactttctgatggagaacggaagtatcacctccatacgcagcgagctgatcccttatcttgtcaggaaacagttctcaagtgccagtagccagcaggggcaggaggagaaagaggaggacttaaagaagaaagagctcaaatccctcgacatctacagtttcatcaaagaggctaataccctgaatcttgccccatacgatgcctgctggaatgcatgccggggagatcgctgggaagatctgagtagatcacaggtccgctgttatgtccatattatgaaggaggggctgtgcagccgggtcagcactttgggattgtatatggaagctaatcgccaggttcccaaacttctgtctgcgctttgcccagaagaacctcctgtacattcttccgcccagattgttagcaaacacctcgtgggagtggacagcctgatcggcccggagacacagattggcgagaagagctccattaaacgcagcgtgattggaagctcatgcctgatcaaagatcgagtcaccatcaccaattgtctattaatgaactccgtgaccgtggaagagggatacgtaagcccatgtacccacctgagacaaagatag

SEQ ID NO: 187067 - DNA, 669 bp, synthetic construct
  misc_feature 1..669: note = Description of Artificial Sequence: Synthetic coding sequence
  source 1..669: mol_type = other DNA
tgagtgatcaagggcagcatcctgcagaagcacccccggatccggttccacaccggccttgtggacgcacacctctactgcttgaaaaagtacatcgtcgattttttaatggagaacggatccatcacctctatcaggagcgaattgattccttatcttgtgcggaagcagtttagctccgcaagttcacaacagggccaagaggaaaaggaagaggacttaaagaaaaaagagcttaagagcctggatatatactccttcataaaagaagctaataccctgaacctcgccccttacgatgcatgctggaatgcgtgtaggggggaccggtgggaggacttaagtcgaagccaagtacgatgctacgttcatatcatgaaggaagggctgtgtagtagggtgagcaccttggggttatacatggaggccaaccgacaggtgcccaaactgcttagcgcactctgccccgaggagcctcctgtccacagttccgctcagatcgtgtcaaagcacctggttggcgtggatagtctcattggccccgagacgcagatcggcgagaagagttcaattaagcggagcgtgatcggtagctcctgtttgatcaaggatcgtgtgactattacaaactgtcttttaatgaatagcgtgacagtcgaggagggttag

SEQ ID NO: 187068 - DNA, 1572 bp, synthetic construct
  misc_feature 1..1572: note = Description of Artificial Sequence: Synthetic coding sequence
  source 1..1572: mol_type = other DNA
atggccgccgtggccgtggccgtgcgggaggacagcggcagcggcatgaaagctgaacttcctcctgggcccggagcggtgggaagggaaatgactaaagaggaaaagctgcagcttaggaaagagaagaaacagcagaagaaaaagcgcaaagaagagaagggggccgagcccgagacaggcagcgctgtgtcggctgcccagtgtcaggtgggccctactcgcgaactccccgaaagtggcatccaattggggactccacgcgaaaaggtgcccgctggtcgatcgaaagccgaattgagagcggaaaggagggcgaagcaggaggccgagagagcactgaaacaggcccggaaaggcgagcaaggaggccctcctcctaaagcctccccttctaccgcaggagagaccccgagcggagtgaagcgcctccccgaatatcctcaggtggacgacttactcttaagacgacttgtgaagaaacctgagaggcaacaggtccctacgcgtaaagactatggcagcaaagtttctctgttctcacatctgcctcagtacagccggcagaacagcctcactcagtttatgtccattccgtcatctgtgatccaccccgcgatggtgcggttagggctacagtatagccaggggctggtctctggctccaatgcaagatgcattgccctgcttcgggccctccagcaagtaatccaagattacaccacgcccccaaacgaagaactttcccgggatttggtaaataaactgaagccttacatgagttttctgacccagtgtcgtccgctgtctgccagtatgcataacgccataaaatttttgaataaagaaatcacctcagtgggatcaagcaaacgggaggaagaagccaagtcggagcttagagcagcaattgacaggtacgtgcaggagaagatcgtgctcgccgcccaggccatctcaagattcgcatatcagaaaatttcaaatggggacgtcatacttgtctacggatgttctagcttggtctcacgtattttgcaggaagcctggactgagggacgcagatttcgggtcgttgtggtcgatagcaggccatggctggagggtagacatacacttcggtctctggtgcatgcaggagtgccggcaagttacctcttgatcccggctgcctcttatgtgctccctgaggtgtccaaggtgcttctgggcgcacatgccttgcttgcaaatggctctgtgatgtccagagtggggaccgcccaacttgccctggtcgctcgcgctcacaacgtgcctgtcttggtctgctgcgagacatacaaattctgtgagcgcgtccaaactgatgcttttgtgtcaaatgaactcgatgatcccgacgatctccaatgtaagagaggagagcatgtcgcccttgcaaactggcagaaccacgcctccctgagattactaaatctcgtgtacgatgttacacctcccgagcttgtagatctcgtaatcacagaactggggatgatcccctgttcgtccgtgcccgtggtcctccgcgttaaatcatccgaccagtag

SEQ ID NO: 187069 - DNA, 1563 bp, synthetic construct
  misc_feature 1..1563: note = Description of Artificial Sequence: Synthetic coding sequence
  source 1..1563: mol_type = other DNA
atggccgccgtggccgtggccgtgcgggaggacagcggcagcggcatgaaagctgaatccccttgggcgtgggtcggcagagagatgacgaaggaggagaagctgcaactgcgaaaggagaaaaagcagcaaaagaagaaacgcaaagaggagaagggagcagaacctgaaactggatctgcagtgagcgccgctcaatgtcagggccctaccagagagctgccagaatctgggattcaacttggcacccctcgcgagaaagtgcctgccggccgttccaaggccgagctaagggctgaaagacgggcaaagcaggaagccgagcgagcactgaaacaagcccggaagggggagcaagggggcccaccacccaaggcctccccatcgaccgcaggcgaaacaccttcaggagtgaaacgacttccggaatatccccaagtcgacgacctgctattgcgcaggctggtgaagaagccagagaggcagcaggtccctacacgcaaggactacggctccaaggtgagcctcttttcccatctaccccagtacagtcgccaaaactcactaacccagttcatgtcgataccttcaagtgtcatacatcctgcaatggtgaggttgggacttcaatactcacagggcctcgttagcggtagtaatgcaagatgcattgcattgctgcgggccctccaacaggtgatacaggattacaccaccccacctaatgaagaattgagcagggacctagtcaacaagctcaagccgtacatgtccttcctgactcagtgccgtccactctctgcctccatgcataatgctataaaattcctgaataaagagatcacgtctgttgggagcagcaagcgggaggaagaggccaagagtgagctgagggcagccattgataggtatgtccaggagaagatcgtgcttgcagctcaggctatatccagattcgcctatcagaagattagcaacggggacgtgatccttgtttatggatgtagttcgcttgttagccgcatacttcaagaagcctggactgagggacgtcgttttcgtgtggttgttgtagactcaagaccttggctggagggacgtcacacccttcggagcttggtacacgctggcgtgcccgcctcctatctactaatcccagcagcttcttacgtactgccagaagtcagtaaagtgctgctgggagcccacgcactgctggctaacggaagcgtgatgagtagggtaggaacagctcaactagcccttgtggcgagagctcacaacgttcctgttctcgtgtgttgtgagacttacaagttttgtgagagagtgcagactgatgcttttgtgtctaatgaactcgatgatcctgatgacctccaatgtaaaaggggcgagcacgtggccctcgcaaactggcagaatcatgcgtcgttgaggttactgaatctggtttacgacgttaccccccccgagctcgtggaccttgtgatcacagagttagggatgatcccctgcagctctgtgccagttgtactgagagttaaaagcagcgaccagtag

SEQ ID NO: 187070 - DNA, 2166 bp, synthetic construct
  misc_feature 1..2166: note = Description of Artificial Sequence: Synthetic coding sequence
  source 1..2166: mol_type = other DNA
atggccgcccccgtggtggccccccccggcgtggtggtgagccgggctaacaagagaagcggagctggtcccggaggttcaggcggtggcggcgcccgaggcgcagaggaggaaccgccacccccactccaggccgtgctagtggccgactccttcgaccggcggtttttccccattagcaaggaccaaccccgggtcctcctgccactggccaacgtagccctgatcgattacaccctggagtttctgactgcgaccggggtgcaggaaacgtttgtcttctgttgctggaaagctgcccaaattaaggaacacctgcttaaatcgaagtggtgtcgccctaccagcctaaacgttgtgaggattattacgtcagagttgtatcgctccctgggagacgtactgagggatgtcgacgccaaagcgctagtgcggtcggatttcctactggtttacggtgatgttatttcaaatataaacatcaccagagccctggaagagcatcgactgaggcgaaaattggaaaagaacgtatcggttatgaccatgatctttaaagagtctagcccttcccaccccacacggtgtcacgaagataatgtggtcgtggccgttgactcaaccacgaaccgggtgttacactttcagaagacgcagggtctacgaaggttcgcattccccctgagtctattccagggatctagcgacggtgtagaagtgaggtatgacctccttgactgtcacatctcgatttgcagcccacaagtagcacagttgtttactgacaactttgactaccagacccgggatgattttgttagagggctgctagtgaatgaagagatcctcggaaaccagattcatatgcacgtcaccgcaaaggaatatggtgctcgggtcagtaatttgcacatgtattcggccgtgtgtgccgatgttatcagacgctgggtgtacccactcacacccgaagctaacttcaccgatagcacaacgcagagctgtacccattctcgacataatatttaccgaggtcccgaagtttcactcggtcacggtagcatccttgaggagaacgtgttgctcgggagtggtaccgtcatcggcagcaactgcttcatcaccaactccgtaattgggcctggctgccatatcggggataatgtcgttctcgaccagacttacctgtggcagggggtgagagtcgctgctggtgcccagatccatcagtcactcctgtgcgacaatgcagaggtcaaggaaagagtgaccctaaagccccggtcggttctcacatcgcaggtagtggtcgggccaaacattactcttcccgagggatcagtgatctcactgcacccccctgacgcagaggaggatgaggacgatggggaattcagtgacgattctggagccgaccaagaaaaggataaagttaagatgaaagggtacaatccggcggaggtgggcgctgccgggaagggatacctgtggaaggccgcgggtatgaatatggaggaggaagaggaacttcagcagaacctgtggggtctgaagataaacatggaggaagagagcgagagcgaaagcgaacagtcaatggactctgaagagccggattcgcgggggggatccccccagatggacgatatcaaggtcttccagaatgaggttctggggacccttcagcgggggaaggaagagaacattagttgcgacaaccttgtcctggaaattaactctctgaaatacgcctacaacatctccctaaaagaggtcatgcaggtgctgtcccacgtggtcttggaattcccactgcaacagatggattctcccctggactcgagtcgctactgcgcattgctgttgcccctcctgaaagcctggtctcctgtctttcgtaactacatcaaacgtgcagccgaccacctggaagctctggctgccatcgaggatttcttcctcgagcatgaggcgctcgggatctcaatggccaaggtccttatggctttctaccagctcgagatcctggctgaggagaccattctatcatggttttcccaacgcgatacaacagataagggccaacagcttcgcaaaaaccagcagctccagcgttttatacagtggctcaaagaagccgaagaagagtcgagcgaagacgactag

SEQ ID NO: 187071 - DNA, 1014 bp, synthetic construct
  misc_feature 1..1014: note = Description of Artificial Sequence: Synthetic coding sequence
  source 1..1014: mol_type = other DNA
cccccccagcccagcaagatgctgggcctgcaggtggcccagctgttcaccgataatttcgattatcagactagggatgactttgtaagaggcttgctggtcaacgaggaaatcctagggaatcagatacacatgcacgtgactgctaaggagtatggcgcccgtgtatcgaatctacatatgtactctgccgtgtgtgccgacgttatccggagatgggtctaccccctcaccccggaggccaatttcaccgattcaactacacagtcctgcactcactcacgtcacaatatttaccggggccccgaggtttctttaggccatggttccattctggaggagaatgtgctgctgggatccgggacagtcatcgggagcaactgctttatcaccaattcagtaatcggcccagggtgccacattggtgacaatgtagtgctggatcagacatacctgtggcagggcgtgagggtggctgccggggcccagatccaccagtccctcttgtgtgacaatgcggaggtgaaggagagagtgacccttaagccccggtcagtgttaacctctcaagtggtcgtgggtcccaatatcacacttcccgagggctcagtgatttctctacacccacccgatgcggaagaggatgaagacgatggggagttctccgacgactctggtgcagaccaggagaaggacaaggttaaaatgaaaggctacaatcctgcagaggttggggccgccgggaaggggtacctgtggaaagccgccggcatgaatatggaggaggaagaagagctgcagcagaatctgtggggacttaagatcaacatggaggaggagagcgaatccgagtccgagcaaagcatggatagtgaggagccggacagtcggggaggctcgcctcagatggatgatatcaaggtgtttcagaatgaggtgttggggactctacagcggggcaaagaggaaaacatctcatgcgacaatctcgttctcgaaatcaatagtttgtag

SEQ ID NO: 187072 - DNA, 2574 bp, synthetic construct
  misc_feature 1..2574: note = Description of Artificial Sequence: Synthetic coding sequence
  source 1..2574: mol_type = other DNA
atggaggccggccccagcggcgccgccgccggcgcctacctgcccccactccagcaggtcttccaggccccacggaggcccgggatcggcacagttggaaaacccattaagctgttggctaactactttgaagtcgacattccgaaaatcgatgtctatcactacgaggtagacatcaaacctgataaatgtccgcgacgagtgaatcgcgaggttgtcgagtacatggtgcaacactttaagccccagatatttggtgaccgtaaacctgtgtacgatggtaaaaagaatatctacaccgtcacagctttacccataggcaatgaaagggtggactttgaggttacaattccaggcgaggggaaagatcgaatttttaaggtttcaattaagtggctggcgattgtgagctggagaatgttacatgaagccttggtatcgggccagattccagtgcctctggagagtgtgcaggccttggacgtagccatgcggcatctcgcctccatgagatatacgcccgtcggtaggtcattcttttcaccacctgaaggctactaccacccactgggtggggggagagaagtgtggttcggattccatcaatctgtgcgtcccgccatgtggaaaatgatgctcaacattgacgtatccgccaccgcattttataaagcgcaacctgtgatcgagtttatgtgtgaggtgctggatatcaggaatatcgacgagcagcccaaacccctgacggatagccagcgagtgcggttcactaaggaaattaaggggcttaaagtggaggtgactcactgcgggcaaatgaaaagaaagtatagagtgtgtaatgtgacgcggaggccagcatctcaccagaccttcccactgcagctggagagtggacagacagtcgagtgtactgtcgcccagtatttcaagcaaaaatataacctccagctcaagtaccctcacctgccatgcttacaggtgggacaagaacagaaacatacttacctgcccttggaagtatgcaacattgtggcggggcaaaggtgtatcaaaaaactgaccgacaatcaaacaagcaccatgatcaaagccactgcacgatccgcacctgaccggcaggaggagatctcgaggctgatgaagaatgctagctacaacttggacccctacatccaggagtttggaataaaagtgaaggacgatatgacagaagtgaccggacgcgtcctgccagcccccatactgcagtatgggggccggaaccgggccattgccacacccaaccagggcgtttgggatatgagaggtaagcagttttataatggcatcgaaatcaaagtctgggcaatagcatgctttgccccacaaaagcaatgcagggaggaagtccttaaaaattttacagatcaattaagaaagatcagcaaggatgccggaatgcccatacaaggtcagccatgtttttgtaagtatgcacagggcgctgattccgtagaacctatgtttagacacttgaaaaacacctatagcggcctacagttaatcattgtcatcctgccggggaaaaccccagtctacgcagaagtcaagagggtgggtgataccctgctggggatggccacgcagtgtgtgcaggtgaaaaatgtggttaagacatccccccagacattgtcgaacctgtgcttgaagatcaacgtgaaattgggcgggataaataatattctggtgcctcaccagcgaagcgcagtctttcagcaacctgtaatctttctgggcgctgacgtcacacaccccccggcgggcgacggtaaaaaaccttctataactgcggtggttggatccatggacgcccacccatcccgctactgcgcaaccgtgcgggtgcagcgcccaagacaggaaattatcgaggatctgtcttatatggtaagggagcttttgatccagttctacaaatccacccgctttaaacctaccagaattatcttttaccgggacggcgtgcccgaggggcagctcccccagattctgcattatgaactgctcgctataagggacgcatgcatcaaacttgagaaagactaccagcctggtattacatatattgtggttcagaagcgtcaccacacacggctattttgtgccgataagaatgagcggattgggaagtccggaaacatccccgccgggaccactgtcgacacaaacattactcatccatttgagttcgacttttacttgtgtagccacgccgggatccagggaacctctcgcccttcacactactacgtactgtgggacgataacagatttaccgccgatgagctccagattctgacctatcaattgtgtcacacgtatgtgagatgcacaagaagcgtctctatacccgccccggcctactatgcccgattggttgcctttagagcaagataccacctggttgataaggagcatgactccggcgaagggtctcatattagcggccagagcaatggacgagatcctcaggccttggcaaaggccgtgcaggtgcatcaggacacccttcggactatgtacttcgcatag

SEQ ID NO: 187073 - DNA, 2349 bp, synthetic construct
  misc_feature 1..2349: note = Description of Artificial Sequence: Synthetic coding sequence
  source 1..2349: mol_type = other DNA
atggtgcagcacttcaagccccagatcttcggcgaccggaagcccgtgtacgacggaaagaagaacatttataccgtgacggcccttcctataggaaacgaacgcgtagattttgaagtgacgataccaggagagggcaaagaccgcatttttaaggtttccatcaagtggctggcaatcgtgtcttggcgaatgttgcatgaagcactcgtctctggacagatcccggtaccactggagtcagttcaggccttggacgtggccatgaggcacttggcaagtatgaggtataccccagtgggaagatcattcttctccccgcccgaaggctactaccaccccttggggggtggcagagaagtgtggttcgggttccaccagagcgtgcggcccgctatgtggaagatgatgctgaacatcgacgtctcagccaccgccttttacaaggcccagcctgtcatcgagtttatgtgtgaagtactggacatcagaaatatagacgaacaaccaaagcccctgacagacagtcagcgggtgagattcactaaggagataaagggcctgaaagtcgaagtcacccattgcgggcagatgaagcgcaagtacagagtgtgcaatgttacccgccgacctgcaagccaccagactttcccactgcaactggagtcaggacagaccgtggagtgcacagtggctcagtatttcaaacagaagtataacctccagctgaaatacccccatcttccttgcctccaggtgggccaagagcagaaacatacttatttgccgttggaggtgtgcaatattgtggccggccagaggtgtatcaaaaagttgactgataaccagacgagtaccatgattaaggctaccgcccgaagtgcccctgacaggcaggaagagatcagcaggctcatgaagaatgcatcttacaacctagacccctatatccaggagtttggaattaaagtgaaggacgacatgacagaagtgactggaagggtgcttcctgccccaatcctgcaatacggagggcgaaacagagcaatcgccactcctaaccagggtgtttgggacatgagagggaagcaattctataacgggattgagattaaagtctgggcgattgcctgctttgcacctcagaagcagtgtagggaggaagttctcaagaactttacagaccagctgcgcaagatctctaaggacgcgggtatgcccatacagggacaaccctgcttttgtaagtacgcccaaggcgccgattccgttgagccaatgtttaggcatcttaagaatacctactccgggctccagctcatcatcgtcatacttcccgggaaaacccctgtctatgcagaggttaagcgggtcggggatacactcctggggatggctacgcagtgtgtccaggttaagaacgtggtgaagacttctccacagaccttgagcaatttatgtcttaaaattaatgtgaagctcggaggcataaataatattctggtgccccaccagcgttctgcagtattccaacaacctgttatctttctgggcgccgatgtgacacatccacccgccggtgatgggaaaaaaccgagcatcacagcagtggtgggctctatggacgctcatccaagcaggtactgtgccaccgtgagagtgcagcggcctcggcaggagattatagaggacttatcatacatggtgcgggaattgctcatccagttttacaaaagtactcggttcaaacccaccaggatcatcttttacagggacggggtgccagaaggccagctgccacaaatcctgcattacgaactgctggcaatccgagatgcctgcatcaagcttgagaaagattaccaacctggcattacatatattgtggtgcagaagcggcaccacacccggctcttctgtgctgacaagaatgagaggatcggaaagtccggtaacattccggctggtacgaccgtggacactaacataacgcacccattcgaattcgatttttacctgtgttcacacgcagggatccagggtactagcagaccctcacattactacgtgctttgggatgataaccgatttactgctgatgagctgcagatcttaacatatcaattgtgtcacacttacgtccgatgtacccgatccgtgtctatccctgctcccgcttactatgctaggctggtggcttttcgcgccaggtaccacctcgtggacaaagagcacgattcaggtgagggcagtcacatcagcggacaaagtaacggtcgggaccctcaggctctagccaaagccgtgcaggtgcaccaggacaccctccggaccatgtacttcgcttag

SEQ ID NO: 187074 - DNA, 1254 bp, synthetic construct
  misc_feature 1..1254: note = Description of Artificial Sequence: Synthetic coding sequence
  source 1..1254: mol_type = other DNA
atggagttcgtgaagtgcctgggccaccccgaggagttctacaaccttgtcaggttccggatcggaggaaagaggaaagttatgcctaagatggatcaagatagcctgtctagttctctgaagacttgttataaatatctgaatcaaacctcaagaagttttgcagctgttatacaggctctcgatggagagatgcgcaatgccgtatgtatattttacctggttctccgcgctttggatacactggaggatgatatgactatcagtgttgagaagaaagtgcccttgctccacaattttcattcctttctgtatcagcccgactggcgatttatggaatctaaagaaaaggatcggcaagtgctggaggactttcctacaatatccctggaatttcggaatctcgccgagaagtaccaaacagtcatcgcagacatatgtagaagaatggggattggaatggcagaattcttggacaagcatgtgacctccgagcaggagtgggacaaatattgccactatgtggcggggcttgtggggatcggactgtctcgcctattcagtgcttctgaatttgaggatccgctggtgggagaggacacggagagagctaatagcatgggtctcttcctgcagaaaactaacatcattcgtgactatcttgaggatcagcagggtggccgcgaattctggcctcaggaggtctggtctagatacgtgaagaagctgggtgatttcgctaaacctgagaacatcgacctggcggtgcagtgtctgaacgagctaattactaatgctctgcatcacattccagacgtaattacatacctctccagattgagaaaccaatcagtatttaatttctgtgctatccctcaggtgatggctatcgccactcttgctgcctgctacaataaccaacaggtctttaagggggccgtgaaaatccggaaaggccaggcggtgacattgatgatggacgctacaaatatgcccgcagttaaagccataatataccagtatatggaggaaatctaccatagaatcccagacagcgatccctcaagctcaaagacgcggcagataattagtacgatcagaacccagaaccttccaaactgccaactgatctctagaagccactacagccctatctacctgtccttcgtgatgctgttggcagctctgagctggcaatatcttacgaccctttcccaagtgaccgaggattatgtgcaaacgggggagcattag

SEQ ID NO: 187075 - DNA, 2478 bp, synthetic construct
  misc_feature 1..2478: note = Description of Artificial Sequence: Synthetic coding sequence
  source 1..2478: mol_type = other DNA
atgtacagcggcgccggccccgccctggccccccccgccccccccccgcctattcaagggtacgcttttaagcctccccccaggcctgactttggtacgtcaggcagaacaattaagttacaggcgaatttcttcgagatggatattcccaaaattgacatctaccactatgagctggacattaaaccagaaaagtgccccagacgcgtgaaccgggagatcgtagaacatatggtgcagcattttaagacccagatctttggggatcgcaaaccagtgtttgacggaaggaaaaacttatatactgctatgcctctacccattggccgcgataaagtagaactggaagttaccttaccgggtgagggtaaagatcgtatcttcaaagtgagtataaagtgggtgtcgtgcgtctccttgcaggctttgcatgatgccctctctggaagactgcccagtgtcccatttgagacaatccaggccctggatgtggtgatgcgccacctgccctccatgagatatacgcccgttgggagaagtttttttaccgcctcagagggttgtagtaaccctctggggggcgggagagaagtgtggttcggctttcatcaaagtgttagaccttccctctggaagatgatgctgaacatcgacgtctcagctacagccttctacaaggcacaacctgttatcgaattcgtctgcgaagttttagatttcaaaagtatcgaagagcagcagaagcccctgactgattcccaaagagtaaagtttactaaggaaataaagggtctcaaggtcgaaatcacccattgcggccagatgaagagaaaatacagggtctgtaacgtaacaaggcggcccgctagtcatcaaacatttccactccaacaggagtcgggccaaaccgtggagtgtaccgtggcccagtatttcaaagaccggcataagctggtgctgcggtacccgcaccttccttgtctgcaggttggacaagaacagaagcatacttaccttcccctcgaggtctgcaacatagtagccggtcagcgttgcatcaaaaaactgaccgacaaccagacctcaacaatgattcgtgctacggcaagaagcgctcccgatcggcaggaggaaattagcaagctcatgcggagcgctagtttcaacaccgacccatacgtccgagagttcggcatcatggttaaggatgagatgactgatgtgactgggagggtcttgcagcccccgtctattctgtacggcggcagaaataaagccatcgccacacctgtacagggtgtttgggatatgcgtaacaaacagttccacactggaatcgagattaaggtctgggccatcgcttgcttcgcaccacagcggcagtgtactgaagtccacttgaagagtttcaccgagcaattgcggaagatttcacgggacgccggcatgccaatccaaggacagccgtgcttctgtaagtacgctcagggtgccgacagtgttgaaccgatgtttagacaccttaagaatacctatgcaggtctccagctggtcgttgtgattctacccggaaaaacccccgtgtatgccgaggtgaagcgcgtgggggacactgtgctcggtatggccacccagtgtgtccagatgaaaaacgtgcagcgaaccacgcctcagacgctttccaatctctgtctgaagataaatgtcaaacttggcggtgtgaataacatcctgttgccgcagggaagaccccccgtctttcagcagcccgtgatttttctgggcgcggatgttacccaccctccagcaggcgacggcaagaagcctagtattgcagcagtggtgggttctatggacgctcatccgaacagatactgtgcgaccgtgcgggtccagcagcaccgtcaagagattatccaggatctcgccgccatggtacgagagttgctcattcagttttacaagtctacacggtttaaaccaacccggataatattttacagagatggggtgagtgaggggcaattccaacaggtgttacaccatgaactgctggcaattcgggaggcctgtatcaagttagaaaaggattaccaacctggaattactttcatcgttgttcagaagagacatcatactcggttgttttgtaccgacaaaaatgaaagagggaccagccgcccgagccactaccatgtcctgtgggacgataacagattttcatcagatgagttgcaaattctaacctatcagctatgccatacttatgtgagatgcactcgatcagtcagtatccctgcaccggcatattatgcgcatctggtcgccttccgtgccaggtaccacctggtcgataaagaacatgacagcgcagagggttcccacacaagtggacaatccaatggtagggatcaccaggcactcgcgaaggccgttcaggtacaccaggataccctgaggaccatgtatttcgcttag

SEQ ID NO: 187076 - DNA, 1881 bp, synthetic construct
  misc_feature 1..1881: note = Description of Artificial Sequence: Synthetic coding sequence
  source 1..1881: mol_type = other DNA
atgtgcgaggtgctggacatccacaacatcgacgagcagccccggcccctgaccgactcacaccgggttaagttcacaaaggaaattaagggcctgaaggtcgaggttacgcattgtgggaccatgagacgtaagtacagggtatgcaacgtcacgagaaggccagcaagtcatcaaacctttccattgcagctggaaaacgggcaaaccgttgaaaggacagttgcccaatactttcgcgaaaaatataccttgcagctgaagtacccccacttaccctgccttcaggttgggcaagagcagaaacacacttacctgcctctagaggtatgtaacattgtggcggggcagcgttgtataaaaaagctgactgacaaccagacaagtacaatgattaaagccaccgccaggtctgctccagaccgacaggaggaaattagtaggttagtgaggagcgccaactatgaaactgatccgttcgtccaggagttccaattcaaggttagggacgaaatggcccatgtgaccgggagagtgctacccgcgccgatgctgcagtacggcggccgcaatcgcacggtggccacaccatcccacggcgtctgggacatgcgtggcaagcaatttcatactggggtggagataaagatgtgggccatagcttgcttcgctacccagaggcaatgtcgagaagaaatattgaagggtttcacagaccaattgcgtaaaatctctaaggacgccgggatgccaatccagggacagccctgcttttgcaagtacgcacagggagctgattctgtagagcctatgttccgacacctcaaaaacacctattcaggtttacagctgatcattgtcatcctccccggaaagacccctgtttacgcagaggtgaagagggtgggcgacactctcttggggatggctactcagtgtgtccaggtcaaaaacgtcataaaaacttcaccacaaaccctctccaatctgtgcctcaagatcaacgtcaaactgggagggatcaataatattctagtcccgcaccagagaccttcagtattccagcagcctgtgatttttctaggggctgacgtaacgcaccccccggctggtgacggtaagaagccttcaattgccgccgtcgtaggatccatggacgcccacccatcaagatactgtgcaaccgtccgcgtacagcgaccccgtcaggagatcattcaggacctggctagtatggtgagagagctcttaattcagttctacaagtccacgcgcttcaagccaacaaggatcatcttttacagggacggggtctccgaagggcagtttaggcaggttctttattatgagcttcttgccatcagggaggcgtgcatcagtctggaaaaggactaccagcccgggatcacctacatcgtcgtgcagaagcgacaccatactcggctattttgtgcagatcggacggagcgcgttggcagatcagggaacattcccgcgggaaccacagtagatactgacatcactcacccttatgaattcgacttttatctctgtagccatgcaggcattcagggaacctcaagaccctcacactaccatgtgctctgggatgacaactgtttcaccgccgatgaactccagctgctgacctaccagctgtgtcatacatatgtaagatgcacacgcagtgtgtccatccccgctcctgcctattatgcccatttagtcgcttttcgggctcgataccatttggtggacaaggaacacgattctgccgagggaagccatgtgtcgggacagtccaatggaagagatccacaggccttggccaaagccgtgcagattcaccaggacacactgcggacgatgtacttcgcctag

SEQ ID NO: 187077 - DNA, 690 bp, synthetic construct
  misc_feature 1..690: note = Description of Artificial Sequence: Synthetic coding sequence
  source 1..690: mol_type = other DNA
atggagatcggcagcgccggccccgccggcgcccagcccctgctgatggttccccggagaccgggctatgggacaatgggaaaacctatcaagctactggcgaactgcttccaggtggaaatccctaaaattgatgtgtacttgtacgaggtcgacattaagccagacaagtgtcccagacgcgtcaaccgggaggtcgtcgatagtatggttcagcactttaaagtcacaatatttggtgacagacgcccagtgtacgatgggaaacggtctttatacacagcaaatcccttgcctgtagccacgactggggtggatttggatgtgaccttaccgggggagggggggaaggacagaccttttaaagttagtataaagttcgtgtcccgggtgagctggcacctcctccatgaagtgttaactggccgaactctcccggagcccttggagctggacaaacctatctccaccaatccagtgcatgctgtggacgttgttctgagacacctgccttccatgaaatataccccagtcggccgctcatttttttcggcacctgagggatatgaccaccctttgggaggtggcagggaggtatggttcggctttcaccagagcgtgagaccagctatgtggaaaatgatgctgaatatcgacgaacgagatctgtggcagcaatgcggcgaatag

SEQ ID NO: 187078 - DNA, 2583 bp, synthetic construct
  misc_feature 1..2583: note = Description of Artificial Sequence: Synthetic coding sequence
  source 1..2583: mol_type = other DNA
atggagatcggcagcgccggccccgccggcgcccagcccctgctgatggtccctcgcagacccggttatggaaccatgggaaaaccaataaagcttctggccaactgtttccaggtagagatcccgaagatcgacgtctatttatatgaagtggatattaagcctgacaagtgccctcgccgggttaaccgtgaagttgtggatagcatggtgcagcatttcaaggtcacgatcttcggtgaccgccggcccgtgtatgacggcaagcgttccctttacaccgccaaccccctacccgtggcaacaaccggcgtcgatctagatgtgacactccccggcgagggtggcaaggacagaccatttaaggtctccattaaatttgtgagtcgggtaagctggcacctgttgcatgaggtactcactggacgaaccctaccggaacctttggagcttgacaagcctatttctaccaatccagttcacgctgtcgacgtcgttctacgccacttaccctcaatgaaatacacgccagtcggtcgcagcttcttcagcgccccagagggttacgaccatccactgggcggcggccgggaagtgtggttcgggttccaccagtcagtgaggccagccatgtggaagatgatgctgaacatagacgtaagtgccaccgcattctataaagcccagccagttattcaattcatgtgtgaggtcctggatatccataatattgatgaacagccccgccctctcaccgatagtcatcgggtgaagtttaccaaggagatcaaaggacttaaggtggaggtaacacactgtggtactatgcggaggaaatatcgagtctgtaacgtgactcggcggccagccagtcaccaaacatttcccttacagctcgagaatggccagacagtcgaacgaactgtggcacaatattttcgggaaaagtacactctgcagctcaagtaccctcatctaccatgcctgcaggttggacaagagcaaaagcacacatacctgcctctggaagtgtgtaacattgttgctgggcagagatgcataaagaaactcacagacaatcaaaccagtacgatgattaaagccacagcccgctcagccccggaccgccaggaggagatcagccgcttagtgcgctccgctaactacgagacagatccctttgtgcaagagttccaattcaaggtgagggacgagatggcacatgtgacgggacgtgttctgccggcaccaatgcttcaatatggggggcgaaacaggaccgtggctactcctagccatggcgtatgggatatgagaggaaagcagttccatacaggcgtggaaatcaagatgtgggccattgcttgctttgcgacgcagcgccagtgccgggaagaaatcctgaaagggttcactgaccagctgcgcaaaattagtaaggacgccggcatgcccattcagggccaaccatgcttttgcaaatacgcacaaggtgcagacagtgtggaacccatgttccgacacctgaaaaatacctacagtggactacagctcatcattgtgatcctacccggtaaaaccccagtatatgctgaggttaaaagagtgggggatacactactgggcatggccacccagtgtgtacaggtgaagaacgtgatcaagacaagtccacaaacgttgagtaacctgtgtcttaagatcaacgtgaagctgggtgggattaacaacatcctcgttccacatcagcgcccttcagtgtttcagcaacccgtgatctttctgggtgcagacgtcacgcatccccccgctggggatggcaagaagccctcgatagcggctgtcgtggggtcaatggacgcacacccttcccggtattgcgccaccgtgcgagtgcagcgccctcgccaggagattatccaggacctggcatctatggttcgcgaactcctaattcagttctacaagtctacaaggttcaagccaaccagaattatattttatcgggatggggtctccgaaggccagttccggcaggtgctgtactacgagctgctggcaattagggaagcttgtatctcactggagaaagattaccaacccgggattacctacatcgtcgttcagaagagacatcataccaggctgttctgcgccgatagaactgagcgcgtgggtcgcagcggtaacattccagctgggacaacagtggacacagatatcacgcatccatatgaattcgatttttacctctgtagccatgccggaattcagggtacttcccgaccttcgcattaccacgttctgtgggacgacaactgctttacagctgatgaactgcagctcctgacttaccagctttgccatacatacgtaaggtgtactcgatctgtctccatccccgctcctgcatactatgcacatctggttgccttccgcgcacggtatcaccttgtagacaaggaacacgactctgctgagggctcccatgtgtctggccaaagtaatgggcgggaccctcaggcgctggccaaggctgtgcaaatccatcaggatacactccgcacaatgtatttcgcttag

SEQ ID NO: 187079 - DNA, 690 bp, synthetic construct
  misc_feature 1..690: note = Description of Artificial Sequence: Synthetic coding sequence
  source 1..690: mol_type = other DNA
atggagatcggcagcgccggccccgccggcgcccagcccctgctgatggtgccccgaagacccggttatggcaccatgggcaagccgattaaactcctggcaaactgttttcaggtcgaaatcccaaagattgacgtgtatctgtatgaggtggacatcaaaccggacaaatgccctcggagagtgaatcgcgaagttgtagatagcatggtgcagcatttcaaagtcacaatcttcggggatcgccggcctgtgtatgatggtaaacgcagcctttatacagcaaaccccctccccgtagccacaaccggagttgacttagacgtgacgctgcctggcgaaggcggaaaggatcggccctttaaagtttcaatcaaattcgtgtccagggtctcgtggcacctcctccacgaggtactcacaggaagaaccctgccagaacccctggagctcgacaagcccatcagtactaacccagtgcacgctgtggatgtcgtgctccggcatctgccgtcgatgaaatacacaccagtgggaaggagtttcttcagcgcccccgaaggctacgaccacccgctggggggaggtcgcgaggtctggtttggttttcaccagtccgtgaggccggccatgtggaaaatgatgctaaatatcgacgagcgcgatctttggcagcaatgtggggagtag

SEQ ID NO: 187080 - DNA, 2586 bp, synthetic construct
  misc_feature 1..2586: note = Description of Artificial Sequence: Synthetic coding sequence
  source 1..2586: mol_type = other DNA
atggaggccctgggccccggcccccccgccagcctgttccagccccccagacgcccagggcttgggaccgtgggaaagccaatcaggctgctggctaatcacttccaggtacagatccccaaaatcgacgtgtatcactacgatgtggatattaaaccagaaaaacggcctcgccgagtgaatcgggaagtggtggacacaatggtgcggcattttaaaatgcaaattttcggtgacaggcagcccggctatgacggcaagaggaatatgtataccgctcaccccctgcccatcggacgcgaccgcgtagatatggaggtgacccttccaggcgaggggaaggatcagacatttaaagtgtccgtccagtgggtgagcgtggtttctctgcaactcctgctggaagccctggctggtcacctgaatgaagtgcccgacgactctgtgcaggcgctggacgtgataactcggcatctcccgtctatgaggtacacccctgtgggaaggtccttcttttccccacctgagggctactatcatcctctgggtggtgggcgcgaggtgtggttcggcttccatcaaagcgttcggcccgccatgtggaatatgatgcttaatatcgacgtcagcgcgaccgcattctacagagcccagcccatcatcgagttcatgtgcgaggtgctcgacatccagaatatcaacgagcagactaaacccttaaccgacagccaacgagtaaagtttacaaaagaaatacgcggactcaaggttgaggtgacccactgtggccagatgaaacgcaaataccgggtctgtaacgtgacccggcggcccgcatcccaccagacatttcctctgcagctagaaaatggccaggcaatggaatgtactgtagcccagtactttaagcagaagtacagcttgcagttgaaatatcctcatctgccctgtttgcaggtcgggcaggagcagaagcacacatacctgcccttagaagtctgtaacattgtggccgggcagcgatgcataaaaaaactgaccgataatcagacatcaacaatgattaaggccacggcgcgatctgcgccagatcggcaggaagaaatcagcaggttggtgaaatccaattcgatggtgggcgggcctgacccttacttgaaagaatttggaatcgttgtacataacgaaatgacagaactgaccggtagggtgctccctgcccctatgcttcagtacggaggccggaataaaaccgtcgctacacctaatcaaggcgtctgggacatgaggggaaagcagttctacgcaggcatagaaattaaggtgtgggccgtagcttgctttgctccacagaaacagtgcagagaggacctgctgaagtcctttaccgaccaactgcgtaagatcagtaaagacgcagggatgccaatccagggacagccatgcttctgtaaatatgcacagggcgccgacagtgtggaaccgatgttcaagcatcttaagatgacatatgtcggactccagcttatcgtggtcatcctgccaggaaaaaccccagtgtacgcagaggtaaagcgggttggcgatacacttctgggcatggcaacgcagtgtgttcaggtgaagaacgtcgtaaagacgtctccgcaaacattgagcaatctttgtcttaagataaatgcaaagctcggtggcatcaataatgtgctggtgccacatcagcgaccctcggtcttccagcagccggtcatcttcctgggggccgatgtgacacaccctccagctggggacggaaagaaacccagtatagcggctgtggtgggcagtatggacgggcatcccagcagatattgcgcaactgtccgcgtccagacaagccggcaggagatttctcaggagctcctgtatagccaggaggtcatccaggatttgaccaacatggtgcgggaactgttaattcagttctacaagagtacacgcttcaaacccacgagaatcatctactatagggggggagtaagcgagggccagatgaagcaggtggcctggcccgagctcatcgcaattcggaaggcttgcattagtctggaggaggactatcgtcctggaataacttatatcgtcgtacagaagcgacatcacaccagactcttctgcgccgacaagactgagcgggtcggaaaatcagggaatgtgcccgccgggacgactgtggactccaccattacccaccctagtgagttcgacttctatctttgcagccatgccggtattcagggcacctcacgcccttctcactatcaagtactatgggacgacaactgctttacagcagatgaacttcagctactgacttatcagctctgtcacacatacgtgcggtgtacccgctctgtctccattccagctcccgcttattatgcccggcttgttgcgttcagggctcggtatcatctggtcgataaagaccatgacagtgcagagggctctcacgtgagcggacagagcaatggacgagaccctcaagccctggcaaaagccgtacagatccaccacgatacccaacacaccatgtattttgcctag

SEQ ID NO: 187081 - DNA, 1755 bp, synthetic construct
  misc_feature 1..1755: note = Description of Artificial Sequence: Synthetic coding sequence
  source 1..1755: mol_type = other DNA
atgttcgccaaggccttccgggtgaagagcaacaccgccatcaagggatctgacagaagaaaactcagagctgatgttactaccgccttcccgactctcggaaccgaccaggtcagtgagttagtgcctgggaaagaggaattgaatatcgtgaagttatatgcccacaaaggagatgccgtgaccgtctacgtctctgggggcaatcccatcttgttcgagcttgaaaagaatttgtatccaactgtctatacattgtggtcttaccccgatctgttaccgacattcactacctggccactggtgctggaaaagctcgtgggcggggccgacctgatgctgcccggcctcgtcatgcctcctgccgggctcccccaagtgcagaagggtgatctgtgtgctattagccttgtgggcaatcgggcaccggtggccattggggttgctgcaatgtcaactgcagagatgttgacatccggcctgaaggggcgcggattctccgtgttgcacacctaccaagatcatctgtggcggtccggtaataagtcatcaccaccttcaatcgcaccattggccctggactcagcggacttgtcagaggaaaaggggtctgtccagatggattcaacgcttcagggggatatgcggcatatgaccctggagggcgaggaagagaatggagaagtgcaccaagccagagaagacaagtcgttgagcgaggcccccgaggacactagcactcgaggcctgaaccaagatagcacagactccaaaactctacaggaacagatggacgagctcctgcagcagtgcttcttgcatgcactcaagtgccgcgtgaagaaggctgacttgcctctccttacctccaccttcttaggatcacatatgttttcctgctgtcctgagggcaggcaactcgatatcaaaaaatccagttacaagaagctgagtaaatttcttcagcagatgcagcaagagcagattatacaggtaaaggaactttcaaagggagtagagagtattgtagccgtggactggaaacatcccaggattacatcatttgtcattccagagccctctcctacatcccagacaattcaggagggatcgagagaacagccttatcacccacccgatatcaaaccattgtattgcgtacccgccagtatgaccttgctgttccaggagagcggtcataagaagggcagctttctcgaggggtctgaagttcgcaccatagtcataaactacgccaaaaagaatgacctggtggacgctgacaacaagaatctcgtgagattggaccccatcctgtgtgactgcatactagagaagaacgagcagcataccgtgatgaaactgccgtgggatagcctgctgactaggtgccttgaaaagctacagcccgcttaccaggttacgctgccaggccaggaacccatcgtcaagaaggggaggatatgcccaattgatatcaccctggcacagcgggcttctaacaaaaaggttaccgtagtcagaaacctagaagcctatgggttagatccctactctgtggccgcaatcctccagcagcggtgtcaggcgagtactaccgtgaaccccgccccaggcgccaaagacagtctacaggtgcagatccaaggaaaccaggtacatcacctggggtggctgctccttgaggagtaccaactcccacggaagcacatccagggcctcgaaaaggccctgaagccaggaaagaagaagtag

SEQ ID NO: 187082 - DNA, 816 bp, synthetic construct
  misc_feature 1..816: note = Description of Artificial Sequence: Synthetic coding sequence
  source 1..816: mol_type = other DNA
atgttcgccaaggccttccgggtgaagagcaacaccgccatcaaggggtcagacaggcgtaagttgcgtgctgacgtcactacagcctttcccacgctgggaacagatcaggtctccgagctggttccaggcaaagaagaactgaacattgttaaactgtacgcacacaaaggcgatgccgtcacagtgtatgtgagcggcggcaatcccattctgtttgaactcgagaagaatctctaccccactgatcttatgctgcccggtctcgttatgccccccgctgggctgcctcaggtccagaagggtgatctgtgcgccatttcgttagtgggaaacagggccccggtcgccatcggcgttgctgccatgtctacagcagaaatgctgacctccgggctgaaaggccggggattcagcgtcctgcatacttatcaggatcacctctggcggagtgggaacaagtcttcgccgcccagtatcgcgcccctggctcttgactctgctgatctttccgaagaaaagggtagcgttcagatggacagtacattgcagggcgatatgcgccacatgaccctcgagggggaggaggagaatggggaagtgcatcaggctcgggaagacaaatctctgtccgaagccccggaggatacttcgacaaggggactcaatcaggactccaccgactccaaaactttgcaggagcagatggacgagcttctacagcagtgtttcttgcacgccctgaaatgcagggtcaaaaaggctgatttgccactgctcactagtacgtttttgggctcccacatgttttcctag

SEQ ID NO: 187083 - DNA, 1383 bp, synthetic construct
  misc_feature 1..1383: note = Description of Artificial Sequence: Synthetic coding sequence
  source 1..1383: mol_type = other DNA
atgttcgccaaggccttccgggtgaagagcaacaccgccatcaaggggtcagatcgacgcaagcttagagccgatgtgactaccgcttttcccaccctgggcacagaccaggtcagtgaattggtgccaggcaaggaagagctgaacattgttaaactgtacgcacataaaggcgatgccgttaccgtatacgtgtcgggcgggaatcccatcctgttcgagctggaaaagaatctgtatccaaccgtctatacactctggagttaccccgatctgctgccaacgttcactacttggcccctggtgcttgagaaactggtgggaggagccgacctgatgctgcctgggctagtcatgcccccagccggcctgccacaggtgcaaaagggcgacctgtgtgccatttcactcgtcggcaatagagcacccgttgccatcggggtcgccgccatgagcaccgccgagatgctcacctcagggctgaaaggccgcgggttcagtgtgctccacacataccaggaccacctctgccccgaggggcgccaactcgatattaagaaaagctcatataagaagctgagcaaattccttcagcagatgcagcaggagcagattatccaggtcaaagaactgagcaaaggcgtggagagcatcgttgctgtggactggaaacatcccagaatcaccagcttcgtgattcctgagcccagcccaaccagccagactatccaggaagggtcaagggagcagccctatcaccccccagacattaagcctctctactgcgtgcccgctagcatgaccctgctgttccaagagagcggccacaaaaaaggaagtttcctggaggggagcgaggtgagaacaatcgtcatcaactacgcgaagaaaaacgatcttgtggacgctgacaacaagaaccttgtgcgactcgaccctattttatgcgactgtattctggaaaagaatgagcaacacaccgtgatgaagctcccctgggacagcctgctgaccagatgcctcgaaaaactccagccagcttaccaggtcaccctcccagggcaggaaccgatcgttaagaagggccggatttgccctatcgacattactctggcccagcgggcctctaacaagaaagtcaccgtggtgagaaacctggaggcctacggcctggatccttattccgttgccgccatcctgcaacagcgttgccaggcctctaccactgtcaaccccgctccaggagccaaggacagtcttcaggtccagatccagggtaatcaggtgcaccatctgggctggttgctgctggaggagtatcagttgccaaggaaacatattcagggcctggaaaaggccctgaagccgggcaaaaaaaaatag

SEQ ID NO: 187084 - DNA, 816 bp, synthetic construct
  misc_feature 1..816: note = Description of Artificial Sequence: Synthetic coding sequence
  source 1..816: mol_type = other DNA
atgttcgccaaggccttccgggtgaagagcaacaccgccatcaagggcagcgaccgaagaaagctgcgagccgatgtcacaactgcctttccaacacttggaaccgaccaggtatccgaactcgtcccaggaaaggaagaactgaacatcgtgaagctgtacgcacataaaggtgatgccgtaacagtctacgtctcaggaggaaatcctatattgttcgagttggagaaaaatttataccccactgacctgatgttgcctggacttgtcatgccaccagccgggttgccccaggttcagaagggagacctctgcgcgatttcgcttgtcgggaaccgtgcacccgtggccattggcgtggctgcaatgagtaccgctgagatgttaacttctggtcttaaaggtcgcggattcagcgtgttgcatacttatcaggaccatctgtggagatctggcaataagagctcacctcctagtatagctccactggctctggacagcgcagacttatcagaggagaaaggaagcgtgcagatggattctaccctgcagggagatatgcgacacatgactctggagggcgaagaggaaaatggcgaagtgcatcaggctagggaggacaagtctctgagcgaggcgcctgaggatactagtacacggggactaaaccaggattcaaccgattccaaaactttgcaagaacagatggacgagttactgcaacagtgttttctacacgctctcaagtgcagggtgaagaaggctgacttacccctgttgacgagtacattcctggggagccatatgttttcttag

SEQ ID NO: 187085 - DNA, 2742 bp, synthetic construct
  misc_feature 1..2742: note = Description of Artificial Sequence: Synthetic coding sequence
  source 1..2742: mol_type = other DNA
atgagccggttcttcaccaccggcagcgacagcgagagcgagagctccctgtctggtgaagagctcgttacgaagcccgttggcggaaattatggcaagcaacctttgctcctttcggaggatgaagaggataccaaaagagtggtgagatctgcgaaggataagagatttgaggaactcaccaatctgattaggacaattcggaacgccatgaagatccgcgatgtcacaaaatgcctcgaggagttcgaactactcggtaaggcatacggcaaagctaagagcatcgtagataaagagggtgtgccacgcttctatattcggatcctggccgacctggaggactacttgaatgagctgtgggaagacaaggagggtaagaagaaaatgaataagaacaacgccaaggccctatccactcttaggcaaaaaattcgaaaatacaacagggactttgaatcgcacattacaagctacaaacagaacccagagcaaagcgctgatgaggatgccgaaaagaatgaggaggattccgagggatccagtgatgaggatgaagacgaggacggtgtatccgctgccaccttccttaaaaagaaatccgaggcacccagcggggagagtaggaaatttttgaagaaaatggatgatgaggatgaggatagcgaggattctgaggatgacgaagattgggataccggctccacgtctagcgactcagactccgaggaagaagaaggaaaacaaacggccttggcaagcaggtttttgaaaaaagcaccaaccaccgatgaagacaagaaggctgccgaaaaaaagcgtgaagataaggctaagaaaaaacacgacagaaagtctaagaggctagacgaagaagaagaggacaatgaggggggggagtgggagagagtgagaggaggggtcccgctggtgaaggagaagcctaagatgttcgccaaaggcacagagattacacatgcggtcgtgataaagaagttgaatgagattctgcaggcccgcgggaaaaaggggacggaccgagcagcgcagatcgagttgctacagttacttgtgcaaatcgcagccgaaaataaccttggtgagggtgttattgtcaaaatcaaattcaacatcattgccagcctctacgattacaatcccaatctagctacttacatgaagccggagatgtgggggaaatgtctcgattgcattaatgaattgatggacattctatttgcaaatccgaacatctttgtgggcgagaacatcctggaggaaagcgaaaatctgcataacgccgaccagcccctgcgggtgagaggatgcatcctgacgttggtggagaggatggacgaggaattcaccaagatcatgcaaaataccgatccccactcccaggagtacgtcgagcatctcaaagacgaagcccaggtatgcgcaataattgagcgcgtgcaacgatacctggaggagaaaggcacaacagaggaggtgtgtcggatttatctcttgagaatactgcacacttactacaagtttgattacaaagcccaccagcgacaactgacaccaccagaggggtcttccaagtccgaacaggatcaggctgagaacgagggagaggacagtgcagtgttgatggagagattgtgcaaatatatctatgctaaggatcgcactgaccgaatcagaacctgcgcgatcttgtgtcacatctatcaccacgcactgcacagtagatggtatcaagcccgtgatttaatgctcatgtctcacctccaggacaatatccaacatgccgacccacctgtccagatcctctataacagaacaatggtgcaacttggaatctgtgcctttcgtcagggtctgactaaagatgctcataacgccctgttggatatccagtcatctggaagggcaaaggaactcttaggccaaggcctactgcttcggtcactgcaggagcgcaatcaggagcaggagaaagtagaaagacgccgccaagtgccttttcatctgcatataaatctggagttactagaatgcgtatatttggtgtcagccatgctcctggagattccctatatggccgcccatgagtccgacgctaggagacgtatgattagtaagcaattccaccaccagctgcgtgtgggcgaacggcagccactgctcgggccgcctgagtctatgagagagcacgttgtggccgcgtctaaggccatgaaaatgggagactggaaaacctgccactcgtttatcattaacgagaagatgaacggcaaggtgtgggatctcttccctgaggcggacaaggttcgtaccatgctggtcaggaaaattcaagaagagtctcttcggacctatttgttcacatactcttctgtatacgattcaattagtatggaaaccttgagtgacatgtttgaactcgacttaccgacggtgcactcaataatctctaaaatgataatcaacgaagagctcatggcatcattagatcaacccactcagacagtggtcatgcacagaactgaacccacagctcagcagaatctggcgctacagctggctgagaaactgggctctttggtggagaacaacgagcgtgtattcgatcacaagcaggggacttacgggggatatttccgggatcaaaaagatggatacagaaagaacgaagggtatatgcgtaggggagggtacagacaacagcagagccagacagcatattag

SEQ ID NO: 187086 - DNA, 4149 bp, synthetic construct
  misc_feature 1..4149: note = Description of Artificial Sequence: Synthetic coding sequence
  source 1..4149: mol_type = other DNA
atgcccgcctacttccagcggcccgagaacgccctgaagcgggccaatgaattcttggaggtaggtaaaaaacagccggccctggatgtcctctatgacgtcatgaaatcaaaaaagcatcgtacctggcagaagatccacgagcctatcatgcttaagtatctggagctgtgcgtcgaccttcggaagagccatctcgccaaggaaggcttgtatcaatataagaatatatgccagcaggttaatattaaatccctggaggatgttgttcgtgcatacctgaagatggcggaggagaagaccgaagccgcgaaggaggaaagccagcagatggtcctggatatcgaagacctagacaacattcagacacctgagtcagtattgcttagcgctgtcagtggggaagacactcaagatagaaccgacagactgctgctgactccatgggtgaaatttctgtgggagagctaccggcaatgcctcgaccttttgaggaacaatagccgagtggagaggctttatcacgacatcgcacagcaggctttcaaattctgtctgcagtatacgcggaaggccgagttcagaaaattgtgcgataacctgagaatgcatctgagccagatacaacgacatcacaaccagtccacggccattaatctcaataaccccgagagccaatccatgcacctagagacccgccttgtgcagctcgacagcgcaatctcaatggagctgtggcaggaggcttttaaagccgttgaggatattcatggacttttcagcttgtctaaaaagccccccaagccccagctgatggccaactattataacaaagtctcaaccgtcttctggaagtcaggaaacgctctgttccacgcctccaccctgcatagactctaccatctgagcagggaaatgcgaaagaatctcacccaagatgaaatgcagagaatgtccacccgcgtgctgctggcgacactctccatcccaatcaccccggagcggacggacattgccagactgctggacatggatggcattattgtggagaaacagaggaggctggcaactctcctgggcctccaagctccgcctactcggattggcctcatcaatgacatggtgcgctttaatgtacttcagtatgtggtccccgaagtgaaagacctttacaactggttggaggtggaatttaatccactaaagctgtgtgagagggtgaccaaggttctgaactgggtcagagaacagccagagaaggaacccgagttacagcagtacgtgccacaacttcagaataataccatccttcgcttactccagcaagtttcccaaatctaccagtccatcgaattcagccggcttacttctctggtcccattcgtagacgccttccagctggaacgcgccatcgtcgacgccgcgcggcattgtgacttgcaggttcggatagaccacacttcccgcactttgagctttggctctgacctgaactatgcgacccgagaggacgctccaataggcccccacctgcagtccatgccttcagaacagatacgaaaccaactgaccgcgatgagttccgtgctggccaaagctctggaggtgataaaaccagcccacatactgcaggagaaagaagagcagcaccagcttgcagtgaccgcctacctgaaaaacagtaggaaagagcatcagaggatcttagctcggcgacagacaatcgaggagcggaaggaaaggctcgaatccctcaatatccagcgagagaaagaagagttggagcagagagaagccgagttgcaaaaagttcgaaaggcagaggaggagcgtttgcgccaagaggccaaggagagagagaaagagcgtatactccaggagcacgagcagatcaagaaaaaaaccgtgcgagagcgcctggagcaaatcaagaaaactgagctcggggctaaggccttcaaggatattgatattgaagatctggaggaacttgatcctgatttcataatggcaaagcaggtggagcagttggagaaagagaaaaaagaactgcaggaacgactgaaaaatcaggagaagaaaatcgactacttcgaacgtgcaaagaggcttgaagaaatacccctgatcaagtcagcctatgaagagcagcgtataaaagacatggatctgtgggaacagcaggaggaggaacgcattactacaatgcaactcgaaagagagaaggccctggaacacaaaaaccgtatgagcaggatgctggaggaccgcgatctcttcgtcatgagactgaaggctgctaggcagagcgtgtacgaagagaaactgaagcagtttgaggagcgcctggccgaggagaggcataacaggctggaggagaggaagagacagcgcaaagaagagcgccgcatcacatattaccgcgagaaagaggaggaggaacagaggcgggccgaagagcagatgttgaaagaacgcgaagaacgggagagagccgagagggccaagagggaggaagagctacgggagtaccaggagcgagtcaagaaacttgaggaagtggagcgcaagaagagacagagagagctggagattgaagagcgcgagcgcagaagggaggaagagagacgcttgggagactcaagcctgtcccgaaaggatagtagatggggcgaccgagacagcgaagggacctggcgaaagggtcccgaggctgatagtgaatggcgaagaggaccgcccgagaaggaatggcgtcgtggcgagggtcgggatgaggaccgaagccaccgacgcgacgaggagcgtccccgtcggctgggtgatgacgaggatcgggagccctccctgcgccccgacgacgatcgcgtgccgcggcgtggtatggatgacgacagaggcccgcgtcgtggccctgaggaggatcgcttcagcagaaggggcgccgacgatgatcgcccatcatggaggaatacagatgatgacaggcctccacgaaggattgcagacgaagatagggggaattggagacacgccgatgatgataggcctcccagaaggggcctggatgaggatcggggcagctggaggaccgcggacgaggacagaggccccagacgcggaatggatgacgaccgcggaccaaggcggggtggcgccgacgatgagcgctcctcttggagaaacgccgacgacgacagaggtccgagacgcggacttgatgacgatcgcgggcccaggaggggaatggacgacgataggggtcctagaaggggcatggacgacgaccggggcccccgaaggggaatggacgacgatagggggcctcggcggggtctcgacgatgatagaggcccttggagaaacgccgacgacgataggatacccagaagaggagccgaggacgaccggggtccttggagaaacatggacgatgatcggctcagccggcgggcagatgacgatcggtttccgcggcggggcgatgactcccgccccgggccatggcggcccctggtcaagcctggagggtggcgcgaaaaagagaaagcccgcgaggagtcttggggaccacctagggagtcacgccccagtgaggagagggagtgggatagggagaaggagagagacagggacaaccaggacagagaggagaatgataaagatcccgagcgcgaacgagaccgcgaaagagacgtcgacagagaggaccggttcagaaggccgcgcgatgagggtggatggcggcgcggcccagccgaagagagttctagctggcgtgattcctcgcgccgggacgaccgggaccgagatgatcgccgcagggaacgagacgaccgtcgagaccttcgtgaaagacgagacctgcgcgatgacagggataggaggggcccaccactcagatccgagagagaagaagttagcagttggcgaagagctgacgataggaaagacgatcgggtggaggaacgcgatccccctcggcgtgtgcctccaccagctttgtcccgcgatagggaacgcgaccgcgacagagaaagggagggagagaaagaaaaagcgtcatggcgggccgagaaagaccgggagtctcttcgccggactaagaacgaaacggacgaagacggatggacaacagtgcgccgctag

SEQ ID NO: 187087 - DNA, 4047 bp, synthetic construct
  misc_feature 1..4047: note = Description of Artificial Sequence: Synthetic coding sequence
  source 1..4047: mol_type = other DNA
atgaagagcaagaagcaccggacctggcagaagatccacgagcccattatgctgaagtatctggaactctgcgtagatctccggaagtctcatttggccaaagaggggctatatcagtacaagaatatttgtcagcaggtcaatatcaagtctctggaggacgtcgttcgggcatacctgaagatggctgaggaaaagacggaagcggccaaagaggaatcacagcagatggtcttagatatcgaagatttagacaacattcaaactcctgagagcgtgttgctgagtgctgtgagtggggaagatactcaagacagaacggatagactgctgctcactccatgggtcaagtttctgtgggaaagttaccgacagtgcctggacttgctgcgcaacaactcgcgggtggaacgcctgtaccatgacatcgcccagcaggcttttaagttttgtctgcagtataccaggaaggctgagttcagaaaactgtgtgataacctgagaatgcacttatcacagatccaacggcaccataaccaaagtacagcaatcaatctgaataatccagagagtcaatcgatgcacctcgagactagattggtacagcttgatagtgctatttcaatggagctgtggcaggaggcatttaaggccgtcgaggatatacatggccttttttcactcagcaaaaaaccacctaagccacaattaatggccaactactacaacaaggtgtctactgttttttggaaatccggaaacgccctctttcacgctagcacactgcaccgactctatcatttgtcccgagagatgcgcaagaacttgacccaggacgaaatgcagagaatgagcacaagagtgctgctggctacactaagtattcctatcacacccgagcgcactgatattgccagacttttggacatggatgggatcattgtggaaaaacaacgaagactcgccaccctccttgggctccaggccccaccgactcgcatcggcctaataaatgacatggtgagatttaacgtcctgcagtacgtggtccccgaggtgaaggatctatataattggctcgaggtggagttcaacccactgaagctttgtgagcgagtgactaaggtcctcaattgggtgagagagcagcccgagaaggaacccgagctgcagcagtatgtgccccagctgcaaaacaatacaattctcagacttctacaacaggtcagccagatctaccaatccatcgaattcagccgtctcacctcactggtgccattcgtcgatgcttttcagctggagcgcgcaatagtggatgctgcgagacattgcgaccttcaggtaagaattgaccatactagcagaacactgagcttcggctctgatttgaattatgccaccagagaggatgcaccaatcggaccacatttgcagagcatgccctcagagcagattagaaaccagcttactgcgatgtccagcgtgctcgccaaggcattagaggtgatcaaacccgcccatattctacaggagaaagaggagcagcaccagttagcggtaaccgcttatttaaaaaactcaagaaaagaacatcagaggatcctcgccagacgacagaccatagaagagcgcaaagaaaggttggagagcctcaacatacagagagagaaggaggagctcgagcagcgtgaagctgaactgcagaaggtgaggaaggccgaggaggaaagactccggcaagaggccaaggagcgcgagaaagagcgaatccttcaggaacacgagcagatcaagaagaagactgtgagggaacggttagagcaaattaaaaagacagaacttggtgctaaagctttcaaagatattgacatcgaagacttggaggaactcgacccggactttatcatggccaagcaggtggaacaacttgagaaggagaaaaaggagctgcaggaacgcctgaaaaaccaggaaaaaaaaattgattattttgagcgggcaaaaaggttggaagagatacctctgattaaatcagcctatgaagagcaaaggatcaaggacatggatctttgggaacagcaagaagaggagaggatcacaactatgcagcttgaacgtgagaaggcactggaacacaagaatcgcatgtctaggatgctggaagaccgagaccttttcgtcatgaggctgaaagcggcgcggcaatccgtttatgaggagaaactgaaacagttcgaagaacgtctggctgaggagaggcacaatcggctcgaggagcggaagcgtcagagaaaagaggagcggcgcattacttattatagagagaaggaagaggaagaacagagaagggcagaggagcagatgttgaaggaaagagaagagagagagcgtgcagaacgggcaaagagggaagaggaactccgagagtaccaagaacgagtcaagaaactggaagaggtggaaagaaaaaagcgccaaagagagctggagattgaagaaagagagcggcgacgcgaggaagaacggcgactcggagactccagcctgtcaaggaaggacagtcggtggggcgatcgtgattctgaagggacttggcgcaagggcccagaagccgactcagaatggaggcgtggtccacctgaaaaggaatggcggcggggggagggaagagatgaagatcggtcacaccggagagatgaggagcggcccagacgcctaggagacgatgaagaccgcgaaccctctcttcggccagacgatgatcgggttccgcgtaggggaatggacgacgacagaggcccgcggcggggcccagaagaagaccgattttctcgacggggggcggatgatgatcggccgagctggaggaatacagacgacgatcgacccccccggagaattgcagacgaagatcgcggtaattggcggcatgccgatgatgatcgtcctccccgcaggggactagatgaagatcgaggctcttggaggaccgcagatgaggaccgcggccctagacgcgggatggatgacgatagaggaccgcgcagggggggggcagatgacgagcgctcctcctggcgcaatgcagatgatgatagaggtcctcggagaggtctcgatgacgataggggcccccggcgtgggatggacgacgaccgggggccccggcggggtatggacgatgatcggggtccacggaggggaatggacgatgaccggggacctagacgaggactcgacgacgatcgaggcccttggaggaatgccgatgatgataggatcccccgtcgaggtgccgaagacgaccgaggaccttggaggaatatggacgacgacagactctctcgaagggccgatgacgacagattcccacgccggggagacgattcacggcccggcccctggagaccactagttaaacccggcggctggcgggagaaagagaaggcccgcgaggagagttggggccctccccgcgagtctcgtccttccgaagagagggagtgggacagagaaaaggaaagggacagagataaccaggatcgcgaggagaatgataaggaccccgaaagggagagggacagggagcgagatgtagaccgtgaggatcgcttccgcagaccaagggacgaaggaggctggcgcaggggacccgccgaagagagctcttcttggagggattcgagccgtagggatgatagggacagagatgatcggcgaagagagcgcgacgacagacgggacctcagggagcggcgggacctgagggacgatcgtgatcgaagagggccacccctacggtccgaacgcgaggaggtgagctcctggcggcgcgccgacgatcgaaaagacgatcgggtagaggagagagaccctccaaggagagtcccaccaccagcgttgtcccgtgatagggagcgggatagggaccgggagagagaaggggagaaggagaaggcttcttggcgagccgagaaagaccgggagtctctgcggagaactaagaatgagactgacgaggatggctggactaccgtgcgccgatag

SEQ ID NO: 187088 - DNA, 2619 bp, synthetic construct
  misc_feature 1..2619: note = Description of Artificial Sequence: Synthetic coding sequence
  source 1..2619: mol_type = other DNA
atgcaggacgccgagaacgtggccgtgcccgaggccgccgaggagcgggctgagcccggccagcagcagccagcggccgaaccacccccagcagaagggttgctcaggcccgctggccccggcgcgccagaagcagcagggaccgaagcttcaagtgaagaggtgggaatcgctgaggccgggccagaatctgaagttcgaactgaacctgcagctgaagctgaggccgctagtggcccttctgaatcaccttcgcccccagcagcggaagagctgcccggaagtcatgccgagcccccagtcccagctcaaggggaggctccaggtgagcaagccagagacgaacgttctgattcccgagctcaagctgtgtcagaagacgccggcggcaatgagggccgggctgccgaagccgagccacgcgctctggaaaacggggacgcagacgagcccagctttagcgatcctgaagatttcgtagacgacgtctccgaagaggagttgttaggtgacgtccttaaggaccggccacaggaggccgatggcatcgactcagtaatagtggtcgataatgtccctcaagtcggacctgaccggctggagaagctcaagaacgtgattcacaagattttctcgaagttcggaaagattacaaatgatttttaccctgaggaagatggcaagacaaaggggtatatttttctggagtatgcctcacctgcccatgctgtagacgctgtaaagaacgccgacggctacaagcttgataaacagcacacctttcgggtcaatctgtttactgatttcgacaagtacatgaccatcagcgacgaatgggatatacctgaaaagcaaccttttaaggatcttggcaacctgcggtactggttggaggaggccgagtgccgagaccaatatagcgtgatatttgagagcggcgataggacaagcattttctggaacgatgtgaaggaccccgtgtccattgaggaacgggcccgttggactgagacatacgtgcgctggtcccccaagggaacatatctagccacgtttcaccagagggggatcgccctatggggaggggagaaattcaagcagatccagcggttctcacaccaaggcgtgcagttgattgattttagtccatgcgaacggtatcttgtaaccttttcaccactgatggacacccaggacgaccctcaggccataattatctgggatattctaactggtcacaagaagaggggtttccactgcgaatcgagtgctcactggcccatcttcaaatggtcgcacgatggcaaattttttgcacgcatgaccctggacaccctcagcatttacgagaccccaagcatggggctgctggataagaagagcctcaagatcagcggaataaaggacttcagctggtcacccgggggcaatataattgccttttgggtccccgaggacaaggatatccctgcaagggtaactctgatgcagctccctactcgacaagaaatacgtgtgagaaacctatttaacgtcgtggactgtaagctgcattggcagaagaacggtgattacctctgcgttaaggtggatagaacacctaaaggaacccagggcgtagtgacaaactttgaaatcttcaggatgagagagaaacaagtgcctgtcgacgtggtggaaatgaaagaaaccatcattgccttcgcttgggagcccaacgggtcaaaattcgccgttttgcacggggaggcgccacgaatttcagtaagcttctatcatgtgaagaataatggtaaaattgaacttatcaaaatgttcgacaaacagcaggccaacacaattttctggagtcctcaaggccaattcgtggtactggctggcctacggtctatgaacggcgcgcttgcatttgtcgacacgagcgattgcacagtcatgaacattgccgaacactacatggctagcgacgtggagtgggatccaacagggcgttacgtggtgacaagcgtgtcctggtggagtcataaagtcgataatgcttattggctatggactttccaaggcagattactccagaaaaataacaaggaccggttctgccagctgttgtggcgccctcgccctcctacgctgctctcacaggagcagatcaagcagatcaagaaggacctgaaaaagtattctaaaatcttcgagcaaaaagatcgtctgagtcagagtaaggcctctaaagagttggtcgagaggcgaagaactatgatggaagattttaggaaatatcgtaaaatggcacaggagctgtacatggaacaaaagaacgaacgcttggagctgcgaggtggcgtggacacagatgagctcgattctaacgtagacgactgggaggaggagacaattgagttcttcgtcacagaggagatcattcctggaatcagaagtgatcttgaacactgtgcacagccatgcgttctctggagtcggggacgaccagctgggagccgcgttacccctgcctcatccctctgctctctagccctagactgtgactgcgcttggatcttgcctctacggcacatcttcgttcctttctccccttggtgcttgcagtggggaatctag

SEQ ID NO: 187089 - DNA, 2445 bp, synthetic construct
  misc_feature 1..2445: note = Description of Artificial Sequence: Synthetic coding sequence
  source 1..2445: mol_type = other DNA
atgcaggacgccgagaacgtggccgtgcccgaggccgccgaggagcgagccgagcccggacagcagcagccagctgctgagcctccgcccgcggagggactgctccgacccgccggccctggggcccctgaagcagcgggtaccgaggcttcttccgaggaagtgggaatcgccgaggctggaccggagtctgaagtgcgaacggaacccgctgccgaggcagaagccgctagtgggccctctgagtcacctagcccacccgccgcagaagagctgcccggatcacacgcagaaccaccggtcccagcccagggggaggctccaggggagcaggcacgcgacgaacgctcagatagtcgagctcaggctgttagtgaggacgcgggtggcaatgaaggaagagccgccgaggctgagccccgcgcattagaaaacggtgatgctgacgaaccttcctttagcgatcctgaggatttcgtggacgacgtcagtgaagaagagttgctgggcgatgtcctgaaggaccgccctcaggaggctgacggcatagactccgtcatcgtggttgacaatgttccacaagtgggacccgaccgcctggaaaagcttaagaatgtgatccacaagatcttctcaaagttcggaaagattactaacgatttttatccggaggaggacggtaaaacaaagggatatatatttcttgaatatgcttcgcccgcccacgctgtggacgccgtaaagaacgctgacgggtacaaattagacaagcagcacactttcagagtcaatctcttcacagatttcgacaaatatatgaccatatccgacgaatgggatatcccagagaagcaaccgttcaaggacctgggaaatctgaggtattggctggaggaggccgagtgtcgtgaccagtactccgttatattcgagtcaggggaccgcacctctatcttctggaacgatgtgaaagaccctgtgtccatagaagagcgagcaaggtggactgagacatatgttcgctggtctcccaaagggacttacctcgccactttccatcaaagaggaatagcactttggggcggggagaagtttaaacagattcaacggttctcacaccaaggcgtgcaacttattgacttcagcccatgtgagcgctatctggtgacattcagccctcttatggacacacaggacgacccacaggcgataatcatttgggacatcctgaccggccacaaaaaacgcggattccactgcgaatcttcagcacattggccaattttcaagtggtcgcatgacggcaagttcttcgcgcgaatgactctggacacattgagcatctatgagacgcccagtatgggcctccttgacaaaaaaagtcttaaaatcagcggcataaaagatttttcttggagtcctggtggaaacattattgctttctgggtccctgaggacaaggacatcccagctcgcgtgacactgatgcaactaccgactaggcaagaaatacgtgtccgaaatctgttcaacgttgtagactgcaagctgcattggcagaagaatggagactatctgtgtgtgaaggtggacagaacacccaaggggactcagggagtggtcactaacttcgagatcttcagaatgagagagaagcaggttcctgtggacgtcgttgagatgaaggagaccattatcgctttcgcctgggaaccaaacggcagcaaattcgcagtcctgcacggcgaggcgcctcgaatcagcgtctctttctatcatgtgaagaataacggcaagatcgagcttatcaaaatgtttgataagcagcaagccaatacaatcttctggtccccacagggacagtttgtcgttctagctggtctgcgaagcatgaatggagccctggcattcgtggatacaagcgattgcaccgtcatgaatattgcagaacactacatggccagcgatgtggaatgggacccgaccggtcgatatgtggtaacgtccgtaagctggtggagtcacaaagttgataacgcgtactggctgtggacctttcaggggcgtctcctccagaaaaacaacaaggatcgcttctgtcagcttctctggcgccctaggccgccaacgctccttagccaagaacagattaagcagattaaaaaggatctgaaaaaatatagcaaaatcttcgaacaaaaggataggttaagccagtcgaaggccagcaaggaactggtggagaggcgcaggacgatgatggaggacttccgcaagtacaggaagatggcacaggaactttatatggagcagaagaatgaaaggctcgagctccgaggtggagtagacaccgacgaactggacagcaatgtggatgactgggaggaggagacaatagaattctttgtgaccgaggaaatcattcccctgggcaaccaggagtag

SEQ ID NO: 187090 - DNA, 2445 bp, synthetic construct
  misc_feature 1..2445: note = Description of Artificial Sequence: Synthetic coding sequence
  source 1..2445: mol_type = other DNA
atgcaggacgccgagaacgtggccgtgcccgaggccgccgaggagagggcagaacccggacagcagcagcccgccgccgagcccccacccgccgaaggtctgctaagacctgccgggcctggagccccagaggcagctgggactgaagcatccagcgaagaggtgggcattgccgaagccgggcctgagtccgaggtgcgaactgagccagcagccgaagcagaagcagcttctggccctagcgagagcccttctcctccagccgctgaggagctccccgggtctcacgcggaaccacctgtgcctgcacagggggaggctccgggagagcaggcccgcgacgagcggagcgattccagggcccaagccgtgtccgaggatgccggagggaacgaagggagagccgccgaagcagaaccgcgcgctctcgagaatggcgacgctgacgaacctagtttctctgaccccgaagatttcgtggacgatgtgagcgaagaggagctcctcggggatgttcttaaggacaggccccaggaggccgatggaatcgactccgtcatcgttgttgacaacgtgccacaggtcggacccgacagactggagaagctgaagaatgtcatccacaaaatctttagtaaattcggcaagattaccaatgatttttaccctgaggaggacggcaagactaaggggtatatttttttagagtatgcctcgccagctcatgcagttgatgccgtgaagaacgctgatggatacaagctagacaagcagcacacctttcgggtcaacctgttcaccgactttgacaaatacatgacgatctcagacgagtgggatatcccagaaaagcagccctttaaggacctggggaacctccggtattggctggaggaggcggagtgcagggaccagtacagcgtgatatttgagtctggcgatcggacctccatcttctggaacgacgtgaaggaccctgtgagcattgaggaaagagctcgttggaccgaaacatatgttcgttggtcccccaagggaacttacttggctaccttccatcagagaggcatcgcactgtggggaggcgaaaagtttaagcagattcagcgattttcccaccagggcgtacagcttatagatttcagtccatgtgagcgatatctggtcaccttcagcccgcttatggatactcaggatgacccccaggccataattatctgggacatcttgaccggccataaaaaacggggctttcactgcgagtcaagcgcgcactggcctatatttaaatggagtcatgacgggaagttttttgcacggatgactttagatacgctgagcatctacgagacgccatcgatggggctgctggataaaaaaagcctgaagattagtgggataaaggacttcagctggtcccctggaggcaatattattgccttctgggtgcctgaagataaggacatcccagctagagtaacccttatgcaactgccaacaaggcaggaaatcagagtcagaaacctgttcaacgttgtggactgtaagttgcattggcagaaaaacggagactacctctgcgtgaaagtcgatcggaccccaaaaggtacacagggtgtggtcaccaattttgagatctttagaatgagggagaaacaggtcccagtcgacgtggtagagatgaaggaaacgatcatcgccttcgcctgggagcccaacgggagcaagtttgcagtactgcatggagaggcaccccgaatctccgtttctttttaccatgtgaagaacaatggcaaaattgagctcatcaaaatgtttgataagcagcaagctaacaccattttttggagcccacagggccagttcgtcgtgcttgcaggccttagaagcatgaatggcgcccttgcttttgttgatactagcgactgcactgtcatgaatatcgccgagcactatatggcttccgatgtggagtgggatcccaccggccggtatgtggttacgtctgtcagctggtggtcccataaggtggacaatgcatactggctgtggaccttccagggtagattgctgcagaagaacaataaggaccgtttctgtcagttgctctggaggcctcgtccccccactttgctgtcccaagagcagatcaaacagatcaaaaaagacttaaagaagtactctaaaatctttgaacaaaaggatcgactttcccagtcaaaagcctctaaagaactcgtcgagcggcgaaggaccatgatggaggactttcggaagtatcgaaagatggctcaggaactctatatggaacagaaaaatgagcgtctggagcttcgaggcggtgttgataccgacgaacttgactcgaacgtggatgattgggaggaagagacgatcgaatttttcgtcacagaggaaatcatccccctgggaaaccaggagtag

SEQ ID NO: 187091 - DNA, 2217 bp, synthetic construct
  misc_feature 1..2217: note = Description of Artificial Sequence: Synthetic coding sequence
  source 1..2217: mol_type = other DNA
atgcaggacgccgagaacgtggccgtgcccgaggccgccgaggagagagcaggtagtcatgccgaaccacccgttccggcgcagggagaggccccaggagaacaggcgagggatgaacggtctgatagtcgtgcccaggcagtgtctgaggacgccggtgggaatgagggcagggctgccgaagcggagccacgcgccctagagaacggcgacgccgacgagccaagcttctcagacccggaggattttgtagatgacgtttctgaggaggagttgctcggcgacgtcctgaaagacaggccccaggaggccgatggcatcgacagtgttattgttgtagacaacgtgccccaggtgggcccagatcggctcgagaaactcaaaaacgtgattcataagattttcagtaagttcggaaagattacaaatgacttttacccagaggaagacgggaaaacaaaaggctacatcttcctggagtacgcctccccggcccatgcagtcgacgcagtgaagaatgccgatggttacaagctcgacaaacagcatactttccgggtcaatctatttaccgatttcgacaagtatatgactataagcgacgagtgggatattccagaaaagcaaccctttaaggacctggggaatctgcggtattggttggaggaggcagagtgtcgagatcaatactccgtaatctttgagagcggagatcgaacgtcaatcttttggaacgacgtgaaagaccctgtttcaatcgaggaaagagcccgctggacagaaacgtatgttcggtggtctcccaaaggtacctatctcgcaacttttcaccagcgaggcatcgcactatggggaggcgagaagttcaagcagatacagaggttttctcatcaaggggtccagttaatagacttttccccttgcgagcgctacctcgttaccttcagccccttgatggatacacaggatgacccccaggccattataatctgggatatcctgaccggacataaaaaaagaggcttccactgtgagagcagtgcccattggcctatctttaagtggtcacatgatggtaagttctttgctcgaatgactctggacaccctcagtatctatgaaaccccctccatgggcctcctcgataaaaaaagcctgaagatctcaggaatcaaggattttagttggtccccagggggcaatatcatagcgttctgggtccctgaagacaaagacatcccagccagggtgacactcatgcagctgcctactcggcaggaaatcagggttcgaaatttgttcaacgttgtagactgtaaactgcattggcagaaaaatggggactatctgtgtgttaaggtggaccggacgccgaaaggtacgcagggcgttgtaacaaacttcgagatatttcggatgcgcgaaaagcaagtccccgtggacgtcgttgagatgaaagaaactatcattgcatttgcctgggagccaaatgggtcaaaattcgcagtgttgcacggggaggccccacgcatatccgtgagcttctaccacgtgaaaaacaacgggaagattgagctgattaagatgtttgacaagcaacaggccaataccattttctggtctcctcagggacaattcgtcgtcttagccggtctgagatctatgaatggtgccctggccttcgttgacacgtccgattgcaccgtcatgaatatagctgaacactatatggcgagcgatgtcgaatgggaccccactggccggtatgtggtgaccagtgtctcttggtggtcccataaggtcgataacgcctactggctgtggacattccagggacgactgctgcagaagaacaacaaggatcgcttctgtcagctgctctggagaccacgacccccgaccctgcttagccaggaacagataaagcagatcaaaaaggacctcaaaaaatactctaagatttttgagcagaaggaccggctgtcccagagcaaagcgagtaaagagctggtggagaggcggagaacaatgatggaagatttccgaaagtaccgaaaaatggctcaggagttgtacatggaacagaagaatgagcgcctggagctgcgaggtggagtggacaccgatgaactggattcaaacgttgacgactgggaggaggagacgatcgagttcttcgtgaccgaagagattattcctctcggcaatcaagaatag

SEQ ID NO: 187092 - DNA, 2742 bp, synthetic construct
  misc_feature 1..2742: note = Description of Artificial Sequence: Synthetic coding sequence
  source 1..2742: mol_type = other DNA
atgagccggttcttcaccaccggcagcgacagcgagagcgagagctccctgagcggggaggaactcgtgacaaagccggtgggcgggaattatggtaagcaacctctgttgttatctgaggacgaagaggacacaaaacgcgtggtccgctccgcaaaggacaagcgttttgaggaactgaccaatctgataagaactattcgtaacgctatgaaaattcgcgatgtgactaagtgcctcgaggaattcgagctactggggaaggcctacggtaaggctaagagcatcgttgataaggagggagtcccaaggttttatattcgcattctcgccgaccttgaggactatctcaatgaactttgggaggataaggagggaaagaagaaaatgaataaaaataacgccaaagccctttccaccctcaggcaaaagattcgtaaatataatcgcgactttgagagtcatatcacgagttataagcagaatcccgagcagtctgcagacgaggacgccgagaaaaacgaggaggacagcgagggcagctcagacgaggacgaggatgaagatggagtcagcgccgctactttccttaaaaagaagtctgaggcgccttccggcgagtcccggaagttcctaaaaaagatggacgatgaggacgaagatagtgaagactctgaggatgatgaggactgggacaccgggtcaacgtccagcgattctgactccgaggaagaagaggggaagcagacagcactagctagtcggtttttgaagaaggctcccaccacagatgaagataagaaggccgccgagaagaagcgggaggataaggcaaagaagaaacatgatagaaagagcaagcgcctggacgaggaagaggaggacaatgagggcggagaatgggagagggtgcgggggggtgtgcccctggtaaaagaaaagcccaaaatgtttgctaagggcactgaaatcactcatgcagtggtcatcaaaaagctgaatgaaattttacaagcccggggaaagaagggtactgaccgggcagcccagattgaattattacagctccttgtccagattgctgccgaaaataatttgggcgagggcgtaatagttaagattaagtttaatattattgcctccctttacgattacaatcccaatttggctacctatatgaaacctgagatgtgggggaaatgtctcgactgtatcaatgagcttatggacatactatttgctaacccaaatattttcgtcggcgaaaacatcctggaagagtctgagaatcttcacaacgcagaccagccactgcgggtgcgcggctgcatacttacactcgttgagagaatggatgaggaattcacaaaaataatgcagaatacggacccccactcacaggaatatgtagaacacctgaaagatgaagcccaggtctgtgctattattgaaagggtccagcggtacctggaagagaaagggaccactgaagaagtttgcaggatatacctcctgcgtatcctacatacatattacaagttcgactataaggcgcaccagcggcagctgacccctccagaaggtagctctaaatctgagcaggatcaggctgagaacgagggagaggacagcgctgtacttatggaacgtctctgcaaatacatctacgcaaaggatcggaccgatagaataaggacatgtgccatcctttgtcatatttatcaccacgcccttcatagccgctggtatcaggctcgagacctgatgctaatgtcacacttacaagacaatatccagcacgccgatcctcccgtccagattctgtacaataggacgatggttcagcttggcatatgcgcttttcggcagggtctaacaaaggacgcccacaacgcattgttggacatacagtctagtggcagagccaaggaactgctggggcaaggactcctcctgcgctccctgcaagagaggaaccaagaacaggagaaggtagaaagaaggcgccaggtgcctttccatttacacatcaacctcgagctcctggagtgcgtatatcttgtgtcagctatgctgcttgaaattccgtatatggccgcgcacgaaagcgacgccagacgtcgaatgatcagcaagcagttccatcaccagcttagggtgggggagaggcaaccccttcttggcccaccggagagcatgcgggagcatgtcgtcgcagcctctaaggcaatgaagatgggcgactggaagacttgtcattccttcattatcaatgagaaaatgaacggaaaagtctgggatttgttccctgaagccgacaaggtaagaacaatgttagtgcggaaaattcaggaagagtcactccggacctatctgttcacgtactcgtctgtgtacgactctatcagtatggagacattatcagatatgtttgagttggacctgcctacggtgcatagcatcataagtaagatgattatcaacgaagagctgatggcgtccctcgatcaaccaacccaaacggtggtaatgcataggaccgaacctactgcacagcagaatctcgcgctgcaacttgctgagaagctggggagcctggtcgagaacaacgagcgggtctttgaccacaaacagggcacatacgggggatacttcagggaccagaaggacggataccgaaaaaacgagggatatatgaggagagggggttaccggcagcagcagtcacagaccgcatattag

SEQ ID NO: 187093 - DNA, 2286 bp, synthetic construct
  misc_feature 1..2286: note = Description of Artificial Sequence: Synthetic coding sequence
  source 1..2286: mol_type = other DNA
atgagccggttcttcaccaccggcagcgacagcgagagcgagagcagcctgagtggtgaagagttagtcacgaaaccagttggtggaaactatggaaaacaacctcttctgctttccgaagatgaggaagatacaaaacgggtcgtcagatccgccaaagacaagaggtttgaggaattgactaatctcattcgaactatccggaatgcaatgaagatacgggatgttaccaaatgtctcgaggagttcgagctgctgggtaaggcgtacgggaaggcgaagagtatcgttgataaagagggagtgccccggttttacatacgtatcctcgcggatttggaggactacttgaacgaactgtgggaagacaaagagggaaagaaaaagcacgatcgtaagagtaaaagactggatgaggaagaggaggataacgagggaggggagtgggagcgcgtcagaggcggcgtcccactcgtgaaggaaaagcccaagatgttcgcaaaaggcaccgaaattacccacgccgtcgtcatcaaaaaattgaatgagattctccaggcgcgggggaagaaaggaaccgacagagcagcacagatagagctcctgcagcttctcgtgcaaatcgccgccgagaataacttgggggagggagtgattgtgaagattaagtttaacattatcgccagcctttacgattacaaccccaacctggcaacttacatgaagcctgaaatgtggggaaagtgcctcgattgtatcaatgaactaatggatatattatttgctaaccccaatatttttgtgggagaaaatattctcgaggaatccgaaaatctgcacaacgccgaccagccactgagagttagagggtgcatcctaacactggtagaacgcatggatgaggaattcacaaaaattatgcaaaacactgatcctcactctcaagaatatgtggagcatctgaaagatgaggcccaggtgtgcgctattatcgaaagggttcagagatacttagaggagaaagggaccaccgaggaggtttgccggatttaccttctgcggatcctgcatacatactataaattcgactataaagcccaccagcgccagctgacaccccccgagggaagctcaaaatccgagcaggaccaagctgagaatgaaggagaggactcagcagtcctgatggagcgtctctgtaaatacatttatgcgaaggatagaaccgatcgaatacgcacctgcgctatcctctgtcatatatatcaccacgcccttcattctaggtggtaccaggctcgcgacctcatgctgatgtcccatctgcaggacaacattcaacacgctgatccgcctgtgcaaatcctctataatcgaaccatggtccagctgggcatttgcgcatttagacagggccttaccaaggacgctcataatgctctgctggatatacagtcctctgggagagccaaggaactgttaggtcaaggactgctgctgagaagtctccaggagagaaaccaggaacaggaaaaggtggaaagacggcggcaggtgcccttccacctccatataaatcttgagttgttggagtgcgtctaccttgtgagtgcgatgttactcgagatcccctacatggcagcacacgaatctgatgctagaagacgcatgatcagtaagcagttccatcatcagcttcgagtaggggaacggcagcctcttctgggacctcctgaaagcatgagggaacatgtagtggccgccagtaaagccatgaagatgggggactggaagacttgtcactcctttataattaacgaaaagatgaacggcaaggtttgggacttgtttccagaagcagacaaagtgcggactatgctggtcaggaagatccaagaagagagtctcaggacctatttgtttacatacagcagcgtgtacgactccattagcatggagactctgtctgacatgtttgaactagatctccctaccgtccactcaattataagcaaaatgattatcaatgaggagctgatggcttctctggatcagcccacgcagaccgtggtcatgcatagaacagaaccaaccgctcagcagaatctggcactccagctggctgaaaaacttggatctctggtggagaacaacgaacgagttttcgatcacaagcagggaacctacggggggtattttagagaccaaaaggacgggtaccgtaagaacgaaggatacatgcgcaggggtggttacagacagcagcagtcccagacagcctattag

SEQ ID NO: 187094 - DNA, 2742 bp, synthetic construct
  misc_feature 1..2742: note = Description of Artificial Sequence: Synthetic coding sequence
  source 1..2742: mol_type = other DNA
atgagccggttcttcaccaccggcagcgacagcgagagcgagagcagtctaagtggcgaggaactcgtgaccaagcctgtaggggggaattacgggaagcagcctttacttctctcagaagacgaggaggacaccaagcgtgtggtgcgttctgcaaaggacaagaggtttgaggaactgacgaatctgattcgaactatacgtaacgctatgaagatccgcgacgtaaccaagtgcctcgaggaatttgagcttttgggtaaagcctatggcaaagcaaagtcaattgtcgataaggaaggagtgccacgcttctacattagaattcttgctgatctcgaagactacttaaatgaactctgggaagataaggaggggaaaaaaaagatgaataagaacaacgcaaaagccctgagcacgctccgtcagaagatccgtaaatataacagagatttcgaatcccatatcacctcttacaagcagaaccctgagcagtccgccgatgaggacgccgaaaagaatgaagaagacagtgaggggagctccgatgaggatgaagacgaggatggtgtatccgcagcaacgtttctgaaaaagaaaagcgaggctccatccggagaatccagaaaatttcttaaaaagatggatgacgaagacgaagacagcgaggacagtgaggatgatgaggattgggatactgggtccacctcttcagattccgattccgaagaggaggaaggaaaacaaaccgccctcgcttccagattcctgaaaaaagcacctacaacggatgaggacaaaaaggctgcagaaaagaagagggaagacaaagcgaagaaaaagcatgaccggaaatctaaaaggctcgacgaggaagaagaagataacgagggcggcgaatgggaaagagtgagaggtggggtaccccttgtgaaagaaaagcctaagatgtttgccaaaggaaccgaaatcacacacgccgtggtaatcaagaaactcaacgagatcctacaggctcgtggaaagaagggtaccgatcgcgcagcgcagatcgaactgctacaacttctggtgcaaatcgccgccgaaaataatttaggtgagggggtcatcgtgaaaatcaaattcaacataatcgcttcattgtatgattataaccccaaccttgccacatacatgaagccagagatgtggggcaagtgtttggattgcatcaacgagttaatggatatcctgttcgcaaatccaaatatctttgtcggcgagaacatcctggaggaaagcgaaaatctgcacaatgccgaccaacccctgcgggtacgcggttgtatcttgacactggttgagcgaatggacgaggagttcacgaagattatgcagaatacagatccccattcacaagaatatgtggaacacttaaaggacgaagcccaggtatgcgcaataatcgagagggttcaacggtacctcgaagagaagggtactactgaagaggtctgcagaatttatttactgaggatactacacacgtattacaagttcgactacaaggctcaccagcgacaattgaccccaccggaggggtcatctaagtcagaacaggatcaggcggagaatgagggcgaagacagtgcagtactgatggagcggctatgtaagtacatttacgccaaggaccggaccgataggatcagaacttgcgctattttgtgccacatttaccatcatgctcttcactcacgatggtatcaggcacgcgacctgatgctaatgtctcacctccaggacaacatccagcacgccgatccgcctgttcagattctctataatcggacgatggtgcaactgggtatctgcgccttccgacagggacttaccaaagacgcgcacaacgcccttctcgatattcaatccagcggtagagccaaggaattgctcggccagggcttactgcttcggtccctacaagagcgtaaccaggagcaggagaaggtggaacggcggcgtcaggtaccattccacctgcacatcaaccttgagctcctagagtgcgtgtatctggtctctgcaatgctcctggagattccatacatggcagcccatgaatcagacgcgaggcgccgtatgatttctaagcagttccaccatcaactgcgcgtgggggagaggcaaccgctgctcggcccgccagagtccatgcgagagcatgtggttgctgctagtaaagccatgaaaatgggcgactggaagacctgccattcctttatcataaatgagaaaatgaacggtaaggtctgggacctgtttcccgaagcggataaagtgagaacaatgctggttcgtaaaatccaggaagagtcacttagaacctaccttttcacatactcttcggtatacgactcaatttccatggagactttgtctgacatgtttgaactagatctccccacagtgcactccattattagcaagatgatcataaacgaggaacttatggctagcttggaccagccaactcagactgtagtgatgcatagaacagagcctaccgcccagcagaacctggccctccagctggcggaaaaattggggtctttagtggagaacaatgagagagtctttgatcacaaacaggggacttacggtggctattttcgggaccagaaggacgggtatcgtaaaaacgaagggtacatgcgaagaggtggatacagacagcagcagagccagaccgcctactag

SEQ ID NO: 187095 - DNA, 2208 bp, synthetic construct
  misc_feature 1..2208: note = Description of Artificial Sequence: Synthetic coding sequence
  source 1..2208: mol_type = other DNA
atgagccggttcttcaccaccggcagcgacagcgagagcgagagctccctctccggcgaagagctggttaccaagccagtaggcggaaattacggcaagcaaccacttctactgtctgaggatgaggaagatacgaaacgcgttgtgcgaagtgctaaggacaagcgttttgaagagctgactaatctgatcagaaccatccggaacgcgatgaaaataagagacgtaacaaagtgcctggaagagttcgagttgcttggaaaggcatatgggaaggccaagagcatcgtggacaaggctaagaagaagcacgatcgcaaatccaaaaggctggatgaagaggaagaagataatgaaggaggcgaatgggagagggtgaggggcggggtgcctcttgtgaaagaaaagcccaagatgttcgcaaaaggtaccgaaattacccacgccgtggtgatcaaaaaactcaacgaaattcttcaggctagaggtaaaaaaggtaccgatcgggcggctcaaattgagcttctgcagcttctggtgcagattgctgccgagaacaatctgggagagggggtgatcgtgaaaattaaatttaatatcatcgccagcttatatgattacaatcccaatttagccacttacatgaagccagagatgtggggcaagtgcctggattgtattaacgagctcatggatatcctttttgctaacccgaacatctttgtgggtgagaacatattggaagagagcgaaaatctccacaacgccgaccagccgttgagggttcgcgggtgtatcctgacccttgtggaaagaatggacgaagaattcacaaaaatcatgcagaatacagacccccattcacaggagtatgtggagcatctgaaagatgaagctcaagtttgcgccattatcgagcgcgtgcaaaggtatctggaggaaaagggcaccaccgaggaggtgtgtaggatctacctgctgcgaattctgcacacctactacaagtttgattataaggcccatcagcggcagctgactccaccagaagggagcagcaaaagcgagcaggatcaggccgaaaatgaaggggaggactccgccgtgttaatggagaggttgtgcaagtatatttacgcaaaggacaggaccgaccggatcaggacctgtgctatcttatgccatatttatcatcatgccctccacagccgctggtatcaagccagagacctgatgctgatgagtcacttgcaggacaacattcaacatgcggatcctcccgtccaaatactttataacaggacgatggtccaacttggaatctgcgctttccgccaggggctcacaaaagatgcccacaatgccctgttggatatacagtcctccggacgcgctaaggagctgctcgggcagggtctcttgttgcgctccctgcaggaaaggaaccaggagcaggagaaggtggagcggcgccggcaggtgcccttccatttacatatcaacttagagttattggagtgcgtctacttggtgtctgctatgctgctggagatcccctacatggcagcacacgaatctgatgcacgccggcgcatgatcagtaaacagtttcaccatcaactcagggtcggagagcgacagcctttattgggaccacccgaatccatgagggagcacgtagtggcagcttctaaggcaatgaaaatgggcgattggaagacatgccattccttcattatcaatgagaaaatgaacggtaaggtgtgggacctcttccccgaggcagataaggtgaggaccatgcttgtcagaaaaattcaagaagagtcactgaggacatatctatttacgtattcgagcgtctacgatagcatctctatggagacgctctctgatatgtttgagctggatcttcccacggttcatagcatcatctccaagatgattatcaacgaggagctgatggcttctctggaccagcccacacagaccgtcgtgatgcatcgtacggagcccacagcacaacagaatctggcactacaactagcggaaaaactgggatccctagtagagaacaacgagagagtatttgaccacaagcaagggacatatggaggctattttagggatcagaaagacgggtatagaaagaatgagggctatatgcgccgagggggataccgccaacagcagagtcagactgcgtattag

SEQ ID NO: 187096 - DNA, 2697 bp, synthetic construct
  misc_feature 1..2697: note = Description of Artificial Sequence: Synthetic coding sequence
  source 1..2697: mol_type = other DNA
atgagccggttcttcaccaccggcagcgacagcgagagcgagagctcactgtccggagaggaattagtaactaaaccagtgggcggaaactatgggaaacagcctttgctcttatcagaggacgaggaggacaccaagcgggtggtgcggagcgctaaagataagcgcttcgaagagctcaccaacctgataaggacaatcaggaacgctatgaagatccgggatgtgaccaaatgcctcgaggagtttgagctcttgggcaaggcgtacggcaaggccaaatccattgtggacaaagaaggagtccccaggttctacattcggattcttgctgacctggaggattatttgaacgaactctgggaggataaagaaggaaagaaaaagattcggaaatataaccgggactttgaatctcatattacctcgtacaagcaaaaccccgagcaatcggccgacgaggacgccgaaaaaaacgaagaagactcagaaggatcttctgatgaagacgaggacgaggatggcgtatctgccgctacattcctaaaaaaaaagagcgaggctccaagcggggaatctcgtaagttcttaaagaagatggacgatgaggatgaggatagcgaggatagtgaggatgacgaggactgggacaccggttcaacaagctcagattcagactctgaagaggaagagggcaaacagacagcccttgcgagccgattcctcaagaaggctcccaccaccgatgaggataaaaaagcagctgagaagaaaagagaagacaaggcaaagaagaagcatgatcggaagagcaagcgtttagacgaggaggaagaagataacgaagggggggaatgggaaagagtacgcggaggtgtcccactcgtcaaggagaagcctaaaatgttcgccaaaggaaccgagattacacacgccgtcgtgattaagaagctcaacgagattcttcaggcccgggggaagaaaggcaccgatcgcgcggcacagatcgaactactccagctgctggtgcaaatcgcagccgaaaataacctcggcgaaggagttatcgtgaagataaaattcaatattatagccagtctctacgactataacccaaatttggcaacgtacatgaaaccggaaatgtgggggaaatgtctggattgtattaacgaattgatggacatcctgttcgccaacccgaatatatttgtcggagagaacatactggaagaatctgagaaccttcacaatgcagatcaaccattacgagtacggggctgcatcttgaccctggtcgaacggatggatgaagagttcacaaaaattatgcaaaatacagatcctcactctcaggagtatgtcgagcacctcaaggacgaggcccaagtctgtgcaatcatagagagggtccagaggtatttggaggaaaagggaacaacagaggaggtttgccggatctacttgctgagaattctccacacttattacaaattcgactacaaagcccatcaacgccagttgacccccccagaggggtcctccaagagcgagcaggaccaagcagagaatgagggagaggactccgccgtgctaatggagagactgtgcaaatacatttacgctaaggatagaaccgacagaatacgaacctgtgctatactgtgccacatctaccatcacgccttgcattctagatggtaccaagccagagacctgatgctgatgagccacctacaggataatattcagcacgccgaccccccagtacagatcctatataatcggacaatggtgcaattgggtatttgtgcctttcggcaggggcttaccaaggatgcccataacgccttactcgacattcagtcctcgggtcgggcaaaggagctgctcggccaagggttgcttctcaggtcattgcaggagcgcaatcaggaacaggagaaggtggagcggcgcagacaggtgcccttccacctacacatcaatctcgagctgctggaatgtgtgtacctggtgtccgccatgctgttggaaataccatatatggctgcacacgaaagcgatgcaaggcggcgaatgatatctaagcaatttcaccatcagctccgagtaggggagcggcaacctctactgggacctcctgagtccatgagagagcacgtggtcgcagcctctaaggctatgaagatgggagactggaagacatgccacagtttcatcatcaatgagaaaatgaacggcaaggtatgggacttgttccctgaagctgacaaggtgcggactatgttggtacggaagattcaggaagaaagtcttcgaacttacctgttcacgtacagttccgtatacgatagtatctctatggagacgctctctgatatgttcgagctggacttaccaaccgtccactcaattatttctaagatgataataaacgaagagctgatggcctctctggatcaacccacacagacagtggttatgcatcggaccgagcccacggcacagcagaaccttgctttacaactcgcagagaagctggggtccctggtggaaaataacgagcgcgtatttgatcataagcaggggacttacgggggttattttcgggaccagaaagatggctacagaaaaaatgaggggtacatgaggcggggaggataccgccaacagcagagccagaccgcttactag

SEQ ID NO: 187097 - DNA, 2055 bp, synthetic construct
  misc_feature 1..2055: note = Description of Artificial Sequence: Synthetic coding sequence
  source 1..2055: mol_type = other DNA
atgggcctgagcgccgccgcccccctgtggggcccccccggcctgctcctcgctatagctctccaccctgccctcagtgtaccaccacggagggactattgcgtactgggagccggtcccgcgggcctccagatggcttattttctacaaagagccggccgggattacgctgtttttgagcgagcaccgagaccaggctctttcttcaccaggtatcccagacacagaaaattgatcagcatcaataaaaggtataccggcaaagcaaacgccgaatttaacctcaggcacgactggaacagcttactgagccatgacccccgcctcctttttaggcattattccagagcgtacttcccagacgcacgggacatggtacgctacctgggtgatttcgcggatactctgggcctcagggtgcaatacaataccaccatagcccacgtcacactggataaggaccgtcaagcctggaacggacattacttcatccttacagaccagaaagggcaggtccatcaatgttccgtgctgttcgtggcaacgggactgtccgtcccaaatcaggtcgattttcccggctccgagtatgcggaaggatacgagagtgtaagcgttgatcctgaggatttcgtgggtcagaacgtgcttattcttggacgcggaaattccgcctttgaaacagccgagaacatcctgggcgtgacgaattttatccacatgctatctagaagccgcgtccgattgtcgtgggcaactcactacgtaggcgatcttagagcaattaataacggccttctggacacctaccagctgaagtctttggacggtcttcttgaatccgacctgaccgacctggcaatcctcaaggattctaaaggcaaatttcatgtgacgcctaaatttttcctggaggaggccaatacaaaccagtctgcagattctattacactgcctcaggacgacaatgacaacttcgccatgagggtgccatacgaccgggtgatccgctgcctgggctggaatttcgatttttctatcttcaataaaagcctccgccttaactcgggcaatgcctttggaaagaagtatccactgattagagcatcctacgagtccaagggcagtcgtggactgttcatcttgggcacggcaagtcactcggtagactacaggaagagtgctggaggatttatccacggctttaggtacacagtgagggcagtccacaggctattagaacacagacatcacagcgtcacctggccggcaacagaactcccaataacccagctgacgtcctctattgttagacgggtcaatgaggctagcggcctgtatcagatgtttggagtgctcgcggacgtcatcctgctgaaagaaaactctaccgcattcgaatacctggaggagtttcccatccagatgctggcccagctcgaaaccctcaccggaagaaaagctaaacacggtctatttgtcattaatatggagtatggacgcaatttctccggacctgacaaggacgtctttttcgacgaccgcagtgtcggtcatacagaagacgcgtggcagagtaatttcctccaccctgtgatctactactaccgatatctcccaaccgaacaagaagtacggttccggcccgcccattggccacttcctcgacctacagccatccatcatattgtagaggacttcctgacagattggaccgcgcctataggccacatcctgccccttcggagatttctggagaactgcctggacaccgaccttaggtccttctacgccgaaagctgtttcctctttgccctcacacggcaaaaattaccccctttctgccagcagggatacctcaggatgcagggcttggtatcgaccgagagcctgtggcaacatcgcgtagagtcaaggcttctcagggactacgcccccactggacgacgactcgaggacagcagccagcaactaggggaccaggaaccattgggcagtcctctggccccaggccccctcgcccagagtgtagactccaacaaagaagagttgtag

SEQ ID NO: 187098 - DNA, 1602 bp, synthetic construct
  misc_feature 1..1602: note = Description of Artificial Sequence: Synthetic coding sequence
  source 1..1602: mol_type = other DNA
atggccaagttcatgacccccgtgatccaggacaaccccagcggctggggtccctgcgcagtaccagagcagttcagggatatgccttaccaaccctttagtaagggcgataggctgggcaaggtggcagattggacaggtgccacttatcaggacaagagatacaccaacaaatatagctctcagtttggcggcggttctcagtacgcctattttcatgaggaagacgaaagttccttccagttggtggatacagctcggacgcaaaagacagcctatcagagaaaccgaatgaggtttgcccagcgaaacttgcgtagagacaaagaccggagaaatatgctgcagtttaacttacaaatcctgccaaagtctgccaagcagaaggaacgcgagcgcatcaggctccaaaaatcgcaaaagcctcgcgatagttctgtggaagtgcggtcagactgggaagtgaaggaggagatggacttccctcaactgatgaaaatgagatacctagaagtcagtgagcctcaggacatcgaatgttgcggcgccctggaatattacgacaaagcatttgatcgcatcacaacccgtagcgagaagcccttacgctcaataaagcgcatcttccatacggtgacgacaaccgacgatcccgtcatcagaaagctggccaaaacccaggggaatgttttcgccaccgacgcaatattggcaactttgatgtcctgtacacgcagcgtctattcctgggatattgttgtacagagagtcggatctaagcttttcttcgacaagagggataactctgatttcgatctgctcactgtctctgagactgcaaacgagcctccccaggacgaaggtaacagctttaactccccgcgaaacttagccatggaagctacctacatcaaccacaacttctctcagcagtgcctgcgaatggggaaggaaagatacaacttcccaaaccctaatccgtttgttgaggatgatatggataaaaacgagatcgcctctgtagcttatcgatatcggcggtggaaactgggtgacgacatcgatcttatcgtacgatgtgagcatgacggcgtgatgaccggagccaacggcgaagtaagcttcattaacatcaagacactgaatgaatgggactctcgacattgcaatggggttgattggcggcagaaattagactctcaaagaggcgccgtgattgccacggagttgaaaaataacagttataagctggctcgctggacttgttgtgctttgctggccggttcagagtatctcaagctcggttatgtttcaaggtaccacgtgaaggactcatccagacatgtgatactgggcacacagcagttcaagcccaacgaatttgcctcccagatcaacttgtccgtggagaatgcgtggggaatcctgagatgcgtgatagacatctgtatgaaactcgaagagggcaagtacctgatattgaaagacccaaataagcaggtcatacgcgtctacagcctgccggatgggaccttctcttctgatgaggacgaggaggaagaagaagaggaggaggaagaggaggaggaggaagagacttag

SEQ ID NO: 187099 - DNA, 372 bp, synthetic construct
  misc_feature 1..372: note = Description of Artificial Sequence: Synthetic coding sequence
  source 1..372: mol_type = other DNA
atggccaagttcatgacccccgtgatccaggacaaccccagcggctggggaccctgtgccgtgccagagcagttcagggacatgccctaccagcctttctctaagggcgacagactgggaaaggtggccgactggacaggcgctacttatcaggataagcgctatactaacaaatatagctcacaatttggtggaggctcgcagtatgcttactttcacgaggaagacgagtcaagcttccaactggtggacactgcccgaactcagaagaccgcatatcaacggaacagaatgaggtttgcccagcgaaatctcagacgtgataaggataggcgcaatatgttgcagtttaatcttcagatactgccctag

SEQ ID NO: 187100 - DNA, 1647 bp, synthetic construct
  misc_feature 1..1647: note = Description of Artificial Sequence: Synthetic coding sequence
  source 1..1647: mol_type = other DNA
atggccaagttcatgacccccgtgatccaggacaaccccagcggctgggggccctgcgccgtgccagagcaattccgcgacatgccatatcaacccttcagcaagggggatcgactggggaaggtcgctgactggaccggtgctacataccaggataagcggtataccaacaagtactcctcccagttcggtgggggcagtcagtatgcctactttcacgaggaagacgaaagctcctttcagctcgtggatactgctagaacacagaagacagcataccagcggaaccggatgagattcgcacaaagaaacttgcggagagacaaggaccgacggaatatgcttcagtttaatctgcagatactgcctaagagcgccaaacagaaggaacgcgagcgcatacgcctgcagaaaaagttccagaagcagttcggcgtgcgccagaagtgggaccagaaatcacagaagcctcgcgattcctcagtggaggtgagatccgattgggaagtcaaagaagagatggacttcccacagctgatgaagatgagatatctggaagtgagcgaaccccaagatattgaatgctgtggtgccctcgaatactacgataaagcctttgatcggattacaacaagatccgaaaaaccactgagaagtatcaaacgcattttccacactgtgacgaccactgatgatcccgtcatacggaagcttgcaaagactcagggcaatgttttcgccaccgacgcaattctggcaacattaatgagttgcacccgatctgtctacagttgggacattgtggtacagagggttggaagtaaactattctttgacaagcgagataacagtgacttcgacctgttgaccgtttccgagacggctaatgagcctccacaggatgagggcaattccttcaatagtccgagaaacctggccatggaggccacttacatcaatcacaattttagccagcagtgtctgagaatggggaaagaaaggtataactttccaaatcctaaccctttcgtggaagacgatatggacaagaatgagatagccagcgtggcataccgttaccgtaggtggaaactcggcgatgacatcgacctgatagttcgatgtgagcatgacggggtgatgacgggtgccaatggagaggtgtctttcatcaatataaagacattgaacgagtgggattctcgacattgtaacggcgtggattggcggcagaaattggactcacaaaggggggccgtgatcgctaccgaactcaagaacaattcatataagttagctcgatggacctgttgcgctctgctggccgggtcagagtacctgaagttggggtacgtgtcacgttaccatgtgaaggattcgtcaaggcacgtgattctgggaacccagcaatttaagcctaatgaatttgcaagccagataaacttaagcgtagagaacgcctgggggatcctacgatgcgtgattgatatctgtatgaaactggaggagggtaagtacctgattctgaaagacccaaataagcaggtgatcagggtatattcactaccagatgggacttttagttcagacgaggacgaggaagaggaggaagaggaggaggaggaagaagaagaggaagaaacatag

SEQ ID NO: 187101 - DNA, 519 bp, synthetic construct
  misc_feature 1..519: note = Description of Artificial Sequence: Synthetic coding sequence
  source 1..519: mol_type = other DNA
atggacaagaacgagatcgccagcgtggcctaccggtaccggcggtggaaactcggggacgacattgatctgattgtgagatgcgagcatgacggggtgatgaccggtgcaaacggcgaagtgagctttattaatattaaaaccctgaacgaatgggatagtagacactgtaacggcgtggactggaggcagaaactggactcccagcggggagctgtgatcgcgaccgagcttaaaaacaactcctacaagctggccagatggacttgctgtgcgctgctggcagggtcagagtacctcaaactcggttacgtctcacgataccatgttaaggactcttctcggcatgtaattctgggtacacaacagttcaagccaaacgaatttgcttctcagatcaatctgagtgtggagaatgcatgggggatccttcgctgtgtcattgatatctgtatgaagctggaggaagggaagtatctgattttgaaagatcccaataaacaagtcatccgcgtgtag

SEQ ID NO: 187102 - DNA, 561 bp, synthetic construct
  misc_feature 1..561: note = Description of Artificial Sequence: Synthetic coding sequence
  source 1..561: mol_type = other DNA
atggccaagttcatgacccccgtgatccaggacaaccccagcggctggggcccttgtgcggtgcctgaacagttccgagatatgccttatcaaccattttctaagggcgaccgcctcggaaaggtagctgattggactggagccacctaccaggacaagcggtacacaaacaaatactcatctcagttcggaggtggatcccaatatgcttacttccatgaagaggatgaaagcagctttcagttagtggatacagctagaactcaaaaaaccgcatatcaaagaaaccggatgcggttcgcccagcggaatcttcgacgggacaaggataggcgaaatatgctacagtttaatctacaaatacttcctaagtccgctaagcagaaggaaagagagcggatacggctgcagaaaaagtttcaaaaacagttcggggtgaggcagaagtgggatcagaaatcacaggtgatgtatttgtatcagaatagcgccttggaattcgggtctgtgtacctggtggtcttcattaactcactggacgaaatctacttcacttactag

SEQ ID NO: 187103 - DNA, 810 bp, synthetic construct
  misc_feature 1..810: note = Description of Artificial Sequence: Synthetic coding sequence
  source 1..810: mol_type = other DNA
atggccaagttcatgacccccgtgatccaggacaaccccagcggctggggcccttgcgccgtgccagagcagttccgggacatgccctaccagccattttctaaaggagatagactggggaaggtggcagattggaccggggcaacatatcaagacaaaaggtataccaataagtatagtagtcaatttggaggcgggtcacagtatgcttacttccatgaggaggacgaaagttccttccagttggtcgacactgcccgcacgcagaaaacggcttaccagagaaatcgcatgcgttttgcacagaggaacctgagacgggataaggatcggcggaatatgctccagttcaatttgcagattctgccaaagtctgcaaaacaaaaggaacgggaaaggattaggctgcaaaagaaattccaaaagcaattcggtgtgaggcagaagtgggaccaaaaaagccagaagccaagggattcctctgtcgaagtgcgctctgattgggaagttaaagaggagatggatttcccccagcttatgaaaatgcgctatctagaggtgagcgaaccacaggacatagaatgctgcggagccttggaatactacgataaggcatttgatcggataactacaagatccgagaaaccgctgcggagcattaagcgcatcttccacactgtcactacaacagacgatccagtaatccgcaagctggctaagactcagggcaatgtgtttgcgacagacgcaatactcgctacactgatgtcatgcacccggtccgtgtactcatgggatatcgtagtctag

SEQ ID NO: 187104 - DNA, 522 bp, synthetic construct
  misc_feature 1..522: note = Description of Artificial Sequence: Synthetic coding sequence
  source 1..522: mol_type = other DNA
atggccaagttcatgacccccgtgatccaggacaaccccagcggctggggcccttgcgctgtccccgaacagtttcgagacatgccttatcaacctttctctaaaggggaccgtctgggcaaagtggctgactggacaggcgccacctaccaggacaaacgatacacgaacaaatactctagtcaattcggggggggatcccagtacgcctattttcacgaggaagacgaaagtagctttcagctggtggatacagctagaacccagaaaaccgcttatcagcgaaacagaatgagattcgctcagagaaatctgcgtagagacaaagaccggcgaaacatgttacaatttaatctgcagattttgcccaaatctgctaagcagaaagaacgagaaagaatcagactccaaaaaaaattccagaaacaattcggggtgcgacagaaatgggatcagaaatcacagaaaccccgcgattcttccgtggaggtgagatctgactgggaggtgaaggaggaatag

SEQ ID NO: 187105 - DNA, 498 bp, synthetic construct
  misc_feature 1..498: note = Description of Artificial Sequence: Synthetic coding sequence
  source 1..498: mol_type = other DNA
atggaggccacctacatcaaccacaacttcagccagcagtgcctgaggatggggaaagaaagatacaacttcccaaatcctaatcctttcgtggaggatgatatggacaaaaatgaaatcgcttctgtggcttacagatacagacggtggaaattgggagacgacattgaccttatcgttaggtgtgaacatgacggagttatgactggcgcgaatggcgaagtgtcctttattaatataaaaactctgaatgagtgggacagtcggcattgcaatggcgtcgattggaggcagaaacttgacagtcaacgcggagccgtgattgctacagagctcaaaaacaattcctataagctggcaagatggacttgttgtgcactacttgccggtagcgagtacctgaagttgggctacgtgtcccgatatcacgttaaagatagctctaggcatgttatcctgggcacccagcagttcaagcctaatgaatttgcatcgtag

SEQ ID NO: 187106 - DNA, 1500 bp, synthetic construct
  misc_feature 1..1500: note = Description of Artificial Sequence: Synthetic coding sequence
  source 1..1500: mol_type = other DNA
atggccaagttcatgacccccgtgatccaggacaaccccagcggctgggggccgtgcgctgttccagagcaatttcgggacatgccatatcaacccttctctaagggggatagattgggaaaagttgctgactggactggagcaacgtaccaggacaaaagaaaccttcggcgggacaaggacaggagaaacatgttgcagtttaatctccagatcctgccaaaatcagcgaaacaaaaggaacgtgagcgaataaggctccaaaagaagttccaaaagcagttcggcgtacggcaaaaatgggatcaaaaatctcagaaaccaagggattcctctgtcgaggtgcgatcggactgggaggtgaaagaagagatggacttcccacagctgatgaaaatgcggtatttagaggttagcgaacctcaggatatcgaatgctgtggcgccctagaatactacgacaaggccttcgaccgaatcaccacccgctcggaaaagccactccggagcataaagaggatatttcacactgtgacaacgactgatgatcctgtcatcaggaagttggctaagactcaggggaatgtattcgcaacagacgcgatcctggcgactctgatgtcgtgcacaagatccgtgtactcttgggacattgtagtccagcgggtgggctccaaactcttcttcgacaaaagagacaactctgattttgatctgctgaccgtgagcgagacagccaatgagcccccacaggatgaaggaaactcgtttaattctccaagaaacctagcaatggaagctacgtacatcaaccacaacttttctcagcagtgtttacgcatgggcaaagaacgatacaacttcccaaatccgaatccctttgttgaggacgacatggacaagaacgaaattgcaagcgtggcatacaggtatcgccgctggaaacttggcgatgacatcgacctcatcgtcagatgtgagcatgatggggtgatgacaggagccaatggagaagtgtccttcatcaacatcaagacactcaatgaatgggatagtcggcattgcaatggagtggactggcgacagaagttagatagccagcggggcgcagtgatcgccactgaattgaaaaataatagttacaaactggcaagatggacatgttgtgcattactggccggatcagagtacctgaaactgggttacgtgagccgatatcatgtgaaggactcctccagacacgtgatattgggcacacagcagtttaagcctaatgaatttgctagccagattaatctttctgtcgaaaatgcctgggggatcctgaggtgcgttatcgatatttgtatgaagctcgaagaaggtaaatatctgatactgaaagaccccaataagcaggtcattcgggtatattccttgccagacggaactttcagctcagacgaggacgaggaggaagaggaggaggaggaggaggaagaggaagaagaagagacttag

SEQ ID NO: 187107 - DNA, 1215 bp, synthetic construct
  misc_feature 1..1215: note = Description of Artificial Sequence: Synthetic coding sequence
  source 1..1215: mol_type = other DNA
atgttcaccgagaagaccaccacctaccagtacccccgggccatcctatctgttgatctctctggcgagaacctgagcgacgtagatttcctggatgacagctccacagagtctttgctgttgtctggggacgagtacaaccaggatttcgactccacaaacttcgaagaaagccaagacgaggacgatgcactgaacgaaatcgtgaggtgtatctgcgaaatggacgaggaaaacggttttatgattcaatgtgaagagtgtctgtgctggcagcacagcgtctgcatggggttgttggaggaatctatcccagagcagtacatttgttacatctgtagagaccctcctggccagaggtggagtgctaagtatcgctatgacaaggagtggctgaataatgggagaatgtgtggcctcagcttttttaaagagaactacagtcatctcaacgctaagaaaatcgtcagtacccaccatctgttggccgatgtgtacggcgtcacagaggtactgcatggactgcagctgaagataggcattctgaagaacaagcatcacccagatctgcatctttgggcttgtagcggcaaaaggaaggatcaggaccagattattgcaggagtggagaaaaagatcgcccaggacaccgtgaacagagaagaaaagaaatacgttcagaaccataaggagccacctagattacccctgaaaatggaaggtacttacatcacgtctgagcattcttatcaaaagcctcagtcttttggacaagactgtaaatctctggctgaccccggttcaagtgatgatgatgatgtgtcgtctctggaagaagaacaggagttccatatgcggagtaagaactccttgcagtacagcgcaaaggaacacggcatgccagagaagaatccggccgaagggaatacggtgtttgtctacaatgataagaaggggacggaggaccctggagacagtcaccttcagtggcagctgaatttactgacccacatcgagaacgtccagaacgaagtgacatctcggatggatttgatagaaaaagaggtcgatgtgttggaatcttggctcgactttactggcgaactggaacctccagaccctctggcgaggctcccgcagttgaagaggcacatcaagcagttactgatcgacatgggcaaagtgcagcagatcgccactctctgttctgtgtag

SEQ ID NO: 187108 - DNA, 1074 bp, synthetic construct
  misc_feature 1..1074: note = Description of Artificial Sequence: Synthetic coding sequence
  source 1..1074: mol_type = other DNA
atggccacccccgccgtgcccgtgagcgccccccccgccacccccactcccgtgcccgccgcggcccctgcttcagttcctgctccgacccccgcccccgccgctgctcctgtgcctgccgctgcccccgcttcatcttcagacccagccgccgccgcagcagccactgcagcccccgggcagacaccagcttctgctcaggctcctgcccaaactcccgcccccgccttgcctggcccagctcttcctggaccattccctggtggccgcgtggtgcgcttgcatcccgtgattcttgcgagcatagtcgattcctacgaacgaaggaacgaaggtgccgctcgcgtaatcggcacattgctgggcaccgtggataagcactctgttgaagtgaccaattgtttctcagtgccccacaatgagtcggaggacgaggtggcagtggatatggagtttgccaaaaatatgtatgaactccacaagaaggtgagcccaaacgagcttattctgggttggtacgccactgggcatgacatcactgagcatagcgtgctgattcacgagtactatagcagagaggcccccaatcctatacacctgaccgtcgacaccagcctccagaacggacgcatgtcgatcaaggcttacgtcagtaccctgatgggagtacccgggcggacaatgggcgtaatgtttacaccactgaccgtgaagtacgcctactacgacacagaaaggatcggggtcgatttgatcatgaaaacctgcttctcccctaaccgtgtgataggtctgtcctcagacttgcagcaggtggggggcgcctcagctagaatacaggatgctctcagcaccgtgttgcagtatgcagaagacgtcttgagcggaaaggtgagtgccgacaatactgtgggacgatttctcatgagtctcgtgaaccaggtacccaagatcgtgcccgatgattttgagactatgcttaactccaatatcaacgacttactaatggtgacctatttggcgaatctaacacagagccagatcgctcttaatgagaagcttgtgaacctctag

SEQ ID NO: 187109 - DNA, 627 bp, synthetic construct
  misc_feature 1..627: note = Description of Artificial Sequence: Synthetic coding sequence
  source 1..627: mol_type = other DNA
atggagttcgccaagaacatgtacgagctgcacaagaaggtgagcccgaatgagttaatcctcggctggtacgcaacaggccatgacataactgagcattcagtcctgatacacgaatattattcccgcgaggcacctaaccccattcatcttactgtcgacacatccctgcagaacggccgcatgtccataaaggcttatgtcagcaccctgatgggggtgcccggccggacgatgggtgtaatgttcacccccctgactgtaaaatatgcttactacgataccgagagaatcggggtggacttgattatgaagacatgtttctctcctaacagggttatagggctgagcagtgacctgcagcaggtggggggcgcatccgctcgcattcaggacgcgctttcaacggtgctgcagtatgctgaagacgtccttagcggtaaagtgtccgcggacaatacggtgggcagattcctcatgtctctggtgaatcaggtaccaaagattgttcccgatgatttcgaaacgatgctgaactccaacatcaacgacctactgatggtgacttaccttgcaaacctgactcagagtcagattgccttgaatgaaaagctggtgaatctatag

SEQ ID NO: 187110 - DNA, 1074 bp, synthetic construct
  misc_feature 1..1074: note = Description of Artificial Sequence: Synthetic coding sequence
  source 1..1074: mol_type = other DNA
atggccacccccgccgtgcccgtgagcgccccccccgccacccccactcctgtgccagccgctgctcccgctagcgtgccggcgccaacacccgccccagccgcagcaccggtgcctgcagccgcgcctgcttccagcagtgatcccgctgctgccgctgccgctacagctgcacccgggcagacacccgcatccgctcaagctccagcgcagacgcccgctcccgcgctgccgggccctgccctccctggccctttcccaggcggaagagtagtccgtctgcaccctgtgatcttggccagtatcgtagactcttacgagcggcgcaacgagggtgcagccagggttataggcactctgcttgggacagtggacaaacacagcgtcgaagtaaccaactgcttttccgtgcctcataatgaatctgaagatgaggtggccgtggatatggaattcgctaaaaacatgtacgaactccacaagaaagtatccccgaatgagcttattttgggatggtatgctacaggacacgacattacagaacattctgtccttatacatgaatattattctcgcgaagcaccgaatccaattcacctcacagtggataccagtctgcagaacggccggatgtccatcaaggcctacgtgagcactctgatgggagtgcccggccgaacaatgggtgtaatgtttaccccactgactgtgaagtatgcttattatgacaccgaacgtatcggagttgacctgattatgaaaacatgcttctctcctaaccgggtcattggcttgagtagcgatcttcaacaggtaggtggtgcatctgcacgcattcaggatgcattgagcaccgtgctccagtacgcagaagatgtgctgtctgggaaagtaagtgcggataataccgtcgggagatttctgatgtccttggtcaatcaggtaccaaaaattgtaccagacgattttgaaacaatgttaaattcaaatatcaatgacctgctgatggtaacatacctggccaacctgacccagagccagatcgcactcaacgaaaaactcgtgaatctctag

SEQ ID NO: 187111 - DNA, 1119 bp, synthetic construct
  misc_feature 1..1119: note = Description of Artificial Sequence: Synthetic coding sequence
  source 1..1119: mol_type = other DNA
atgaacgccgtgatcagcgccagcgccagcttcttcctggacaagatggccacacctgcggtgcccgtgtctgctccacctgccactccaactcctgtacctgccgccgccccagcatctgtacccgccccaaccccagcacctgctgcggcccctgttccagctgccgcgcctgccagctcaagcgaccccgcagccgccgctgctgccacagcagctcctggacagactccggccagtgcgcaggcccccgctcagaccccagcccctgctctaccgggccctgcactccctggaccattcccaggtggccgagtggttcgtcttcatcccgtcatcctcgcaagcatcgttgattcgtatgaaagaaggaatgaaggcgctgccagggttattgggacactgcttgggactgtcgataagcactctgtcgaagtgacgaactgttttagtgtgcctcataacgagtcagaggatgaggtagcagtggacatggaattcgccaaaaacatgtacgagctgcataagaaggtatcccctaatgaactgatcctcgggtggtatgcgacaggccacgatataaccgagcactccgtgctcatacacgaatattactcaagagaggctcctaaccctattcacctcacagtggataccagtcttcagaacgggcgaatgtcgatcaaagcgtacgtgtccacgttgatgggtgtgccaggacggaccatgggtgttatgttcacacccctgactgtgaagtatgcctactacgatactgaaaggattggcgtggacctcatcatgaagacgtgcttttcccccaatagggtgattggcctgtcttctgacctgcaacaggtgggaggggcaagcgctcgcatccaagacgcactctctacagtgctccagtatgcggaggatgtgctgtccggaaaggtctccgctgacaacactgtcgggcgttttttgatgagcttggtgaatcaagtccccaagattgtccccgacgatttcgaaactatgctgaattctaatataaatgatctgctgatggtcacatatctggcaaatctgacacagtcacagattgctctgaacgagaagttagtcaacctgtag

SEQ ID NO: 187112 - DNA, 924 bp, synthetic construct
  misc_feature 1..924: note = Description of Artificial Sequence: Synthetic coding sequence
  source 1..924: mol_type = other DNA
atggccacccccgccgtgcccgtgagcgccccccccgccacccccacccccgtgcctgccgcagctcccgcaccagcattaccaggaccagcactgcccgggcccttcccggggggacgcgtagtgagattacaccctgttatactcgcgagcattgtcgactcatacgaacggagaaatgaaggcgcggccagagtgatcgggaccctactgggcacagttgataaacacagcgttgaagtaacaaattgtttttctgtgccgcacaacgaatcagaggatgaagtcgcagttgacatggaattcgcaaagaatatgtacgagttgcataaaaaggtgtcccccaacgagttgattctgggctggtacgccactgggcacgacatcacagagcattctgtacttatacatgagtactatagccgggaggctccgaatcccatacacctgaccgtcgataccagcctgcagaatgggcggatgagcatcaaagcctacgtctcgaccctaatgggcgtgcccggaaggaccatgggggtgatgttcacacccctaactgtcaagtacgcttactatgacacggagagaattggcgtcgacttaattatgaagacttgctttagcccaaatagagtcatcggcctgtccagtgatctgcagcaagtcggcggagcctcggctaggatccaggacgcccttagtacggtacttcagtacgcggaggatgttctgagcggtaaggtatcagccgacaatacagtggggcgatttctcatgtctttagtaaatcaggttcccaaaattgttcccgacgacttcgagactatgttaaacagcaatatcaatgacctgctcatggtaacctatctcgctaatctgacccagtcccagatcgcattgaatgaaaagctggtcaatctctag

SEQ ID NO: 187113 - DNA, 963 bp, synthetic construct
  misc_feature 1..963: note = Description of Artificial Sequence: Synthetic coding sequence
  source 1..963: mol_type = other DNA
atgcccaccggcgacttcgacagcaagcccagctgggccgaccaggtggaggaggagggtgaggacgataagtgcgtgaccagcgaactactgaaaggcatcccattagcaaccggcgataccagcccagaaccggagctcctgccaggcgcgccactgccgcctccgaaggaggtgatcaacggaaatatcaagaccgtgaccgaatacaaaatcgatgaagatggcaagaagttcaagatcgtgaggactttcaggattgagacacgtaaagcatccaaagctgtagcgcgccgtaagaattggaagaagtttggaaattctgagtttgatcctccgggacctaatgtagcaacaacgacggtaagcgatgacgtgtctatgacattcataactagcaaagaggatctgaactgccaggaggaggaggatcccatgaacaagttgaagggccagaagatcgtgtcatgccgaatctgcaaaggagatcactggactacccggtgcccttataaagacacccttggaccgatgcaaaaggaattggcagaacaactcggcctgtccaccggcgagaaggaaaagttacccggtgaactagaacccgtgcaggcgactcagaataagaccggaaagtacgttcctccctccttgcgcgatggtgcctcaaggcggggggagagtatgcagccaaaccgaagggcggatgataatgccactatcagagtcaccaacctctcagaagatacccgagagaccgacctgcaagaactcttccgaccctttggatccattagtcgaatttacctggctaaggataaaactaccggccagagcaaagggtttgcctttatctctttccacaggcgtgaggatgcagcaagagcaatcgccggagtttctggattcggatatgatcatctcatactcaacgtggaatgggccaagccttcaaccaactag

SEQ ID NO: 187114 - DNA, 1101 bp, synthetic construct
  misc_feature 1..1101: note = Description of Artificial Sequence: Synthetic coding sequence
  source 1..1101: mol_type = other DNA
atgtacagccggcacgcccagcggatcccccccggcaagaagatggctagtcgtaaggagggtaccggttctaccgctaccagttcttcgtctaccgccggcgcagcgggtaaaggtaaaggtaaaggaggctccggcgacagtgcagtgaaacaagttcagatcgacgggcttgttgtgctgaagatcatcaaacattaccaggaagagggacagggaaccgaagttgtgcagggggtgttgttagggcttgtggtcgaagaccggctcgagataacaaattgtttccctttcccacagcacaccgaggatgacgctgattttgatgaggtacagtaccaaatggagatgatgcgatcgctccggcatgttaacattgaccatctgcatgtgggatggtatcaaagcacttactatggaagcttcgtaacccgagccctgctggatagccaattttcttatcagcatgccatcgaagaatctgttgtgctgatatacgaccccatcaagactgcccaaggctctctttctctgaaggcctatcggctcacccccaaactcatggaagtctgcaaggagaaggatttctctccagaagctctgaaaaaggccaatatcacatttgagtatatgtttgaggaagtgcctatagttattaagaattcccatttgattaatgttctgatgtgggaactcgaaaaaaaaagcgcggttgctgacaagcacgagctactgtccctggcctctagtaatcacctcgggaagaacctgcagttgttgatggacagagtggacgagatgagccaggatatcgtcaagtacaacacctacatgaggaatacctcaaaacagcaacaacagaagcatcagtaccagcaacgtcgacagcaggaaaatatgcagagacagtcccgaggtgagcctccgctgccggaagaggacttaagtaagctgttcaagccaccgcaaccccctgcaagaatggattctcttctgatagccgggcagataaatacttattgccagaacatcaaagagtttacagcccagaatcttgggaagctgtttatggcccaggctctgcaagagtataataactag

SEQ ID NO: 187115 - DNA, 1059 bp, synthetic construct
  misc_feature 1..1059: note = Description of Artificial Sequence: Synthetic coding sequence
  source 1..1059: mol_type = other DNA
atggccagccggaaggagggcaccggcagcaccgccaccagcagcagcagcaccgcaggtgcggcagggaaaggaaaaggtaagggaggttccggcgatagcgccgtcaaacaggtgcagatcgacggccttgtggtcctgaaaataatcaaacattaccaggaggagggccagggcaccgaagtggtccagggggtcctgcttgggctcgtcgtcgaagaccggctggaaatcacaaactgtttccctttcccacagcacacggaagacgacgccgattttgacgaggttcagtatcaaatggagatgatgagatctcttcgtcacgtaaacatcgatcaccttcatgttggctggtatcaatccacatattatgggtcttttgtcacgagagccttattagactctcagttttcataccagcatgcaatagaagaaagcgtggtgctgatttatgatcctataaaaactgctcagggaagtctctccctgaaagcataccgcctaacccctaaattaatggaggtctgcaaggaaaaggatttctctcctgaggccctcaagaaagctaatattacgtttgaatatatgtttgaagaggtgccgatcgtgataaagaattcccatcttatcaacgtgttaatgtgggaactcgagaaaaagagcgcagtcgcggataagcacgaactgctcagcctcgcctcctcaaaccatctggggaaaaatctgcagctcctaatggaccgcgtggacgaaatgtcacaggacattgtgaagtataatacttatatgcggaacacgtccaagcaacagcaacaaaagcatcagtatcagcaacgcagacagcaggagaatatgcaaagacagagtaggggggaacccccgctgccagaggaagacctttctaagttatttaagccaccccagccacccgcgcggatggacagtctcttgatagcggggcagattaatacctattgtcagaacattaaagagtttacagcacagaatttagggaagctgttcatggctcaggccctgcaggaatataataactag

SEQ ID NO: 187116 - DNA, 378 bp, synthetic construct
  misc_feature 1..378: note = Description of Artificial Sequence: Synthetic coding sequence
  source 1..378: mol_type = other DNA
atgaagcccatcctgctgcagggccacgagcggagcatcacccagattaagtacaaccgagagggcgacctgctctttaccgtcgcgaaggaccctatagtcaacgtctggtattctgtaaacggtgaaaggttaggtacatacatggggcacactggcgcagtatggtgtgttgacgctgactgggatacaaagcatgttctgacaggcagcgccgataactcctgccgcctttgggattgcgaaactggcaaacaactggctttgctgaaaacaaacagcgccgttcggacctgtgggttcgactttgggggcaatataattatgttctcaaccgataagcagatgggatatcagtgctttgtgtcgtttttctag

SEQ ID NO: 187117 - DNA, 978 bp, synthetic construct
  misc_feature 1..978: note = Description of Artificial Sequence: Synthetic coding sequence
  source 1..978: mol_type = other DNA
atgaagcccatcctgctgcagggccacgagcggagcatcacccagattaaatacaaccgcgagggagacctcctttttacagtggccaaagaccccatcgtcaacgtgtggtacagcgtgaatggcgaaaggctcgggacatatatgggtcacactggagccgtctggtgtgtggacgcagactgggatacgaaacacgtgctgacagggtcagccgacaacagttgtcggttgtgggactgtgagacagggaaacaactcgcactgctgaaaactaacagcgctgtgcgtacctgcgggttcgactttggcggcaacataattatgttcagcactgacaaacagatggggtatcagtgttttgtgagcttcttcgatctgcgggatccttctcaaattgacaacaacgagccatatatgaaaataccttgtaatgattccaagattacatctgctgtgtggggccctctgggagagtgcattattgctggccacgaaagtggagagttgaatcaatatagcgctaaatcaggcgaggtgctcgtgaacgtcaaagagcactcacggcagattaacgacatacaactgagccgagacatgaccatgttcgtgaccgcctccaaggacaataccgctaaactgtttgacagcactaccctggagcaccagaagaccttccgaaccgaaagacccgtgaattcggcagcattgtctcccaactatgaccatgtcgtcttggggggcggccaggaagccatggacgtcaccaccacctccacacgtatagggaagtttgaagctcgcttttttcacttagcctttgaagaggagttcggacgagtgaagggccatttcggcccgataaatagcgtggcctttcacccagacggcaaaagttatagtagtgggggagaggacgggtacgtccggatccattacttcgaccctcagtactttgaatttgagttcgaggcctag

SEQ ID NO: 187118 - DNA, 777 bp, synthetic construct
  misc_feature 1..777: note = Description of Artificial Sequence: Synthetic coding sequence
  source 1..777: mol_type = other DNA
atggccgccgccgccgccgccgccggcgacagcgacagctgggacgcggatgctttcagtgtagaagacccagtacgtaaagtcggcggtggtggtaccgcagggggagacaggtgggagggagaggatgaagacgaagacgttaaggacaactgggatgatgatgacgacgagaaaaaggaggaggccgaggtcaaacctgaagtgaagattagcgaaaaaaagaagatcgcagaaaagatcaaggaaaaagagcgacaacagaagaagcggcaggaagaaattaaaaaacggctggaggaaccagaagaaccgaaggttcttacacctgaggaacagctcgcagataaactgaggctcaaaaaacttcaagaggaatccgatctggagctggctaaggaaacctttggagtgaacaacgccgtttacgggattgatgcgatgaacccatcctcacgggacgactttaccgagttcgggaagctactgaaggataagataactcaatacgagaaatcgctctactatgcatccttcctggaggtgctggtgcgtgatgtgtgcatctctctggagattgacgacctcaagaagatcacaaattcattgactgtcttatgcagcgaaaagcaaaaacaggaaaagcagtccaaggctaagaagaagaagaagggagtagtccccggcggcggcttgaaagccacgatgaaggacgacctcgccgattatggcggatatgacggcggttatgtgcaggattacgaagatttcatgtag

SEQ ID NO: 187119 - DNA, 657 bp, synthetic construct
  misc_feature 1..657: note = Description of Artificial Sequence: Synthetic coding sequence
  source 1..657: mol_type = other DNA
atggccatgttcgagcagatgcgggccaacgtgggcaagctgctgaaaggcattgatcgatacaatccggaaaatttggctacactggagcgctacgttgaaactcaggccaaagaaaacgcgtatgatttggaggccaacctggccgtgctcaaactctatcagttcaaccccgctttttttcagacaaccgtgactgctcagatcttgttgaaggctttaacaaatctcccacacaccgacttcacactatgtaagtgcatgatagatcaggcccaccaggaggaacggcccatccggcagatcctctatctgggtgatctcctggaaacctgtcacttccaggccttctggcaagccctggatgagaatatggacctcctcgagggcataaccgggttcgaggactccgtgcgaaaatttatctgtcacgtggtgggtattacctaccagcacattgatcgctggctgcttgcagagatgctgggggacctgagcgatagccaactgaaagtttggatgagtaaatacggctggtccgccgacgagtcgggccagatattcatctgctctcaggaggaatccattaagccaaagaacattgtggagaagatcgattttgattcggtaagtagcatcatggctagtagccagtag

SEQ ID NO: 187120 - DNA, 375 bp, synthetic construct
  misc_feature 1..375: note = Description of Artificial Sequence: Synthetic coding sequence
  source 1..375: mol_type = other DNA
atgatcgaccaggcccaccaggaggagcggcccatccggcagatcctgtacctgggtgatctgctggaaacatgccatttccaagcattttggcaagccctggatgagaacatggacctcttggagggaatcacaggctttgaagattccgttcgcaaattcatatgccacgtggttggcatcacatatcagcacattgacaggtggttactggccgagatgcttggcgatctctccgacagtcaacttaaagtgtggatgtcaaagtatggatggtccgccgatgaaagcggtcagattttcatttgctcccaggaggagagcatcaaaccgaagaacatcgtggaaaaaattgacttcgacagcgagtggtag

SEQ ID NO: 187121 - DNA, 636 bp, synthetic construct
  misc_feature 1..636: note = Description of Artificial Sequence: Synthetic coding sequence
  source 1..636: mol_type = other DNA
atggccatgttcgagcagatgcgggccaacgtgggcaagctgctgaagggaatcgaccggtataatcccgaaaacctcgccactcttgaacgatacgtcgagactcaagcgaaagaaaacgcctatgatttagaagccaacctcgcggtgctgaagctttaccaatttaaccccgcgttctttcaaaccaccgtgaccgcacagatcctcctgaaagccctgacaaatctaccgcacactgatttcaccctgtgcaaatgcatgatcgaccaggcccatcaggaagagcgcccgatccgacaaattctgtacctgggtgatcttctggagacatgccactttcaggctttttggcaggcgctagacgagaacatggacctgctggaaggaatcactggtttcgaagacagcgtgaggaagtttatttgtcacgtggtggggattacctatcaacacatcgatcggtggctgctggcagagatgttgggcgacctgtccgactctcagctcaaagtctggatgtctaagtacggctggtccgcagacgagtccggccagatcttcatatgttctcaggaggaatctattaaaccaaagaatattgtggaaaaaatcgactttgattctgaatggtag

SEQ ID NO: 187122 - DNA, 1125 bp, synthetic construct
  misc_feature 1..1125: note = Description of Artificial Sequence: Synthetic coding sequence
  source 1..1125: mol_type = other DNA
atgagcgtgcccgccttcatcgacatcagcgaggaggaccaggccgccgaactgagagcatacctgaagagtaaaggggcagagatctcagaagagaactcggaggggggcctgcacgtagatctggcccagattatcgaagcatgcgatgtttgcctcaaagaggacgacaaagatgtggaatccgtgatgaattccgtcgtcagcctgctactgatcttagagccggacaagcaggaggccctgattgagtctctgtgtgaaaaactggtgaaatttcgagaaggagagcgaccttcgctgcggctgcagctacttagcaacttatttcatggtatggataaaaatactccagtgaggtacacagtgtattgctcactgatcaaagtcgcagcctcctgtggggccatccagtatatcccgacagaacttgatcaagttcgaaaatggatcagcgattggaatctgaccacagaaaagaaacataccttgctgaggctgttgtacgaagccctggtggattgcaagaaaagcgacgccgcatccaaggttatggtggaattattaggcagctacaccgaggacaatgcgtctcaagctcgggtggacgctcacaggtgcatcgtgagggccctgaaagaccccaacgcctttctgttcgatcacctcctgaccctgaagcctgtgaagttcttggaaggagagttaatccacgatcttttgacaattttcgtttccgccaaactcgcctcttatgtcaaattttaccagaacaacaaggacttcatagacagcctgggactccttcatgagcagaatatggctaagatgaggctcctgacatttatgggcatggcagtggagaacaaagaaatctcatttgatactatgcagcaggagttacagattggtgccgacgatgtggaagcctttgtaattgacgctgttagaacaaagatggtgtattgtaagatcgaccagactcaaaggaaagtggttgtgagtcatagcacccaccggaccttcggaaagcagcagtggcagcagctatacgacactcttaatgcctggaagcagaaccttaataaggtgaaaaattcactcctgagcttgagcgatacctag

SEQ ID NO: 187123 - DNA, 2724 bp, synthetic construct
  misc_feature 1..2724: note = Description of Artificial Sequence: Synthetic coding sequence
  source 1..2724: mol_type = other DNA
gtggagagcgccatcgccgagggcggcgccagccggttcagcgccagttcagggggcggcggcagcagaggggccccccaacactatcccaagactgctggaaattctgagtttctgggtaaaaccccaggacagaatgcacagaagtggattcccgcccggtctaccagacgcgacgataatagcgccgcaaacaatagcgcaaatgagaaagagcgacacgacgccatctttcggaaagtccgcggcatattaaacaagctgacccctgagaagttcgacaaactgtgcctggaattactcaacgtgggcgtcgaatccaaactgatccttaaaggtgtaatcctgttgattgtcgacaaggcccttgaggagcccaagtactcctccctctacgctcagctatgcctaagactggcagaggatgcccccaactttgacgggcctgctgccgaagggcagcccgggcagaagcaatctacgactttcagacggctgttaatcagcaagttgcaggatgagttcgaaaataggactagaaatgtcgacgtgtacgataagagagagaacccactgctgcccgaggaagaggaacagagggctattgcaaaaatcaagatgttagggaacatcaagttcatcggcgagttgggaaagttggatctgattcacgagagcattttgcacaagtgcattaagactctgcttgaaaagaaaaaaagagtgcagctgaaagatatgggagaggatctggagtgcttgtgccagatcatgcggacagtcggcccacgactggaccatgagcgggctaagtctttgatggaccagtacttcgccagaatgtgctcgctaatgctgagtaaggaactgccggccagaatcagattcctccttcaggacactgtagaacttagggaacatcactgggtcccccgcaaagccttcttggacaacgggccaaaaacaatcaatcaaatcaggcaggacgctgtgaaagacctgggcgtgtttatccccgcacctatggcgcaaggtatgcgaagcgatttttttctggaaggccctttcatgcccccaaggatgaagatggatcgtgatccgctgggtggccttgctgacatgtttggacagatgccaggatccggtatcggaacgggacccggggtgatccaagaccggtttagtcccactatggggcgtcaccggagtaatcaactgttcaacggccacggggggcacatcatgccccctacacagtcccagttcggagagatgggaggtaagtttatgaagtcccaaggcctgtcgcagctctaccataatcagtcacaagggttactgtctcagctacaggggcaatctaaagacatgccaccacgctttagtaagaagggacagttaaacgctgacgagatctcacttcgccctgctcaatctttcttgatgaacaagaatcaggtgcctaagctgcagccacagatcaccatgatacccccatctgcccagcccccccgtactcagacccccccacttgggcagaccccgcaattagggctgaagactaatccacctctgattcaggaaaagcccgccaagacttcaaagaagccccctccatctaaagaagagctactcaagctcacagaaacagttgtcaccgaatacctcaatagtggaaatgcgaacgaggccgtaaacggagttcgtgagatgagggcacctaaacattttttacccgagatgctgagcaaggtgataatactgtctttggacaggagcgacgaagacaaagagaaagcgtcctccctaatctcgttgctcaaacaggaggggatagcaacctcggacaactttatgcaggcctttctgaatgtcttagaccaatgtcccaagctggaagtggacatcccactggtgaagtcttaccttgcacagtttgctgcccgagccatcataagcgaacttgtaagcatctccgaattagcgcagcccttggagagtggcacacacttccccctgttccttttatgtctgcaacagctggcaaagttacaggacagagaatggctcacagagttgtttcaacagtctaaagtgaatatgcagaagatgctgcccgaaatagaccagaacaaagacaggatgctagaaatactcgaggggaaaggcctgtccttcctgtttcccctgctcaagctggagaaggagcttctgaaacaaattaagctcgatccgtccccacaaaccatctacaagtggataaaggacaacatatcaccaaagcttcatgtggacaaagggtttgttaacatccttatgacatcattccttcaatatatcagttccgaggttaacccacctagcgatgaaacagattcctccagcgctccgtccaaggagcaactcgaacaagagaagcagctgttgctttcctttaagccggtgatgcaaaaattcctacacgaccacgttgatctgcaggtcagcgcgctgtacgcactgcaggtgcactgctacaattccaattttccgaagggaatgctgctgcgtttctttgtgcacttttacgatatggagattatcgaggaagaagcgtttcttgcctggaaagaggatataacccaggagttccctggtaaagggaaggcgctttttcaagtcaaccaatggcttacttggttggagactgcagaggaagaagagagcgaggaggaagctgattag

SEQ ID NO: 187124 - DNA, 762 bp, synthetic construct
  misc_feature 1..762: note = Description of Artificial Sequence: Synthetic coding sequence
  source 1..762: mol_type = other DNA
atgcaggccttcctgaacgtgctggaccagtgccccaagctggaggtggatatccctcttgtaaagtcttacctggcgcagttcgcagcgcgggccatcattagtgaacttgtgtccatttctgaactagcacagcctctggagtccggcacacactttcctctgttcttactatgccttcagcagctggccaagctgcaagatagggaatggttaacagagctgttccagcaatcgaaagtcaacatgcagaagatgctccctgagattgaccagaataaagacagaatgctggaaatcctagaggggaaaggcctgtcctttctgtttccgcttctgaagctggaaaaggaattactgaaacaaatcaaactggatccatcgcctcagaccatatacaagtggatcaaagacaacatctcaccaaagttgcacgtcgataagggcttcgtgaatatcttgatgacaagctttttacaatacattagcagtgaggtgaatccccccagcgatgagactgacagctctagcgccccaagtaaggaacaactcgagcaggaaaagcaacttttgttaagttttaaaccggtaatgcagaagttcctgcatgaccacgtggacctacaggtatccgccttgtatgcgttacaggtgcactgttacaactcaaatttccccaagggtatgctgctatttctgtgtacaagtatgacatggaagctgctcaagaaaaaactctcatggctgggtaaaaagatttag

SEQ ID NO: 187125 - DNA, 2610 bp, synthetic construct
  misc_feature 1..2610: note = Description of Artificial Sequence: Synthetic coding sequence
  source 1..2610: mol_type = other DNA
gtggagagcgccatcgccgagggcggcgccagccggttcagcgccagctcaggtgggggagggagcaggggcgcaccccagcactacccaaaaaccgctggtaacagtgagttcctggggaagactcctggacagaatgcccagaagtggatccccgcaaggagtactcgcagagatgacaactcagccgctaacaattcagcgaatgaaaaagagagacacgacgccatatttagaaaagttcgggggatccttaataagctaacccccgagaagtttgacaaactctgcttggagttgcttaatgtgggtgttgagagcaagctgattctcaagggtgtgatcttattaattgtagataaagctctcgaggaaccgaagtactctagtctttacgcccaactctgcctaagacttgctgaggatgcgcccaatttcgacggccccgccgccgaaggccagcctggccagaaacaatccactacattccgccgcttgcttatctctaagcttcaagacgaattcgagaacaggactaggaatgtggacgtgtatgacaagagagagaatccgctcctgcctgaggaagaggaacagagagccatcgccaaaatcaagatgctcggcaatattaagtttattggagagctagggaagctcgacctcattcacgaaagcattctccataagtgcattaaaacacttctcgagaagaaaaagagagtgcagctgaaggatatgggtgaggatttggaatgcctgtgtcagattatgcgaacagtaggcccccgattagaccatgaacgcgcaaagagcctcatggatcagtactttgccagaatgtgctccctgatgctcagtaaggaactccctgctaggatccgtttcctgctccaggacactgtcgagttgcgggagcatcattgggttcctagaaaagctttcctggacaacggccctaaaaccataaaccagatcagacaggacgcagttaaggatcttggtgtgtttatcccagcgccaatggcccaaggcatgaggtcagacttcttcttagagggtccatttatgccacctaggatgaaaatggatcgggatccattgggtggtctagctgacatgttcggccaaatgccagggagtggaatcggcacaggacccggggtgatccaggataggttttcccctacgatgggccggcaccgaagcaaccagctctttaatggtcatggcggccatattatgccaccaactcagtcgcagttcggagagatgggagggaaatttatgaagtctcaaatctctttgcgtcccgcccagtcattcctgatgaacaaaaaccaagtgcctaagctccagccccaaattaccatgatccccccgtccgcccagcccccacgaacacagacaccacccctgggacagacgccacagctcggattaaaaacaaacccacctctcatccaggagaagcctgcaaaaacttcgaaaaagcctcccccgagcaaagaagagctcttgaagttaacagagacggtggttacagagtatcttaactccggcaatgcgaatgaagccgtgaacggtgttcgcgagatgagagctcccaaacatttcctccctgagatgctgtccaaagtgattatcctctctctggataggtccgatgaggacaaggagaaggcctcatctttgatctccctactgaagcaagagggaatcgccacgtccgacaactttatgcaggcgtttcttaacgttttggaccagtgtccgaaactggaagtggacatccccctggtaaaatcataccttgcccagtttgccgctagggccatcattagcgagcttgtgtccattagcgagcttgcccagcctctggagtctgggactcatttccctctgttcctactctgtctccagcagttggccaagctccaggaccgcgaatggttgaccgagctgttccaacaatcaaaagtaaacatgcagaaaatgctccccgagattgatcagaacaaagaccggatgctcgagatactggaaggtaagggcctttccttcctgttccctctgctcaaactagaaaaggaactgcttaagcagatcaagctggacccctcgccccagactatttataagtggattaaagacaatatttcccccaagttgcacgttgataaggggtttgtcaatattctgatgacaagcttcctccaatatatcagttccgaggtgaatcctccgtcagacgagactgactcgtcaagcgcaccgagtaaggagcagctggagcaggagaaacagctgttactgagttttaaacctgtcatgcagaagtttctgcacgaccacgtagatttacaggtgtccgccctttatgctttgcaggtgcactgttataatagtaatttccctaagggcatgctgcttagatttttcgttcacttctacgatatggagatcattgaagaggaagcttttttggcctggaaagaagatattacccaggaattccctggaaagggcaaggcattgttccaggtgaaccagtggctaacctggctggagactgctgaagaagaggagagtgaggaagaggccgattag

SEQ ID NO: 187126 - DNA, 2943 bp, synthetic construct
  misc_feature 1..2943: note = Description of Artificial Sequence: Synthetic coding sequence
  source 1..2943: mol_type = other DNA
atggccggctggcccacccccgccggcacccggccctggcggaccgaagcaaggctctgcagtgacggcgagggcgcatggcttgggccactggccccatggcgggaagccaggctagccagcagacggggaggtattagctttctgcttagtcctccgttacccaccccctcaataaacattatcctgctcaaaattctccgatgccaggccgccaaagtggagtctgctatcgcagaggggggtgcttccaggttctccgcttcctcaggcggagggggctcacgtggagcaccacagcactaccctaaaacagctggaaatagcgagtttctgggtaaaacacccggtcaaaatgcccagaagtggattcccgccaggagtactcgcagggatgacaatagtgcagccaacaatagcgccaacgaaaaagaaaggcacgacgctattttcaggaaggtccgggggatcctcaataaattaaccccggagaaatttgacaaactctgcttagagctgcttaatgtgggagtcgagtccaaactgattctcaagggggtgatcctcctaattgtcgacaaggccctcgaggaacctaaatatagcagtttatacgcccagctgtgccttcgcctggctgaggatgcaccaaacttcgacggtcctgcagcagagggccagccaggccagaagcaatcgaccacattccgtaggctcctcatatccaaactgcaggacgaatttgaaaacagaacgcgaaacgtcgatgtgtacgacaaaagggagaacccactgttgcccgaagaagaggagcagagagccatcgctaagattaagatgcttggaaacatcaaattcatcggtgagctgggcaaactggaccttattcacgagagcatcctgcacaaatgcatcaagactcttctggagaagaagaagagagtgcaactcaaagacatgggggaagacctggagtgcctatgccagattatgaggaccgtgggacctcggctggaccacgagcgcgcaaaaagcctgatggatcagtacttcgctagaatgtgttccttgatgctcagtaaagaactgcccgcccgtataaggttcctgctgcaggataccgtggaactgagagagcaccattgggtacctcggaaggcctttttggacaatggccctaagacaatcaaccagatccggcaggacgccgtaaaagacctcggagtgtttatcccagctccaatggctcaaggaatgagaagcgacttttttctggagggaccctttatgcctccacgtatgaaaatggaccgcgatcctctggggggactggctgacatgttcggtcagatgcccggatccggtatcgggactggccccggggtaatccaagacaggttcagcccaactatggggcgtcacagaagcaatcaactgtttaatggccatggaggtcacatcatgccccctacacagtcacaatttggcgaaatggggggaaagtttatgaaatcacaagggttatctcagctctatcataaccagagccagggcctcctctcccaactgcaagggcagagtaaggacatgccgccaaggtttagcaaaaaggggcagcttaatgctgacgagattagtctgagacccgcgcagtcgttcctgatgaataagaaccaagtgcctaaactgcagccgcagattacaatgattcccccatctgcccaaccacctcggactcaaactcctccgttaggacagaccccacagttgggcctgaaaaccaatcctcctctgatccaggaaaaaccggctaaaacatccaagaagccacctcctagcaaagaggagctgctgaaactcacagagacagttgtgactgaatacctgaacagcggaaacgccaacgaagctgtcaatggcgtgcgggaaatgcgggcccctaagcattttttgccggagatgctatccaaggtgataattctgtccctggacaggagcgatgaggataaggaaaaagcctccagtctgatttctttgttgaaacaggaaggtattgcaacatctgacaactttatgcaggcctttctgaatgtgctggatcagtgtcctaaattggaagtggatatcccacttgttaagtcttacttggcccagtttgcggccagggccatcataagcgagctggtctctattagtgagttggctcaaccactagagagcggcactcacttccccctctttttactctgcctgcagcagctggcgaagctgcaggatcgagaatggctcactgaactgtttcaacaatccaaggtgaatatgcagaagatgctgccagagattgaccagaataaggatcggatgttagagatcctggaagggaaaggactgagcttcctgttcccactactcaagctcgagaaggagctattgaagcagattaagcttgacccatctccgcagacaatatacaagtggatcaaggataacatttcaccaaagttgcacgtcgacaaggggtttgtaaatattctgatgactagcttccttcagtatatctctagcgaagttaatccaccgagcgacgagaccgatagtagctctgctccgtccaaagagcagctggaacaggagaagcagctgctattgtcgttcaaacccgtaatgcagaagttcctgcatgatcatgtcgatctgcaggtctccgccctgtatgcgctgcaagttcattgctacaattccaactttccaaagggaatgctcctgcgctttttcgtccatttttatgacatggaaatcatcgaggaggaggcttttctcgcctggaaggaagacataacgcaggagttccctgggaaaggaaaggccctgttccaggttaatcagtggttaacctggctcgagactgctgaggaggaggaatccgaggaggaggccgactag

SEQ ID NO: 187127 - DNA, 735 bp, synthetic construct
  misc_feature 1..735: note = Description of Artificial Sequence: Synthetic coding sequence
  source 1..735: mol_type = other DNA
gtggagagcgccatcgccgagggcggcgccagccggttcagcgccagctccggagggggcggctcgagaggagccccacagcattatcccaaaactgctgggaactccgaattcctcggaaaaaccccaggccagaacgcgcagaagtggattcctgcccgctccacccgtcgcgacgacaactcagccgcaaataatagcgctaacgaaaaagaacgtcatgacgcgatcttccgcaaagtgaggggcatcctgaataaattgacccccgagaaattcgacaagctgtgtctcgaactgctgaacgtgggggtggagagcaagcttatcctgaagggtgttatcctgcttattgtcgataaggccttggaagaaccaaagtattcgtctctttacgctcaactctgcctgcgcctggcagaggacgctccaaatttcgatggccctgcagctgaagggcagccaggacagaagcagagcacaacgttccgcagacttttgatatctaaacttcaggacgaattcgagaataggactcggaatgtggatgtctatgataaacgcgagaaccccctgctacccgaggaggaagaacagagggccatcgccaagattaaaatgctggggaacatcaaattcattggcgagttaggcaaactggatctgatccatgagagtattctccataaatgcatcaagacattgctagagaagaagaaaagagtacagctatag

SEQ ID NO: 187128 - DNA, 2724 bp, synthetic construct
  misc_feature 1..2724: note = Description of Artificial Sequence: Synthetic coding sequence
  source 1..2724: mol_type = other DNA
gtggagagcgccatcgccgagggcggcgccagccggttcagcgcctcatcaggaggtggtgggtcccgcggcgccccgcaacactaccctaagacagcgggaaactccgagttcttgggcaagacccccggacagaacgcccagaagtggattcccgcccgtagtactcggcgggacgacaacagtgctgccaacaactcagctaacgaaaaagagagacatgacgcaattttccgcaaggtaagaggcatccttaataagctgaccccggaaaagttcgacaaattgtgtctggagctgctgaatgtcggagtcgagtcaaagcttatactaaagggagtcatattacttattgtggataaggccctggaggaaccaaagtactcaagcctctatgcccagctttgcctgcggctggcagaggacgcacctaatttcgacggacctgcagcagaaggacagcctggccagaaacagtcaactacctttcgcagattgctgatttcaaagctccaggatgagttcgagaataggacgcggaacgttgatgtctacgataagagggaaaacccactgctacccgaggaagaggaacagcgagccatcgcgaagatcaagatgctgggaaacataaagtttatcggagagctgggtaagctcgacctgatccatgagtcaattttgcacaagtgcataaagacactcctggagaagaaaaaacgcgtccaacttaaggatatgggcgaagatttggagtgcctttgccagattatgagaacagttggtccacgtcttgaccatgaaagggccaagtctcttatggaccagtattttgcaagaatgtgtagcctgatgcttagtaaagagctgccggcgcggatacgcttcctactacaagatactgttgagctgcgggagcaccactgggtcccacggaaagcctttctggacaatggcccgaagaccatcaaccagatccgccaagacgccgttaaagaccttggcgtatttattcccgctcctatggcacagggcatgaggtccgatttctttcttgaggggcctttcatgccccctcgcatgaaaatggatcgcgacccactgggggggctggctgatatgttcggacagatgccaggctcaggtatagggaccggcccaggggtgatccaggatcgcttttcaccaactatggggaggcaccggtccaaccagttgtttaacggacacggaggccacatcatgcctcccacccaaagccagttcggagaaatgggcgggaagttcatgaagtcacaaggattgtcccagctgtaccataaccagtctcaggggcttctatcccaactgcaaggccagagcaaggacatgcccccaaggtttagcaagaagggacagctaaacgctgacgaaatttctctgcgtccggcccagtcttttctgatgaataaaaaccaggtgccgaagctgcaaccccagatcaccatgatcccaccctccgctcagccacccaggacgcaaacgccccccctgggccagacaccccaactggggttaaaaaccaacccacccctcatacaggaaaaaccagctaaaaccagtaagaagccccctcccagtaaggaggaactgctgaaactgacagagaccgttgtcacagagtacttgaattccggcaacgctaacgaggccgtgaatggggtccgtgaaatgcgtgcacccaaacacttcctccccgagatgctgtctaaggttattatcttatccctggatcgcagtgatgaagacaaggaaaaggcgagttcgctgatttccttgttgaaacaggagggcattgcgacctctgacaacttcatgcaagcgtttctgaatgtgctcgatcagtgcccaaaactggaagtggatataccgctggtgaaatcctacctagcccaatttgccgcccgtgccatcattagcgaactcgtaagcattagcgagctggctcaaccattggagtctggtacccactttccgctcttcctactttgtcttcaacagctggcaaaacttcaggaccgagagtggttgacagaattatttcaacagagtaaggtgaacatgcagaaaatgctgcccgaaatcgaccagaacaaagaccgtatgcttgaaatattggaaggcaaggggttatcctttttattccctctactgaaactcgagaaagagctattgaagcagattaaattagacccctctcctcaaactatttacaagtggataaaggataacatctcccctaaactccatgtagataagggatttgtgaacatcctgatgacctcctttcttcagtatatctcaagtgaagtgaaccccccaagcgatgagactgactcgagttctgccccatcaaaagagcagctcgaacaggagaaacagctccttcttagctttaagccagttatgcagaagttcttgcatgaccacgttgacctgcaggtctcagctttgtatgctctgcaggtccattgttataattccaattttcccaagggaatgttactgaggtttttcgttcacttttatgatatggaaatcattgaagaggaggcctttctggcttggaaagaggacataacgcaggagttccccggcaagggtaaagctttgtttcaggtgaaccaatggctgacttggctcgaaactgccgaggaggaggagagtgaggaagaagccgactag

SEQ ID NO: 187129 - DNA, 2724 bp, synthetic construct
  misc_feature 1..2724: note = Description of Artificial Sequence: Synthetic coding sequence
  source 1..2724: mol_type = other DNA
gtggagagcgccatcgccgagggcggcgccagccggttcagcgcctccagcgggggcggaggtagccgaggcgccccacaacactatccgaaaaccgccggtaattccgaatttttggggaaaacccccggacagaacgcccagaagtggattccagcacgaagcacacgcagagacgataatagcgctgcaaataacagtgctaatgagaaggaacgccacgatgcaattttcagaaaggtgagaggaattctgaacaaactgactcctgaaaaatttgataagctctgtcttgagctcctcaatgttggagtggaatccaagctaattctgaagggcgttatcctgttaatcgtggataaggcacttgaggagcccaagtatagttctctctacgctcagctctgcttacggctggccgaggatgcccccaacttcgatggcccggcagcagagggacagcctgggcagaagcagtcaactaccttcagaaggcttctcattagtaaattgcaagacgaattcgagaatagaactaggaatgtcgacgtctacgataagagagagaatcctctcttaccagaagaagaggaacagagagccattgcaaaaataaaaatgctagggaatattaagtttattggggagcttggcaaactggacctgatccatgaaagtattcttcataagtgcattaagacgctcctggaaaagaagaagagggttcagctgaaggatatgggcgaggacctcgaatgtctgtgccagataatgcgtactgtgggaccacgtctggatcatgagcgggccaaaagtcttatggatcagtattttgccaggatgtgcagcctgatgctaagtaaggagcttcccgccagaatccggtttttactccaagacaccgtggagcttagagaacaccattgggtaccaagaaaagcattcctggataacggtccaaaaacaatcaatcagatcagacaggatgccgtgaaagacctcggggtgttcattccagccccgatggcccagggaatgaggagtgatttcttcctggaggggccttttatgcctcctagaatgaaaatggatcgcgatcccttaggcgggctggccgacatgtttggccaaatgccagggtccgggattggtactggccccggcgtcatccaggatcgctttagtccgacaatgggtcgtcaccggtcaaaccaactctttaacggccacggagggcacataatgcctcccactcagagccagtttggcgaaatgggaggaaagttcatgaagagccaaggcctgtcccagctctaccacaatcagagccagggactcctgagccaactgcagggccagtccaaggacatgccccctcggttcagcaaaaagggacaacttaacgccgatgagattagcctccggccagcccagagcttcttaatgaacaagaaccaggtccccaagctccaacctcagattacgatgattcctccttcggctcagcccccacgtacccagacccctcctctgggacagacaccacagcttgggctcaaaaccaatcctcccctgattcaggaaaagccggctaagacatcaaaaaaaccccctccaagcaaagaggaattactaaaattgaccgagacagtggtaacagaatacctgaatagtggcaacgcaaacgaggcagtaaatggcgtacgagagatgagagcccccaagcactttctccctgagatgctttccaaagtgataattttgtccctggatcgctctgacgaggacaaggaaaaggcaagctccctgattagccttttgaagcaggagggcattgcgaccagcgacaattttatgcaggcctttctgaacgtgttggaccagtgccccaaactggaagtcgatatcccactggtgaagagctaccttgctcagtttgcagccagagcgatcatcagcgagcttgttagtatcagtgagcttgcacagccccttgagagcggcactcatttcccactgtttttgctctgcctgcagcagctggccaaattacaggaccgtgagtggttaactgaactcttccagcagagcaaggtgaatatgcagaaaatgctgcccgaaatcgatcaaaacaaggatcgcatgctggagattttggagggcaaaggtctttcctttctgttccccctgcttaagttggagaaagagctcctgaaacagattaagctggatcccagccctcagaccatctacaagtggattaaggacaatatctcacctaagcttcatgtggacaagggatttgtaaacatccttatgacctcctttttgcagtacatcagcagcgaggttaatccaccctccgatgaaaccgactcttcgtccgcaccttctaaagagcagctggaacaagagaaacagttgttgctgagtttcaagccagttatgcaaaagttcctgcatgatcatgtggacttacaggtcagtgcgctttacgctctgcaggtccattgttacaattcaaattttccaaaaggaatgctcctcaggtttttcgtgcacttctatgacatggaaatcatcgaggaggaggctttcctcgcatggaaagaggatatcacacaggagtttcctggcaaaggcaaggcactgttccaggttaatcaatggctgacttggctcgaaacagctgaggaggaggaatccgaggaggaggcagactag

SEQ ID NO: 187130 - DNA, 375 bp, synthetic construct
  misc_feature 1..375: note = Description of Artificial Sequence: Synthetic coding sequence
  source 1..375: mol_type = other DNA
gtggagagcgccatcgccgagggcggcgccagccggttcagcgcctcaagcggtgggggcggatctaggggagcaccgcagcattatcctaaaacagccggaaactctgaattcctgggtaaaacaccaggccagaacgcgcaaaagtggatccccgcacggagtacacgccgggacgataacagcgccgcgaataacagcgctaacgaaaaagaacggcacgacgctatcttccggaaggtgaggggcatcttgaacaaactaacgcccgagaagttcgacaagctatgtctggagctcctcaatgttggtgtggagagtaagctgatacttaagggagttatcctgcttatcgtggacaaggctctggaatag

SEQ ID NO: 187131 - DNA, 339 bp, synthetic construct
  misc_feature 1..339: note = Description of Artificial Sequence: Synthetic coding sequence
  source 1..339: mol_type = other DNA
gtggagagcgccatcgccgagggcggcgccagccggttcagcgccagctccggtggcggagggtcccggggggctccacagcattatcccaaaaccgccgggaatagtgaatttttgggaaaaacccccggacagaacgctcagaagtggattcctgcccgcagcacaaggagagacgacaactccgcagcaaacaactcagcaaacgagaaagaacggcacgatgctattttcaggaaggttaggggcatcctgaataagctcaccccagaaaaattcgataagctgtgccttgagctgttaaacgtgggtgtagaatcgaagcttatcctcaagtag

SEQ ID NO: 187132 - DNA, 351 bp, synthetic construct
  misc_feature 1..351: note = Description of Artificial Sequence: Synthetic coding sequence
  source 1..351: mol_type = other DNA
gtggagagcgccatcgccgagggcggcgccagccggttcagcgcctccagcgggggtggagggagcaggggcgctccccagcattaccctaagacggctgggaacagcgagttcttggggaaaacaccggggcagaacgctcaaaaatggatccccgctaggagcacccggcgagatgacaactctgccgccaacaacagtgccaacgagaaagaacgtcatgacgccatatttaggaaagtccgcggaatcctcaacaagctcacgcccgaaaagtttgataagctgtgcctggagttgcttaatgtgggagttgaatccaaactgattcttaagggcgtcatcttgtag

SEQ ID NO: 187133 - DNA, 1335 bp, synthetic construct
  misc_feature 1..1335: note = Description of Artificial Sequence: Synthetic coding sequence
  source 1..1335: mol_type = other DNA
gtggagagcgccatcgccgagggcggcgccagccggttcagcgccagcagtggcggaggtggatcacgtggtgctccccagcactatcccaagacagctggaaacagtgagttcctgggcaaaactccggggcagaacgcgcaaaaatggatccccgcaagatctacacggagagatgataattcagccgcgaacaactctgccaacgaaaaggagcgccacgacgcaatctttagaaaggtgagaggaattctgaacaagcttaccccagagaaattcgacaaattgtgtttggagctgctgaatgtaggcgtggagtcgaaattgattctgaaaggagtaattctcttgatcgttgataaggcccttgaggaaccaaagtattctagtctgtacgcacagttatgcctccgcctcgccgaagacgctccaaacttcgacggacctgctgccgaggggcagccgggacagaagcagagcacaacgttccggcggctcttaatctcaaagttgcaagatgagttcgaaaatcggacaaggaacgtggacgtctacgacaaacgggagaaccctctcctccctgaggaagaggagcaacgggccatagcaaagatcaaaatgctgggcaacataaagttcatcggcgagctcgggaaactggatctgatacatgaaagcatccttcacaaatgcataaagacccttttggaaaagaagaagcgcgtgcaattgaaggatatgggtgaggatctggaatgtctatgccagataatgagaactgttggacccagactggatcatgagcgagccaagagcctcatggatcagtacttcgcgaggatgtgttcgctcatgttgtcgaaagagctgccagccaggattcgatttcttctccaggatacagtcgagttacgggaacaccactgggtgccacgcaaggccttccttgacaacggccctaaaaccatcaatcagattcgacaggacgcagtgaaggacttgggcgtcttcattcccgcccccatggcccaggggatgaggagcgacttcttcttggagggtccttttatgcctccaaggatgaaaatggatagagacccgctcggcggcctggccgacatgtttggtcagatgcccgggagcggaatagggacagggccgggcgtgattcaagacagattcagccccactatgggtcggcaccgctcaaatcagcttttcaatggacacggaggccacatcatgccccccacgcagagtcaattcggtgaaatgggaggtaagttcatgaagtctcagatttccctgcgcccagctcagagctttctcatgtag

SEQ ID NO: 187134 - DNA, 849 bp, synthetic construct
  misc_feature 1..849: note = Description of Artificial Sequence: Synthetic coding sequence
  source 1..849: mol_type = other DNA
gtggagagcgccatcgccgagggcggcgccagccggttcagcgcctcttccggtggaggtgggtcccgtggtgcgccccaacactaccctaagaccgcaggaaactccgaatttttaggaaagactccaggtcagaatgctcagaagtggatccctgcgcgatccacccgaagagacgacaatagtgcagctaacaactcagccaatgagaaagagcggcacgacgctatctttcgcaaggtccggggcatcttgaacaaattgacgccagaaaaatttgacaagctctgtcttgagctgttaaacgtcggcgtcgagtcgaaactgatcctgaagggagttattttactaattgtggacaaagccctggaggagccaaagtactcaagcctgtacgctcagctctgtctgcgcctcgcagaggatgcaccaaattttgacggaccagcagccgaaggtcaaccagggcagaaacagtctacaactttcagaaggctactgatcagcaaactccaagacgagtttgagaacaggacccgcaacgtcgatgtttacgacaaacgagagaacccactgcttccagaggaggaagagcagcgggccatcgcgaaaatcaagatgttgggcaacattaaattcatcggagaactgggaaagcttgacctgatccacgagtccattttacataagtgcatcaagaccctgctggagaagaagaagcgggtacagctgaaagacatgggagaggatctggagtgcctatgtcagatcatgcggacggtaggtccaagattagaccacgagagagcaaagagcctgatggaccagtactttgccaggatgtgttag

SEQ ID NO: 187135 - DNA, 393 bp, synthetic construct
  misc_feature 1..393: note = Description of Artificial Sequence: Synthetic coding sequence
  source 1..393: mol_type = other DNA
gtggagagcgccatcgccgagggcggcgccagccggttcagcgccagcagtggcggtggaggttctcggggagccccgcagcattatcctaagactgccgggaacagcgagttcctgggtaagactcccggccagaatgctcagaaatggatccctgccaggagcaccaggcgagatgacaattccgctgcaaataattctgctaatgaaaaagaacgacacgatgcaatcttcaggaaagtgcgaggaatcctgaacaagttgacacccgagaaatttgacaagttgtgcctagagttgctgaacgtgggcgtcgaatccaagctgatcctcaagggagtgattcttttaatcgttgacaaagccctggaagagcccaaatattcctcctag

SEQ ID NO: 187136 - DNA, 1221 bp, synthetic construct
  misc_feature 1..1221: note = Description of Artificial Sequence: Synthetic coding sequence
  source 1..1221: mol_type = other DNA
atgagcgccagccaggacagccggagccgggacaacggccccgacggtatggaacctgaaggcgtgatcgagagtaactggaatgagattgtggacagctttgacgacatgaaccttagcgagtctctgttgagaggaatttacgcctatggcttcgaaaaaccgtcagctattcagcagcgcgctatacttccctgtattaaagggtatgatgtgatcgcacaagctcaaagtggtacaggtaaaaccgctacttttgccatctctattctgcagcagattgaattggacttaaaagccacccaggccttagtcctagctcctacccgagagcttgctcagcagatccaaaaggtagtcatggcgctcggagactatatgggcgcaagttgtcatgcctgtattggcggcaccaatgttcgggcagaggtgcagaaattgcaaatggaagccccccacatcatcgtgggaactcctggacgcgtttttgacatgctcaatagaaggtatctctcccccaaatacatcaaaatgtttgtcctcgacgaagccgatgaaatgttgagccgcggattcaaggatcagatctatgatatatttcaaaaactgaattcaaacacgcaggtggtgctgttaagcgccaccatgcccagtgacgtcttagaggtgacaaagaaatttatgcgggaccctatcagaattctggtaaagaaagaggagttgaccctggaggggattcggcagttttatataaacgtggagagggaagaatggaagctggatacgctgtgcgatctatatgagacactgacgatcacccaagcagttatctttatcaacaccagacgcaaagtcgactggcttacggagaagatgcatgcccgagactttaccgtatctgccatgcatggtgacatggaccagaaggaacgggacgtaattatgcgcgagtttaggagtggaagtagtcgagtgctaatcacaactgacctcctagccagaggcatcgacgtacagcaggtgtccctcgtcatcaattacgatttgccaacaaaccgggagaactatatccacaggatcgggaggggcggtcgcttcggtagaaaaggggtcgcgatcaatatggttacggaggaagataaaagaaccctgagggacattgaaacgttctacaacacttccatagaagagatgccattgaatgtcgccgatctaatttag

SEQ ID NO: 187137 - DNA, 441 bp, synthetic construct
  misc_feature 1..441: note = Description of Artificial Sequence: Synthetic coding sequence
  source 1..441: mol_type = other DNA
atggagcccgagggcgtgatcgagagcaactggaacgagatcgtggattccttcgacgacatgaacctgtcagaaagcctcttgagaggcatatacgcgtacggattcgaaaagcctagcgccattcagcagcgagccattctcccctgcattaagggttacgatgtcatagcccaggctcaatcagggaccggaaaaacagctacgttcgccatcagtattctgcagcagatcgagcttgatttaaaggcgacgcaggctttggtgctggcacctacccgcgagctcgcccaacaggtgcgggtggcgagtataccttcattccgagcagacctgggcatgatgtctatcattcagggtccagagaaatcctctctcataaccaccttaggaggcaggcacggttgccctaataccctggaaacatgctgggtgaactag

SEQ ID NO: 187138 - DNA, 603 bp, synthetic construct
  misc_feature 1..603: note = Description of Artificial Sequence: Synthetic coding sequence
  source 1..603: mol_type = other DNA
atgttcgtgctggacgaggccgacgagatgctgagccggggcttcaaagatcaaatctacgacatttttcagaagctcaactccaatacacaagtggtgctgctcagcgccactatgccaagcgacgtgctggaagttaccaaaaaattcatgagggacccaatcagaatcttggtgaagaaggaggagctcactttagagggtattcgtcagttttatatcaacgtcgaacgcgaggaatggaagcttgacacactgtgtgacctgtatgaaaccctgacaatcactcaggccgtcatctttatcaacacgaggcgcaaagttgattggctgaccgaaaaaatgcacgcccgggattttacagtcagtgcaatggtgtgcctccctgccgcctccctcctgtgggtatgcccaagcgaggtgtcctatcttaagcctggttttcttgagcctcgttgcctgcccggactgctccacatttgtttcctcttccaacacggggacatggaccagaaagagagagatgtgataatgagggagtttagatctgggtcctcccgcgtcctgatcaccaccgacttgctcgtgtctaggggcaattag

SEQ ID NO: 187139 - DNA, 1026 bp, synthetic construct
  misc_feature 1..1026: note = Description of Artificial Sequence: Synthetic coding sequence
  source 1..1026: mol_type = other DNA
atgagcgccagccaggacagccggagccgggacaacggccccgacggaatggagccagagggggtcatagagtctaattggaacgaaattgtggactccttcgacgacatgaacctgtcagagagtctgttgagaggaatctacgcctacgggtttgagaagccgtctgcaattcagcaaagagccattctcccctgtattaagggctatgacgtgatcgctcaggcccagtctggcacagggaagacagcaaccttcgcaataagcattctacagcagatcgaactggatctcaaagcaactcaggctcttgtcctcgcccccaccagggaactggcccagcagattcagaaggtcgtaatggcactcggagattacatgggagctagctgtcacgcttgtataggaggaacaaacgtgagggccgaggtgcagaaattacaaatggaagctcctcacatcattgtaggcaccccaggcagagtgtttgacatgcttaaccggaggtatctatcgcccaaatacatcaaaatgttcgtcctggatgaagcagacgagatgttgtcaaggggatttaaggaccaaatttacgacattttccagaaactcaactcaaacacccaggtggtgttgttgtcggcaactatgccaagcgatgtcctagaggtgacgaagaaatttatgagagaccccattaggattcttgtgaagaaggaagaactgacacttgaagggataagacagttctatatcaacgtggagagggaggaatggaaattggacaccctgtgcgatctgtacgagacactgaccattacccaggccgtgatcttcataaatacccggcggaaggtggactggctcactgaaaagatgcatgccagggactttacagtgtcggctatgcacggcgacatggaccaaaaagaaagagatgtgatcatgagagagtttcgttccggaagctcccgcgtcttaattacgaccgacctcctgaatcgttctcgatggacagtttggccttag

SEQ ID NO: 187140 - DNA, 1224 bp, synthetic construct
  misc_feature 1..1224: note = Description of Artificial Sequence: Synthetic coding sequence
  source 1..1224: mol_type = other DNA
atgagcggcggcagcgccgactacaaccgggagcacggcggccccgagggtatggaccctgatggagtgatcgagagtaattggaatgaaattgtggataacttcgacgacatgaatctgaaggagagtctattaaggggcatatacgcgtatggcttcgagaagcctagtgcgatccaacagagggccattatcccttgcatcaagggttacgacgtgattgcacaagcccagtccgggacgggaaaaaccgctacatttgcaatatccattttacagcaactagaaatcgagtttaaagagacacaagcattggttttggctcccactcgtgaactggcgcagcaaatccagaaggtgattcttgcactcggggattatatgggcgctacgtgtcacgcatgcatcggcggtacgaacgtccggaatgagatgcagaagcttcaggccgaagctccacacatagtggtaggcacacctggcagggtgtttgatatgctgaaccggagatacctgtctcctaagtggatcaagatgttcgtgctggacgaagcggatgaaatgctatctcggggattcaaggaccagatctatgagatctttcagaaactcaacacctctatccaggtggttttgctgagtgccacaatgcctaccgatgtgctcgaagtaactaaaaagtttatgcgcgatccgattaggattctagtgaagaaagaggaactgacacttgaaggaataaagcagttctatatcaatgtggaaagggaagagtggaagcttgacacactgtgcgacttatacgagactctgactattacacaggcagtgatttttttaaacacacggagaaaagttgactggctcacagaaaagatgcatgcgagagacttcaccgtgtcagctctgcacggggacatggaccagaaggaacgagacgtcattatgagggagttcagaagcggcagttcaagagtcctcatcactactgacctgctcgctcggggcatcgatgtgcagcaagtttcattggtgattaattacgacctccccacaaatcgcgaaaactatatccatagaatcgggcgtggcgggaggttcggaaggaagggcgtagcaatcaatttcgtaaccgaagaagacaagaggatcttacgcgatattgagacattctacaacactaccgtggaggagatgccgatgaacgtggcagatctgatctag

SEQ ID NO: 187141 - DNA, 939 bp, synthetic construct
  misc_feature 1..939: note = Description of Artificial Sequence: Synthetic coding sequence
  source 1..939: mol_type = other DNA
atgctgaccgtgctgcggagcctgcccctgttcagccgggagctgttattccctgtcctgaagatccaaaaggtgatcctggccctcggggactatatgggggcaacttgtcatgcttgcataggcggaacaaatgtgagaaatgagatgcagaaactccaggcagaagctccccatatcgtggtgggcacgccaggaagggtgttcgacatgctaaacaggagatacctgtccccaaagtggataaaaatgttcgtactcgacgaagccgatgagatgttgtcaagaggattcaaggatcagatatatgaaatcttccaaaaactcaataccagcattcaagtcgtactgctatccgcgacgatgcctaccgacgtgctggaggtaactaagaaattcatgcgagatcccattcggatactggtaaaaaaagaggagcttactctggagggtattaagcagttttacattaacgtggaacgtgaagagtggaaactggacactctctgtgatctttacgaaactttgaccatcacacaggccgtgatctttctgaatactcgcagaaaggttgactggctaaccgagaagatgcacgcgagagacttcacagtaagcgctctgcacggggacatggaccagaaagaaagagacgtcatcatgagagaattcaggagcgggtcatcccgggtcctcatcaccacggacctgctggctcgagggatcgatgttcagcaggtaagccttgtgattaactacgacctgcctaccaacagagaaaattacatccacaggattggccggggcggccggttcgggagaaaaggcgtggccattaatttcgtcacggaggaggataagaggatcttgcgggacatagaaacgttttataatacaaccgtggaggaaatgccaatgaatgtggcagacctaatttag

SEQ ID NO: 187142 - DNA, 1227 bp, synthetic construct
  misc_feature 1..1227: note = Description of Artificial Sequence: Synthetic coding sequence
  source 1..1227: mol_type = other DNA
atgagcggcggcagcgccgactacaacagccgggagcacggcggccctgaaggcatggatcccgacggtgtaatcgaaagcaattggaatgagattgttgataacttcgatgacatgaatctgaaagaatctctgctgcgcggcatttatgcctatgggtttgagaagccgtccgcgatccagcagagggctatcatcccctgcattaaaggttacgacgtgattgcccaggctcagtcaggtactgggaagactgccacctttgctattagcatattgcagcagctcgagatagagttcaaagaaacccaggccctggtgcttgccccaacacgggaattggcacagcagatacagaaggtcatcctcgcccttggtgactacatgggcgcaacatgccatgcatgtataggtgggactaatgttcggaacgagatgcagaaactgcaggctgaggcacctcacattgttgtgggcacaccaggccgagtttttgatatgctgaaccggaggtacttatcccccaaatggatcaaaatgttcgtgctggatgaagccgatgagatgctaagcagaggctttaaggatcagatctatgaaatcttccagaagctcaatactagcattcaggtagtactgctttcagccactatgccaacggacgtccttgaggttacgaaaaagtttatgcgagacccaatccgaattctggtgaagaaggaagagctgacgctggaaggtattaagcagttctacatcaatgtagaaagagaagagtggaagttagatacactgtgcgacttatacgaaaccctgacaattacccaagctgtgatctttcttaatactcgaaggaaggtggattggttaacagagaaaatgcatgcccgggactttaccgtgtccgctctgcatggtgacatggaccaaaaggaaagggacgtgattatgagagagtttcggagcggatccagtagagtcctcattactaccgatctactggccagaggcattgatgtacaacaggtcagcctcgtgattaactacgatctgcccaccaaccgagaaaattacattcaccgtatcgggagggggggacggttcggcagaaagggcgttgccataaattttgtgactgaggaagacaaaaggatccttcgggatatcgagactttctacaatacgaccgtggaagaaatgcccatgaatgtggcggatctgatttag

SEQ ID NO: 187143 - DNA, 174 bp, synthetic construct
  misc_feature 1..174: note = Description of Artificial Sequence: Synthetic coding sequence
  source 1..174: mol_type = other DNA
atgagcggcggcagcgccgactacaaccgggagcacggcggccccgagggtatggacccagacggagtgatcgagtcaaattggaatgaaatcgttgataattttgacgatatgaacctgaaggagtcactcctcaggggtatttatgcatatggatttgaaaaaccatcatag

SEQ ID NO: 187144 - DNA, 297 bp, synthetic construct
  misc_feature 1..297: note = Description of Artificial Sequence: Synthetic coding sequence
  source 1..297: mol_type = other DNA
atgagcggcggcagcgccgactacaaccgggagcacggcggccccgaggggatggatccagatggggttatcgagtccaattggaatgaaattgtggacaattttgatgacatgaacttgaaggagtcactgctgagaggtatatatgcatacgggtttgagaagccctccgccattcagcagagggcaatcattccgtgcatcaaagggtacgacgtcattgctcaggcccagtctggtacaggcaagactgcaacgtttgcgataagcatcttacagcagcttgagatcgagtag

SEQ ID NO: 187145 - DNA, 363 bp, synthetic construct
  misc_feature 1..363: note = Description of Artificial Sequence: Synthetic coding sequence
  source 1..363: mol_type = other DNA
atgagcagcagcgccggcagcggccaccagcccagccagagccgggcaatacccactcggacggttgccatctcagacgcggcgcagttaccccatgactactgtaccactccaggcgggaccctgttcagcacaacccctggcggcactcgcatcatatacgatcgcaagttcctgctggacagaagaaattctcctatggcccagactcctccctgtcacctgcccaacatcccaggagttacgtcgccaggaacattaatcgaggatagtaaggtagaggttaacaatttaaataacctcaacaaccacgaccggaaacacgccgtgggcgacgacgctcaattcgagatggacatttag

SEQ ID NO: 187146 - DNA, 738 bp, synthetic construct
  misc_feature 1..738: note = Description of Artificial Sequence: Synthetic coding sequence
  source 1..738: mol_type = other DNA
atgaacaacaagttcgacgccctgaaggacgacgacagcggcgaccacgatcaaaatgaagagaattctacacaaaaagatggcgagaaagagaagaccgaaagagacaaaaaccagtcctcttcaaaaaggaaagccgtcgtgcctggcccagctgagcatcccctgcagtataattacaccttctggtatagtaggcgaactcccggccgacctacatcctcgcagtcatacgaacagaacattaagcagatcggaactttcgcaagtgtggaacagttctggagattttactcacatatggtgaggcctggtgacttaaccggccactctgatttccacctgtttaaggagggaatcaagcccatgtgggaggatgatgccaacaaaaacggcggaaaatggatcatcaggttgaggaagggccttgctagcagatgttgggaaaacctcattctggccatgctgggagaacagtttatggttggggaggagatctgtggagctgttgtgtctgtgcgcttccaggaagacatcatttctatctggaataagaccgcttcagaccaggcgacaaccgcccgaatccgggatacgcttaggcgggttctcaatctccctcccaatactattatggagtataaaacacatacagacagcattaagatgcccggacgcttaggcccccaaagattgttatttcagaacctctggaaacccagactgaacgtgccttag

SEQ ID NO: 187147 - DNA, 705 bp, synthetic construct
  misc_feature 1..705: note = Description of Artificial Sequence: Synthetic coding sequence
  source 1..705: mol_type = other DNA
atgaacaacaagttcgacgccctgaaggacgacgacagcggcgaccacgaccaaaacgaagagaattctacacaaaaagacggggaaaaggaaaagacagagcgggataagaatcagagcagtagtaagcgaaaagcggtcgtcccaggccccgctgagcacccactgcagtacaattatactttctggtactctcgcaggacacctgggcgccctacctcttctcagtcctatgagcaaaacattaaacagatcggcacctttgcctccgttgaacagttttggcgcttttactcacatatggtccggcccggggacctgaccggccactccgatttccacctgttcaaagaggggattaaacctatgtgggaggacgatgccaacaagaacggcgggaaatggatcatacgactgcggaaagggttggcctcaaggtgttgggagaatctcattctggcaatgcttggcgagcaattcatggtaggcgaagagatctgtggagccgttgtctccgtgagattccaggaagatatcatttctatctggaataagaccgcttcggaccaggctacaacagctaggattcgggatactttgcgcagagtacttaacctgcctccaaatacgattatggagtacaaaacacacacagattccattaaagataacagcagcttccggaatactaagatcaccttgtag

SEQ ID NO: 187148 - DNA, 567 bp, synthetic construct
  misc_feature 1..567: note = Description of Artificial Sequence: Synthetic coding sequence
  source 1..567: mol_type = other DNA
atgaacaacaagttcgacgccctgaaggacgacgacagcggcgaccacgatcagaatgaggagaatagcacacagaaagatggggaaaaggagaagacggaacgcgataagaatcagtcctcttcgaagcgtaaagtcgaacagttctggagattttacagccatatggtgcggcctggagacttgacaggccactccgatttccatctctttaaggaagggattaaacccatgtgggaggatgacgccaacaagaatggggggaaatggatcattagattgcggaaaggcctggccagcaggtgttgggaaaacctaattctcgccatgcttggggagcagttcatggttggagaggaaatttgtggagccgtagtgagcgttcggttccaggaagacataatctccatttggaacaaaacagcctctgaccaagccactactgcaagaatccgagacacacttcgcagggtgctcaatctccccccgaacacaatcatggaatacaagactcacactgacagtatcaaatatgtgctggggggatacgggagaacatgtccatag

SEQ ID NO: 187149 - DNA, 357 bp, synthetic construct
  misc_feature 1..357: note = Description of Artificial Sequence: Synthetic coding sequence
  source 1..357: mol_type = other DNA
atgcggggcgagcggcggcccctgtgggaggaggagagcaacgccaaaggcggggtctggaagatgaaagtgcctaaagattctacctctaccgtctggaaagagctgctgctcgcaacgattggagaacagtttactgactgtgccgcagcggatgacgaggtgattggagtgagcgtgagcgtgagggacagagaagacgtggtgcaggtgtggaatgtgaacgcctccctcgtgggtgaagctactgtgctcgagaaaatctatgaactgctcccccatattacttttaaagcggtgttctacaaaccacacgaggaacatcacgcctttgagggcggcaggggcaaacattag

SEQ ID NO: 187150 - DNA, 357 bp, synthetic construct
  misc_feature 1..357: note = Description of Artificial Sequence: Synthetic coding sequence
  source 1..357: mol_type = other DNA
atgcggggcgagcggcggcccctgtgggaggaggagagcaacgccaaagggggagtgtggaagatgaaagtgcccaaagactcgacttctacagtctggaaggagctactgctcgccacaataggcgaacaatttactgactgcgctgccgcggacgatgaggtcattggcgtgagtgtttctgtgagggatagggaagatgtggtccaggtgtggaatgtcaatgcctcactcgtgggcgaggctactgtgctcgaaaaaatctatgaactcctcccccatatcaccttcaaggccgtcttttacaagccgcacgaagagcaccacgcatttgaagggggcaggggcaagcactag

SEQ ID NO: 187151 - DNA, 357 bp, synthetic construct
  misc_feature 1..357: note = Description of Artificial Sequence: Synthetic coding sequence
  source 1..357: mol_type = other DNA
atgcggggcgagcggcggcccctgtgggaggaggagagcaacgccaaaggcggagtgtggaagatgaaggtgcccaaggactccacatctactgtctggaaggagctcctgctggccaccatcggcgagcagttcactgactgcgcggccgccgacgacgaagtgattggagttagcgtcagcgtgcgcgatagggaggacgtggtacaggtgtggaatgtaaatgcgagcctggttggggaagctacggtgctagagaagatctatgagttgcttccacacattaccttcaaggccgtcttttataaaccacacgaagaacatcacgccttcgaagggggccgtggtaagcactag

SEQ ID NO: 187152 - DNA, 675 bp, synthetic construct
  misc_feature 1..675: note = Description of Artificial Sequence: Synthetic coding sequence
  source 1..675: mol_type = other DNA
atggccctgccccccgccgccgccccccccgccggcgcccgggagccacccggatcccgggccgctgccgctgcggcagcccccgaacctccactggggttacagcagctaagcgctctgcagccagaacctgggggtgttcctttgcattcaagctggacattttggctcgataggtccctgcctggcgctacagctgccgagtgcgcctctaatctgaagaagatttacacagtgcagactgtccagatattttggagcgtgtacaacaacatcccccccgtgacatccttacctctgcgctgcagttaccacttgatgaggggcgagagaaggcctctctgggaagaggaatctaacgccaaaggtggagtgtggaagatgaaagtacccaaggactcaactagcaccgtttggaaagaacttctcctggccaccattggcgaacagttcacagattgcgctgccgccgatgatgaagtgatcggtgtgagcgtgagcgtccgtgaccgtgaggatgtggtgcaggtgtggaacgtaaatgcctcacttgtcggcgaggccaccgtattagaaaaaatttatgagttgttaccacacattacattcaaggcggtgttttacaaacctcatgaggaacaccacgcatttgaaggcggcaggggaaagcactag

SEQ ID NO: 187153 - DNA, 357 bp, synthetic construct
  misc_feature 1..357: note = Description of Artificial Sequence: Synthetic coding sequence
  source 1..357: mol_type = other DNA
atgcggggcgagcggcggcccctgtgggaggaggagagcaacgccaaggggggggtgtggaagatgaaggttccgaaggacagtacctcaactgtctggaaggagctgctgctggctacgataggtgaacagtttacagattgcgcagctgccgatgatgaagtcattggggtttctgtttctgtcagggatcgcgaggatgtggtacaagtgtggaatgtgaatgctagcttagttggcgaagccacagtgttagagaaaatctacgaactcctcccccatattaccttcaaagctgtgttctataaaccacatgaggagcatcatgcttttgagggaggtcgggggaagcactag

SEQ ID NO: 187154 - DNA, 135 bp, synthetic construct
  misc_feature 1..135: note = Description of Artificial Sequence: Synthetic coding sequence
  source 1..135: mol_type = other DNA
atgcggggcgagcggcggcccctgtgggaggaggagagcaacgccaaaggcggggtctggaagatgaaggtacccaaggattcaacgtccactgtgtggaaagagctgctgttggcaacaataggtgagcagtag

SEQ ID NO: 187155 - DNA, 156 bp, synthetic construct
  misc_feature 1..156: note = Description of Artificial Sequence: Synthetic coding sequence
  source 1..156: mol_type = other DNA
atgcggggcgagcggcggcccctgtgggaggaggagagcaacgccaagggtggggtgtggaaaatgaaagtgcctaaggactctacatcaaccgtctggaaggagctacttctggccacaattggagagcagttcactgactgtgccgccgcgtag

SEQ ID NO: 187156 - DNA, 282 bp, synthetic construct
  misc_feature 1..282: note = Description of Artificial Sequence: Synthetic coding sequence
  source 1..282: mol_type = other DNA
atgcggggcgagcggcggcccctgtgggaggaggagagcaacgccaaggggggggtctggaaaatgaaagtaccaaaagattccacctctacagtttggaaggagctgcttcttgccaccattggggagcagtttacagactgcgcggccgccgacgatgaagtaataggggtgtctgtctcggtacgagatagagaagacgtagttcaggtgtggaatgtcaatgcatccctagtcggagaagcaaccgtcttggagaagatttatgaacttctgccatag

SEQ ID NO: 187157 - DNA, 2958 bp, synthetic construct
  misc_feature 1..2958: note = Description of Artificial Sequence: Synthetic coding sequence
  source 1..2958: mol_type = other DNA
atggaccggcggagcatgggcgagaccgagagcggcgacgccttcctagatctgaagaaaccccctgctagcaaatgtccccacagatacaccaaagaggaactgcttgatatcaaggaactaccccattccaaacagcgaccatcgtgtctgtccgagaaatacgatagtgatggtgtttgggatcccgagaaatggcatgcttccctttatccggctagcgggaggtcttctccggttgagagtttgaaaaaggaacttgacaccgataggccatcactggtcagaagaatcgtggaccctcgtgagagagtaaaggaggatgaccttgatgtcgtactgagtccccagaggagaagcttcggcggggggtgccacgtcactgcagctgtaagttcgagaaggagcggctccccacttgaaaaagacagcgacggcctgcggctgctgggcggacgtcgaatcggcagcggcagaattattagcgcacgaacatttgaaaaggaccataggctgagcgataaggacctgagagatctgcgagacagagatcgagaaagagacttcaaagataaaagattcaggagagaattcggggattctaagcgcgtgttcggcgagagaagaaggaatgacagctacaccgaggaagaacctgaatggttttctgctgggcccacaagccaatctgagacaattgagctgacaggattcgacgacaaaatactcgaggaggatcacaaggggcggaagcggacgagaaggcgcactgcatctgtgaaggaaggcatcgtggagtgcaacgggggggttgcagaggaagatgaagtggaggttattttggcacaggagccggcagctgaccaggaggtgcctcgggatgccgtgctcccagagcaaagcccaggcgattttgattttaatgagttcttcaatctcgacaaggtcccttgtctcgcctccatgattgaagacgtgttgggagaggggagcgtctctgcatcgagattctcaagatggttttctaatccatctcggtcagggtctaggtcttcctcactggggagcacccctcacgaggagcttgagcggctcgcaggtctagagcaagctatcctttctcccggccagaacagtggaaactacttcgctcccattcctctcgaggatcacgccgaaaataaggttgatatattggaaatgctgcagaaggccaaagtggatcttaagccactgctctcttcgctgtccgctaacaaagaaaagctgaaagagtcaagccattcaggggtcgtcttgtccgtagaggaggtggaggccgggttgaaagggctgaaagttgaccagcaggttaagaacagcactcctttcatggctgaacacctggaggagactctgagtgccgtgacaaacaacaggcagttaaaaaaggacggcgacatgaccgcattcaacaagctagtgtctacaatgaaggcctccggcaccttgccctcccaacccaaggtgtctcggaatctggaaagtcacctgatgtctccagcagaaatcccaggccaacctgtgcctaagaatattcttcaagaactgctgggacagcctgtacaacgacccgctagttcaaatctgctgagcggtcttatgggcagtctggaacccaccacctccctcctgggacagagggcccccagccctccattgagtcaggttttccagacacgcgccgcttctgctgactacctgagacctcgcatcccctctccaatcggttttacccctgggccccagcagctgctgggggatccctttcagggcatgcggaaacctatgtccccgattacagcccagatgagtcagttggagctacagcaagccgctctcgagggcctggccttgccccatgatttggccgtccaagcggctaatttctaccagcccggcttcgggaagccccaagtcgaccggacccgcgacggtttccgaaacagacaacagcgagtcacgaagtccccggcccccgtgcacaggggaaatagttcttccccggcccccgccgccagtataaccagtatgttgtcccccagttttactccaacaagcgtgataaggaagatgtacgaaagcaaagaaaagtcaaaagaggaaccagctagcggtaaggcagccctcggagattcaaaggaggacacccaaaaggccagcgaggagaatctgctgtcttcgtcaagcgtgccgtcagccgacagggacagtagcccgactactaatagcaagctcagcgcacttcaacgctcaagctgctccaccccactgtcacaggctaacaggtacactaaagagcaggactacagacctaaggccactggccgcaagaccccgaccttggcaagcccagtgccaaccactccattcctgagacctgttcaccaagtccccctggtgccgcatgtcccgatggtgagacccgcccaccaactgcacccgggactcgtccaaagaatgctcgctcaaggcgtgcacccacagcacctgccaagcctgttgcagacaggcgtgcttccccctgggatggacctgtcccatctacaggggatcagtggccccatactcggtcagcccttttacccactccctgcagcctctcaccccctcctcaacccacgtccgggcacccccctgcacctagccatggtgcaacagcagctacagagaagtgtcctacaccctcctggcagtggctcgcatgcggcggctgtgtcagtgcagactactccacagaatgtaccatctagatccggtctcccccatatgcatagccagctcgagcaccgccccagccaaaggagcagcagtcctgtcggcctggcaaagtggtttggctctgatgttcttcagcagcctttaccatctatgcctgccaaagtgatcagcgtggacgaactcgagtatcgccagtag

SEQ ID NO: 187158 - DNA, 2436 bp, synthetic construct
  misc_feature 1..2436: note = Description of Artificial Sequence: Synthetic coding sequence
  source 1..2436: mol_type = other DNA
atggaccggcggagcatgggcgagaccgagagcggcgacgccttcctggaccttaagaaaccccctgcttctaagtgcccgcaccgctacaccaaggaagagctactagatattaaggagttgccgcatagcaagcaacgcccatcttgtcttagcgaaaagtatgattcagacggtgtgtgggacccggagaagtggcacgctagcctgtatcctgcctccggtcgctcaagcccagtcgagtctcttaaaaaggagctggacacggatcgaccgtctctcgtaaggcggatcgtgggaatagttgaatgtaatggaggcgtggctgaggaggatgaagttgaagtcattctggcacaggaacccgcggctgaccaggaagttcctcgcgatgctgtgctccctgagcagagcccgggcgatttcgatttcaatgagtttttcaacctggataaagtcccttgtctggcttcaatgatagaggatgtgcttggggaaggcagcgtgtctgcgagcaggttcagccgctggttttccaacccctcacgcagcggctctcggtcttccagcctcggcagtacccctcacgaggaactcgaacggctggccggtctggagcaggcaatactatcgccagggcaaaattccggcaattacttcgcacccattccactggaggatcatgcagagaacaaggtagacatactcgaaatgttacagaaagctaaggtcgacctgaagcctctgctttcgtctctttcagccaacaaggaaaaattaaaggaaagttcccacagcggggtggtgctatccgttgaggaggtcgaggccgggctcaagggactcaaagttgatcagcaggtaaagaactccacaccattcatggctgagcacctggaagagaccctttctgctgtgacaaataacaggcagctcaaaaaagatggagacatgactgctttcaataagttggtttccacaatgaaaaggaatctggagtcacacctcatgtcccccgccgaaatcccagggcagccagtacccaaaaatatcctgcaggagctgcttggtcagccagttcagagacctgcctcctccaatctgctgtccggactgatgggctccctcgagcccactacgtcattgctcgggcagcgagccccatctccccctctgagccaggtgtttcagacacgggcagcatcagccgattacctccggcctcgcatcccgtcccccattggctttacgccaggaccccagcagttacttggggaccccttccaagggatgcgtaaaccaatgagccccatcactgctcagcagatgtcgcagctagaactgcaacaagccgcccttgagggtctcgctctccctcatgacctcgctgtgcaagccgccaacttctaccagcctggttttggcaagccacaagtcgatagaacacgagacgggtttagaaacaggcagcagcgagtaacaaaatcccctgctcctgtccacaggggaaacagttccagcccggcacccgccgccagcattactagcatgctctccccctcttttacaccaacctccgtcatccgcaagatgtacgagtcgaaggaaaagtccaaggaagagcccgctagtggtaaggcagccctgggagatagcaaagaggacacacaaaaagctagcgaggagaacctcctgtcttcctctagtgtcccctccgctgatcgcgactcgagtcctactactaactcaaagctatctgccctgcagcggtcgtcgtgttccactcccttgtctcaggcaaacagatataccaaggagcaggattataggcccaaagcgaccgggagaaagacgcctacgctggcatcccccgtgccaactaccccctttcttagacccgttcaccaggtcccactggtgcctcatgtcccgatggtcagaccagcccatcaacttcatccgggactggtgcaacgcatgcttgctcagggggtgcatccccagcacctgccaagcctgttgcaaaccggggtgctccctccagggatggatttgagccatcttcagggcatcagcgggccaattttgggtcaacctttctatcccctgcctgctgcttcacacccattgcttaacccacgccccggtacacccctccatttggcaatggtccagcagcagcttcagcggtcagtgctgcacccccctggatccggctcccatgcagccgccgtgtctgttcagaccaccccacagaatgtgccttcaaggtcaggcctgccccacatgcattcgcaacttgagcaccgtcctagtcagcggagctcctctcccgtcggtttagccaaatggtttgggtccgacgtactacaacaacccctaccttccatgccggcaaaggtaatatccgtggatgagcttgagtatcggcagtag

SEQ ID NO: 187159 - DNA, 1923 bp, synthetic construct
  misc_feature 1..1923: note = Description of Artificial Sequence: Synthetic coding sequence
  source 1..1923: mol_type = other DNA
atgatcgaggacgtgctgggcgagggcagcgtgagcgccagccggttctctcggtggtttagtaatccgtcaaggtccggcagccgatcttcatctctaggctccacaccccatgaagagctggaaaggctggccggactggagcaggccatcctgtcccccgggcaaaattctgggaattacttcgcaccgatacccctcgaagatcacgcagagaacaaagtcgatatcttagagatgctgcaaaaagctaaagtcgacctgaaacctctgctgtcttcactctccgcaaataaggaaaagctgaaagagtcctcccattctggcgtggtgctaagcgtggaggaagtagaggccggtctgaagggcttgaaggttgatcaacaagtcaaaaactcaacacctttcatggcggagcacctggaggaaaccctgagcgcggtcaccaacaatcgccagctgaaaaaagatggtgatatgactgccttcaacaagctggtgagtaccatgaaggcctcaggcacgctgcctagtcagccaaaagtgagcgaactactgggccagccagtgcagaggcccgcttccagcaacctgctctccggtctgatgggctctctggagccaacaacgtctttgctgggtcagcgtgctccctcaccaccactgtcgcaggtcttccagactagggccgcttcggccgactatctcagaccaaggatccccagccctatcggctttacccccggaccacagcaactgctcggggacccattccaggggatgcgcaaacctatgagccctattacagctcagatgtcgcagctcgagcttcagcaggctgcactagaaggtctagccctgccacatgatctcgccgtgcaagctgcaaatttctaccagcccggcttcgggaagccacaagtggaccgtaccagagacggattccggaataggcagcaacgcgtcactaagtcaccagccccagtgcataggggaaacagcagctccccggccccagcagccagtataacaagtatgctgagcccaagcttcacccccacctctgtcattaggaaaatgtatgagtctaaagagaaatccaaggaggagccagcttctggaaaggctgcgctaggggattccaaagaagacacccaaaaagcgagtgaagagaacctactgtcctcatcgtctgtcccttctgcagacagagacagcagtccaacgacaaatagcaagctatccgctttgcagaggtcctcgtgctcaactccactgtcacaggcaaataggtatactaaggaacaggattataggccaaaggcaactgggcggaagactccaacactggcgagtcctgtccctaccacccctttccttaggccggtccaccaggtcccactggtgccccatgttcccatggtgcgcccagcccatcagcttcaccccgggctggttcaacggatgctcgcccagggagtccatccccagcatctgccatccttgcttcaaactggcgtcctcccacccgggatggacctgagtcacctgcaggggatcagtgggcccattctcggacagcccttttacccgttgcctgccgcatctcacccactcctcaatccccgaccgggcacccctctgcacctggccatggttcagcagcagcttcaaagaagtgtgctgcatcctccggggtctgggagccatgctgccgcagtttctgtacagactactccacagaatgtgcccagtcgttccggcctcccccacatgcactctcagctggaacataggcccagccagcgttccagctcacctgtgggacttgccaaatggtttggttccgacgtcctgcagcagccgctgccatctatgccggcgaaagtgataagcgtggacgaattggagtatagacagtag

SEQ ID NO: 187160 - DNA, 192 bp, synthetic construct
  misc_feature 1..192: note = Description of Artificial Sequence: Synthetic coding sequence
  source 1..192: mol_type = other DNA
atggaccggcggagcatgggcgagaccgagagcggcgacgccttcctggatcttaagaaacctccagcatcaaagtgcccccatcggtacactaaagaggagctgttggatatcaaggaacttcctcatagcaagcaaaggccgtcgtgtctgagcgaaaagtacgacagcgacggagtgtgggacccctag

SEQ ID NO: 187161 - DNA, 192 bp, synthetic construct
  misc_feature 1..192: note = Description of Artificial Sequence: Synthetic coding sequence
  source 1..192: mol_type = other DNA
atggaccggcggagcatgggcgagaccgagagcggcgacgccttcctggacctgaagaaaccgccagcaagcaagtgtccacaccggtatactaaggaggagttgctggacattaaagaacttccacactcaaagcagcggccaagctgtctcagcgagaaatatgactctgacggcgtttgggacccctag

SEQ ID NO: 187162 - DNA, 2886 bp, synthetic construct
  misc_feature 1..2886: note = Description of Artificial Sequence: Synthetic coding sequence
  source 1..2886: mol_type = other DNA
atggaccggcggagcatgggcgagaccgagagcggcgacgccttcctggatctaaagaaaccccccgcgtctaaatgcccgcaccggtacacaaaggaagagctactcgatatcaaagaactgcctcatagtaagcaacggccctcttgtctaagcgagaaatacgattcagatggagtctgggatccggagaaatggcatgccagcctctatcccgcttcaggcaggagttctcctgtggagtcgctgaagaaggagttggacacagaccgtccttccctcgtgaggaggattgtagatccccgcgaacgcgtaaaggaggatgacctagacgtcgtgctgtctccccagcgccgtagcttcggagggggctgccatgtcaccgcagctgtctctagcaggcggagcggaagccccttggagaaagattccgacggactgaggttactgggcgggagacgaatcgggagcggccgaatcatctcagccagaaccttcgaaaaggatcacaggttatccgataaggatcttagagatctaagagacagggaccgcgaacgcgacttcaaagacaagcgcttccgcagggagttcggagattcaaagcgcgttttcggggagcgccgcaggaacgattcttatacagaggaagaaccagaatggttttcggcgggccccacctcacagtccgagactatagagctaactggcttcgatgacaaaatcctggaggaagaccacaaggggcgcaaacgaactcgaaggagaaccgcctcggtgaaggaaggcatcgtggaatgcaatgggggcgttgctgaagaggatgaagtggaggtgattctggctcaggaacctgctgccgaccaggaagtgccacgcgacgcggtgctccctgagcagagtcctggagacttcgattttaatgagttttttaatttggacaaggtcccctgcctcgcctccatgatcgaggacgtgctgggcgaggggtcggttagtgcgtcccgtttcagtaggtggttcagtaatcctagtcgcagcggttcacggtcgtctagcttgggctctactccccacgaggagctagagcggcttgccggactcgagcaggccatactcagtccagggcaaaactctggaaactacttcgccccaattcctctggaggatcatgctgagaataaagtggacatcctggaaatgcttcaaaaggccaaggttgacctgaaacctcttctgagttcgttatctgccaacaaggaaaagctcaaagaatctagtcactctggcgttgtgctgagcgtcgaggaagtagaagccggcctgaagggcctgaaagtagatcagcaggtaaagaattctactcccttcatggcagaacatctcgaggagaccctaagcgcagtcaccaacaatcgccagcttaaaaaagacggagatatgactgctttcaataagttagtcagcaccatgaaagcctccggcaccctgccttctcagcctaaggtctccgagctgcttggccagccagttcagcgacctgcctccagtaatttgctgtcggggttgatgggcagcctcgaaccaaccacatccttgctgggccaacgcgctccctcacctccgctgagtcaggtcttccagacgagagcagccagtgcagactatctgagaccaagaataccctcgccaatagggtttacccccgggcctcagcaattgctaggcgaccctttccagggcatgaggaagcctatgagtccaattactgcacagatgtcacagctagagctgcaacaggccgcactcgagggtcttgccctgccccatgatcttgctgtccaggccgctaacttctaccagcctgggtttgggaaacctcaagtcgaccgcactagggacggattccgaaatcgtcagcagagggttaccaaaagccctgctcctgttcaccgagggaatagttcaagtcctgcccccgcagcaagcataactagtatgctgagcccctcattcacccccacctccgttattcgtaagatgtacgaatccaaggaaaagtcgaaagaggaacccgcttccggaaaggctgctttgggcgattccaaggaagacactcaaaaggcatccgaagagaacttactgtcctcatcatctgttccttccgctgatcgtgactcaagccctactaccaatagtaagctgtcagccctgcagaggagtagttgttccacaccactcagccaggcaaacagatataccaaagaacaggactaccgacctaaggccactggacggaagacgccgacactcgccagtccagtgcctaccacgccattcctgcgcccagtacaccaagtaccgctggttcctcatgtcccaatggtgcgcccggctcaccagctacatcccggcttggtacagaggatgctagcacagggtgtgcaccctcagcacctcccaagcttacttcagactggcgtgctgcccccagggatggacctgagtcatctgcaggggatctccgggccaatactggggcagcccttttatcccttgcctgcggcatctcaccccctgcttaatccccgcccaggaactccacttcatcttgccatggtacaacagcagcttcagcgatctgtcctccacccacctggatcaggatctcacgctgccgcagtctcagtacagactacaccacagaatgttccatccagatctggattgcctcacatgcacagtcagctggagcacagaccatcccaaagatcttcctcacccgtaggtttggctaaatggtttggatcggatgtacttcagcagcccctgcctagcatgcctgctaaggtgataagcgtcgacgagctggaatatcgacagtag

SEQ ID NO: 187163 - DNA, 2958 bp, synthetic construct
  misc_feature 1..2958: note = Description of Artificial Sequence: Synthetic coding sequence
  source 1..2958: mol_type = other DNA
atggaccggcggagcatgggcgagaccgagagcggcgacgccttcttggacctaaagaaacctccagccagcaaatgccctcatcgctatactaaggaagagctgctggacataaaggagctgccccactctaaacagcggccctcgtgcctctcagaaaagtacgacagcgatggagtgtgggaccctgaaaaatggcacgcctcactctaccccgctagtggaaggagctcgcccgttgaaagcctgaaaaaggagttggacacagatagaccgtcactggtgaggcgaatcgtagacccaagagaacgagtcaaggaggatgacctggatgtcgtgctaagccctcaaaggagaagttttggcggtggctgtcacgtgacggccgccgtgtcttcacgtcgatctggctcgcccttggagaaggattccgacggtttgcgtctgcttggcgggagaaggattggcagcggtcgaatcattagtgccagaacttttgagaaggaccataggctatccgataaagatctgcgcgatctgcgcgatcgcgaccgagaacgcgattttaaggataaaagattcaggagggagtttggggactcaaaacgggtgttcggagaacggcggcgcaatgacagctataccgaggaagagcccgagtggtttagcgctggtcccactagtcagagtgagaccatagagttgaccggatttgacgacaagattctggaagaagaccacaaaggtcgtaagcgtactcgacgtcggaccgcatctgttaaagaagggatcgtggagtgcaatggaggggtcgccgaggaagacgaggtggaagtgattctagcccaggagcccgctgctgaccaggaagtgcctcgggatgccgtgctgccggagcagtctcccggcgacttcgatttcaacgaattctttaatctggataaggtaccctgtctggcctctatgatagaagatgttcttggagagggatcggtatcagcctctaggttctctcggtggtttagtaatccatctcggtcgggttcgaggtcgtcctcccttggtagcaccccacatgaagaacttgagcggctggccggtcttgaacaagccatcttgtcacctggccaaaactctggcaactattttgcccccatccccctcgaagatcacgctgagaataaagtggatatactggagatgctgcaaaaggccaaagtcgacctcaaacctctcttgtcaagcctgtctgctaacaaggagaaactcaaggagtccagtcacagcggtgtcgtactctcagtggaagaggtggaggccggcctcaagggactgaaagttgatcaacaggtgaagaatagcactccatttatggcagagcacctggaggagaccctctccgcggtcactaacaaccgccagcttaagaaagatggcgacatgacagcctttaacaaacttgtgagtaccatgaaggctagcggcacactcccctcccagcctaaggtgtctcgcaacttagagtcacacctcatgtcgcccgccgagattccaggtcaacccgtccccaagaatatcttacaggagctcctgggccagcccgtgcagcgtcccgcatctagcaatctgctgtccgggctgatgggcagcctggaacctacaaccagtctgctcggacaaagggccccaagtccacccctctcccaggtgttccagacaagagccgccagcgccgactacttacgtcctcgcattccaagtcctatcggattcacccccggaccacagcagctgctgggggatcccttccagggaatgcgtaaacctatgagcccaataacggcacagatgtcccagctcgagcttcaacaggctgctcttgaaggattagctttgccccatgaccttgccgtgcaggccgctaacttttatcagccaggattcgggaaaccccaggtcgatcgtacccgagacgggtttcgcaatcggcagcagagggtaacaaaatcccccgctcctgtgcacaggggaaactcttcatcacctgcacccgccgcaagcattactagtatgctgtcaccatctttcacccccacatcagtcattagaaagatgtacgagtccaaagagaagtccaaagaagaacccgccagcggcaaagccgcattgggagattccaaagaagacacccagaaagctagcgaggagaatctcctctcttcctcgtccgtgccttctgccgaccgcgacagctctcctactacaaatagcaaactctctgctctgcagaggagtagttgtagtacccccctgagtcaagccaaccgttatactaaagagcaagactaccgtccgaaggctacaggtcgaaagacgccgactctggcgtcccctgtgcccacgacgccatttttgcgcccagttcaccaggtccccctggtgcctcatgttcctatggtgaggcccgcccaccagctgcatcccggactggtgcagcgaatgttggcgcagggcgtgcacccccagcacctaccctcactgttacagactggggtgcttcctccaggtatggacctgtctcatctgcagggcatctccggtcctattctaggacagcccttctaccccctccctgctgctagccaccctctgttaaacccgcggccaggaacgccgctccacttggcaatggtgcagcagcagctccaacggagtgtattgcaccctcctgggtctggcagccacgcggccgctgtatcggtgcaaactacaccacagaacgtgccttcaagatccggactgccgcatatgcattctcaactggaacatagaccttcccagcggtcctcatcaccagtggggctggctaagtggtttgggagcgacgtgctgcaacagccactgccttcaatgcccgctaaggttatctcagtggacgaactggagtaccgccagtag

SEQ ID NO: 187164 - DNA, 1311 bp, synthetic construct
  misc_feature 1..1311: note = Description of Artificial Sequence: Synthetic coding sequence
  source 1..1311: mol_type = other DNA
atggaccggcggagcatgggcgagaccgagagcggcgacgccttcctcgacctcaagaagcctcccgcaagtaagtgtccacatcggtataccaaggaagaactgctggacatcaaggaattgccccacagtaaacagcgtccctcctgcctttcagaaaaatatgattcggacggggtttgggacccggagaagtggcatgcctctctctatcctgcaagtggccggagtagccctgtggaaagcctcaaaaaggaactggacaccgaccggccctccctcgtgaggcggatcgttgatccacgcgagcgcgtcaaagaggacgacctggatgtcgtactcagtccccaacgccgttcatttggcggggggtgtcacgttacagcggccgtttcctctcgcagaagcggcagtccactcgaaaaggatagcgacggactacggctgctgggcggccgtcgtattggtagcggaaggatcatctccgcacgaacattcgaaaaggaccaccggttgtctgacaaggacttgagggaccttagggacagagacagggaaagggactttaaagataagagattcagacgcgaatttggtgatagtaagagagtttttggagagaggaggcgcaacgatagctatacagaggaggagcctgagtggtttagtgccggtcctacgagccaatcagaaactattgaactgaccggtttcgacgataagatactggaagaagatcacaagggtcgcaagcggacacgcaggcgtacagcttccgttaaagagggtatcgtggaatgtaatgggggagtggccgaagaggacgaagtcgaggtcattctggcacaggaacctgccgcagaccaggaggttccccgggatgcggttctccccgagcagtcaccaggtgatttcgacttcaatgagttcttcaatctagataaggtgccatgtcttgcgtcaatgatagaggacgtacttggagagggctctgtaagcgcaagccgattcagtagatggttctcgaatccttccagatctggctcacgttcgtcttccctgggctccacgccacacgaggagctggagaggctcgccggtctcgagcaggcaatcctaagtcctggccagaacagtgggaactatttcgcccctatcccactcgaggatcacgccgagaataaggtcgacatcctcgaaatgctgcagaaggctaaggtggacctgaaacctcttttaagctctctttcagctaacaaagagaagctgaaagagtctttgcggctcagcccgaagaagaagaaaaagtag

SEQ ID NO: 187165 - DNA, 567 bp, synthetic construct
  misc_feature 1..567: note = Description of Artificial Sequence: Synthetic coding sequence
  source 1..567: mol_type = other DNA
atggaccggcggagcatgggcgagaccgagagcggcgacgccttcttggacttaaaaaagccccccgcttcgaagtgcccgcacagatacacaaaagaggaactcctggacattaaggagttaccacattcaaaacagagaccaagctgcctgagcgaaaaatatgattcagacggcgtttgggaccccgagaaatggcacgcgtccctctatcctgccagcggtcgatcctctcctgtggagagtttgaagaaagaactggacactgataggccctccttagtcagacggattgttgatcccagagagcgggtgaaagaggacgacctggacgtcgtgctgtcgcctcagcggaggtcatttgggggcggatgccacgttaccgcagccgttagcagccgaagatccggctcacccctggagaaggattccgatggattgcggctgcttggtggccggcgaattggttccggacgtataatcagtgcccgcacgttcgaaaaggaccacaggttgagcgacaaggatctgagggaccttcgggatcgggatagagagcgggactag

SEQ ID NO: 187166 - DNA, 747 bp, synthetic construct
  misc_feature 1..747: note = Description of Artificial Sequence: Synthetic coding sequence
  source 1..747: mol_type = other DNA
atggccgacttcgacacctacgacgaccgggcctacagcagcttcggggggggacgggggagcaggggatctgccggcggccatggttcacggtcgcaaaaggaattacccactgaacccccgtatacagcttatgttggcaacctgcccttcaacacagtccagggtgatattgatgcaatttttaaggacctaagcatccggagcgtacgcctggtgcgggacaaggacacagataagtttaaaggattctgttacgttgagttcgacgaggtagatagtctgaaagaggcactcacttatgatggtgcgttgctgggggaccggtctctacgagtggacatcgccgaagggcgtaagcaggataaagggggtttcggcttcaggaagggtggcccagatgatagaggaatgggctcatcccgcgagtccagaggtggatgggacagtagagatgacttcaacagcgggttcagagacgatttcctgggcggaagagggggttctaggccaggagatcgccgaacaggccccccgatgggatcccgctttcgggatggcccccctctgcggggcagcaacatggattttagagagcctacagaggaagagagggcacagcggccgaggctccaattaaagcctagaacggtagcaacacctttgaatcaggtcgcaaacccgaacagcgccatctttggcggtgctaggccccgggaggaggttgtccaaaaggagcaggaatag

SEQ ID NO: 187167 - DNA, 687 bp, synthetic construct
  misc_feature 1..687: note = Description of Artificial Sequence: Synthetic coding sequence
  source 1..687: mol_type = other DNA
atggccgacttcgacacctacgacgaccgggcctacagcagcttcggcggcgggcgcggctcccgcgggtctgccggaggtcacggcagccggtctcagaaagaattgcctactgaacccccttacaccgcctatgttggtaatttgccattcaatacagtccagggggatatagacgcaatctttaaggatctgagtattcggagcgtcagactggtgcgcgacaaggatactgacaaatttaaggggttttgctacgtggagttcgacgaggtggactcactgaaagaggctcttacttacgatggggccctgttgggcgatcgctccttgcgggtggatatcgctgagggcaggaaacaagataaggggggctttggcttccgcaaggggggccccgacgatcggggttttcgggatgacttcttaggtggacgtggaggaagtcggcctggggaccggagaaccgggccccccatgggtagccggttccgggatggaccgcctctccgtggcagcaacatggatttccgagaaccaacagaagaggagcgggcccagagacctagactacaacttaagccgcgcacagtggcaactcccctgaaccaggtggccaacccaaactctgctatcttcggcggtgctagaccaagagaggaagtcgtgcagaaggaacaagaatag

SEQ ID NO: 187168 - DNA, 1050 bp, synthetic construct
  misc_feature 1..1050: note = Description of Artificial Sequence: Synthetic coding sequence
  source 1..1050: mol_type = other DNA
atggaggcccacaacgccagcgcccccttcaacttcaccctgcccccaaactttggaaagaggcctaccgatttagccctgtcagtcatcctcgtttttatgctgtttttcataatgctttctctgggttgcactatggaattctcaaaaataaaggcccacctgtggaagccgaaaggtctggccattgctctcgttgcccagtacggcatcatgccacttaccgcttttgtactcgggaaggttttccgactgaagaatattgaagccttagcaatactggtttgcggctgctcgcccggtgggaatttaagcaatgtgtttagtctggcaatgaagggcgatatgaatttgtccattgtaatgacaacttgttctacattctgcgcactgggcatgatgcccctcttactttacatctatagtagggggatctacgatggggacctgaaggataaagtaccctacaagggaatcgtgattagcttagtccttgtgttgatcccatgtacaataggcatagtgctcaaatctaaaaggccccagtacatgaggtatgtcatcaagggtggtatgatcatcatactcctttgtagtgtggccgtgactgtcctttccgctattaatgttgggaagagtataatgttcgccatgacccccctgcttatcgcgacatccagcctgatgcctttcatcggattcttgctgggttatgtgctatctgcgctcttttgccttaatgggcgttgtagacgaaccgtgagtatggagaccggctgtcaaaatgtgcagttgtgcagcaccattttgaacgtagcctttccgccagaagttatcggtccactgttcttcttccctcttctgtatatgatcttccaacttggtgaagggcttttgttgattgcaattttttggtgttacgagaagttcaagactcccaaggataaaactaaaatgatttatacagccgcaaccacagaagaaacaattccaggcgctctcgggaatgggacctacaaaggagaagactgtagtccctgcaccgcctag

SEQ ID NO: 187169 - DNA, 1296 bp, synthetic construct
  misc_feature 1..1296: note = Description of Artificial Sequence: Synthetic coding sequence
  source 1..1296: mol_type = other DNA
atgagcgtgaacgtgaaccggagcgtgagcgaccagttctaccggtacaaaatgccacgattaatcgcgaaagtcgagggtaagggtaacgggattaagaccgtcattgtaaatatggtagatgttgccaaggcgcttaacagacccccaacataccccaccaaatattttggctgtgaacttggagcacagacccagtttgatgtcaagaacgaccggtacatcgtcaatggatcccatgaggccaacaagctgcaagacatgctcgatggattcattaaaaagttcgtgctttgtccagagtgtgaaaatcctgaaacagatctgcacgtcaatcccaaaaagcaaacgataggcaattcctgcaaagcctgcgggtatcgagggatgctagatacacaccacaaattgtgcacgtttatattgaaaaatccgcccgagaattccgattctggcacaggtaagaaagagaaggagaagaagaatagaaagggaaaagataaagagaacggatctgtctcctcctctgagacaccccctccccctcctccacccaatgaaatcaaccctccgccacacacaatggaagaagaggaagacgacgactggggggaggacaccacagaagaggctcagcggcgaaggatggacgagattagcgatcacgcgaaagttttgactttatcagacgacctcgagcggactattgaagaacgggtgaatatcctgtttgatttcgtgaagaaaaagaaggaggaaggagttatcgattcctctgataaggagatcgtcgctgaagcagagaggttggacgtgaaggccatgggacctttagtgctcactgaggttctgtttaacgaaaaaattcgggagcaaatcaagaaataccgcaggcatttcttgcggttctgccacaataacaagaaagcgcaaagatatctcctccacggactggagtgcgtcgtcgccatgcatcaagcccagctgatctcaaaaatcccgcacatccttaaagagatgtacgatgctgatctgttggaagaggaggtgattataagctggtccgagaaagcgagtaagaagtacgtttcgaaagagttagcaaaggagatccgtgtcaaggcagaaccgtttataaagtggctcaaggaggcagaagaagaatcaagtggcggggaggaggaagatgaggatgagaacatcgaagtggtatatagtaaagcggcctcagttcctaaggtggagactgtaaagagcgacaacaaagacgatgatatcgacattgacgctatctag

SEQ ID NO: 187170 - DNA, 603 bp, synthetic construct
  misc_feature 1..603: note = Description of Artificial Sequence: Synthetic coding sequence
  source 1..603: mol_type = other DNA
atgagcgtgaacgtgaaccggagcgtgagcgaccagttctaccggtacaagatgccgcgcctgatcgcaaaagtggaaggcaagggcaacggcattaaaacagttatcgtgaacatggttgatgtcgctaaggctcttaatcggccacccacttatcccacaaagtacttcggctgcgagctaggcgcccaaacccaattcgatgtaaagaacgacaggtacatcgtcaacggctcacacgaagcaaacaagttacaagacatgctcgatggattcataaaaaagttcgtattatgccccgagtgtgagaaccccgagacggacttgcacgtgaatcccaagaagcaaactattggcaattcctgtaaggcatgcggatatcgagggatgttagatactcaccacaagctgtgtacatttatactcaagaatcccccagaaaacagtgactccgggaccggcaaaaaggagaaagagaagaagaataggaagggtaaagacaaagaaaacggcagtgtgagcagctccgagaccccccctcctccacctcctcccaatgagatcaaccccccgccccacaccatggaagaagaggaggattag

SEQ ID NO: 187171 - DNA, 441 bp, synthetic construct
  misc_feature 1..441: note = Description of Artificial Sequence: Synthetic coding sequence
  source 1..441: mol_type = other DNA
atgagcgtgaacgtgaaccggagcgtgagcgaccagttctaccggtataaaatgcctagactcatcgctaaagtagaaggtaagggcaatggcattaagacagtgattgtgaatatggtggacgtcgctaaagccttaaaccggcctcctacctaccccactaagtacttcgggtgtgagctgggagcccagactcaattcgatgtcaagaacgaccgctacatcgtgaatggctcccacgaagctaataaactccaggacatgctcgatggcttcatcaagaaatttgtcttatgtcctgaatgcgagaaccctgagaccgatttacatgtaaaccccaaaaagcagacgattggtaactcatgtaaagcttgcggctacagaggcatgctggacactcatcacaagctatgtacctttatcctgaagaatcccccttag

SEQ ID NO: 187172 - DNA, 1296 bp, synthetic construct
  misc_feature 1..1296: note = Description of Artificial Sequence: Synthetic coding sequence
  source 1..1296: mol_type = other DNA
atgagcgtgaacgtgaaccggagcgtgagcgaccagttctaccggtataagatgccaaggttgatagcgaaggtggagggcaagggtaatggaatcaagactgtgattgtgaatatggtcgacgtcgccaaagccctcaatcgcccacccacataccccacaaagtattttggctgtgagttaggcgcccagacgcaatttgacgtcaaaaacgacaggtatattgtaaacgggtctcacgaagccaataaactgcaggatatgctggatgggttcatcaagaaattcgtcctctgcccggagtgtgagaacccagagacagacctccacgtgaaccctaagaagcagacaatcggaaactcctgcaaggcttgtgggtaccgcggaatgctggacacgcaccacaagctatgcacatttattctcaaaaacccccccgagaacagcgactcgggtacaggtaagaaggaaaaggagaagaaaaacagaaaaggaaaagacaaggagaacggtagcgtcagtagttcggagactcctcctccaccacccccccccaatgagatcaacccaccacctcacaccatggaggaggaagaggacgatgattggggcgaagacacgacggaggaggcccagcgccggcggatggatgaaatcagcgatcacgcgaaggtgttgaccctgagtgacgatctggagaggactattgaggaacgtgtaaacatcctgttcgatttcgttaagaaaaaaaaggaagagggggtgatcgactcatctgataaggaaatcgtggctgaggccgagcgtctggatgtaaaggcaatggggcctctggtattgacagaggtgcttttcaatgagaagatccgggagcagataaagaagtacagacgacactttctgcggttttgtcataacaataagaaggctcagcgctatctgctccacgggctcgagtgcgttgtggccatgcaccaggctcaattgatttctaaaattccacatattctaaaggagatgtacgatgcagacctgcttgaagaggaggtcatcatctcttggtccgagaaggcgtccaagaaatatgtgtctaaagaattagctaaggaaattcgtgtgaaagcggaaccatttattaagtggctaaaagaggccgaggaagaaagttccgggggagaagaggaagacgaggacgagaatatcgaggtggtttactcaaaagcagcaagtgtgcccaaggtggagactgtcaagtctgacaataaggatgacgatatcgatatcgatgcaatttag

SEQ ID NO: 187173 - DNA, 210 bp, synthetic construct
  misc_feature 1..210: note = Description of Artificial Sequence: Synthetic coding sequence
  source 1..210: mol_type = other DNA
atgagcgtgaacgtgaaccggagcgtgagcgaccagttctaccggtataaaatgccccgtctcatcgccaaagttgagggcaagggaaatggcatcaaaacagtgattgtgaacatggtagacgtagccaaagccctgaatcgcccacctacgtacccaacaaaatattttggttgtgaactcggagcacagacccagttcgatgtctag

SEQ ID NO: 187174 - DNA, 330 bp, synthetic construct
  misc_feature 1..330: note = Description of Artificial Sequence: Synthetic coding sequence
  source 1..330: mol_type = other DNA
atgagcgtgaacgtgaaccggagcgtgagcgaccagttctaccggtacaagatgcccagactgatcgcaaaggtggagggaaagggtaatggtataaagactgtgatcgtgaatatggtcgacgtcgccaaagccctgaatagacctccgacctacccgaccaagtacttcggctgcgagcttggagcacagactcagtttgatgtaaaaaatgaccgctatatagttaatggttcccatgaagccaacaagttgcaggacatgcttgatggcttcatcaaaaagttcgtcctttgccctgagtgtgaaaaccccgaaactgatctatag

SEQ ID NO: 187175 - DNA, 306 bp, synthetic construct
  misc_feature 1..306: note = Description of Artificial Sequence: Synthetic coding sequence
  source 1..306: mol_type = other DNA
atgagcgtgaacgtgaaccggagcgtgagcgaccagttctaccggtataagatgcccaggctgatcgcgaaagtggagggtaaaggaaatggaatcaagaccgtcatcgtcaacatggtggacgttgccaaagccctaaatcggcctccgacgtaccctaccaagtacttcgggtgtgaactgggagcccagacacagtttgacgtcaaaaacgatagatatatagtcaacggctcccacgaggctaacaagctgcaagacatgctggacggtttcatcaaaaagtttgtgctatgtcccgagtag

SEQ ID NO: 187176 - DNA, 156 bp, synthetic construct
  misc_feature 1..156: note = Description of Artificial Sequence: Synthetic coding sequence
  source 1..156: mol_type = other DNA
atgagcgtgaacgtgaaccggagcgtgagcgaccagttctaccggtacaaaatgccgagattgatagctaaggttgaggggaaagggaatggcatcaagacagtgatagtgaacatggtggatgttgcaaaggctctgaacagaccccccacctag

SEQ ID NO: 187177 - DNA, 330 bp, synthetic construct
  misc_feature 1..330: note = Description of Artificial Sequence: Synthetic coding sequence
  source 1..330: mol_type = other DNA
atgagcgtgaacgtgaaccggagcgtgagcgaccagttctaccggtataagatgccacggctgattgctaaggtggagggaaaggggaacggaattaaaactgtcatcgtcaacatggttgacgtggctaaggcacttaacaggccgccaacctacccaaccaaatattttggttgcgaattgggtgcccagactcagttcgacgtcaagaacgacaggtatattgtgaatggatcgcacgaggccaacaaattgcaagacatgctagacgggttcattaaaaaattcgtgctgtgtcccgaatgcgaaaacccggaaacggacttatag

SEQ ID NO: 187178 - DNA, 555 bp, synthetic construct
  misc_feature 1..555: note = Description of Artificial Sequence: Synthetic coding sequence
  source 1..555: mol_type = other DNA
atgtgcggcaccggcggcaccgacagcaagacccggcggcccccccaccgcgcctcgttcctcaaacgactagaaagcaagcctttgaagatggctgacgatctcgatttcgaaaccggcgacgctggggcctctgccacgttccctatgcagtgttctgctctgcgaaagaatggtttcgttgtcctcaaaggcaggccctgcaaaattgtcgagatgtccacaagcaaaaccggaaagcatggccatgccaaagtgcacttggttggaattgacatcttcacagggaagaagtacgaggacatctgcccctcaacgcacaatatggacgtcccaaacattaagcgcaacgacttccaattgattgggatacaagatgggtatctctccctcctccaagactcgggtgaggtgcgcgaggatctgcgtttgccagagggggacctgggcaaggagatcgaacagaaatacgattgcggcgaagagattctaattactgtgctctctgcaatgaccgaagaagccgctgtagctatcaaggctatggcaaagtag

SEQ ID NO: 187179 - DNA, 465 bp, synthetic construct
  misc_feature 1..465: note = Description of Artificial Sequence: Synthetic coding sequence
  source 1..465: mol_type = other DNA
atggccgacgacctggacttcgagaccggcgacgccggcgccagcgctacctttcccatgcagtgttctgctttacgcaagaacggattcgtggtgctgaaagggcgaccgtgcaagattgttgaaatgtcgacatctaagacaggtaaacatggccatgcaaaggtacatctcgtgggcatcgatatctttaccggaaagaagtatgaagacatctgtccctctacccataatatggacgtgccgaacattaaaaggaacgactttcagttgataggtatccaggacggctacctgtcactgctacaggattcaggggaagtcagggaggacttgcggctgccagagggcgacttgggcaaagaaattgaacagaaatatgactgcggcgaggaaatactcatcaccgtgctcagtgctatgaccgaggaggctgcagtcgctattaaggccatggcaaagtag

SEQ ID NO: 187180 - DNA, 645 bp, synthetic construct
  misc_feature 1..645: note = Description of Artificial Sequence: Synthetic coding sequence
  source 1..645: mol_type = other DNA
atgacctggaccagccggcaggagatgcagggcccccagcccccctcgcagtgttctgctcagcactatgtgcggatggcactctggtgctctaaggcaggccatgtccgaagtagtcggtgcctgcttcggcgccttgcaagcactgccaccccacggctcgagtttcatctccggattctaccctctccatgcctgcagtacctctggagatcccagcagcaggcagccaactctgcggacttcccactgacactactactgctgagcgattgcttttgcctggccctgtccctccatacacacagcgataactatacttgttccccagtattctccctcttttgtgggtatcccagtgtcccggcttcgttctccggtagcccctccgtgagccccgccctgtgccagagcctccagttcataggtctgtacgctctggccatacagctgcttcttccgtattcttggttctccctgttcctgtcatcactggagccgctgctgtctggatgttttcaccacgtggcccaggggtttagcaactccacaccaagcccaggaggaacccccgcttctatactgtcctttcaagtgacattgctcttacgcagtcccgtcctggccttccccctggaattgtag

SEQ ID NO: 187181 - DNA, 465 bp, synthetic construct
  misc_feature 1..465: note = Description of Artificial Sequence: Synthetic coding sequence
  source 1..465: mol_type = other DNA
atggccgacgacctggacttcgagaccggcgacgccggcgccagcgcaaccttccctatgcagtgcagtgccttgaggaaaaatggcttcgtggtcttgaaaggacgcccttgcaagatcgttgaaatgtccacgtcaaagaccgggaagcatggccatgcaaaggtacacctggtggggatcgatatctttacgggaaaaaaatatgaggacatctgtccttcaacacacaacatggacgtgccgaacataaagagaaacgatttccagctgataggaatccaggacggctacctgtctctattacaggactccggagaagtcagggaggacttgcggctgccggaaggcgatctgggcaaagagatcgagcaaaaatatgattgcggcgaagagatacttataacggtcttaagcgccatgaccgaagaagctgcagtcgccatcaaggccatggctaagtag

SEQ ID NO: 187182 - DNA, 465 bp, synthetic construct
  misc_feature 1..465: note = Description of Artificial Sequence: Synthetic coding sequence
  source 1..465: mol_type = other DNA
atggccgacgacctggacttcgagaccggcgacgccggcgccagcgcaaccttccctatgcagtgcagcgctctccgtaagaatggctttgtggtcctcaaaggtcggccttgcaagatcgttgagatgtcaacttccaaaaccggtaaacacggccacgctaaagttcacctggttgggatagatatttttactggaaaaaaatacgaggatatatgcccctctacccacaatatggacgtgcctaatatcaaacgcaatgatttccagttaatcggcattcaggacggatatctgagccttctccaggattcgggagaggtaagagaggatctgcggctccctgaaggggacctgggcaaagagatcgaacagaagtacgattgtggggaagagattctgattacggtcttatccgcaatgacagaagaagcagccgtcgccattaaggccatggcgaagtag

SEQ ID NO: 187183 - DNA, 462 bp, synthetic construct
  misc_feature 1..462: note = Description of Artificial Sequence: Synthetic coding sequence
  source 1..462: mol_type = other DNA
atggccgacgagatcgacttcaccaccggcgacgccggcgccagcagcacatatcctatgcagtgctctgctctgcggaagaatgggtttgtggttttgaagggccgcccctgtaagattgttgagatgtcaacttcaaaaaccggtaaacatggtcacgctaaggtgcacctggttgggatcgatatttttaccggcaagaagtatgaggacatttgcccatcaactcacaacatggatgtgcccaatatcaaacgcaatgactatcagctcatatgcatacaggatggatatctgagtctgttgaccgagacaggagaagttcgcgaagatttgaagttgcctgaaggcgagctgggcaaggaaattgagggcaagtacaatgcaggagaggacgtgcaggtttcggtcatgtgtgccatgagcgaagagtacgcagtggctatcaagccatgtaagtag

SEQ ID NO: 187184 - DNA, 738 bp, synthetic construct
  misc_feature 1..738: note = Description of Artificial Sequence: Synthetic coding sequence
  source 1..738: mol_type = other DNA
atggccgtgcgggccagcttcgagaacaactgcgagatcggctgctttgccaaactcacaaacacctattgtctggttgccatcggaggctctgagaatttttactctgtgttcgagggtgagctgagcgacacaattcccgtcgtacatgcatctattgccggctgcagaatcatcgggagaatgtgtgttgggaacagacacgggctactggtgccaaataacacaacagaccaagagttgcagcatatcagaaactccctccctgatacagtgcagatccgccgcgttgaggagaggttgtcagccttgggtaacgtgacaacgtgcaacgactatgtagctctggtccatcccgacctcgatcgcgagactgaggaaattcttgccgacgtgctgaaggtagaagtgttccgccagactgttgcagaccaggtgcttgtgggttcttactgcgtgttttctaatcagggaggactagtccatccaaagacttcgatagaagatcaggacgaactgagctccctcctccaggtgcctctcgtggccggcacagtgaatcggggctctgaggtgatcgctgcaggaatggtagttaacgactggtgcgccttttgcggcttagacaccaccagtacagaattatcagtagtcgaatcagtgttcaagcttaacgaagctcagccaagcactattgcaacttccatgcgcgactccctgatcgattccttgacctag

SEQ ID NO: 187185 - DNA, 681 bp, synthetic construct
  misc_feature 1..681: note = Description of Artificial Sequence: Synthetic coding sequence
  source 1..681: mol_type = other DNA
atggccgtgcgggccagcttcgagaacaactgcgagatcggctgcttcgccaaactgactaatacctactgtctggtagccatcgggggatcggaaaatttttaccgttgcgggggcagccctggggcttacggcgggggcgaagcctgtgccggcgttaaaagttctggaagcgggagggtgcctgccccactgcctcgacatcatcgcgttcacgtgcctacggtgtgctcaagagcctcatctcctatcccaagtccttggtgtacgagactcagtcccgcagccgcctcttctggcgcttgtgtgtgggaaaccgaggagatactcgctgacgtgctgaaggtggaagtgttccggcagacagtggcagaccaggtgttggttgggtcttactgcgtctttagcaaccaaggtgggttagtgcatcccaaaacttcaatcgaagaccaggatgaactgtcttccctattacaagttccgctggtagcggggacagtaaatcggggctccgaagtgatagctgccgggatggttgtgaacgattggtgcgctttctgtgggctggacaccacctcgactgagctgtctgtggtggaaagtgtatttaagctgaatgaagcgcagccatcaaccattgcaaccagtatgagggactcccttattgatagtttaacctag

SEQ ID NO: 187186 - DNA, 738 bp, synthetic construct
  misc_feature 1..738: note = Description of Artificial Sequence: Synthetic coding sequence
  source 1..738: mol_type = other DNA
atggccgtgcgggccagcttcgagaacaactgcgagatcggctgcttcgccaaactgaccaacacttactgcctcgttgctattggcggatctgaaaacttctactctgtgttcgagggcgagttatctgataccataccggtagttcatgcaagcatcgccggatgtcgaatcatcgggagaatgtgtgtcgggaatcgccacggcttgctcgttccgaataatacaacagatcaggagctgcagcacatccggaactccctgcccgacaccgtgcagatacgacgcgtggaggagcggcttagcgcgcttggaaacgtgaccacatgcaatgactatgtggccctagtgcacccggaccttgaccgcgaaactgaagaaatcttagcagatgtcctgaaggtggaagtctttcggcagactgttgctgatcaagtgctcgtaggaagctactgcgtgttctctaatcagggaggcctggttcatcctaaaaccagcatagaggaccaggatgaattatccagcctgctccaagtgccgcttgttgccgggacagtcaatcgaggctccgaagtgattgccgctggtatggttgtcaacgattggtgcgcattttgcggccttgatactacaagtacagagctttcggtcgtggagtctgtatttaagttgaatgaagcacagccctccaccatcgctacctctatgagagactctctgattgactctctgacgtag

SEQ ID NO: 187187 - DNA, 327 bp, synthetic construct
  misc_feature 1..327: note = Description of Artificial Sequence: Synthetic coding sequence
  source 1..327: mol_type = other DNA
atggccgtgcgggccagcttcgagaacaactgcgagatcggctgctttgcaaagctgactaacacctactgcctggtggctattggaggctccgaaaacttctattccgtgttcgagggggagcttagcgacaccatcccagtcgtgcacgccagtatagcaggttgccgcattatcggacgcatgtgcgtcgggaataggcatgggctacttgtcccgaataataccacagatcaggaacttcagcatatcagaaattctctgccagataccgtacagatcagaagggtcgaggagaggctctctgcgcttggcaatgtgacatag

SEQ ID NO: 187188 - DNA, 1314 bp, synthetic construct
  misc_feature 1..1314: note = Description of Artificial Sequence: Synthetic coding sequence
  source 1..1314: mol_type = other DNA
atggccgacgaccccagcgccgccgaccggaacgtggagatctggaaaattaaaaagttaatcaagagtctcgaggccgcccgtggaaatggtacaagcatgatctcgctcattataccacctaaagatcagataagcagggtagccaagatgctggccgatgaattcggaaccgccagcaacatcaaaagtcgcgttaatcgcctctccgtcctcggagcaattacaagcgtgcagcagcgtctcaaactctataacaaagtaccccccaacggactcgtggtctactgcggaacaatagttacagaagagggcaaggagaaaaaagttaacattgacttcgagcctttcaaacctataaatacctctctatacctatgcgataacaagttccacaccgaggccttaaccgccctcctttctgacgactccaagttcggttttatcgtgattgatgggagtggggctctgtttggtacactccaaggaaacacgcgggaggtgctgcacaaatttactgtcgatctgcccaaaaagcacggtcgcggagggcagagcgctttgcgattcgccaggttacgcatggagaagagacataattacgtccgaaaagtggctgagacggctgtgcagctgttcataagcggagataaagtgaatgtggcggggttggtgctggccggctccgctgacttcaagacagagctaagccagtctgatatgttcgaccaaaggctgcaaagcaaagtgttaaagttggttgacataagctatggcggggaaaacggtttcaaccaagccattgaactgtcaactgaggtcctgtctaacgtgaaatttatccaggaaaagaagctaattggtagatacttcgatgagattagccaggacaccggcaaatactgtttcggggtcgaagatacactgaaagcgttagaaatgggcgccgttgaaatactgattgtgtatgaaaacctggatatcatgcgttacgtcctgcattgtcagggaacagaggaagagaaaattctgtacctgacccccgagcaggagaaggacaaatcgcactttacggacaaggaaacaggccaggagcatgagctgatcgaatccatgccacttttggagtggtttgccaataattataaaaagttcggcgctacccttgagatcgtgactgataagagtcaagaaggttcgcaatttgtaaagggatttggtggtatcggaggaattctccggtatcgagtggatttccagggcatggagtatcaggggggggatgacgaatttttcgaccttgacgattactag

SEQ ID NO: 187189 - DNA, 1215 bp, synthetic construct
  misc_feature 1..1215: note = Description of Artificial Sequence: Synthetic coding sequence
  source 1..1215: mol_type = other DNA
atgatcagcctgatcatcccccccaaggaccagatcagccgggtggccaagatgttggctgatgagttcgggacagctagcaacatcaagtcacgcgtcaaccggctaagtgttctgggcgcgatcacatccgttcagcagaggcttaaactgtataacaaagtgcctccgaatggtttggtcgtttactgtggcacaattgtaactgaggaaggcaaggagaaaaaggtgaatatagactttgagccctttaagcctatcaatacctcattgtatctttgcgataacaagtttcacaccgaggccctcacagccctgctgtccgatgacagcaagtttggctttatcgtaatagatggctcaggagctctgtttggaaccctgcaggggaatactagggaggtattgcacaaattcactgtcgacctgccaaagaagcacgggaggggcggccagagcgctctgcgcttcgcacggctcaggatggagaagagacacaattatgtaagaaaggtggctgagacagctgtccagctattcatctcgggcgacaaagtgaacgtggcggggctcgtgctggccggctccgcggatttcaagacggagttgtcccagagcgatatgttcgatcagaggcttcagagtaaagtcctgaaactcgtcgatatttcctatggaggagaaaatggatttaatcaggccatagagctttccacagaggtcttaagcaacgtgaaattcatccaagagaagaagctgatagggaggtactttgatgaaattagtcaggatacagggaagtactgctttggagtggaggataccctcaaagccctggaaatgggcgctgttgaaatcctgatagtgtatgaaaatcttgatatcatgcgctatgtgctgcactgccaaggaaccgaggaggagaagatcctgtacctgacccccgaacaggagaaggataagtcccactttactgacaaggagaccgggcaggaacacgaactcatcgaaagtatgccgctgctcgaatggttcgccaacaattacaagaaattcggagccacactggagatagtcaccgacaagtcacaggagggttctcagttcgtgaaaggcttcggaggcatcggagggatactaaggtacagagtggatttccagggaatggagtatcaggggggtgatgacgaattcttcgacttggacgactattag

SEQ ID NO: 187190 - DNA, 1272 bp, synthetic construct
  misc_feature 1..1272: note = Description of Artificial Sequence: Synthetic coding sequence
  source 1..1272: mol_type = other DNA
atgaagcaggacgtgctgaactgcaccgagggccccatccacagcaacggaacttctatgatcagcttaataatcccccccaaagaccagatctctcgtgtggccaagatgctagcagacgaatttgggacggcctccaacattaagagtagagtcaatcgtctgtcagtgctgggagcaattactagcgttcaacagagactcaagctgtataacaaagtgcctcccaatggtcttgtggtgtactgtggtaccatcgtaactgaagaggggaaggagaaaaaggttaatatcgatttcgagcccttcaaacctatcaataccagcctttacctctgtgacaacaagttccatactgaggccctgactgctttgctgtctgatgacagcaaatttgggttcattgtcatcgatggttcgggcgccctgttcggcacactgcaaggtaacactcgagaggttctgcataaatttactgttgatctgcccaagaagcatgggcggggaggacagtccgccctgaggttcgcccgtctaaggatggagaagcgacacaactatgtgcgcaaggtggcggaaacagctgtgcagttgtttatctctggggacaaggttaacgtggctggtctcgtgctcgctggatccgccgactttaagactgagttgagccagtccgacatgttcgatcagcgcctgcagtcaaaggtgctgaagctggtggacatatcctatgggggcgaaaatggatttaatcaggcaatcgaactgagcacagaagtactgagcaatgtgaagttcatccaggaaaaaaagctgatcggtaggtattttgatgaaatatcacaggatacggggaaatattgtttcggagtcgaagacacgctgaaagcgctggagatgggagccgtggaaattctgatcgtgtacgaaaacctggacattatgcgctacgtgctgcattgtcagggaacagaagaagaaaagatactctatctcaccccagagcaggaaaaagataaatcacatttcacagacaaagagacagggcaagagcacgaactgattgagagcatgcccctgcttgagtggttcgccaataactataaaaaatttggtgccaccttagaaatcgtgaccgacaaatctcaggaagggtcacagtttgtgaaaggatttgggggcatcggaggcatactccgttacagggttgattttcaagggatggagtatcaggggggcgatgatgagtttttcgatctcgacgactattag

SEQ ID NO: 187191 - DNA, 1224 bp, synthetic construct
  misc_feature 1..1224: note = Description of Artificial Sequence: Synthetic coding sequence
  source 1..1224: mol_type = other DNA
atggagagccggaaggacatggtggtgttcctggacggcggccagctcggaaccttggtcggaaagcgggtctccaacctctcagaagctgtggggagccctctgcctgagccccccgagaaaatggtgccccgcggctgccttagcccacgcgctgtccctcctgccacccgagagcggggcggtggaggcccagaagaggagcccgttgatggactggccggatcggctgccggccccggggctgagcctcaagtggcaggtgctgcgatgctgggcccggggcctccagccccgagcgttgactcgctgtctggccaggggcaaccgagttcaagtgataccgaaagtgacttctatgaagagatcgaggtttcctgcacacccgactgcgccactggcaacgcagagtatcagcattcgaaggggagcggatcagaggctttggttggatccccaaacggaggatcggagacacctaaatccaacggcggcagcggcggcggcggttcccagggaacacttgcttgtagcgctagtgaccagatgagacgctacaggacagcctttaccagggagcagattgcccgattggagaaagaattttatcgagagaattacgtctctcgtcctcgtagatgtgagctagcagccgcactgaatctgccagagactacaatcaaggtctggtttcagaacaggcggatgaaagataagcggcaacgtcttgcaatgacctggcctcaccctgcagacccagccttctatacctatatgatgtctcatgctgccgcagccggcggcctgccttatcctttcccgagtcacttacctctaccatattactctcctgtcggactcggcgctgcttcagcagcttccgctgcagcctcccccttcagcggctctctgagacccttagatacattccgggtgctgagccagccctatcccaggcccgaactcctgtgcgcattccgtcaccccccactgtacccaggcccggcgcacggtctgggcgctagcgcaggcggcccctgttcttgtctggcatgtcatagcgggccagcgaatggattggcacctcgcgcggctgctgccagcgacttcacttgcgcctccactagcaggagcgactcgtttctgaccttcgcacccagtgtcctgagtaaggcttcatccgtggccctcgatcagagggaagaggtgcctttgaccagatag

SEQ ID NO: 187192 - DNA, 678 bp, synthetic construct
  misc_feature 1..678: note = Description of Artificial Sequence: Synthetic coding sequence
  source 1..678: mol_type = other DNA
atgcggcggtaccggaccgccttcacccgggagcagatcgcccggctcgagaaagagttctaccgcgaaaactacgtgtctcggccgaggagatgtgaactcgcggcagccttaaacctccccgagactaccattaaggtgtggttccaaaaccggcgaatgaaggataaaagacaacgtctcgctatgacatggccccatcctgctgatccggctttctacacatacatgatgtctcatgctgctgccgctggcggacttccctatccctttcctagtcatctccccttgccatattattccccggtgggccttggtgcggccagcgcagcttcagccgccgcctctccgttcagtggcagccttcggccgctcgacacctttcgggtattaagccagccttaccccaggcctgagctcctatgcgctttcagacacccgccattatatcctggacccgcacacggcctgggggctagtgcgggtggtccttgttcctgcctcgcctgccactctggccctgcgaatggcctggctcctcgagctgcagccgctagtgatttcacatgtgcatccacatcccggtccgatagctttctgacttttgcacccagcgttttgtccaaggcaagcagcgtcgctcttgaccagcgagaggaggtgcccttgactcgatag

SEQ ID NO: 187193 - DNA, 1431 bp, synthetic construct
  misc_feature 1..1431: note = Description of Artificial Sequence: Synthetic coding sequence
  source 1..1431: mol_type = other DNA
atgatggagcggatccggaaggagatgatcctgatggagcggggcctgcacagtcctactgctggcaaacggttttctaatctgtccaactccgcggggaatgccgtgctggaagccctggagaattcacagcatcccgctagattatccccgcgtctgccctccgcgcccctccactcggccttgggggaattacccgctaagggtaagtttgagatagatacactttttaatctgcagcacacagggagtgagagcacagtgtcttccgaaatttcatcagctgctgaatcccgaaagaaacctggccattatagcgaggccgcagcagaggctgacatgtcctccgacgtggaggtcgggtgctccgccctgcggtcgcctggtggactgggggccgcacagttgaaggagaataacggcaagggatatgccgaatccggcagtgccgccggcacaaccacttccgcctcaggcagtgggttaggttctctgcatggaggttcagggggcagcggaggcagtgccgcactgggtggctctggctcaggcgcggatcaagtccgcagataccgaaccgcctttacccgagagcagattgctcgcctggaaaaggaattttacagagaaaattatgtctcgagaccacgccggtgtgagctggccgccgcactcaacttacccgaaactaccattaaagtctggttccagaaccgaagaatgaaggacaagcggcagagactggcgatgtcatggccccaccctgctgacccctctttctacacttacatgatgactcacgctgccgccactggttcactaccatatcctttccacagccacgtgccattacactactatccccacgtgggagtaaccgctgctgccgccgctgcagctgcaagcggagctgctgccgcggcgagctccccattcgcgacaagcattaggcctctggacacttttagggccctgagccatccctactcccgcccagagctgctatgtagctttcgtcatcccggtctgtaccaggcccccgcagccgccgccggccttaactcagctgccagcgcggctgctgctgcagctgccgccgctgcggcggcatccagcgccgccgctgccggggccccaccgagcggaggctctgctccatgctcatgcctgtcgtgccattccagccaaagcgcagcagctgctgctgcggctgctgctgccgctcttgggagccgcgggggaggaggtggaggaggtggcgggggaggcggcggcggcgggggcgccggagcagggggtgggtcagattttggttgcagtgcggcagcaccccggagtgagtccggattccttccctacagcgctgccgttttgtctaaaacagccgtgtccccgcccgaccagagagacgaagcccctctgaccaggtag

SEQ ID NO: 187194 - DNA, 2781 bp, synthetic construct
  misc_feature 1..2781: note = Description of Artificial Sequence: Synthetic coding sequence
  source 1..2781: mol_type = other DNA
atgagccggcggcggaagcacgacgacagccccagccccaagaagaccccccacaaaactgtcgcagcggaagaatgtggtagcgtcgtagagccgggcaggaggcggttacggagtgcaagaggcagctggccgtgtggagcacgcgagggcccacctggacccgtgagacagagagagcagcctcccaccgccgccctgtgttcaaagtctaacccggaagaacgctatgagacccccaagagagctcttaaaatggactccttatccagcagcttcagctctcctaatgatcccgatggacagaatgacatcttctgggatcagaattcacccttaaccaagcagctaggtaaaggacggaagaaacagatttatacgacagatagcgatgagatttctcatatcgtcaaccgtatagccccccaggatgagaagcccacgaccaatagcatgctggacatgtggatcggcgagacggccatcccgtgcaccccttcggtggccaagggtaagagtcgagccaagatttcctgcaccaagctgaagacccagtcacaagaagaagagctgatgaaacttgccaagcaatttgataaaaatatggaggagttggacgtcatccaagagcagaacaaaaggaattacgacttcacgcagatgattagtgaaacagagatcctctctaactacaaagataacatccagatgtggagccttcataatatcgtcccagagatcgacaacgccacaaaaaagcctatcaaagggaacaccaagatctcagtggctaacaatcagaacagttctcagaagcccttcgaccagatcgcagaggcagcctttaacgctatttttgatggctctacacagaagtgcagcgggcagctaagtcaagaactgcccgaagcattttggtctacatctaacactacgttcgttaagactaacgctctgaaggaggaaaaaattattacaaacgagactttggttatcgaaaaactgagtaataagacgccaagaagtctgagctcacaagttgatacccctattatgaccaaatcctgcgtgacaagctgtactaaagagcccgaaacctcgaataagtacattgatgccttcacgacctcagacttcgaagacgactgggagaatctactaggcagcgagcccttcgcgatgcagaatatagatatgccagaactgttcccgtccaagactgcccacgtgacagatcagaaggaaatctgcacctttaactccaaaactgttaagaatactagccgggccaacacttctccagatgctcgattgggagacagcaaagtgcttcaggatctctccagtaagacctatgatagggagctgatcgatgcggaatatagattctctcctaactcaaataaatcaaataaacttagtactgggaataagatgaagtttgagaacagtagtaataagatcgtgatccaggacgaaatccagaactgcatcgtgacctcgaacctgaccaaaattaaagaggacatattgacaaactccactgaggcaagcgagcgaaaatccgcccttaacacaaggtacagtaacgaacagaagaacaaatgtatccttaaccagagcatcaaagcccctgtgaatactgacctgtttggatctgcaaatctggggtcaaaaacctcagttagcaatcccaatcagaccagcgcgagcaaggtcggctctttttttgacgactggaatgacccaagcttcgcaaacgagataatcaaagcctgccaccagttagataatacgtgggaagccgatgatgttgacgatgacctgctataccaagcctgcgatgacatagaaaggttgactcagcagcaggatattcggaaagattctaaaacatccgaatccatctgcgagataaacaacaactctgaacatggagccaagctgacacagcagcaggatattcgcaaggactcgaaaacaagcgaatctatctgtgagattaacaacaattccgagcacggcgcaaagaatatgttcgcgatttcaaaacagggtagcaatctggtgcagagcaaacatctcaatcctgggagcatttctgttcaaacatcactgaccaatagctcgcagatcgataagccaatgaaaatggagaagggggaaatgtatggcaattccccccggttccttggggccactaatctgaccatgtacagcaagatttccaattgtcaaatcaataatttgcacgtttcttacacaaacaccgacgtacccatacaggttaactcttccaaattagtgctccctggctctagtagcctcaatgtcactagtgaccacatgaatacagagattacaacttataaaaagaagctgagtaccaaccagccttgccataaaaccgtcactgatgaggctcaatcaaatcttaacactacggttggattttctaagtttacattcacccggatgaaaaattcccaaatactgtctcagtttaaccaaaattgtatcacggggtcgatgtctgatactaagataacacagggcgtcgagaaaaaaaagggagttaacccattgctcgaagaggcagttggccagcagtcccttgtgaaactgtccgagtcactgaagcagtccagtaaggaggaagaggaaaaaaaccgaaaatgctcgccagaagaaatccagcggaagaggcaggaagccttagtccggcggatggcgaaggcccgtgccagttctgtgaatgcggctccaaccagttttctgtag

SEQ ID NO: 187195 - DNA, 2349 bp, synthetic construct
  misc_feature 1..2349: note = Description of Artificial Sequence: Synthetic coding sequence
  source 1..2349: mol_type = other DNA
atgggcaagcgggaccgggccgaccgggacaagaagaagagccggaagcggcattatgaggacgaagaagacgacgaggaagacgcccctggtaacgacccacaagaagcagtgcctagcgctgcagggaagcaagttgatgaatctggcacaaaggtggatgagtatggggccaaggattatcggctgcagatgcctctaaaggacgatcatacgagccggcctctgtgggtcgccccggacggacacattttccttgaagctttttcccctgtatataaatacgcccaggactttctcgtggctattgcagaacccgtttgccggcctactcatgttcacgagtacaagttgaccgcatattccctgtacgcagctgtgagcgtgggcctgcagacctccgacattaccgaatacctgcgcaagctgagtaaaactggagtgcccgatggcattatgcagttcatcaagttgtgcaccgtgagctatggcaaggttaaattggtgctgaagcacaacaggtacttcgtggaatcatgtcacccggacgtaattcagcatttgctccaggatcctgtaatccgtgagtgccggcttagaaattccgaaggcgaagccacagaattaattacggagactttcactagtaaaagtgccatctccaagacagctgagagctctgggggcccatccacgtcgagggtaacggatccccaagggaaatctgacattcctatggatctgtttgacttttatgagcagatggacaaagacgaagaagaagaggaggagacccaaactgtctctttcgaggtgaagcaggagatgatagaagaactccagaaacggtgtattcacttggagtatccattattagccgaatatgattttcggaatgacagtgtgaaccctgatatcaatattgacctcaaacctactgctgttctgagaccttatcaggaaaagagtttaagaaaaatgtttggaaacggtcgggcgagatcaggcgtaatcgttctcccatgtggcgccggcaagtcattagtgggtgtcactgctgcctgtacagttcgcaagcgctgtctggtgctgggtaactctgcagttagtgtggagcagtggaaagctcagttcaaaatgtggtctacaatcgacgactcccagatttgtcggttcacgtccgatgctaaggacaaacctattgggtgtagtgtcgctatttcaacctacagcatgttgggtcatactaccaagcgctcttgggaggccgagcgcgtgatggaatggttgaaaactcaagagtggggcctaatgattttggatgaggtgcacacaatcccagccaagatgttccgccgtgtcctcacaatcgtgcaggcgcactgtaagctggggctgaccgcaaccctcgtacgcgaagatgataagatcgtggatttgaactttctgattggtcccaaactatatgaggctaattggatggaacttcagaataacgggtacatcgccaaggttcagtgcgccgaggtatggtgtccaatgtcgcctgagttttaccgagaatatgtagctataaaaacaaagaagcgaattctgctgtacacaatgaatcctaataagtttagagcctgtcagtttctgataaagttccatgagcgccggaacgacaaaataatcgtgttcgcagataacgtgttcgctctcaaagagtacgcaatccggctgaataaaccctatatttatggcccaactagccagggcgagcgcatgcagatcttgcagaacttcaaacataaccctaaaatcaacaccatattcatatcaaaggtgggtgatacgagtttcgacctgcccgaggctaatgtactgatccagatcagttctcacggaggttccaggaggcaggaggcacaacgcctgggccgcgtgctgagagctaaaaagggtatggtcgctgaagagtacaatgctttcttttacagcctggtgagccaagatacacaggaaatggcatacagtactaagagacagaggtttctagtagaccaggggtactccttcaaagttataacaaagcttgccggtatggaagaggaagatttggccttcagtaccaaagaagaacagcagcaactgctgcagaaggtcctggctgctacggatttagacgcggaggaggaggtggtggcgggggaattcggcagcagaagctcacaagccagtcgccgatttggcacaatgagctctatgtccggagcagacgacacagtttacatggaataccatagttctcgcagcaaagccccctcgaaacatgtgcaccctctgttcaaacgctttcggaagtag

SEQ ID NO: 187196 - DNA, 2157 bp, synthetic construct
  misc_feature 1..2157: note = Description of Artificial Sequence: Synthetic coding sequence
  source 1..2157: mol_type = other DNA
atgcccctgaaggacgaccacaccagccggcccctgtgggtggccccagacggccatattttcctggaagcttttagtcctgtgtacaaatacgcccaggactttttggtggccatagctgagccagtgtgcaggccaacacacgttcacgagtacaaactcacagcttacagcctgtacgccgctgtctcggtcggactgcaaacctctgatattaccgagtacctacgtaagctttccaaaactggggttcccgacggtattatgcagtttatcaagctgtgcaccgtatcatacggcaaggtgaagctcgttcttaaacataatcgctactttgtcgaatcctgccatccagacgtcatccaacatctcctgcaggaccctgtcatccgggagtgccgactacgcaactccgagggcgaggccaccgaactgatcaccgagactttcacttcgaagagtgcaatttcaaagacagctgagagcagtggcggcccctctactagccgcgtgactgaccctcagggtaaaagtgacattccaatggatttgttcgacttctatgagcagatggataaggacgaagaggaagaggaggaaacgcagacggtgtcatttgaggtgaagcaggaaatgattgaagagcttcagaagaggtgtattcacctcgagtaccctttactggccgagtacgatttccgtaatgacagcgtgaatcccgatattaacatagacttgaaaccaacagccgtgcttcggccgtaccaggagaagtcactgcgcaagatgtttggcaatggtagagcccgctccggggtcattgttttaccttgtggggcaggaaagtcactggtgggcgtgactgccgcatgtacggtcagaaagagatgcctcgtactgggcaacagtgcagtgtccgtagaacagtggaaagcccagtttaagatgtggtctaccatagatgacagccagatctgtcggttcacgagtgatgccaaagacaagcctataggctgttctgtggccatcagtacctatagtatgcttgggcatacaaccaaaagaagctgggaggcagaaagggttatggagtggcttaaaacccaggagtggggtctcatgattctggatgaggtccataccattcccgctaagatgttccgtcgggttctgactatcgtccaggcacattgcaagctaggcttgactgcaacgttagtgagggaggacgacaagatcgtagatcttaacttcctcatcgggccaaaactgtatgaagccaattggatggagctgcagaacaatggctatattgccaaggtccagtgtgccgaggtttggtgtccaatgtcacccgaattctatagggagtatgtggctataaaaacaaaaaagcggatcctcctgtacacaatgaaccccaacaagttcagagcctgccagtttctaatcaaatttcatgagcgacgcaacgataagatcattgtgttcgcggataatgtatttgccctgaaggaatatgccatcaggctcaataaaccttatatctacggtccgacatcacagggagaacggatgcagatcctacaaaattttaagcacaacccaaagatcaataccatttttatttccaaagttggggacacatctttcgacctaccagaggcgaatgtgcttatacagatttcatctcacggaggatccagacggcaagaggctcagcgcctaggacgggtcctgcgcgcaaagaagggcatggtagcagaggaatataatgcctttttctacagcctggtatcccaggatacccaagaaatggcctactctaccaaacgtcagcgatttcttgtggaccagggttatagcttcaaagttataaccaagctggccggaatggaagaagaggacttggccttcagtacaaaggaggagcagcagcagctccttcaaaaggtgctggctgccactgatctagacgcagaggaggaggtcgtcgctggagaatttggcagtaggagcagccaagcctcccggcggtttggtacgatgagctccatgtcaggtgctgatgacacagtgtatatggaatatcacagctcacggagtaaggctccatccaaacacgtacacccacttttcaaacggttcaggaagtag

SEQ ID NO: 187197 - DNA, 3753 bp, synthetic construct
  misc_feature 1..3753: note = Description of Artificial Sequence: Synthetic coding sequence
  source 1..3753: mol_type = other DNA
atggaggccagccggcggttccccgaggccgaggccctgagccccgagcaggcggctcactatctcagatacgttaaagaggccaaggaggcaacaaagaatggcgacctggaggaagcatttaagctatttaacctagcaaaggacattttcccaaacgaaaaggtgctgtcacgaatccagaaaatccaggaggcactcgaagaacttgcggaacagggcgacgacgaatttacagatgtctgtaatagcggcctgctcctttaccgggagcttcataaccagctgttcgaacatcagaaggagggcatcgcctttctctattccctgtatcgagatgggcgcaaagggggcatcctggctgatgacatgggcttaggaaagaccgtgcaaattattgcctttctcagtggcatgttcgacgcttccctcgttaatcacgtgcttctcatcatgcccactaacctgataaacacatgggttaaggaatttattaagtggacccccgggatgcgcgtgaaaacatttcatggccccagtaaggacgagcgcacccgtaaccttaaccgcatccagcagcggaacggcgtgatcatcaccacttatcaaatgcttattaataactggcaacaactctcctcctttagaggccaggaatttgtctgggattatgtaatccttgatgaggcccacaagattaagaccagttccacgaagagcgcaatttgtgccagggccatccccgcctcgaatcgcttgctgttgaccggcacgcctattcaaaacaatctccaagagctgtggagcctgttcgattttgcgtgtcagggctctcttttgggaactctcaagactttcaaaatggagtatgagaatcctatcactcgggccagagaaaaagatgccactccaggagagaaagcactggggttcaagatctccgagaacttgatggcgattatcaagccttactttctcagaaggacgaaggaagacgttcagaagaagaaatcttccaacccggaggcaaggctgaatgagaaaaacccagacgtcgacgcgatctgcgaaatgcccagtctgagccgaaaaaatgacctgatcatttggatccgcctggtacctctgcaagaggagatctatcggaaatttgtgagcctggatcacattaaggaactcttaatggaaacgcgcagcccattggctgaactgggagtgctgaaaaagctctgcgatcatccgaggttgctctccgctcgcgcttgctgtttgctgaatttaggcaccttttcagcccaggacggcaatgagggcgaggactctcctgatgtggatcatatagatcaagtgaccgatgacaccctcatggaggagagtggaaaaatgatattcctcatggatctgctgaaacgcctcagggacgagggccaccagacactggtgttttcccagtcgaggcagatcctgaatattatcgagagattattgaagaacaggcactttaaaaccctccggatcgatggaacggtcacgcacctcctcgagagagaaaaacggataaacttattccaacagaataaagactattctgtgttcctgcttactacccaggtcgggggagtgggcctgaccctcactgccgctaccagggtggtgatttttgaccctagttggaacccagctacagatgctcaggccgtggatagggtatataggataggccagaaggaaaatgtggtagtgtaccggctgattacatgcggtacagtggaggagaagatctaccgccgacaagttttcaaggacagcctcatcagacagacgaccggagagaaaaagaaccccttccggtacttttcaaagcaagagctgcgggagctattcaccattgaggatttacagaacagcgtaacacagctccaattacagagcctacacgccgcccagaggaaatccgatatcaagttggatgagcatatcgcatacctacaaagtctcgggatagccgggatctccgaccacgacctgatgtacacctgtgacctgtcagtgaaagaggagttggatgtggtggaggagtctcactacattcaacagcgggtccagaaggctcagtttttagtggagttcgagagtcagaacaaagagttcttgatggagcagcagaggacccgcaacgagggagcctggttacgggaacccgtctttccctcctcgactaagaagaaatgtcctaagctgaacaaacctcagccacagccctcccccttgcttagtactcatcacacccaggaggaagatatctctagcaagatggcctcggtcgtaatcgacgatctgcccaaggagggcgagaagcaggacttaagctcaatcaaggtgaacgtgacaacgctgcaggatgggaagggcacaggttccgccgacagtatcgctactttacctaaaggattcgggtctgtggaagaactatgcaccaattcctcgttgggaatggagaagagtttcgccactaagaatgaagccgtccagaaggagactctgcaggagggccctaaacaagaggccctacaggaggacccattggaaagctttaactatgtcttatccaagtcaacaaaagccgatatcggccccaatcttgaccaactgaaggatgatgagatcctgcggcactgcaacccttggccgatcattagcatcacaaacgaatcacagaacgctgaatcaaacgtaagtatcatcgagatagctgatgacctgtctgcttcccacagtgcgctgcaggacgcacaagcgagcgaagccaagctggaggaagagcctagcgcctccagtccccagtatgcgtgcgacttcaatctatttctggaggactcagccgacaatcgacagaattttagctcccaatctctcgagcatgttgaaaaagaaaactcactttgcggatccgcccctaacagccgggccggctttgtccacagcaaaacatgcttgtcctgggaattctctgagaaagatgacgagcctgaagaggtcgtggtcaaagcgaagattagatccaaggcacgaaggatcgtgtctgatggggaggacgaggacgactcgttcaaagacacgtcttccattaaccctttcaacacaagcctgttccaattttcgtccgtaaaacagtttgatgcgtctacacccaagaatgatatttcgcctcctgggagattttttagctctcaaatcccaagttccgtcaataaaagcatgaacagcaggcgctccctggcgtcgaggcgctctttaattaacatggtgctggaccacgtggaagacatggaagaacggctggacgattcctccgaagcaaaaggaccagaagactaccccgaagagggggtggaagagtcttccggcgaagcatcaaagtacaccgaagaagacccttccggtgagacactatcatccgagaataagtcctcctggttgatgacaagcaagccgtccgcgcttgctcaggaaactagcttgggcgctcccgaacccctgagcggggagcagcttgtgggctctccccaggataaagctgccgaagccactaatgactatgaaaccctggtcaagcggggcaaagaattgaaagagtgcgggaaaatccaagaagctctgaactgcctggttaaagcccttgacatcaagtccgctgatccagaggtgatgctgttgaccctaagtctctacaaacagctaaacaacaattag

SEQ ID NO: 187198 - DNA, 2685 bp, synthetic construct
  misc_feature 1..2685: note = Description of Artificial Sequence: Synthetic coding sequence
  source 1..2685: mol_type = other DNA
atgaccgccatcaagcacgccctgcagcgggacatcttcacccccaatgacgagaggctgctgagcattgtgaacgtctgtaaggccggaaaaaagaagaagaattgctttctttgtgctacagtgaccaccgaaagaccggtccaggtgaaagtggtcaaagtgaagaaaagcgataagggagacttttacaaacgccagatcgcatgggctctccgcgacctggcagtggtcgatgcaaaggacgctatcaaagagaacccagagttcgatctccactttgagaaaatttataagtgggtggcttcttctaccgccgagaagaatgcatttatctcatgtatttggaagctgaaccagcgatacctgaggaaaaaaatcgacttcgttaatgtgtcctcgcagctcctggaagagtctgtaccctccggagagaaccagagcgtcaccggcggggacgaggaagttgtggacgagtaccaggagctcaatgcgcgcgaagagcaggatatcgaaattatgatggaaggatgtgagtatgcaatctctaacgccgaggcttttgcagagaagttgtcccgcgagctgcaggtgttggacggcgcaaatatccagtcaattatggcatccgagaaacaggtgaacattctaatgaagctgctggacgaagcactcaaggaagtagatcagattgagttaaaactgtcatcatacgaagagatgctacaatccgtgaaagaacagatggatcagatttctgagagcaatcatttgatacacctcagtaatacaaacaatgtgaagttactgtccgaaattgaatttctggttaatcatatggatctggccaagggtcacatcaaagctttacaggagggcgacttggcttcgtcaagaggcattgaagcttgcaccaatgcggccgatgccctattgcaatgcatgaatgtcgctctgcgccccggccatgacctgctcttggcggtgaagcagcagcaacagagattcagtgatttgcgggaactcttcgccaggcgactggcctcccacctgaataacgtgttcgtccagcagggacatgatcaaagctccaccctggcccaacactctgtggagctgacactgcctaaccaccacccttttcaccgtgacttacttagatacgcaaagctaatggaatggctgaaaagtactgactacggtaagtacgagggcctgactaaaaactatatggactatctaagtaggctgtatgaacgggaaatcaaggattttttcgaagtggcaaaaatcaagatgacaggcaccacaaaggagtcaaaaaaattcgccaccctgcctcgtaaagaatcagctgtgaaacaggagaccgagtcactgcatgggtcaagcggaaaactgacagggtcaacaagcagtctcaacaaactgagtgtccagagcagtggcaatcgaaggtctcagagcagctccctgttggatatgggcaacatgagtgcttctgaccttgacgttgctgaccgaaccaaattcgacaaaattttcgaacaagtgctctctgaattggaacccctatgtctggccgagcaggattttatttcaaaattcttcaaattacagcagcatcagtctatgcccggcactatggctgaggccgaagacctagacggcgggacactgtcaaggcagcataattgtgggacacccttacccgtttccagcgagaaggatatgatccgtcagatgatgataaaaatttttcgctgtatcgagccagaactcaacaatctgattgccctgggtgataagatagatagctttaattccctctacatgctggtgaaaatgagccaccacgtctggacagcacaaaacgtagacccagcaagcttcctgtctaccacactggggaacgtcctcgtgacagtgaaacgaaatttcgacaaatgtatatctaatcaaatcagacaaatggaggaggtaaagatctccaaaaaatcgaaggttgggattctcccatttgtcgcagaattcgaggaatttgccgggcttgccgagagcatttttaagaacgcggagagaagaggcgaccttgacaaggcctacacaaaactgattcgaggggttttcgtaaacgtcgagaaggtcgcaaacgagtctcagaagacacctcgcgacgtggttatgatggaaaactttcaccacattttcgccacgctctcccggttgaagatctcctgtttggaggccgaaaagaaggaagcaaagcaaaaatatacagatcacctgcagtcgtatgttatttactctctggggcagcccctggaaaaattaaaccactttttcgaaggagtggaggctcgagtggctcagggaatccgggaggaagaggtctcttatcagctggcatttaacaaacaggagttgagaaaggttatcaaggaataccctggaaaggaagtgaaaaaggggttggataatctgtacaagaaagttgacaagcacttgtgtgaagaggagaacctgctccaagtcgtgtggcacagtatgcaggatgaattcatcaggcaatacaagcattttgaaggactcattgctcgttgttaccccggtagcggtgttaccatggaatttactatacaggatatcctggactactgctctagcatcgcccaatcccactag

SEQ ID NO: 187199 - DNA, 2640 bp, synthetic construct
  misc_feature 1..2640: note = Description of Artificial Sequence: Synthetic coding sequence
  source 1..2640: mol_type = other DNA
atgaccgccatcaagcacgccctgcagcgggacatcttcacccccaacgacgagaggctgctctctatcgtcaatgtgtgcaaggcagggaagaagaaaaagaattgcttcttgtgtgctacagttaccaccgaaagacccgtgcaggtgaaggtcgttaaagttaagaagtcggataagggtgatttctacaaaagacagatagcatgggccctgagggatctggctgtggtggatgcaaaggatgccattaaggagaaccccgagtttgacctccacttcgagaaaatttacaagtgggtcgcttcatcaactgccgagaagaacgcatttatcagctgtatatggaagcttaaccagcgttacctgaggaagaaaatcgactttgttaacgtgtcaagccagctactagaggagagtgtgccatctggcgagaatcaaagcgtcaccggcggagacgaggaagtggtggacgaatatcaagagctcaatgcccgagaggaacaggatatcgagattatgatggagggctgtgaatacgctattagtaatgctgaggcatttgcagaaaaattgtcacgagagctgcaggtgctggatggtgcaaatattcagtctatcatggcatcagaaaagcaggtgaacattctcatgaagctgctggacgaggccctgaaggaagtagaccagattgaactcaagctaagctcctacgaagagatgctgcagagcgtgaaggagcagatggaccagatcagcgaatctaaccatctgattcacctgagcaatacaaacaacgtgaaactgttaagcgaaatagagttcctcgtgaaccatatggacttggctaagggacacatcaaggcattgcaggagggggacctggcatctagcagggggatcgaagcttgtacgaacgctgccgacgcattgctccagtgcatgaatgtggccctacggccaggccacgacctcctccttgcggttaaacagcagcagcagcggttctctgacctcagggagttatttgcgcgccgactggcgtcacacctcaacaacgtcttcgttcaacaagggcacgaccaaagtagtaccctcgcccagcactccgttgagctgactctgcccaaccatcatccatttcatcgtgatctgctgaggtacgccaagcttatggaatggctgaaatccactgactatggaaagtatgagggactgaccaaaaactacatggattatttgtcacggctgtacgaacgtgagatcaaagacttcttcgaggtagcaaaaatcaagatgaccgggacgaccaaggagagtaaaaaattcggtttacacgggagctctggcaaactgaccggctctacatcctctcttaataaactcagcgtccagtcctccgggaacagaagaagccagtcatcgtcactgctggacatgggcaacatgagcgcgagtgacctggatgtggccgacaggactaagttcgataaaatctttgagcaggtgcttagcgagcttgagcctctttgcttggccgagcaggactttatctctaagtttttcaagttgcagcaacaccagagcatgccggggaccatggcggaagcagaagatctcgacggtgggacactgtcgaggcaacataattgtgggactcccctgcctgtaagctctgagaaggacatgatacgccagatgatgataaagattttccgctgtatagaacccgagctgaacaaccttatagctctcggggacaagatcgacagttttaattctctgtatatgcttgtgaaaatgtcccatcatgtttggacagcccagaatgtcgatccggcgtcatttctgtcgacgaccttgggaaacgttctcgtgacggtaaaaagaaacttcgacaagtgtatatctaatcaaatccggcagatggaagaggtcaaaatctctaagaagtccaaagtgggcatcctccccttcgtagctgagtttgaagaatttgccggcttagccgagagtatttttaaaaatgccgagcgccgtggagatctggataaggcctacaccaagctgattagaggagtgtttgtgaacgtggaaaaagtcgccaatgagagccagaaaactccccgggacgttgtcatgatggaaaacttccaccatatcttcgcaacgcttagtcgtctcaagatctcctgtctagaggctgagaagaaggaagccaagcaaaagtacacagaccacctccagtcctatgtgatttatagcctgggtcaacccctcgagaaactgaaccactttttcgagggagtggaggcacgagtagcacagggaatcagagaggaagaggtgagctaccagttggcatttaacaaacaggagctcaggaaggtgattaaggagtatccgggaaaagaggtgaagaagggtctggataatctttacaaaaaggtggataagcacttgtgcgaggaagaaaacctgctgcaggtggtgtggcactctatgcaggacgagtttatccgccagtacaagcacttcgaaggtctcatcgcccgctgctaccctggcagcggggtcacaatggagtttacaatacaggatattctcgactattgttcatccatagcccagtcgcattag

SEQ ID NO: 187200 - DNA, 2685 bp, synthetic construct
  misc_feature 1..2685: note = Description of Artificial Sequence: Synthetic coding sequence
  source 1..2685: mol_type = other DNA
atgaccgccatcaagcacgccctgcagcgggacatcttcacccccaatgatgaacgtctcctcagcattgtgaatgtatgcaaggccgggaagaagaagaagaattgcttcctatgtgccaccgtcacgacagagagaccggtccaggtgaaggtggtaaaagtgaagaagagcgataagggagacttctacaagcggcagattgcgtgggccctgcgcgatttagcagtcgttgacgccaaggatgccatcaaggagaaccccgaattcgatttacactttgaaaaaatttacaagtgggtggcaagctcaacggcagaaaagaatgccttcatttcatgcatctggaagctaaatcagcgatatctcaggaaaaagattgacttcgttaacgtatccagtcaattattagaagagtctgttcctagcggggaaaatcagtccgtcactggcggagacgaggaagtcgtggacgaatatcaagagctgaatgccagagaagaacaagatatcgaaatcatgatggaaggatgcgaatatgccattagtaatgctgaagctttcgccgagaagctctcaagagagttgcaggtgcttgacggcgctaacatccaatctataatggcctctgagaagcaggtcaacattctgatgaagctgttggacgaagccctgaaagaggtcgatcagatcgaactcaagctctcatcctatgaagagatgctccagtctgtgaaggagcagatggatcagatcagtgaaagtaaccacttgatccacttatccaatactaacaacgtcaagctcttgagcgaaattgaatttctggtgaatcatatggacctcgccaaaggtcatatcaaggctctgcaggagggagacctggcttcctccaggggaatcgaagcctgcacaaatgccgctgacgcactactgcagtgtatgaatgtggccctccgccccggacacgacctccttctcgccgtgaagcaacagcaacaaaggtttagcgacctgagagaactctttgcaaggcgtctggcctcccacttgaacaacgtgttcgtgcagcaagggcacgatcagtcctctacccttgcacagcatagtgttgagttaactctaccgaaccatcaccctttccaccgggatctgctgcgctatgccaaactaatggagtggctgaaaagtaccgactatgggaaatatgaggggttaaccaaaaattacatggattacctgagccggttatacgaaagagagatcaaggacttcttcgaggtggctaaaatcaagatgaccggtacgaccaaggagtcaaaaaagtttgctactttgcctaggaaggagagcgccgtaaaacaggaaactgagtcattgcacggcagctccggtaagctcacagggagtacctcttccctgaataagctttccgtgcagtcatctggcaatcgccgatctcagtcgtcctcgctgctggacatggggaatatgagcgctagcgatcttgacgtggccgaccgcacaaaatttgacaagatctttgagcaagtgctgagtgagctggagcctttatgcctcgcagaacaagacttcatatcaaagttctttaaactacagcagcaccagtccatgcccggaactatggccgaggctgaggatctggatgggggaacactgtccagacagcacaactgcggtacccccttaccagtgtccagcgagaaagatatgataagacagatgatgataaaaatatttcgatgtatcgaacccgaattaaataatttgatcgctttgggcgataagattgactcttttaactccttatacatgctggtgaaaatgtctcatcacgtgtggactgctcagaacgtggaccccgctagctttttgagcactactttaggtaatgtgctcgtaaccgtcaaacggaactttgacaagtgtataagcaaccagatcagacagatggaggaggttaaaatcagtaagaaatctaaagtgggtattttacccttcgtcgctgagttcgaggagttcgcaggactcgccgagtctatatttaagaatgcagagcgccggggggacctggacaaggcctacaccaagctgatccgcggggtcttcgtcaacgtcgagaaggtggcaaatgaatcgcagaagactccaagagatgtcgtgatgatggagaatttccaccatattttcgccacactgtccaggcttaaaataagttgcctggaggctgaaaagaaggaagccaagcaaaagtatacagatcaccttcaatcctacgtgatatactcgctcgggcaacctcttgagaaacttaaccatttctttgaaggtgttgaggctagagtcgcacaagggattagggaggaggaagtgagttaccagctggcatttaataaacaggagctgcgtaaggtgatcaaggaataccctggcaaagaggttaaaaagggcctggataatctgtacaaaaaagtggacaaacatctgtgtgaggaagagaatctccttcaggtggtgtggcactctatgcaggacgagtttataaggcagtataagcactttgaaggcctgatagcccgttgttacccgggctccggcgtgactatggagttcaccattcaggatattttggactactgtagcagcatagcccagtcacactag

SEQ ID NO: 187201 - DNA, 2238 bp, synthetic construct
  misc_feature 1..2238: note = Description of Artificial Sequence: Synthetic coding sequence
  source 1..2238: mol_type = other DNA
atgaaggagaccgaccgggaggccgtggccaccgccgtgcagcgggtggcaggtatgctgcagagaccggaccaattggacaaggtggagcagtatcgtagacgcgaggccaggaagaaggcctccgttgaggctaggctgaaagccgcaatccaaagccagctggacggcgtccggacagggcttagccagttacacaacgcacttaatgacgtgaaagatatccagcagtccttggccgacgtttctaaggactggaggcagtccatcaacacaatagagtccttgaaagacgtcaaggacgcagtggtgcaacactcacagttggccgctgcagtcgaaaatctcaagaatatcttcagcgtcccagaaattgtgagagaaacacaggacctcatcgaacagggggctttgctgcaggcacataggaagttgatggatcttgaatgttccagggacgggttaatgtatgaacagtaccggatggatagtggcaatacccgtgacatgaccctaattcatgggtattttggttccacacagggactgtcagacgaactggcgaaacagttatggatggtgctgcagaggagtcttgtaacagtcaggcgggatccaacactgcttgtgagtgtggtgcgtattattgagagagaggagaaaatcgatagaaggatcctggatcgaaaaaaacagaccggttttgtgccacctggccggcccaagaattggaaggagaagatgttcaccatactggaacgcacggtgacaacccgcatagagggcactcaggctgacacccgggaatctgacaagatgtggctggttcgccatcttgagataataaggaagtacgtgctcgatgatctgattgtagccaaaaacctcatggtgcaatgcttccctcctcactacgaaatctttaagaatcttcttaacatgtaccaccaggcccttagtactagaatgcaggatctggcaagtgaggacctcgaggctaatgaaatcgtgagccttctgacttgggttttgaacacatatacaagcaccgaaatgatgcggaacgttgaacttgcccccgaagtggacgttgggactcttgaacctctgctaagcccccatgtagtctctgaattactagacacttacatgagcacattaacctccaatattattgcctggctgcgtaaggcccttgagactgacaaaaaggattgggtgaaggagacggagccagaagcagatcaggacggctattaccagacaacactccccgccatagtcttccaaatgtttgagcagaatcttcaggtggcagcccagattagcgaggaccttaagaccaaggtgctcgttctgtgcctgcaacagatgaactcctttctaagtaggtacaaagacgaagctcagctatacaaagaggaacacttgcggaatcggcagcacccacactgctacgttcagtatatgattgctatcattaacaattgccaaacatttaaggagagcatcgtaagtctgaagaggaaatacttgaagaacgaagttgaagagggggtgtcgccaagccaaccctctatggatggtatcctggacgccattgccaaggaggggtgcagcggactcctggaggaagtgttccttgatcttgaacaacacctaaatgagctgatgactaaaaaatggttattgggcagcaatgccgtggacatcatctgtgtgacagtagaggactattttaacgactttgcaaagatcaagaagccatacaagaaaagaatgacagctgaagcccatcgacgggttgtggtggaataccttagggctgtgatgcagaaacggatcagcttccgatcacctgaggaacgcaaggagggcgctgagaaaatggtgagagaagcagagcagttgcgctttttgtttagaaaactggccagcggctttggcgaagacgtagacggttactgcgatactatagtggccgttgccgaagtcattaagctgacagacccctcactcctgtacttagaggttagtaccctggtttccaagtatccggatatccgagacgaccatatcggtgctctactcgctgtgcgtggggacgctagccgggatatgaaacaaacaattatggagaccctcgagcagggccccgcgcaagccagcccctcttatgtgccactcttcaaagatattgtggttccttccctgaacgtggcaaagctcctgaagtag

SEQ ID NO: 187202 - DNA, 1923 bp, synthetic construct
  misc_feature 1..1923: note = Description of Artificial Sequence: Synthetic coding sequence
  source 1..1923: mol_type = other DNA
cagtgcgaggacagcaccagcttcttcaccatgaaggagaccgacagagaggcagtagccactgcggttcaacgcgttgcgggaatgctccagagacccgatcagctcgacaaagttgagcaataccgacggcgcgaagcaagaaagaaagcttcggtcgaggcccgattaaaagccgccatccagagccagctggatggcgtgaggaccggcctgtctcagttgcataacgctctgaacgatgtgaaggatatccagcaatctctggccgacgtatcaaaggactggcggcagagcatcaatacgatcgaatcgctcaaagacgtcaaggatgcggtggtccagcacagccaactggccgctgctgttgaaaatctcaagaatatcttctcggtccccgaaatcgtgagagaaacccaagacttaatcgaacagggggcgcttctgcaggcacaccgtaaactgatggatcttgagtgttcacgagacgggttgatgtatgaacagtataggatggatagtggtaacacaagggacatgaccttgatccatgggtactttggaagcacccaaggactgtctgacgaactcgcgaaacaactgtggatggtcttacagaggagccttgtaaccgtacgtcgagatcctacgcttcttgtgtccgtggtgagaatcattgagagggaggagaagattgatcgaagaatactggatagaaagaaacaaaccggttttgtcccaccaggacgcccaaaaaactggaaggagaagatgtttaccattctggaacgaacagtcactacacggattgaggggactcaggccgacacacgcgaaagcgacaaaatgtggcttgtccgacaccttgaaatcatcagaaagtatgtactagacgacctcattgttgcgaagaatcttatggtccagtgtttccccccccattacgaaatcttcaagaacctgctcaacatgtaccaccaagccctgtcaacacgaatgcaggatctggctagtgaggacctggaggctaatgagattgtatctctcctgacctgggtcctcaatacctacacacggtacaaggacgaggcacagctctataaggaggaacacctgaggaatcgacagcacccacactgctatgtccagtatatgattgcgatcattaataactgccagaccttcaaagaatctattgtcagtctgaagcgtaaatatttgaagaatgaagtcgaggaaggagtcagtcccagtcagccctcaatggacggaatcctggacgctattgccaaagagggttgctcagggctgctcgaagaggttttcttggacctcgaacagcacttgaatgagctgatgaccaaaaagtggctgctgggcagtaacgccgtagacattatatgtgtaaccgtagaggactactttaacgactttgctaaaattaaaaaaccgtataagaagcggatgaccgcagaggcccaccgcagggttgtggtggagtaccttcgcgctgtgatgcagaaacgaatcagcttccggtcccccgaggaacgtaaggagggggccgagaaaatggtcagagaggccgagcagctgcggttcctgttcaggaaactggcgagcgggttcggagaagacgtggatggatattgtgataccatagtcgcagtcgcagaggttatcaagctgacagacccaagcttattgtatctggaagtcagcactctcgtgtctaaatatcccgatattagagacgaccatatcggggcgttactcgctgttcgcggggacgcctccagggacatgaagcagacaatcatggagacacttgagcaggggcctgcacaggccagcccttcatacgtgccactgtttaaagacattgtcgtgccctccttaaacgtcgccaagctactcaaatag

SEQ ID NO: 187203 - DNA, 210 bp, synthetic construct
  misc_feature 1..210: note = Description of Artificial Sequence: Synthetic coding sequence
  source 1..210: mol_type = other DNA
atgaaggagaccgaccgggaggccgtggccaccgccgtgcagcgggtggccggcatgcttcagcggcctgaccagttggataaggtagaacaataccgaaggcgcgaagcccgcaagaaggctagcgtggaagctcggctgaaagcggctattcagtctcagctggacggcgttcgcaccggtctgagccaactccataatgccctatag

SEQ ID NO: 187204 - DNA, 2238 bp, synthetic construct
  misc_feature 1..2238: note = Description of Artificial Sequence: Synthetic coding sequence
  source 1..2238: mol_type = other DNA
atgaaggagaccgaccgggaggccgtggccaccgccgtgcagcgggttgcaggcatgctgcaacgaccggaccagctcgataaagtggagcagtatagacggcgggaagcaaggaagaaagcatcagttgaggctaggctgaaggcagctatccaatctcagttggacggagtcaggaccggactgtctcaactccacaacgcgctgaatgacgtgaaggacatccagcagagcctggccgacgttagtaaagattggcggcagagtatcaataccatcgagtctctgaaagatgtaaaggacgccgtagtacaacactctcaacttgccgcagccgtggaaaacctcaagaacatatttagcgtcccagagatagtgagggagacccaggacctcatcgagcaaggggctctgctacaagcccacaggaagctgatggaccttgagtgctcccgcgacggtctgatgtatgaacaatatcgtatggattcaggtaatacacgcgatatgaccctcatccacggatacttcggatcgacccagggattgtcagatgagctggccaagcagttgtggatggtgctgcagcgttcattggtgactgtgaggagagatccgactttacttgtgtctgtcgtgaggattattgagagggaggaaaagattgaccgccgtatcttggataggaaaaagcagacagggttcgtgccacctggacgccctaaaaactggaaagagaagatgtttacgattttggagcgcaccgtcacgacccggattgagggtacacaagctgatacccgggaaagtgataagatgtggctcgtccggcatcttgaaatcattagaaaatatgtgttagacgatctcatagtagcaaagaatcttatggtgcagtgcttcccaccccactatgagatcttcaaaaacctcctgaatatgtaccaccaagcactgtcaacacgcatgcaggacctggcaagcgaggatctcgaggcaaacgagatcgtatccttacttacctgggtgctgaacacgtacacgtctacagaaatgatgcgcaatgttgaacttgctcctgaagtcgacgtcggcacacttgagcccctgctgagtcctcatgtggtatctgagctactggatacttatatgtcaacactgacttctaacattattgcttggctccggaaagctctggagacggacaaaaaggactgggtcaaggagaccgaaccagaagctgatcaggacggctattaccagacaacccttcccgcaattgtgttccaaatgttcgagcagaacctccaggttgccgctcaaatcagtgaggacctcaaaactaaggtactggtgttgtgtctgcaacagatgaattcatttctgtctcgttacaaggatgaggctcagctttacaaggaagagcacctccgcaaccgccagcaccctcactgttacgtgcagtacatgatcgcaatcatcaacaactgccaaacttttaaggagtctatcgtgagtttgaagaggaagtacttgaaaaacgaggtggaggagggggtatccccctcccagcctagcatggacgggattctggacgctatcgcaaaagaaggctgtagtggactgctagaagaggtcttcctggacctggaacagcacctcaatgagctcatgaccaagaaatggttactcggctccaatgccgtcgacatcatctgtgtaaccgtggaggactattttaatgacttcgccaagatcaagaagccctataaaaagcgtatgaccgcggaggcccataggcgagttgtggtggaatatttacgggcggtcatgcaaaaaaggatatcatttagaagcccggaagaacggaaggagggtgccgagaagatggttagggaggctgagcagcttcgattcctctttcgcaaactggcgagtgggtttggggaagatgtggacggatactgtgatactatagtggccgtggccgaggtcattaagctaacggatccttcactgctatacctggaggtttctactctggtgtccaaatatcctgatatccgtgatgaccatattggagccctgttagccgtgcgtggggatgccagcagggacatgaaacaaacaattatggagaccctggaacaaggtccggcccaagcttcccctagctacgtcccattgttcaaggacatcgtcgtgcccagtctcaatgtcgctaaactccttaagtag

SEQ ID NO: 187205 - DNA, 2034 bp, synthetic construct
  misc_feature 1..2034: note = Description of Artificial Sequence: Synthetic coding sequence
  source 1..2034: mol_type = other DNA
atggacagcgccgccaaggacgagatgcagcccgccctgagccccggaagctcctttccaggaccggagtggcctgagcaggagagagccgagcagttggcccggggcgcagctctgaagtgggcatctgggatcttctatcggcccgaacagctcgcccggctgggtcagtatcggtcgcgggaggtccaacgcacgtgctctctcgagtctcggctgaagtccgttatgcagtcatatctcgaaggcgtgcagaccgtgcctgctgcagttagtcatactcagactctgatcgatggccaacagttcctagaggcatatgtgtctctgcgtgagctcgagcagttgcgggaggatacctgggccccgcttggcggcctggagttacccgtctttcagggtctggatctgcttttcgaagcgttgggtcaggccgtcgaggctgccgctggcgccgcagggaagctggcccgcgaggatccggcactgctggtggccgccgttcgggtggcagaggtcgaaaccggacggaccactccactaggacaggtcccccgtgattggaggcagaggtgtctgcgtgctctccaggaaggccttgaacaggcgcattttggctcccctctattgccagcccctggggcattgccagggtggctcgaagctttgagggtcgcgctgccagtggaactcgcaacagccgaggccttagttgcaccctgctgtcccccccagtataacgtagtgcagctgtgggctcatactctgcattccggattgcgtcgctccctccagaacctcctagccgggcctgagctcgaggccgctgacgcattcgcgctgcttcattgggctttacacgtctacctggggcaggagatgatgggtagcttggagctgggccctgaggccgatgtgagccagctcgagccgctcttgacactggagaatatcgaacagctggaagctacttttgttgctaacattcagatcttagaagagaatattcgggtggcatctctcgtatccgagtccctgcagcaacgcgtccatggaatggccttaagtgaactgggtacgttcttgaggtccttctcggacgctctgattcggttttctcgagaccactttaggggtaaatccatggctccccattacgtaccataccttctggccgctctcaatcacaagtcagccttgtcctcatctgtctcagtcctgcagctcgatggtgccccctccggggcgctggccccagtggaggccgccctggacgagttacaacgccgcatttataggctggttttggaagccctgcaagccgaactgcaacctctattcgcggatctgccctctagacagtggctgtcgagtcccgaactgctccagagcgtatgtgagcggactggacgattttgtcgcgacttctggagggtgaggaatccgactgtgcagctcctgttagctgaggccgaacgtgctgtggttctgcagtatctttcggctttaatgcagggccggctcgtctgtcggggggccgatgagaggactcaagctgctgagaggctaagacatgacgcagcacaattacagcagctgttccttagccttgtcagagctagctgggcagggcgtcgagcaagggtgtctgttgcgggctgggagagagggctggcccgtgatccaacccctacatgctcagggccaggaggcgagcgggccctgagggcaggtgccgctcgacctgaaggggcggccaaaccgccgcgacccagggccgccggtccaggcggaggctggccagcagccacaatatctcgaagagaacggggcccgagactcaggcccttagggccagcacgcgggctggtccccggagccgctcctggtcgggctcaactgcctgccgggtgtgcagcagctgttgcccccagagaaccccctaggccacttcagccatctgcccgtgctcgggccccggcttcttgtctgcccagcggtagctgtgcccgagcgctgttgctcgctgagtag

SEQ ID NO: 187206 - DNA, 2241 bp, synthetic construct
  misc_feature 1..2241: note = Description of Artificial Sequence: Synthetic coding sequence
  source 1..2241: mol_type = other DNA
atggacagcgccgccaaggacgagatgcagcccgccctgagccccggacctgaatggcctgaacaggagcgggccgagcagctggcacggggagccgccttgaagtgggccagtgggatcttttatcgcccggaacagcttgctaggttaggacagtatcggtcacgggaagtccagcggacatgttccttggaatcccgcctcaagtcagtgatgcaaagctatttggagggtgtgcagacgggagtctggcagctggcgcaggccatcgaagtggtccagggtacaagagaagccctctcccaggcaagagggctgttgcaggggatgtcccaagcacttcagacactggaaccactgagagagagggtcgcccagcataagcaactgcaagctctctcccacttactgcccaggctgagggcagtgccagcagccgtgtcccacacacaaacgctgattgacgggcagcagttcttggaggcgtacgtaagtttgcgtgaactggaacagttgcgtgaggacacttgggcgcccctgggaggattggaactgcctgtctttcaggggctggaccttctgttcgaagccctaggccaggcggtggaggccgccgctggggccgcaggcaagttagctcgggaggatccggcgctccttgttgctgcagtgcgggtggccgaggttgaaacagggcggacaacaccactcggtcaggtgcctagagactggcgtcagcggtgcctccgcgcacttcaggaaggccttgagcaagcccattttggcagccccctgcttccagcaccgggggcactgcctggctggttagaggcactgcgcgttgccctgcctgtggagttggccactgcagaggcactggttgccccatgctgtcctccccaatacaatgtcgttcagctctgggcccacactctgcactccgggttacgacgttccctacagaacctgctcgccggcccagaacttgaggccgctgacgcctttgcactgctgcactgggctctgcacgtatacctcggccaggagatgatgggctccctcgagctcggaccggaggcagatgtgtcacaactcgagcctctcttaacccttgagaacatcgagcagctcgaggccacatttgtggcgaatatccaggcatcagtgagccagtggcttcagaacgccttagacggagaggtggccgaatggggcagagagcatggaccaaataccgacccaagcggcagctattactcgcctatgccagcgatcgtgctgcaaattttggaagagaacatcagggtagcttccctggtctcagaaagtttacagcagagagtacacggtatggctctgtcagagctgggaaccttcctgcggagctttagtgacgccctgatccgcttttcacgggaccactttcgcggtaaatcaatggctccccactacgtgccttaccttttagctgcgctgaatcataaaagcgcactcagttcatccgtgtccgtcctgcagttggatggcgcacccagtggggcgctggcaccagtggaggcagcccttgatgaactacagcgccgcatttacagactggttctggaggccctacaggcagagctgcagcccttattcgccgatctgccctccagacaatggctaagtagtcccgagctgcttcaaagcgtgtgcgagaggacaggacgattctgtcgcgacttctggcgcgtccgaaaccctaccgtgcagctgttgctcgccgaagcagagcgggcagttgtgcttcagtatctaagcgccctgatgcaggggagactcgtgtgtcgcggagctgacgaaagaactcaggcggctgagcgacttcgccatgacgcagctcaactacagcaactgtttttatccctcgggcttgaggagaatgcacattgcgcacccgtgctgctcgcactccgagagctgctgaatcttagagaccccgccctgcttggcttggaagttgctggactgagacaacagttcccggatgtgagtgaagatcatgtgtcagcccttctgggcctgcggggcgacctgtccagggagcagcacctggccgccctttcttcccttcaggccgcacttccacctagccccagggcctcaaggagggtgctgttctcattggtgcctgcacctgcactggctcctgcaagctgtctgccttctggttcctgtgctagggccctgctgctcgctgagtag

SEQ ID NO: 187207 - DNA, 2040 bp, synthetic construct
  misc_feature 1..2040: note = Description of Artificial Sequence: Synthetic coding sequence
  source 1..2040: mol_type = other DNA
atggacagcgccgccaaggacgagatgcagcccgccctgagccccggccccgagtggcctgaacaggagcgtgctgagcaactcgcccgcggggcggcactgaagtgggcatcaggcatcttttaccggcctgaacagctagcgagactcggccagtaccgctccagggaagtgcagcgaacctgctctcttgaatcccgcctgaagagcgtgatgcaaagttacttagagggggttcagactgtgcctgctgctgtctcccatacccagacactgattgacgggcagcagtttcttgaggcttacgtttcactgagggaacttgagcagttgagggaggacacatgggcacccctcggcggcctggagttgcctgtttttcaggggcttgatctgctctttgaagcgcttggccaagcggtcgaagccgcagctggcgcagctgggaagctagcaagagaagacccggccctgttagtggccgcagtacgcgtcgccgaggtcgaaacgggtcgaactacaccactagggcaggtcccccgagactggagacagcggtgtttaagagcgctccaagagggcctagaacaggcgcacttcggaagtcctcttctgcccgctcctggcgcccttcctggctggctggaagctctcagggttgctctgcctgtcgaactcgcgactgcagaagcactggttgcaccttgttgtccacctcagtacaacgtggtccagctatgggctcataccctgcattccggcctgcgaagaagtcttcagaacctgctcgcgggaccagagcttgaggctgccgacgctttcgctctgcttcattgggcacttcatgtttacctggggcaggagatgatggggagtctggaactcgggccggaggccgatgtatcccagctcgaacctttgttgacactggagaacatcgaacagcttgaagcgacgttcgtggcaaatattcagattttggaagagaacatccgggtcgcttctctggtctccgagagcctccaacagcgtgtgcatggcatggctttatccgagctaggcacctttctcagaagtttttctgatgctttgatcagattcagtcgtgaccactttcgaggaaagagtatggccccacactatgtgccttacctcttggctgctctgaaccacaagtcagcactgtcatcctcagtatcggtgttgcagctagatggcgctcctagtggtgctctggctcccgttgaggcagctctagatgagctgcagaggcgtatataccgcctcgtactcgaggctctgcaggctgagctgcagccattgtttgccgatctcccgtccagacagtggctttccagtcccgagctgctacagagtgtctgcgaaaggacaggccggttttgcagggacttttggcgagtaaggaatcccactgtccaactgctgctcgcagaagctgagagagcagtggtattacagtacctgtccgcactgatgcaggggcgcctggtgtgcagaggcgcagacgaacggacccaggcagcggagagactgcgccatgatgctgcgcaattgcagcagctgttcctgtcactggtcagagccagttgggccggacgccgtgctcgtgtgtccgttgctgggtgggagcggggccttgcaagagatccaactcctacttgttctggacctggtggggaacgcgctctgcgcgccggagcagctcgccctgagggcgcagccaagcccccacggccccgagcggcagggccgggtggaggctggcccgcagccaccatctctaggcgcgagcgcggtccacgactccgcccgctcggaccggcccgcggtctggtgcccggtgccgccccaggtagagcccaattgcccgccggttgcgctgcagctgtggctccaagagagcccccaaggccacttcagccttctgctagagcacgtgcacgtgccggattactgcctgctctgggcgtcctgcgcccctctcccgctgccagaaggattaaccacggttgccgatag

SEQ ID NO: 187208 - DNA, 2925 bp, synthetic construct
  misc_feature 1..2925: note = Description of Artificial Sequence: Synthetic coding sequence
  source 1..2925: mol_type = other DNA
atggccgccgaggccgccggcggcaagtaccggagcaccgtgagcaagtccaaagacccgtcaggtctgctgattagtgtcatccgcacactctccaccagtgacgatgtggaggaccgtgaaaacgagaaagggcggttggaggaagcatatgagaaatgcgacagggatctggacgagcttattgtgcagcattacaccgaacttacaacagctattagaacctatcaatcaatcacagaaaggatcaccaattcaaggaacaagatcaagcaggtgaaggaaaatctcctatcctgtaagatgttgctccactgcaaacgagatgaactcaggaagctgtggattgagggcattgagcataagcacgtactgaatctcctggatgagatcgaaaatatcaagcaggtgccacagaagctggaacagtgcatggcttccaagcattatctgtctgcaaccgatatgctggtatctgctgttgaatctctcgagggtcccctgttacaagtggaaggtctgtctgatttacggctggagctgcactccaaaaagatgaatcttcacctcgtcctcattgacgaattacatcgccacttgtatatcaaaagcacatctcgagtggtccagcggaacaaagagaagggaaagatcagttctctagtgaaagacgcctctgtacccctgatcgacgtgacgaaccttcccaccccccgtaaatttctcgataccagtcactattcaacggcaggttcctcctctgtccgtgaaataaatctgcaggatataaaggaagacctggagttggatcctgaggaaaatagcacgctcttcatgggcatcctgattaaggggctggccaaactgaagaagatccctgaaacagtgaaagcgatcatagaacggctggagcaggagctgaagcagattgtcaagcgttctaccactcaggttgctgacagcggataccaacgcggagagaatgtgactgtggagaatcagccccgactgctgctcgaacttctcgaactcctgttcgataagtttaacgccgtggccgcagcccattccgtcgtgctaggatatctacaggacaccgtggtgactcctttgacacagcaagaggatatcaagctctatgatatggctgacgtgtgggtgaaaatacaggacgtgttgcagatgctccttaccgaatacctcgacatgaaaaatacacggacggccagtgagccaagtgcacagctgtcctacgcgtcaaccgggagggagtttgctgctttttttgcaaaaaagaaacctcaaaggccaaagaattcgctgtttaagttcgaatcatcctctcacgccatcagtatgtccgcatacctacgcgagcagaggcgcgaactctattcgcgctctggcgaattgcagggaggcccagatgacaacttaattgaaggaggtgggacaaaattcgtgtgtaaacccggggcaaggaatattactgtaattttccaccccttactgcgtttcatccaagaaattgagcatgctctcggacttgggccagccaagcagtgccctctccgagaatttctgaccgtgtatatcaaaaatatcttcttgaaccaggtcctggcagaaattaacaaggaaattgaaggggtcaccaagacatccgatccgctgaaaattctggctaacgcagatactatgaaggtccttggcgtacagaggccccttcttcagagcaccattattgtggaaaaaaccgtgcaggacctgctgaatcttatgcacgacctttccgcatattccgaccaattcctgaatatggtatgtgtgaaactgcaggaatataaggacacttgtactgccgcctatagaggcatcgtacaatctgaagagaagctggtgattagtgcatcttgggcaaaagacgacgatatcagtaggcttctgaagtccttgcccaattggatgaacatggcccagccgaaacaactaagacccaagcgcgaagaggaagaggacttcattagggccgccttcggcaaggagtctgaagttctcatcggcaatctgggcgacaagttaattcctccccaggatattttaagagacgtctctgatctcaaagccctcgccaatatgcacgaaagcttggagtggctcgcttctcgcactaaatccgcgttctcgaatctttccacatcccagatgttatcaccggcacaagactcccacacgaatacagatctaccccctgtgagtgagcagataatgcagacactgtctgagctggccaaatcttttcaagatatggcagatcgctgcctcctggtgctccatctcgaggtgagggtacactgctttcactaccttattccccttgccaaggagggcaattacgccatagtcgctaatgtggaaagcatggattacgatccactcgtagtgaagttgaataaggatatctccgctatagaagaggcgatgtcagcttcattgcagcagcacaagttccaatatatcttcgaaggcttagggcaccttatttcatgtattctgatcaatggggcgcagtatttccgaaggatctccgagagcggcatcaagaagatgtgccggaatattttcgtactgcaacagaacctaacaaacatcactatgagccgagaggccgatttggatttcgcccgacagtactacgagatgctgtacaataccgcggacgagcttctgaatcttgtcgtggaccaaggtgtaaaatacactgagctcgaatacatacacgctcttaccctcctccaccggtcacagacgggtgtgggtgaactcaccacacaaaatacgcgactacagcgcctgaaggagataatctgcgagcaggccgcaattaagcaagccaccaaggacaaaaagatcactacagtttag

SEQ ID NO: 187209 - DNA, 1422 bp, synthetic construct
  misc_feature 1..1422: note = Description of Artificial Sequence: Synthetic coding sequence
  source 1..1422: mol_type = other DNA
atggccgccgaggccgccggcggcaagtaccggagcaccgtgagcaagagtaaagatccctcgggcttgctgatctccgtgatccggacattgtccacatccgacgacgtcgaagacagagaaaacgagaaggggcggctggaagaagcttatgaaaagtgcgacagagatctggacgagctaatagtccaacattacactgagttaaccactgctataagaacttaccagtcaatcaccgagcgcataacaaattcacggaataaaataaaacaagtgaaagagaatctcttaagctgcaagatgcttctccattgcaaacgtgatgagctaagaaagctgtggattgaaggaatcgagcacaagcacgtcctaaacctcctcgacgagatagagaatattaagcaggtcccccagaaactggaacagtgcatggcttccaagcattatctgtccgctaccgacatgctagtgtcggccgtcgagagcctggaaggtccgctcctgcaggtggaggggctgtccgaccttagactggagctacactccaagaagatgaatctgcatttagtgctcatcgacgaactgcacagacacttgtacataaaatctacctcccgtgtggtgcagaggaataaggagaagggcaaaatcagttctcttgtgaaagacgcgagcgtacccctgatcgacgtcaccaacctgcccacccctagaaagttccttgacacctcacattacagcactgcaggatcaagcagtgtgcgtgagattaacctgcaggacataaaagaggacctcgaactggatcccgaagagaattccactctgtttatgggcattctcattaagggtctcgccaagttaaaaaagatcccggaaactgtgaaagcaattatcgaacggctggaacaggaattgaagcaaatcgtcaagagaagcaccactcaggtcgctgatagcgggtaccagcgcggggagaacgtaaccgtcgagaaccagcctagacttctcctcgagctactcgagttactgttcgacaaatttaacgccgtagctgctgctcactctgttgttctcggctatcttcaagatactgtcgtgacacccctcacacagcaggaggatatcaaactttacgacatggcagatgtctgggtgaagatccaagatgtgctgcagatgctgcttaccgaatacttagatatgaagaatactcgaacagcaagcgagccgagcgcacagctgtcgtatgcatcaacaggccgcgaattcgccgcctttttcgcgaaaaaaaagccgcaaaggccaaaaaattctctgttcaagttcgagagctcttcccatgccataagtatgagtgcatacctgcgtgagcagcggcgggagctgtattccagaagcggagagctccagggctag

SEQ ID NO: 187210 - DNA, 2622 bp, synthetic construct
  misc_feature 1..2622: note = Description of Artificial Sequence: Synthetic coding sequence
  source 1..2622: mol_type = other DNA
atgctgctgcactgcaagcgggacgagctgcggaagctgtggatcgagggtatagagcacaaacacgttttgaacctactggacgagatagaaaatattaagcaggttccccaaaaacttgagcagtgcatggcctctaaacactacctgagcgctactgacatgctcgtaagcgccgtggagagtctcgaaggcccacttctccaggttgagggcctctcagacctgcgactcgagttgcacagtaagaaaatgaatctgcacctggttctgatcgacgaattacacagacacctctatatcaagagcacctcaagagtggtccagagaaataaggagaagggcaagatttcaagcctggtcaaggatgcctccgtgcccctaatagatgtgaccaacctgccaactcccaggaagtttctggacacttcacactactccacagccggatcgagcagtgttcgcgaaattaacctgcaggatatcaaggaggatctcgagctagatcctgaagagaacagtacactgtttatggggatcctgattaagggcctggccaagctcaagaagatcccagaaacggtgaaggcgattatcgagcgactggagcaggagctgaagcagattgttaagagatccacaacacaggtggcagactccgggtaccagcgcggtgaaaatgtcactgtggaaaatcaaccccggctgctgttagagctgttggaacttctgttcgataaattcaatgctgtcgccgcagcccactccgttgttttaggttacctgcaggacactgtggtcactcctctcacccaacaggaggacattaagctttacgatatggccgatgtgtgggtgaaaattcaggacgtgctgcaaatgctgctaacggaatatctggatatgaaaaacacccgaactgcctcagagccaagcgcccagttatcctacgccagcaccgggagagagtttgccgctttcttcgccaagaaaaaaccgcagagacccaaaaattcgttattcaaattcgaatctagtagccatgctatctcgatgtccgcttatctccgggagcagcggcgggagctgtacagtcgctccggcgaactgcaggggggaccagacgacaacttgatcgaaggtggcggcaccaaattcgtgtgcaaaccaggtgcacggaatattacggttattttccaccccctcctgagatttattcaggagattgagcacgccctaggcttaggacccgctaagcaatgccccttgcgcgaattcctgaccgtctacattaagaatatcttccttaatcaggtcctggccgagattaacaaagagatagagggggtgactaaaacttctgatccgctgaagatcctggctaatgccgatacaatgaaggtgctcggcgtgcagaggccgctgctccagtcaactattatcgtagaaaagaccgtccaagacctcttgaacctgatgcatgatctgtcagcgtactcagaccaattcttgaatatggtatgcgtgaagttacaagagtacaaagacacttgcactgccgcatacaggggtatcgtccagagtgaagaaaagttagttatcagcgcatcgtgggcaaaagacgatgacatcagtaggctgttaaagtccctacctaactggatgaatatggctcagccaaaacagttacgcccaaagagggaggaagaagaagattttattcgcgccgcatttgggaaggagagcgaagttttgattggaaacctcggcgacaaactcataccaccgcaggacattctgagggatgtgtccgaccttaaggcactcgctaatatgcacgaaagccttgagtggctggcttctaggacgaagagcgcgttcagcaatctgtctacttctcagatgctctcacctgcacaagatagccatactaacacagacctccctccggtctccgaacagattatgcagactttgtccgaactagctaagagttttcaagatatggcagatcgttgtctgctggtcttacatttagaggtgcgggtccattgctttcactatctcatcccactggctaaagaaggtaactatgcgatcgttgctaatgttgagtccatggattacgatcccctcgtcgtgaaacttaacaaggatatcagcgccatcgaagaggccatgagtgcatctctgcagcagcacaagttccagtacattttcgaggggctgggtcatcttatctcatgcatcctcattaacggagcacagtactttcgcagaattagcgaaagcggcattaaaaaaatgtgtcggaacatcttcgtccttcagcagaacttgaccaatataacaatgtcacgcgaggccgacttggatttcgccaggcagtattacgaaatgctctacaataccgcagatgagttattgaatcttgtggtggatcaaggagtcaaatatactgaactggagtatatccacgccctgacacttcttcacaggtcacagactggggttggagaacttacgacgcagaatacgcggctccaacggcttaaagagatcatttgtgagcaggctgccattaagcaggcgaccaaagacaagaagattaccacagtgtag

SEQ ID NO: 187211 - DNA, 789 bp, synthetic construct
  misc_feature 1..789: note = Description of Artificial Sequence: Synthetic coding sequence
  source 1..789: mol_type = other DNA
atgcacgagagcctggagtggctggccagccggaccaagagcgccttctctaacttgagcacatcccagatgctcagccctgctcaagattctcatactaacaccgacctgcctcctgttagtgagcagatcatgcaaacactgagcgagctggcaaaaagcttccaggacatggctgaccgctgccttctagtgctacatctcgaagtcagggtgcattgtttccactatcttatccccttagctaaggaagggaactatgcgatcgtagctaatgtggaatccatggattacgatcctctcgtcgtgaagcttaataaggacataagcgcgatcgaggaagccatgtctgccagcttacagcagcataagttccagtatatcttcgagggcttagggcaccttatttcgtgcattctgattaacggcgcacaatactttcgacggattagcgagagtggaattaagaaaatgtgtaggaacatcttcgtgctgcagcagaacctgacaaatatcaccatgtcacgagaggcagatcttgactttgcgcgacagtactatgagatgctttataacacagcagatgagttgctgaatctggttgttgaccaaggtgtcaagtacaccgaactggaatacatccatgccctcaccctgctacacagaagtcagacgggtgtgggcgaactaacaacccagaacacccgcctgcagcgactgaaggagattatatgcgaacaggcggctattaagcaggccaccaaagataaaaaaatcacgactgtgtag

SEQ ID NO: 187212 - DNA, 1755 bp, synthetic construct
  misc_feature 1..1755: note = Description of Artificial Sequence: Synthetic coding sequence
  source 1..1755: mol_type = other DNA
atggccaacctggtgaccgccagcaagaccaagatgagcaagggcgaggatccaaacaatcctaggtccatcaaacggatttcccagggtggacgcgacaaccacctggccattgctaaatgtgatctcactcagttgaagaaaaaacaatccgaggtgtctaacggctcccgggaaaccataagtatgaaaacctgctgtcaacacggcgacagagggtactggagtacggggtactattggaggggcgggccagacgataacttaatcgaaggtgggggaaccaagttcgtgtgcaaaccaggagctcgcaatataacagttatttttcacccgctgctgagattcatccaggaaatcgaacacgccctaggtttaggccccgctaaacagtgcccattacgcgagttccttaccgtgtacattaaaaatatatttctgaaccaggtcctggcagaaatcaacaaggaaattgaaggggtgaccaagacatccgatccgttgaaaattctggccaatgcggatacaatgaaggtgctaggcgtacagcggcccctcctccaatctacaatcatagtcgaaaagaccgtgcaggacctgctgaacctgatgcacgacctttctgcatatagcgatcagtttttaaatatggtgtgcgtgaagctgcaggagtataaggacacttgcactgcagcctaccgcgggattgttcagtcggaggagaagttggtgatcagcgcatcttgggcaaaggacgatgatatttctaggctcctaaagtctctccccaactggatgaatatggcccagcccaaacagcttagacccaaaagagaagaggaagaagacttcatcagggctgctttcgggaaggagagcgaggtgcttattggcaatttaggagataaattaatacctcctcaggacattctcagggacgtctcagacctgaaggcccttgctaatatgcacgaaagccttgaatggttggcaagccgaacaaaatcagccttctcaaatctgtctactagtcagatgctctctcccgcccaggattctcacaccaacaccgatttgccccctgttagtgaacaaataatgcagactctctcggaactcgcaaaatcctttcaggatatggccgacagatgtctgctggtgcttcatctggaggtccgcgtacactgctttcactatctcatccctttagctaaggagggcaactacgctattgttgccaacgttgagtctatggactatgaccctcttgtcgtgaaattgaacaaggatatctctgccatcgaagaagcgatgtctgccagcctccagcaacataagttccagtatatatttgagggactgggacacctgatctcttgcatcctgattaatggagcccagtactttcggcgcatcagcgagtcgggcattaagaaaatgtgccggaacatcttcgtcttgcaacaaaacctaaccaatatcaccatgtcaagagaggcggatcttgatttcgccaggcagtactacgagatgctttacaacaccgccgatgaacttcttaatctcgtggtagaccagggggtcaaatacacagaactcgagtatattcatgcgctcaccctgctgcacagatctcagaccggggttggcgagttgactactcagaataccaggctccagcgtctaaaggagattatctgtgaacaggcagctattaaacaagccaccaaggacaaaaaaattactaccgtgtag

SEQ ID NO: 187213 - DNA, 1782 bp, synthetic construct
  misc_feature 1..1782: note = Description of Artificial Sequence: Synthetic coding sequence
  source 1..1782: mol_type = other DNA
atggccgacgtgtgggtgaagatccaggacgtgctgcagatgctgctaaccgaatatctcgatatgaaaaataccaggaccgcatccgagccttcagcccaactctcctatgcctcgacaggccgagaattcgccgccttctttgcaaaaaagaagcctcagaggcctaaaaactcgctcttcaaatttgagtctagttcccacgccataagcatgtccgcctatttgcgtgagcaaagacgagagttgtactctaggtctggcgagctgcagggaggtcccgatgataacctgatagaaggcggtggcactaagttcgtttgtaaaccaggcgcgaggaacatcaccgtcattttccaccctctcctccgcttcattcaagaaatcgagcatgctctgggcctaggacccgcaaagcagtgtccgctaagagaattcctgaccgtctatattaagaacatatttctgaaccaggtcctggccgaaatcaataaagagattgaaggcgttactaaaacttccgaccccctgaaaattctggccaatgccgacacgatgaaagtcctgggcgtgcagcgccccctgctgcagtccaccattatcgtggagaaaaccgtgcaggacctgcttaaccttatgcacgatctgtccgcatattctgatcagttcttaaatatggtgtgcgtgaagcttcaggagtataaagacacctgcacggcggcctacagagggatcgtgcaatccgaggagaagcttgtaatctcagcttcatgggccaaagacgacgacatttccagactcctgaaatccctcccgaattggatgaatatggcgcagcctaaacagttgagaccaaagcgggaggaagaggaggactttattcgggccgcctttggcaaagaatccgaggtgttgatcggaaatttgggcgacaaactgatccctcctcaggatattttacgggacgtgtctgatttgaaagcccttgcaaacatgcacgaatcgttggagtggctcgctagtaggaccaagagcgccttcagtaacctgagtacgtctcagatgctgagccctgcgcaggattcccacactaacaccgacctcccccctgtcagcgagcagatcatgcagactctctccgagctcgctaagagctttcaggacatggccgatcgctgtctgttggtgctccatctggaagttcgagtgcactgttttcactatttaataccactagccaaagaaggcaactacgctatagtggctaatgtggagtctatggactatgacccacttgtagtgaaactcaacaaggatatcagcgctatcgaagaagcaatgtccgcttccctccagcagcacaaattccaatacatatttgaaggcctgggacatctcatttcctgtatcctgatcaatggagcccagtacttccgtcgcatctctgaaagtggaatcaaaaaaatgtgccgtaacatcttcgtcttgcagcagaacttgaccaacataaccatgtcccgtgaggccgacctcgacttcgctcgacagtattacgaaatgctctataatacagcagacgagctgttgaacttggtggtcgaccaaggagttaagtacactgagttggaatacattcatgcgcttacactcctccaccgctctcagacaggcgtgggcgaactaacaactcagaatacccgtttgcagcgcctgaaggagatcatatgtgaacaggccgccatcaagcaggcgaccaaagataaaaagattaccactgtgtag

SEQ ID NO: 187214 - DNA, 1932 bp, synthetic construct
  misc_feature 1..1932: note = Description of Artificial Sequence: Synthetic coding sequence
  source 1..1932: mol_type = other DNA
atggccaccaccgccgagctgttcgaggagcccttcgtggccgacgagtacatcgagcgcttggtgtggagaacacctgggggggggtcacgaggcggccctgaggcttttgatcccaaaagactgctggaggaatttgtgaatcatatacaagagctccagatcatggacgaaaggatccaacgcaaagtggagaagctagagcagcaatgccagaaagaggctaaggaattcgccaagaaagtccaagagctgcagaagtcaaatcagatcaaggaggccgctgatatcatccagaaactgcatctcatcgcacaggagctaccgttcgatcgtttttcagaagtgaagagtaaaattgccagtaaataccatgacctggaatgccaactcattcaagagtttacaagcgcacagagacgcggggaaattagcaggatgcgggaggtggctgcggtccttctccacttcaagggctacagccactgcgtggacgtgtacattaagcagtgtcaggaaggtgcctaccttcgcaatgacatctttgaggacgcaggaatcctgtgccaacgggtcaacaagcaggttggcgacatattcagcaatccggaaacagttctcgccaagttgatccagaatgttttcgaaataaaactccagagttttgtcaaagagcagctggaggagtgtcgcaagagtgatgcggaacagtatctgaagaacttgtacgatctttacacaagaacaaccaacctgagttcaaagctcatggagttcaatctcggaacagataaacaaactttcctctcaaaactgataaagtcaattttcatcagctacctcgagaattacattgaggtggaaacaggctatcttaaaagcaggagcgctatgatcctacagagatattacgattcaaagaaccatcagaaaagaagcataggcacggggggaattcaggatctcaaggagcggattcgacagcggacaaatctgcctctgggaccttcgatagatactcatggcgagactttcctttcccaggaggtggtcgtgaacctgcttcaggagaccaagcaggcattcgagcgctgccataggctctcagatccttccgatctgcctaggaacgccttccgaatttttactattctagtggaattcctttgcatcgaacatatagattacgctctggaaaccgggttagctgggattcctagttctgacagccgtaacgcaaatctttacttcttggacgtggtgcagcaggccaatacaatcttccacctgttcgataaacaatttaatgatcaccttatgccactgatatcttcttcacccaagctttccgagtgcttgcagaaaaaaaaggaaattatcgaacagatggagatgaagctagacaccgggattgatagaactcttaattgcatgatcggccagatgaagcacatcctggcagccgagcagaaaaagactgatttcaagccggaggacgaaaataacgtcctgattcagtacaccaacgcttgcgtcaaggtgtgcgcatatgtcagaaagcaagtggagaagataaaaaactctatggacggcaaaaacgtcgatactgtcctaatggagctgggcgtgcggtttcatcgtttaatctatgaacacctgcagcagtactcttacagctgtatgggcgggatgttagccatttgcgatgtcgctgagtaccgcaaatgtgcaaaggacttcaaaattcccatggtgctgcatctgtttgataccctccatgcactatgtaacctgcttgtggtggcccccgataatttgaagcaggtgtgctccggggaacagctggccaacctggacaaaaatatcctccatagcttcgtgcagctgagggcagattacaggagcgcccgtttagcacgccatttctcttag

SEQ ID NO: 187215 - DNA, 2127 bp, synthetic construct
  misc_feature 1..2127: note = Description of Artificial Sequence: Synthetic coding sequence
  source 1..2127: mol_type = other DNA
atggccaccaccgccgagctgttcgaggagcccttcgtggccgacgagtacatcgaaaggctagtgtggcggacccctggggggggcagtcgcggggggccggaagccttcgatccaaagcgtctattggaggaattcgtgaaccacatccaggagctacagatcatggacgaacgaattcagcgcaaagttgaaaaactggagcagcagtgccagaaggaggctaaggaattcgccaagaaagtgcaggagttgcagaaatctaaccaggtagcctttcagcatttccaggaactggacgaacacatatcctacgtggcaactaaagtctgccatctgggcgaccaattagaaggagtgaacacccctagacagagagcagtcgaagcccaaaagcttatgaagtacttcaacgagttcttggacggagaacttaaatctgatgtattcacaaatagcgaaaaaataaaggaggcggccgacattatccaaaaactgcacttgatcgcccaggagctgcctttcgacagattttccgaggtgaaaagcaagatagcatccaaatatcacgacctggagtgccaactgatacaggaatttacgtcggctcagcgacggggagaaatcagtcggatgagagaagttgcagccgttctattgcacttcaagggctattcgcactgcgtggacgtttacataaagcagtgtcaggagggtgcctaccttaggaatgacatctttgaggatgcgggcatactttgccagagagttaacaagcaggtcggtgacatcttcagcaatcccgagactgtgctggccaagcttattcagaatgtattcgaaataaaactgcaatctttcgtgaaggagcagctggaggaatgccgcaagtcagacgctgaacaatatcttaagaatttatacgatctctatactaggaccacgaatctgtcatctaagctcatggaatttaatctgggcactgacaaacaaacattcctgagcaagcttattaagtccatctttatctcctatctggaaaactacatcgaggtggagacgggttacctcaagtctcgaagcgcgatgatcctccagcgttactacgattcaaagaatcaccaaaagagatccatcgggactgggggtatccaggaccttaaagaacgtattcgccagaggactaacttgcctcttggccccagcatcgacacacatggagaaacttttctatctcaggaggtggtggtcaatttgctacaagaaacaaaacaggcctttgaaaggtgccaccgcctgtccgaccccagcgatctcccccggaacgcgtttcgcatcttcactatcctggtggagtttctctgcatcgagcacatagactacgcattagaaactggtctggccgggattccttcctcagactccaggaacgctaatctttattttctggatgtcgtgcaacaggccaataccatctttcacctgttcgacaaacagttcaacgaccacctgatgccgctgattagttccagtcccaagctgagcgaatgtttacagaaaaagaaggagattatcgaacagatggaaatgaagctggatacagggatcgatcgcaccctcaactgtatgattggtcagatgaagcatattttggctgctgagcaaaagaaaacagattttaagccagaggacgagaataacgtgctcatacaatatactaatgcctgcgtgaaggtgtgtgcctacgtgagaaagcaggttgagaagattaaaaactcgatggacggcaagaacgtcgacacggtgcttatggaattaggagtgagatttcataggctaatctatgagcatttgcagcagtactcttactcatgcatggggggcatgttggcgatctgtgacgtggcggagtatcgtaagtgcgccaaggacttcaaaattcctatggtgttacatctgtttgatacgttgcatgccctatgcaatttactcgtggtcgcccccgacaacctgaaacaggtctgttcaggagagcagcttgccaatctggataagaacattctgcactcttttgtgcaactcagagcagactatagatccgcaagactggcgcggcacttctcctag

SEQ ID NO: 187216 - DNA, 2415 bp, synthetic construct
  misc_feature 1..2415: note = Description of Artificial Sequence: Synthetic coding sequence
  source 1..2415: mol_type = other DNA
atggccgagaacagcgagagcctgggcaccgtgcccgagcacgagcgcattcttcaggaaatcgagtccacggataccgcgtgcgtaggacctacattgcggagcgtgtacgatgaccagccgaatgctcacaaaaagttcatggagaagctggacgcatgtattcgaaatcacgataaagagatcgaaaagatgtgtaattttcaccatcagggatttgtggacgccattaccgagctgctgaaggtccgtacagacgcagaaaagctgaaagtgcaggtgacagacacaaaccgcaggtttcaagacgccggtaaggaggtgattgtgcacacagaggacatcattagatgccgcattcagcagcgcaatatcacgactgtcgtggaaaaactgcagctgtgtttacccgtcttggagatgtactcaaagctgaaggagcagatgtcagcaaaacggtactactcagccttgaaaacaatggagcagttggagaatgtctatttcccgtgggtcagccagtatagattctgtcagctcatgatagaaaacctgcctaagctacgcgaggatatcaaggaaatcagtatgtctgacctgaaagactttttagagagcattcgaaaacacagtgataagattggcgaaacagcaatgaaacaagcccagcatcagaaaacctttagcgtaagcctgcagaagcaaaacaaaatgaaattcggcaaaaatatgtatattaatagggatagaatacctgaagagcggaacgaaactgtgctcaagcacagtttggaggaggaagatgaaaatgaagaggagatactgactgtccaggacctggttgacttttcgcccgtgtatcgttgcctccatatttactctgtgctaggggacgaggagacgttcgagaattactaccgtaagcagcgcaaaaaacaggcccgtctggtgctccaaccccagagtaacatgcacgagaccgtggacggatatcgaagatacttcacccagatcgtgggtttctttgtcgtggaggaccacattctacacgttacacaggggctggtcacccgagcctatactgatgaactctggaatatggccctgtccaaaatcatcgctgtgctgcgtgcacattcctcctactgcaccgaccccgatctggtcctggagctgaaaaatctcaccgtaatcttcgctgacacgctgcaaggctatggattccctgtaaaccggctgttcgacttactgtttgagatccgagatcaatacaatgagacactgttgaagaaatgggctggcgtttttagggatattttcgaggaagacaactactcgcccattcccgtagtaaacgaagaagagtacaagatcgtaatctcaaaatttccttttcaggaccccgacctcgagaaacagtcgttcccaaaaaaatttcctatgagccagagcgtcccacacatctacattcaggtaaaagaatttatttatgccagcctaaaattttctgagtccctgcaccgatcatcaacagagatagatgacatgctgagaaagtcgactaatttgctgctgacacggacactgtcctcatgtctgctcaatctgatcagaaagccccatattggcctgaccgagttagtacagattatcattaacacgacacacctggagcaagcctgtaaataccttgaagactttatcaccaatatcaccaacatatctcaggagacagttcacactacacgcctttacggcctttcaaccttcaaggatgcgcggcacgcagctgaaggcgagatttataccaagctgaatcaaaaaattgacgagttcgtgcagctagctgactacgactggaccatgtccgagcctgatggccgagcatctggctacctaatggatctgataaactttttgaggagcatcttccaggtctttacacatctgcctggcaaggtcgcgcagacggcttgtatgtcggcatgccagcacttaagcacttctcttatgcagatgttactcgactcggagctcaagcaaattagcatgggggctgtgcagcagttcaatctggacgttatacagtgtgagctttttgcaagtagtgaacccgtccccgggtttcaaggcgatacattgcaactggcgttcatcgacctccgacagctgctggatctatttatggtgtgggactggagcacatacctcgctgattacggccagcccgcttctaaatatctgagagtgaacccaaatactgcgctgaccctactggagaagatgaaggataccagcaagaagaataacatcttcgctcagtttcgaaaaaacgaccgagacaaacagaagctgatcgaaaccgttgtgaagcagctccggagtctggtcaatggaatgtctcagcacatgtag

SEQ ID NO: 187217 - DNA, 462 bp, synthetic construct
  misc_feature 1..462: note = Description of Artificial Sequence: Synthetic coding sequence
  source 1..462: mol_type = other DNA
atggccgagaacagcgagagcctgggcaccgtgcccgagcacgagcggatcctccaggagattgagtccacagataccgcatgcgtgggcccaacactcaggtcagtgtacgatgaccagccaaatgctcacaaaaagttcatggaaaaacttgatgcctgcatcagaaatcatgacaaagaaatcgaaaagatgtgtaactttcaccaccagggcttcgtggatgcaattaccgagcttttgaaggtgcgtacagatgctgagaagctcaaggtgcaggtcactgatacaaatcggcgcttccaggacgcgggaaaagaagtgatcgtccataccgaggacattattaggtgcagaatccagcagagaaatatcactacagtcgtagaaaagctgcaactgtgtcttccggtgctggagatgtactctaaactgaaagaacagatgagcgccaaaagatag

SEQ ID NO: 187218 - DNA, 2463 bp, synthetic construct
  misc_feature 1..2463: note = Description of Artificial Sequence: Synthetic coding sequence
  source 1..2463: mol_type = other DNA
atgtgctgcgtgggcggcgccggcagctgcagcgacaccggcaagcttggagcctgcagagcgatgctggaagaagagacggaccagacctacgagaatgtgctcgccgagattcaatccttcgagttgcccgtggaagctactctgcgatcagtgtacgatgaccaacccaacgcgcacaaaaaatttatggaaaagttggatgcctgcattcggaatcacgataaggaaatcgaaaagatgtgcaacttccatcatcaggggtttgtggacgccattacggagcttttgaaggtccgaaccgatgctgagaagcttaaagtccaggtgactgataccaacaggcgcttccaagatgcagggaaagaagttattgtacacaccgaggacatcatccggtgtcgcatacaacagagaaatattactaccgtggtggagaaactgcagctttgcctccccgtcttagagatgtatagtaaactgaaagagcagatgtctgccaagcggtactacagcgccctgaaaacaatggaacagctggagaacgtctactttccctgggtgagtcaatacaggttctgtcaactcatgatcgagaaccttcccaaattaagggaggacataaaagaaatctctatgtcagatctgaaagatttcttggagtccatccgcaagcacagcgataagattggggagactgcaatgaagcaggctcagcatcagaagacatttagcgtttccctgcagaagcaaaataagatgaagttcggcaagaacatgtacatcaacagggataggatccccgaggaacggaacgaaaccgtgttgaaacacagtttggaggaagaagatgagaatgaggaagaaatccttacagtgcaggacctcgtggattttagtcccgtttaccgctgcctgcacatctattcggtcctgggggatgaagaaacctttgagaactactacaggaaacaacggaaaaaacaagctcgccttgtcctgcagccacaatcaaacatgcacgaaactgtcgacggctatcggcgttatttcacccaaatcgtgggctttttcgtggtggaagatcatattctgcatgtgacacagggactggtcacccgggcctatacagacgaactctggaatatggccctgtctaaaatcatcgcagtcctgagggcccatagctcctattgtaccgatcctgatctagtcttggaactcaaaaacttgaccgttatcttcgcggacacgctgcaaggatatgggtttccagtaaatcggctgttcgacctgctgttcgagatcagagatcagtataatgagaccctgctgaagaagtgggcaggcgtgttccgtgacattttcgaggaggacaactactccccgattcccgtggtcaacgaggaagaatacaaaatcgtaatttcaaagttcccattccaggaccctgacctcgagaagcagtcctttcccaaaaagttcccaatgtctcaatcagttcctcatatctatattcaagtcaaagaattcatctacgctagtcttaagttctcagaaagcctgcaccggtccagtactgagatcgatgacatgcttcggaagagcaccaaccttttactcacgagaaccctgagctcctgtttactgaacttaattaggaaacctcatattgggctgaccgagctggtccagattatcattaatacaacccaccttgaacaggcatgtaagtatctcgaggacttcattacaaacattacaaacatatctcaggaaactgtccacactacccggttgtacgggctgagcacattcaaggacgctaggcacgcagctgagggcgagatttatactaaactaaatcagaaaatagacgagttcgtgcagctcgctgattatgactggaccatgtccgagcctgatggacgtgccagcggctacctgatggatttaatcaatttcttgagatccatatttcaggtgttcacgcacctccccgggaaggtcgcccagacggcttgtatgtccgcttgccagcacctatcaacatcacttatgcagatgctcctcgacagtgaacttaaacagatctccatgggggccgttcagcagttcaatctggatgttattcaatgcgaactgtttgcttcaagtgagccagttcccggttttcaaggcgacactctgcagttggccttcatagacctccgacaacttctggacttgtttatggtttgggactggtctacctatctggccgactacggacagcccgcctcgaagtacctgcgggtgaatcccaataccgcccttactctgttggaaaaaatgaaggacacctctaaaaaaaacaacatctttgcccagtttcgtaagaacgatcgtgacaagcaaaaactcatcgagacggtggttaaacagctaaggagcctggttaacggcatgtcccagcatatgtag

SEQ ID NO: 187219 - DNA, 2400 bp, synthetic construct
  misc_feature 1..2400: note = Description of Artificial Sequence: Synthetic coding sequence
  source 1..2400: mol_type = other DNA
atgctggaggaggagaccgaccagacctacgagaacgtgctggccgagatacagtccttcgagctcccagtcgaggcgacactgcgctccgtgtacgacgaccagcccaacgcccacaagaaattcatggaaaaactggatgcatgtattcggaaccacgacaaagagatcgaaaaaatgtgtaatttccatcaccagggcttcgtggacgcgataaccgaactgctgaaagttagaacagatgccgagaagctcaaggtgcaggtgacagatacgaatagacggttccaggacgcaggcaaagaggtgatcgtgcatactgaggatataatccggtgccgcatccagcaacgaaatataacaactgtcgtggagaagctccagctctgcttgcctgtccttgagatgtactctaagctcaaggagcaaatgtcggccaagcggtattacagtgcgttgaagaccatggagcagctggagaatgtgtatttcccttgggtctcccagtacaggttctgtcagcttatgatcgagaacttgccgaagttgcgtgaggacatcaaggaaatatctatgtcagatttgaaggatttcctcgagtccatccggaagcactcggataaaatcggcgaaacagccatgaagcaggcgcagcatcaaaaaaccttttctgtaagtttgcagaaacaaaataaaatgaagttcggcaaaaatatgtacattaatagggatagaatccccgaagaacggaacgagactgtgctgaagcactcactggaggaagaggatgagaacgaggaggaaatactaacagtccaagatttggtggatttctcccccgtttatcggtgcttacatatctacagtgtcctgggcgacgaagagacatttgagaactactatcggaagcaacgaaaaaaacaagcgaggttggtgttacagccccagtctaatatgcatgagactgtcgacggctataggagatattttacccagatcgtgggcttcttcgttgtagaagatcacatcctccacgttacgcagggcttagtaacccgtgcctatactgacgaactgtggaatatggcccttagtaaaattattgcagttctgcgggcccacagcagctattgcacagatccagatctggtgctagaattgaagaatcttaccgttatctttgcggatacccttcaggggtacgggtttccagtcaatagactgtttgatctgttgtttgaaattcgggatcaatataacgagacgctcttgaagaaatgggctggagtattcagggacatattcgaagaggataactattccccaatcccagtggtcaacgaagaagaatataagattgttatatctaaattcccttttcaagaccccgatctggagaagcagagctttcctaaaaaattccctatgagccagagcgttccgcatatatacattcaggttaaagagtttatttatgcatcactaaaattttcagagtctctccacaggtcatcaacagagattgacgatatgttgcgtaaatctacgaatctgctgctcacacggaccctgtcatcttgtttgctcaacctgattaggaagccacatatcggcctgacagagcttgtgcagataatcattaacaccacccatctggaacaggcatgtaaatacctggaggacttcatcacaaatataacaaatatcagccaagaaaccgtgcacacgactcgtctgtacgggctaagcacttttaaagacgccaggcacgctgcggaaggggagatctacaccaaactcaaccaaaagatcgatgagttcgtgcagctcgccgattacgattggactatgtctgagccagatggccgagcatcaggctatctgatggatttgatcaacttcctcaggagtatctttcaagtgttcacccatctgccaggtaaagtcgcacagacagcgtgtatgagcgcttgccaacacttgagcacctcgctcatgcagatgctactagacagcgagctgaaacaaataagtatgggcgccgttcagcagtttaacctggatgtaatccagtgcgagcttttcgcaagttctgaaccggtgcccgggtttcagggtgacaccctgcagctggctttcatagatcttcggcagctccttgacctctttatggtctgggactggtccacttacctcgccgattatggccagcccgccagcaagtacttgcgtgtcaaccccaatactgccctgacattgttggagaagatgaaggacacatccaaaaagaataacatttttgctcagttcagaaagaatgaccgcgataagcagaagttgatcgagacagtcgtgaagcagttgagatcacttgtcaacgggatgtcccaacacatgtag

SEQ ID NO: 187220 - DNA, 2106 bp, synthetic construct
  misc_feature 1..2106: note = Description of Artificial Sequence: Synthetic coding sequence
  source 1..2106: mol_type = other DNA
atggccgagaacagcgagagcctgggcaccgtgcccgagcacgagcggattctgcaggaaatagaatctaccgataccgcctgtgttgggcccacgttgagaagcgtttatgacgatcagcccaacgcccacaaaaaatttatggaaaaactcgatgcgtgtatcaggaaccacgacaaagagatcgaaaagatgtgcaactttcaccaccagggcttcgttgatgcgatcaccgagctgctcaaggtgcgtacagacgcagaaaaactgaaagtacaggttacggacactaacaggcggtttcaggacgccggaaaggaggtgattgtgcacactgaggatattattagatgccgcatacagcaacggaacattactacagtcgtggaaaaactgcagttatgcctgccagtcctggagatgtactccaagttaaaggagcagatgtcggccaaaaggtactatagcgccctcaagacaatggagcagctggagaacgtgtatttcccttgggtgtcacaatataggttctgccaactcatgattgagaacctacctaagctccgggaggacattaaagaaatcagtatgtccgacctgaaagacttcttagaaagtattaggaaacatagcgacaagatcggcgaaactgccatgaaacaggcgcaacaccagaaaactttctctgttagcttgcaaaagcaaaacaaaatgaaatttggaaaaaacatgtatatcaacagggatcgcattccagaggagagaaatgaaacggtgctcaagcactctctcgaggaggaggatgaaaacgaagaagaaggtgatgaggagacctttgagaactactataggaaacagaggaaaaaacaagcgcggctggtccttcagccgcagagcaatatggggtacggatttcctgttaaccgacttttcgatctcctctttgagatccgcgaccagtacaacgaaactctgctgaaaaaatgggccggggtgtttcgagacatctttgaggaagacaattactcacccatcccagtcgtaaacgaggaggaatacaaaattgtgattagtaagttcccattccaagatcccgatctggagaaacagagctttccaaaaaaatttcccatgtctcagagcgtaccgcacatttacattcaggtcaaagagtttatttatgcgagtctgaagtttagcgaatctctgcacaggtccagcaccgaaatcgatgacatgctgaggaaatcaaccaacttattgcttactaggacactgtcctcatgtcttctcaatctcattagaaagccccatatcggcctgacagagcttgttcagattataataaatacaacacaccttgagcaggcctgcaaatacttggaggactttataaccaacatcacgaatatatcgcaagagacagtccacacaactcgcctctacggcctcagcacttttaaggatgcacggcacgccgctgaaggggagatttatacaaagctgaaccaaaagatcgacgaattcgttcaactagccgattatgactggaccatgtcagagcccgacgggcgagcttcgggctacttaatggacctgattaactttctgaggtctattttccaggttttcacacacctgcccggaaaggtagcacagacagcctgtatgtctgcttgccagcatctgtcaacaagcctgatgcagatgcttctggactctgaattgaagcagatcagcatgggtgccgtgcaacagttcaacctggatgttatacagtgcgagctcttcgccagcagcgaaccagtccccgggttccagggagataccctgcagttggctttcatcgaccttagacagctactggacctctttatggtgtgggattggtcaacctacttggctgactacgggcaaccggccagcaagtatttgcgcgtcaatcccaatacggccttgaccttactagagaaaatgaaagacaccagcaagaaaaacaatatctttgcgcagtttcgaaaaaacgaccgggacaaacaaaagctaattgagactgtggtcaagcagctcagaagcttggtgaacgggatgtcacaacacatgtag

SEQ ID NO: 187221 - DNA, 219 bp, synthetic construct
  misc_feature 1..219: note = Description of Artificial Sequence: Synthetic coding sequence
  source 1..219: mol_type = other DNA
ggcaaggtggcccagaccgcctgcatgagcgcctgccagcacctgtcaactagtttgatgcagatgctgttggactctgagctaaaacagatttctatgggagctgtacagcagtttaacctcgatgtcatccagtgcgagctttttgcatcgtccgaacctgttccaggttttcagggtgataccttgcagctggcatttatcgacctaaggcagtag

SEQ ID NO: 187222 - DNA, 2436 bp, synthetic construct
  misc_feature 1..2436: note = Description of Artificial Sequence: Synthetic coding sequence
  source 1..2436: mol_type = other DNA
atggagcggggcaagatggccgaggccgagagcctggagaccgccgccgagcacgagcgcatcctccgcgaaattgaaagcaccgataccgcatgcattggaccaactcttcgatcagtctatgatggcgaggaacacggtcggtttatggagaaactggaaacacggattcggaaccacgacagggagatcgaaaaaatgtgcaatttccattaccaagggtttgttgatagcatcaccgaactgttgaaggtcagaggggaagcgcagaaactgaaaaaccaggtcaccgatactaacaggaagttacagcacgaaggcaaagagctagtgattgctatggaagaacttaagcagtgtcggcttcagcagcggaacataagtgctactgtggataagctgatgctgtgtctgccagtgctcgagatgtactctaaactgagggatcagatgaaaacaaagaggcattatcctgcactgaagaccctggagcacctggaacatacctacctgccacaggtgtcacactatcgattctgtaaagtaatggtagataacattccaaaactcagagaggaaataaaggacgtatcaatgtcagacttgaaggattttttggagagcatcaggaaacactctgacaagataggcgagacggccatgaagcaggcccagcaacagaggaacctggataatatcgtgctgcagcagccacgtatcggcagcaaacgcaagtccaagaaggacgcttacatcatctttgataccgagatcgaaagcacctctccgaaaagcgagcaagactcgggtatcctggacgtcgaagacgaggaggacgatgaggaagttcccggcgcccaggatctagtcgatttctcaccagtctacaggtgtttacatatttatagtgttctgggagcacgtgaaacgttcgagaattactataggaaacagcgccggaaacaagcccgccttgtcctgcagccccccagcaacatgcacgaaacactggatggttacaggaaatacttcaatcaaattgtagggtttttcgttgtcgaggaccatattcttcacaccactcaaggtctcgtcaaccgtgcctatattgatgaactgtgggaaatggccctgtctaaaacgatcgcggccctgaggacgcactctagctactgcagcgacccaaacttagtacttgatctgaagaatttaatcgtgttgttcgctgacactctccaggtctacggtttccctgtgaatcagttgttcgatatgctgctggagattcgcgatcagtacagtgaaactctgctcaagaaatgggctgggatatttcggaacatccttgatagtgacaattacagccctattcccgtaaccagcgaggaaatgtacaaaaaggtagtgggacagttcccattccaagacatcgaactggagaaacaacctttcccaaaaaagttccctttcagcgaatttgtccccaaagtgtataatcaaattaaagaatttatctacgcctgcctaaaattctctgaggacctgcacctttcctcaacagaagtcgacgatatgatccgcaaatccacgaacctcttgctgacaaggactctcagtaattcattgcagaatgtgatcaaacgcaaaaatataggcctgacagagcttgttcaaatcattattaacaccactcacttggagaaatcttgcaagtacttggaagagtttatcacaaacattaccaatgtgctgcccgagaccgtgcacacaactaaactctacgggactactactttcaaagacgcacggcacgcagccgaggaggagatatataccaacctgaaccagaagatcgatcagtttctgcagctcgctgactatgattggatgaccggggatctcggcaataaagcatccgactacctggtggatttgatcgctttcctccgttccacatttgctgtatttacacacttacccggaaaagtggcccagacagcctgtatgtctgcatgcaagcaccttgctacctctctcatgcagctgcttttagaggctgaggtgagacagcttacattaggggcattacagcagttcaatcttgacgtgagggagtgtgaacagttcgctcgcagcggtcctgtgcccggttttcaggaggacacactccagttggcctttattgacctgcggcagctacttgaccttttcatccagtgggattggtccacttacctcgccgactatgggcaaccaaactgcaagtacctgagggttaaccctgtgacagccttaactctcctggagaagatgaaagacacaagccgcaaaaataacatgtttgcccagttccgcaagaacgagagagacaagcaaaagctgattgacacagtggccaagcagctgcggggccttatatctagtcaccacagctag

SEQ ID NO: 187223 - DNA, 2016 bp, synthetic construct
  misc_feature 1..2016: note = Description of Artificial Sequence: Synthetic coding sequence
  source 1..2016: mol_type = other DNA
atggagcggggcaagatggccgaggccgagagcctggagaccgccgcggagcacgagcggattcttagggagatcgagtcaaccgacactgcctgcatcggtccaactctgcggtcggtgtatgacggtgaggaacacggcaggttcatggaaaagttagagactagaatccgcaatcatgatcgcgagattgagaagatgtgcaacttccactaccagggtttcgttgactctatcactgagctgctcaaggtgaggggcgaggcccagaaattgaaaaatcaggtcaccgacactaaccgtaaattgcaacatgagggaaaggaactggtgatagccatggaagagctcaagcagtgtcgtttacaacagaggaacatctccgctactgtggacaagttgatgctgtgtctgcctgtgctggagatgtatagcaaactgagggaccagatgaagacgaagcgccattatcccgcccttaaaactctggagcaccttgaacacacatatctgccgcaggtctcacattataggttctgtaaagtcatggtagataatattcccaagcttcgtgaggaaataaaggacgtttccatgtccgatctaaaagatttcctagaatccataaggaagcactccgacaagattggcgaaacggcaatgaaacaggcccagcagcaacgcaacttagacaacatcgttctgcagcagccacggatcgggtccaagcggaagagcaagaaggacgcgtacatcattttcgataccgagatcgagtccacaagcccgaagagcgaacaggacagtggaatcttagacgtggaggacgaggaggatgatgaggaagtccccggggctcaggacctagtcgacttcagcccagtgtatcgctgcctacacatctactcggttctgggggccagagaaacctttgaaaattactaccgcaagcagcgtcggaagcaggcccggctggtattacagcccccctctaacatgcacgagaccctcgatggctaccgcaaatacttcaatcaaatcgtggggttttttgtggtggaggaccacatccttcacaccacccagggattagttaaccgtgcttacatagacgagttgtgggagatggctttgtccaagacaattgccgcgctcaggactcactcctcctactgcagtgacccaaatttggtgttagacttaaagaacctgatcgtgctgtttgccgataccctgcaagtttacggcttccctgtcaaccagctttttgatatgctgctagagataagggaccaatacagcgagactcttctgaaaaagtgggccggcattttccgcaatattctggacagcgacaactatagcccgattccggtaacatctgaagagatgtacaaaaaggttgtggggcagttccccttccaggatatcgaactggaaaagcagcctttcccaaaaaaattcccattctcagagttcgtgcctaaagtgtataaccagataaaggaattcatctatgcctgcctgaagttttcagaggatttacacctgtccagtacagaggttgatgatatgataagaaaatccacgaatcttctactgacacgtacgctgagtaacagcctccaaaacgtgattaagaggaagaacatcggattaacagagctcgtccaaatcatcattaataccacacatttggaaaaatcctgcaagtacctggaggaatttataacgaacattacaaacgtgttgcctgagacagtccacacgaccaagctatacggcactacaactttcaaggacgccaggcacgctgctgaagaggaaatttataccaatctcaatcagaaaatcgatcagtttttgcagctggccgattacgattggatgactggagacttgggtaacaaggcgagtgattacctcgtcgatttgattgctttcctcagatcgaccttcgcagtattcacgcatttgccagtcagcggctcttgttatttcgttctatatatctag

SEQ ID NO: 187224 - DNA, 5970 bp, synthetic construct
  misc_feature 1..5970: note = Description of Artificial Sequence: Synthetic coding sequence
  source 1..5970: mol_type = other DNA
atgaccaaggtgccccccgccttcgacttcagcttcctgaacgacgaagaggctaggaaaattctgcaggtgctagagcggaacgaggagctgcagcgtgctgagaaagaccggatcagcaaactacagaagactaagagagatataaggtggctgcagggcgtgacaggagaatggtttgaggaaatccaacggaagaagttctgtaatgaaaccgacgtgtctcagatgctgaaacaacctctcacatatcgcctgtctaaagagatggcgaaaaacgatcccatcgagctccccacaagccgaagcaagaatgtcaccaatcaaaaaaagcccacacctttcagtagccgtatgagcttcagatccagcttcgctagtctgttcagctttaggaagagcggaaaggagacatccaaactgccttctcttggccaaaagggctgcgacggccacgcagggccccccatgccggtgcgcggggccgccgtgcaggctaaaatttataattcaccactggaaaaccatctggtggactctaccttcgtgccaaaaccggcagtgatgcgcgaagaaagcggaatgccaccaccctgggacgcatccctgttggaaaacgagtttttccaggtgctggatgacctggacagcaaactggcccaagagcagagtgccagctcagtcaacactcggactccacttaattatggctctcgcacacagtttggccacttttacagtagtgggaaccgccacgggaacatcactgaaaggcataaaaaacattataatgagacgtccaatatgtctatctacgatattttaagacccgggactccccgagagggttttaagaccttcagccccagaactagcaccatttatgacatgtaccgaaccagggaaccgagagtatttaaagaggactatgtgcagaagaatacctttggaagcacatctctctgttttgacagccgacagagaagcgctctgccagccactggccatttcaccgccaggagcttacactttcccgcaactacccagtctaaaagcgggttcatcccccccaggcaccagcagagccccaaaagaacacctctgagttctattatatggaataggagtgactcaagtagagatcgcgagaatcaggaagagttcttgagagccccttcgccaatggaaattgaccccgcagacaagtacgtgtatccccgaggcttccaggaaaacaagcggtatgagagctatcattctcaaaacgtgtatcagcgcgtgtccctgaatgcacctatggaaaatgccatgagcccagacacattcgaaaactcagagaacatgcctttttaccatcagagtaatacatttaccaggagttttttttccaacacattcggccgatcaggtgagcagaggagattcgggcaagggccattttgggggcaggaaaagggacatagtttttggagcgactttcatcgctctcgcaagtctttctcctcctcagatcgtgacttcgagatgatttccatggaggctaattctgtgtcggcaatccacggtcacaatgtctcctccgagcactgggagtcatttagttcaggctacggcactgacgtctccagaggtcaagaggagccccatccgtggcaattcgactttcagagatctaccctggatagcatggtggtgagccacggaaatgaaacccaattgacaccccacttcggaaccccaaacgtctgcagcatgaccggttctagctaccatgtgaagtcatcagaacttgtctcccagcaggacagttccccggtggaggtgcacatcaacaaagaagcctcttcattcgggattgcccaaacacttgcttcgtccttcaaaacctcctttagccaaatctcagacgatcgacgcaatcctcagagtcccaacctgcagaatcccactgtgacgctgcaaaagattttccctaataaaccagcaagccaccctatgcggagtcacaccgaggtaaccgtgacaagcagtaacagcgtcgactctctgcctttggctaaaagccaaccgaacattctggtcaccgaggtcaataatgaaaaagatcttaatgaatcaatttctgaggaagataagcagttatccaaaatggaccagacaaacaaagcaggcgaaataccacagcctgtctctcaaacgggcatttcaaattcactgcctgatttccagaatcctctgtcccaggacagcgctaaaagtaacgggtttggctttaatgcttctactataattagctccaagaaatctccacgtgtttttagccgcaaggatacttccaaaatgtacataccacataccgataagtcaaacgacattaaacaggataaacgtttcactgagaaccggaagcttggctcaactgctagcctgcctttcatccaagaacatagaacccctcccagttttccaaggaccgatcaagggtgccatcaggaattgactgtgaacaacgaggatataagtcgaattataaccaacaatcactggtcatccgccctgacggacacccagaatgctcagtattcgaaatgcaaactgacacctggacataaaacgtcctgcgatagcctagatctgagtagcgccgccctgccagattccagcccatcaaagaattcttcactcgacgctcctgtggtgccatccaccacggtgttctccagaaggagccccagtgataaagatccctccttgggggaacgcgaagagaaggataatgccggcaagaatcagaaaaaccagttcattgtttcccacagcgagaaccaggagaggaacgactcccccgtacctacacacgacgaggttgtggacgtaaagtgccatagccattcccccttccggaacgaaagaggaaaaggcaagatccggcatcacatctcctgcatcgagaagctttcaaaaacagagtccatctccgtgcctacaagtgatcaccgatctctcatagaagctaaccagagtaactccaaagtatccgaactggataccatatattgcactctgccgcgcaaaagttctagctttctgatacatggcagacaatcggggtccaagatcatggccgcgtcacttagaaacggaccaccaccttttcaaataaaaaacaatgttgaggatgcgatgggcaactatatgctgaataaattttcgcctagctctcctgagtcagctaacgagtgttcaaaggttctctcggattccgcattagaggccccagaagcaaccgagcggatgaccaatgtgaagtcctctgggagcacatccgtgagaaagggaccactgccatttcttattaaccgcgcaatgagctgcccgtctggggaaccccacgcctccactggcagggaaggacgtaaaaaacccctcacaagtgggatggatgcgtctgagctgacgccacgggcctgggaacgcattatcagtcctgttgagtctgatagcagtgtacgagattgctctctcactaagcggcagcatcaaaaggagaattttcaggaatacaccgaaaaggaaggaaagatggcagcttcaaggaggtcggtctttgcgctgagtaacgaggacccgcttcctttctgctctgacttgagcggcaaggaacggggcaagaccttacacaaggtgaagaccacaagcaccttcagtgtgtcaggcgacgaggataacgtaaagtgcttggaagtcgtgtctatctactacaccctgcctaggaagccctcaaaaaaattttgcaacttgctgcagcagtatacgcaaaataccaacttgctcatagagtcacctcaggttgagacggaaacttttcctaacgccctcgaaaaggataaacaaaattattctactcgcgaacagtctgggacaccttcttgcgagaacctgaagatgtccgtcaacagcgaccaaacacttacaacagagaatatgacagctttcaggctgtcaaatagaggtcccttggcgccgacattacaggagatggccagtgtcgaggctgccgtgagcctgccagaggaagaaagcaaggcccgcgaaatcttcagcgacaatctggcaaaaacaccactcggcgattcagagaacaagaaggagcggggaaagaaactgcagagcgaaacgctgcataccagtcttatgctccagaggaagaacgttagtgaggaaaagtctgagaactgtcagcaaagtatcaacagttcaaactctggcccctcatcactcccggcactgagcgaagttaatataggcaatagtcagacacgccggtcctcttgggagtgtactggtagcggccgagctatccccttcaccggcagtggtaagtgtcctcaaaaggatcatacaagcactgccgtgggggacggcagtagtggctctcagccccgggagggaaggggagacattggcacaaactgtcagaaaatgaccaacaagacactctctcacagcgaatcccaagttttcgccctcacgcccgcacttcacaaattacagctcggtgaagaaacacagagtgatgaaccaaacctcgagtcgctgcagagcgagccacgcgaattaccccaaaggtcacaggaagcaaatatgactgagagccgaaaagcggaggacgagatgcagaaatccgcttgggaccaaccctctctgccggaagggaataaaaacaaaactaatttggacgacctggtgaaaggcgaaaaccgcagcagcgtgaaacatcggctggctgccatgtccaaggccagcaggaagtttcccgcgaaagatgtgagccctaggcggcatgtggcaacgattttccctcagagcggatctaggagcgggttcgatcatctctccctgggcacagtagagtgcaatcctctgtttcccgaacccactcccaagagtgctgaaagcatcggggagtcacggttgtcggaaaatggcaagcacgtaaaaaagtcagaaaatctgttgcccattactgttctgcccaaccgggagccctcaacacacgtgagtaatcagaagtctaattcaattagccagagacatcaaaacgagttcaaaaacgtgagtgaatctccctctaaacacgagaactctaaagacgttaccgccgcccagaatctggtccgcgagtctggagccccatctcccatcacatttacgtccctccgggaggccgagtttagtgacaaccagaggaggctcagccccccttttccgttagagcctgctcagaagagtagggtaagctccccactggcaagtttccttcagcagcagcgctccgcatccagcctcgaatgggagcccgaaccacacttgtacaggtcaaaaagcctcaaaagcatcaacgtacatggggacctgttgagaaagagccacccaccaaaggtgcgggagcggcatttttctgagagcacctccatcgacaacgccctgagtaggcttactctgggaaacgagtttagcgtgaataacggctacagccggcgcttccgctcgttcagcgagctgccttcgtgcgacggcaacgagagctgggcctacagatccggtaccaagaccggaccacggtccgccataagcatctacagacctattgactacggaatcttcggcaaggaacagcagctcgcatttttggaaaacgtcaaacggagcctcactcaaggaagattgtggaagccctcctttctgaagaacccgggattcctgaaagacgatctccggaatcctcccaatccctcggaatcactgagttcaaactcaccatcctcccaagtgcctgaggacggcctgagccctagtgaaccgctaaatatctacgaggacgatccggtcgattcaaattgtgacacagacactactacggacgacgagtactatttggatgagaatgacaaggagagtgagctctag

SEQ ID NO: 187225 - DNA, 5742 bp, synthetic construct
  misc_feature 1..5742: note = Description of Artificial Sequence: Synthetic coding sequence
  source 1..5742: mol_type = other DNA
atgctgaagcagcccctgacctaccggctgagcaaggagatggccaaaaacgatccgattgaactgccaacaagcagatcgaaaaatgtcaccaatcagaagaaacctacacccttttcttctcgcatgagctttcggtcttcctttgcttcacttttcagttttagaaagagcggtaaggaaacctccaaactcccctcccttgggcaaaagggctgcgacggtcacgccggaccacccatgccggtgaggggagctgccgtccaggccaagatttataacagccctctggagaatcacctcgtggatagcaccttcgtgccaaagccggctgtgatgagggaggaatcaggaatgcctcctccgtgggacgcctccttgttggaaaacgaattttttcaggttctggacgacctggactcgaagctggcccaagagcagagcgcctctagtgtcaacacccgcacccccctcaactacggctcccgcacgcagttcggtcatttctattccagcgggaaccggcacggaaatatcacggaacgtcataagaagcactataatgaaacctctaacatgtctatatacgacattctgcgccctgggacgccacgcgaaggattcaaaaccttctctccaaggacaagtactatttacgacatgtaccgcacaagagaaccaagggttttcaaagaggactatgtgcaaaagaatacatttgggtccaccagtctctgcttcgattctagacagcgttcagccctgcccgccacaggccactttacagctcggtccctgcattttccagctaccacacagtccaaatctggctttatcccgcctaggcatcagcaatcccccaaacgcactcccctgagttctatcatatggaatcgaagtgactcctcccgggacagagagaatcaggaggagtttcttcgcgcgccttctcccatggaaatcgatcctgccgacaagtacgtctacccaaggggcttccaagagaataaacgttacgagtcataccatagccagaatgtgtaccagcgtgtgagtctcaacgctccaatggagaatgccatgtctcccgacacctttgagaactcggagaatatgcccttctaccaccagtccaatacattcactaggtcgttcttttctaacacgttcggaaggtccggcgaacagcgcaggttcggtcagggaccattctggggccaagaaaagggccacagcttttggtctgattttcaccggtcaaggaagtctttctcatcgagtgacagggattttgagatgatctccatggaagccaatagcgtgtccgcgatccacggacataatgtctcttcggaacactgggagtccttttcgtcggggtacgggactgacgtgtccagaggccaagaagaaccccatccatggcagtttgactttcagcggtcaaccctggactcaatggtggtcagccatggcaatgagacacagctgaccccacacttcggcactcctaatgtgtgttcgatgacagggagttcttaccatgttaaaagctccgagttggtttcccagcaagatagctccccggttgaggtccacattaataaagaggctagctcattcggcatcgcgcagactttggctagtagctttaagaccagcttctctcagattagtgatgataggcgcaacccccagagcccgaatctccagaaccctactgtgactctgcagaagatcttccctaacaagcccgcctcccacccaatgcgcagccacaccgaagtgacggtaacatcctctaacagtgtagactctctgcccctggccaaatcacagcccaatatcctcgtgaccgaggtgaacaacgaaaaggacctgaacgagtctattagtgaggaagataagcaactatctaaaatggatcaaactaacaaggctggtgaaattccacagcctgtttctcagacagggatcagcaattccctacccgattttcagaaccccctgagccaggatagcgccaagtccaacggattcggtttcaatgcttccactattattagttctaaaaagtctcctcgggtatttagcagaaaggatacatccaaaatgtatatccctcataccgacaagtcaaatgatattaagcaagataaacgtttcactgaaaaccgcaaactggggtctactgcctcactcccctttatccaggaacacagaactcctccatctttcccaaggacagaccaggggtgtcaccaggagttgactgtcaataatgaagacatttctaggataatcactaataaccattggagcagcgctctgaccgacacccaaaatgcccagtattcaaagtgcaaacttacgccaggccacaaaacctcatgtgactctctggacctgtctagtgccgctttacccgattctagccccagtaaaaacagctctttagacgctccagtggtcccatcaactaccgtgttcagccgcaggtccccttcggataaggatcctagtttgggagaaagagaggaaaaagacaatgccggtaagaatcagaaaaatcagttcattgtgtcccattctgaaaatcaggagcggaatgattcaccagtgccaacacatgacgaagtggttgacgtgaagtgtcatagccactcaccctttagaaatgaacgtgggaaagggaaaatccgccatcacattagttgtatagaaaaattgagtaagacggagtctatctctgtccctacttctgaccacaggtccctgattgaggcgaaccagtctaactccaaggtgagtgaactcgacactatttactgcaccctgccccgcaaaagcagtagcttcctgatccacggaagacagtccggatccaaaataatggcggcatccctgcgaaacggccccccccctttccagatcaaaaacaacgttgaggatgcaatgggaaattacatgttgaacaagttcagtccgtcatcccccgagtctgctaatgagtgcagcaaagtgctaagcgattcggctctggaagcacctgaggcaactgagcgaatgactaatgttaaaagcagtgggagcaccagtgttcgcaaagggcctttgccttttctgattaatagagcgatgtcttgccctagcggggaaccccacgcttcaacgggaagagaggggagaaagaagccactgacatcaggaatggatgcctctgaactgacgccccgggcatgggaacggattattagccctgtggagtccgactcctccgttagggattgttccttaaccaaacgtcagcatcaaaaagagaactttcaggaatataccgaaaaggaaggaaagatggcggcctcaagaaggtctgtttttgccctgtctaatgaagatcctctgccgttttgcagtgatttatctggaaaagaaagaggaaagaccctgcacaaggtaaaaacaacctcaacgttttctgtgtctggtgatgaggataacgtcaagtgcctggaggtcgtgtcgatttactatacgctgcctcgcaagccatccaaaaaattttgtaacctcctgcagcagtacacccagaacaccaatctcctcatagaatcccctcaggtggagacagagacttttcccaatgccttggagaaggacaagcagaactactccactagagagcagtccggcaccccaagttgcgagaatctgaagatgtctgtcaattccgaccagactctgactacagaaaatatgactgctttccgcctatccaataggggtccgcttgcccccaccctgcaggaaatggctagcgttgaggccgcggtgagtctgcctgaagaggaatctaaagcgcgggaaattttctccgataatctcgccaaaacccctcttggcgactccgagaataaaaaggagagaggcaagaagctccagtcagagactctgcacacctctttgatgcttcagcggaagaacgtgtctgaagagaaatcggagaactgccagcaaagcatcaacagttcaaatagtggtcctagttcactccctgctttgtctgaagtcaatattgggaattcccagaccaggcgttcctcgtgggaatgtactggctctggccgggccataccattcactggtagcgggaagtgtccacagaaagaccacacttccacagcggtaggcgatgggtcctcaggaagtcagccacgtgagggccgaggagatataggtacaaattgtcagaaaatgacaaataaaacgctgtcccactccgagagtcaggtttttgccctaacacccgctctgcataaactccaactaggagaggagacccagagcgatgagccaaacctcgaatccctccagtccgaacctcgcgaacttccgcagcgcagccaggaagcaaacatgaccgagagcaggaaggccgaggacgaaatgcagaagagtgcatgggatcagccctctctccccgagggcaacaaaaataagactaatctcgatgacttagtgaagggcgagaatcgctcctccgtcaagcatcggctggcagcaatgtccaaggcttctaggaagttccctgctaaggatgtgtctccaaggcggcatgtggccacaatcttcccacaaagtggcagcagatccgggttcgaccatctgtctctcgggactgtagaatgcaatcctcttttcccggaaccaacccccaagtcggctgaatcaattggagagagccgccttagtgaaaatggtaagcatgtaaagaagtcggagaaccttctgcccatcactgttcttccgaatcgggagccttcaacccatgtgtcaaaccagaagagcaacagcattagccaacgccatcagaatgaattcaaaaatgtatcagagagtcccagcaaacacgagaacagtaaagacgtgacggccgcccaaaacctggtgagggaaagcggagctccaagtcctattacgtttactagcctgcgcgaagccgagttctcagataaccaacgacgactgtctcctccttttcccctggaacccgctcagaaatcccgggtaagcagtcccctggcctctttccttcagcagcagaggagcgcctcctccttggaatgggaacctgagccacacctctatcgaagcaaatctttgaagtctattaatgtacatggcgatctgttgcgcaaatcacaccccccgaaggtgcgagaacgacatttcagtgagtcgactagtatagataatgcactgagcaggctgacattgggcaacgagttcagcgtgaataatggttactcacgtcgatttcgatcttttagcgaactgccctcctgtgacggaaacgaaagttgggcctatcgttccgggactaaaacaggtccaaggagcgctatttctatctatcggccgatcgactacgggatatttgggaaggagcaacagctagcgttcttggagaatgtaaagcggtctctaacacagggtcggctctggaaaccctcctttctgaagaaccccgggtttctaaaggatgatttacgaaaccctccaaatccaagtgaatctctgtccagcaactctccctccagccaggtgcctgaggacggcctgtcgcccagcgaacccctcaacatttatgaggacgacccggtggactccaattgtgacaccgacacgactactgatgacgaatactatctcgacgagaacgacaaagaatctgagctgtag

SEQ ID NO: 187226 - DNA, 2460 bp, synthetic construct
  misc_feature 1..2460: note = Description of Artificial Sequence: Synthetic coding sequence
  source 1..2460: mol_type = other DNA
atgcccgtgcggggcgccgccgtgcaggccaagatctacaacagccctcttgaaaaccaccttgtagattctacttttgtcccaaagcccgccgttatgcgggaggaaagcggtatgcctcccccgtgggacgcatctctgctggagaatgaattcttccaggtcttggacgatctagactctaaattagcgcaggaacagtccgcatcaagtgtgaatacccgcacaccattgaattacggttctcgcacccagttcggacacttctattcatccgggaaccggcatgggaatatcactgaacgccacaagaagcattacaacgaaacttccaacatgagtatctatgatatcttgcggcctggaaccccaagagaaggcttcaagacctttagccccaggactagcacaatttatgacatgtaccggaccagggaacctcgtgtgttcaaggaggactacgtgcagaagaacacattcgggagcacctccctgtgcttcgactctagacagcgcagcgctctgccagccactgggcattttactgctcgcagccttcattttcctgctaccacacagagcaaatccggcttcatccctccaaggcatcagcagagccccaagagaacccctctgagttctatcatatggaaccgttccgactccagcagagatagagaaaaccaggaggaatttctgcgcgccccatcccccatggagattgatcccgccgataagtacgtgtatccccggggtttccaagagaataaaagatatgagagttaccacagccagaatgtgtatcagagagtgagtctgaacgctccaatggagaatgccatgagtccagacacatttgagaactcagaaaacatgcccttctaccaccaaagtaatactttcacgaggtcattcttttccaacaccttcggacgatccggagagcaaaggcgatttgggcaggggccgttctgggggcaggagaaaggtcattctttctggagtgatttccatcggagtcgcaaaagcttctctagttccgaccgagactttgagatgatatcgatggaagccaactcagtatctgccatccacggacataatgtttcctccgagcattgggaaagcttcagttccggctacggtaccgacgtctctcgggggcaggaggaaccccacccttggcagttcgacttccagcggagcaccctggatagcatggttgtgagccacgggaatgaaactcaacttaccccacacttcgggaccccaaacgtgtgctccatgacagggtctagctaccacgttaaatccagcgaactggttagccagcaggatagcagccctgtggaggtccacatcaataaggaggcaagcagtttcggaatcgcgcagacgttagctagcagttttaagacctccttttcgcaaatctcagatgaccgaagaaacccccaatctcccaacctacagaaccctaccgttaccctgcagaagatcttccccaacaagccagcttctcacccaatgcgatcccacactgaggtcacagtgacctcttcgaattctgtggattcactgccccttgccaagtcccagcctaacatattggtgactgaagttaataatgaaaactccaaagacgtgacggcagcacaaaacctggttagggagtctggcgcgccttccccaataacttttaccagcctgcgtgaagcagagttctcagataatcagagacggctgtctccaccgtttcctctggagccggcccagaaatctcgggtgtccagccccctggcctccttccttcaacagcaacgctcagcaagtagcctggaatgggagcccgagccccacctttatagatctaagagtctgaagagcatcaacgtccacggcgacctgctgcggaagtcccaccctcccaaagtgcgtgagcggcacttcagtgaatccacctccatagacaacgccctgtccaggctgacattggggaatgagtttagcgttaacaatgggtactcaagacggtttcgctctttcagtgagctcccatcctgcgatgggaatgagtcctgggcctacagatctggaaccaagacagggccaaggtccgctatttctatctaccgccccatcgattacggcatcttcgggaaagaacagcagttagcttttctcgaaaacgtgaaaagatctcttacgcaaggcagactttggaaaccgtctttcctcaaaaatcccgggttcctcaaggatgatctccggaatccccctaatccttccgaatccctttcttctaatagcccatccagccaggtacccgaggatggccttagcccctccgagcccctgaatatctacgaggacgatcccgtggactcaaactgtgacacagacaccacaaccgatgacgagtactatctagacgagaacgataaggagagtgagctgtag

SEQ ID NO: 187227 - DNA, 5406 bp, synthetic construct
  misc_feature 1..5406: note = Description of Artificial Sequence: Synthetic coding sequence
  source 1..5406: mol_type = other DNA
atgcgggaggagagcggcatgccccccccctgggacgccagcctgctggaaaatgagttcttccaggtgctggacgaccttgactcaaagctggcccaggagcagtccgcatcgagtgtgaacactcgtactccacttaactacggaagccggacacagttcggtcacttctactcgagcggcaaccggcacggaaatatcaccgaaagacataagaagcattacaacgaaacttcgaacatgtccatttatgacattttaaggcccggaactccccgtgaaggcttcaaaacctttagcccaaggacatcaaccatctacgacatgtatcgcactcgtgagcctagggtgttcaaagaagactacgttcagaaaaacactttcggatccacctcattgtgctttgactccagacagaggtctgccctgcctgccacagggcactttactgctcgcagcctacacttccccgctacgactcagagtaaaagtggcttcattcccccaaggcaccagcagagtcccaagagaactccactcagcagtataatctggaataggtccgacagtagtagggatagggaaaaccaggaagaatttctgcgagctccctcacctatggagatagacccagctgacaagtacgtctatccgagaggcttccaggagaataagaggtacgaatcataccacagtcagaatgtgtaccagcgcgtatccctgaatgcaccaatggagaacgcaatgtcacctgatacttttgagaactcagagaacatgcctttctatcaccagagcaatacttttaccagatcctttttttctaatacgtttgggagaagtggggagcagagaaggtttggacagggccctttttggggccaagaaaagggccactcattttggtctgatttccatcgcagccggaaatccttcagctcgtctgatagagactttgaaatgatatccatggaagcaaattccgtctctgcgattcatggacacaatgtgagcagtgagcactgggagagcttctcaagtggatatgggacagacgtgtcccgaggccaggaagagccacacccctggcagtttgatttccagagatccacgttggatagcatggtggtgtcacacgggaacgaaacacagctaacccctcactttggcacgcctaacgtgtgtagcatgaccgggtccagctaccatgttaaatcgtctgagttagtgtctcagcaagactctagcccagtggaagtgcacatcaacaaggaggccagctcattcggcatcgcacagactttagcctcgtcattcaagacatctttctcacaaatctcggacgaccgacgcaaccctcagtcacctaacctccagaatccgaccgtgactttacagaaaatcttcccaaacaagcccgcaagccaccctatgaggtcacatacagaagtcaccgtcacaagctccaactctgtcgattctctacctctggccaaatcacagcctaacatccttgtaacagaggtcaacaatgaaaaggacctgaatgagtctatttcagaggaagacaaacagttgagcaaaatggatcagacgaataaagcaggggaaattccacagccagtaagccagaccggcatcagtaacagccttccggattttcagaatccactttctcaggattcagccaagagcaatgggttcggattcaacgccagcacaatcatttcctccaagaagtctcccagggtattttcccgtaaagacacctccaagatgtacattccacacaccgataagtcgaatgacatcaaacaggataagagatttaccgaaaacagaaagctcggcagtactgcatcccttccttttatacaggaacaccgaacccccccatctttccccagaaccgaccagggttgtcaccaggaactgacagtaaataatgaggatatcagtagaattataaccaacaaccattggtcaagtgccctcaccgacacacaaaatgcacagtattccaaatgcaagctgacaccagggcataaaacttcatgtgattcactcgacttatctagcgcagctctgccagactcatccccgtccaagaacagttctctggacgccccggtggtacctagcacaactgtgttctcgagacgaagcccaagcgataaagatccctccttgggagaacgggaggaaaaagacaacgccggaaaaaaccagaagaaccagttcatcgtgagccattcggaaaatcaggagagaaatgattccccggttccaactcacgatgaggtcgtggacgttaagtgccattctcacagtccgttcaggaacgaacgtgggaaggggaaaatcagacaccatatctcttgtatcgagaaactgtccaaaacagagagcataagcgtaccaacctcagaccatcggtcactgatcgaagcgaatcagtccaactccaaggtctccgaactggatactatctactgcacgttgccacgtaagagctcctcgttcttaattcacggccggcagtcaggatccaaaataatggcagcctcattaaggaatggtccgccgccatttcagatcaagaacaacgtggaagacgccatgggtaactacatgttgaacaagtttagccccagctcccccgagagcgccaacgagtgtagcaaagtgctgagcgacagtgctctggaagccccagaagccaccgagaggatgacaaacgtaaagagttcgggtagtacctcagtgaggaaaggtccactaccatttctgattaaccgggccatgtcatgtcccagcggagaaccccatgcctccacagggcgggaaggccggaagaaaccgctaacctctggaatggacgcatctgaactcacccctcgtgcctgggaaaggattatctcgccagtcgagtccgatagctccgtccgggactgctctctcacaaagaggcagcaccagaaagaaaatttccaggaatatactgagaaggagggtaaaatggcagcctctagacgatctgtgtttgctctgagtaacgaggacccattacccttttgctccgacctgtccggaaaagaacggggcaaaacattacacaaagtaaagactacatccactttctctgtcagcggtgatgaggacaatgtgaaatgtctggaagttgtgagcatttactacacactgcccaggaagcccagcaagaaattttgtaacctgctccagcaatatacacagaacacaaatttgctgattgaaagcccccaggttgagaccgaaacctttcccaacgcccttgaaaaggataaacagaattattccacaagagagcagagcggaacaccatcttgtgagaacctcaaaatgagcgtgaattcggaccagacactaacaacagagaacatgacagcttttcgcctctcaaacagggggcctttggctcccaccctccaggagatggcctccgtggaagctgccgtgtccctgcctgaggaggaaagcaaagcacgtgagatttttagtgataacctagcaaagacccccctgggagactccgagaacaaaaaggaacgggggaaaaagctccagtccgaaacactgcacacttcacttatgctacagaggaaaaatgtgagcgaggagaagtcggaaaattgccagcagagcatcaatagctcaaatagtggcccttcatctcttccggccctatcagaggtgaatattggtaactcacagactcgtaggagctcttgggaatgtaccgggtcaggcagagctataccctttacaggcagtggaaaatgtcctcaaaaagaccacacatcgacagcagtaggcgacgggtctagcgggagtcaaccacgagaaggaagaggagacatcgggacgaactgtcaaaaaatgacgaacaaaacactgagtcacagtgagtctcaggtattcgccttgacaccagcgctacacaaattgcagcttggggaggagactcagtctgacgagcccaaccttgagtcattgcagtctgagccccgtgagctcccccagcgctcgcaagaagccaacatgacggagtctcggaaggccgaggatgaaatgcagaagtctgcgtgggaccagccaagcctcccggaaggcaacaagaacaagactaatctagacgatctggttaaaggagagaaccgctcttcagtgaaacatagactagcggccatgagtaaggccagtcgcaagttcccagccaaggacgtgagtcccagacgccatgtggctacaatcttcccacagtccggttctagatctgggtttgatcacttatcccttgggacagtcgaatgtaatcctctctttcccgagccaacccctaagagtgcggagtccatcggggaaagccggctgtcggaaaacggtaagcacgtgaagaaatcggagaacctgttgcccattacagtgctgcccaacagagaacccagcacacacgttagtaaccaaaagagtaacagtatatcccaacgccaccagaatgagtttaaaaatgtttccgaatcccccagcaaacacgaaaatagcaaagatgtgactgccgcacagaaccttgtgcgcgaatcaggagccccgagtccgattactttcacgtcattgcgggaggcagaattctctgataaccagcggaggttgtcaccaccttttcccttggaaccagctcagaaatctagggtgagcagtcctctcgcaagctttctccaacagcagcgcagcgccagttccctggagtgggaacccgaaccacacctgtatagaagtaagagccttaaaagtataaatgtccatggagatctgttaagaaagtcccaccctccaaaagtacgtgaacggcatttctcggagtccactagtatcgacaacgccctgtctcgcctgactcttggcaatgagttttcagttaataacgggtatagtcgaaggtttcgatcgttttcagagctcccaagctgtgacggcaatgaaagttgggcctatcgaagtgggactaagacaggaccccggtcagcaattagcatataccgccccatcgattatggcatctttgggaaagagcaacagctggcatttttggagaacgtcaaacgtagcctgactcagggtcgcttatggaaacctagcttcttaaaaaaccccgggtttctgaaggatgacttgcgcaatcctcccaacccctctgagagcctgagcagtaactcaccctcctctcaagttcctgaagacggactgtcaccatccgagcctcttaacatttacgaggacgacccagtggatagcaattgcgacaccgataccactacagacgatgaatattacctcgacgagaacgacaaagaatccgaattgtag

SEQ ID NO: 187228 - DNA, 5949 bp, synthetic construct
  misc_feature 1..5949: note = Description of Artificial Sequence: Synthetic coding sequence
  source 1..5949: mol_type = other DNA
atgagcctgagcttcctgaacgacgaggaggcccggaagatcctgcaggtactggagcgtaacgaagagctccagcgggccgagaaggaccggatcagtaagcttcagaagacaaagcgggacattaggtggctgcagggtgtaactggggagtggtttgaagagatccaacggaagaaattttgcaacgagacggacgtgagccagatgttgaagcagccgcttacttaccgtctctctaaggaaatggccaaaaacgatcccatcgagctgcccacaagtcggtctaaaaatgtgacgaatcagaagaagcccacacctttttcctcccgtatgagtttccgttccagctttgcctcgctattcagctttcgcaagtctggcaaagagacatctaagttgccctctttgggccagaagggttgcgacgggcacgctggcccgccaatgccagtgaggggcgctgcggtccaggccaaaatctataatagtcctctcgagaaccacctggtagatagtactttcgtccctaaacctgctgtgatgcgcgaggagtcaggaatgccaccgccatgggatgcaagcttgctcgagaacgagttcttccaggtcctggatgatctagacagcaaactcgcacaggaacaaagtgcaagctcggtcaacactcgaacacctctcaactacggatctcggacccagttcggccatttttatagctccggtaatcgtcacgggaacatcaccgaacgccacaagaagcactataatgagacctccaacatgagcatctacgacatccttcgccccggaaccccaagggaaggtttcaaaaccttcagccctcgaaccagtaccatttacgatatgtatcggactagggaaccaagagtgtttaaggaggactacgtgcagaaaaatacttttggttcaacttcactctgttttgactctaggcaaaggtctgccctgcccgcaaccggccatttcaccgccaggagcctgcactttcctgcaacgacccaatcaaagagtggatttattccaccacgtcatcagcagtcccctaaacgcaccccattgtcttcaataatctggaacagatctgattcctcacgcgaccgtgaaaaccaggaggagttcctccgggcaccttcacccatggaaattgaccccgctgacaaatacgtgtatcctagagggtttcaagagaataagcgctacgagtcctaccattcccagaacgtctaccagcgggtgtcactgaacgctccaatggagaatgctatgtctcccgacacttttgaaaatagtgagaacatgcctttttatcatcagagcaacacgttcacaaggagcttcttcagcaacacctttggaagatccggagaacaacgccggtttggacagggaccattttggggccaggaaaaaggacactccttctggagcgatttccacaggtcgaggaaatccttttcaagttccgaccgtgacttcgaaatgatctccatggaggcaaattccgtctcagcaatacatgggcataatgtgagcagtgagcattgggagagctttagcagtggttacggcactgatgtgtcccgggggcaggaggagcctcatccctggcaatttgacttccagcgtagtaccctggactcgatggtagtctcacacgggaatgagacccagctcacgccgcactttggtacccctaacgtgtgctctatgacgggctcttcatatcacgtcaaatcaagcgaactggtgtcccagcaggattcctctcccgtcgaagtgcacattaacaaggaggcatctagcttcggcatcgctcaaactctggcatcatcattcaaaacctctttttctcaaattagtgatgacagacggaatccccagtcacctaacttgcagaatcccactgttaccttgcagaaaatcttcccaaacaaaccggcttctcaccctatgcgatctcacaccgaagtcacagttacatccagcaactcagtggatagcctgcccttagctaaatctcaacctaatattctggtgaccgaggtcaacaatgagaaggatctgaacgaaagtatatccgaagaggataagcaactcagtaaaatggatcaaaccaacaaggcaggcgagattcctcagcctgtgtcccaaaccggaatctctaactctctgccggatttccagaatcctctgtctcaagatagcgctaaaagtaacgggtttggcttcaacgccagcacaattatctcctccaagaaaagtccgcgtgtctttagccgcaaagacaccagcaaaatgtatatccctcacaccgacaagtccaacgacattaaacaggacaagcgatttactgagaataggaaactgggctcaacggctagtttgccttttatccaggagcacaggactcctccatcctttcctcggacggatcagggttgccaccaagagctgactgtcaataacgaggatatttctcgcatcattactaacaatcattggagctcggccctgaccgatacgcagaacgcgcagtactctaaatgtaagctgactcctggccacaagacctcttgtgacagtctggatctgtcctcagctgccctgcctgactcatctccctccaaaaatagtagcctggacgccccggtagttccttcaactactgttttctcgcgcaggagtccctccgacaaggatccttcactgggtgaacgagaggaaaaggataatgccggaaagaaccagaagaaccagtttattgtttctcactccgagaaccaagagaggaatgattcacccgttcccacacatgatgaagtcgtggatgtcaagtgccactcccactcaccctttaggaatgagcgcggcaagggtaagattaggcatcacatctcatgcattgaaaaactgagtaaaacagagtcgatttcagtaccgacttctgatcacaggtcactcattgaggccaatcagtccaactccaaagtctcggaactggacactatatactgcactctcccccgcaaatcatctagtttcttaattcatggtcgccagtctggcagcaagatcatggctgcatcccttcgaaatggccctccgccttttcaaatcaagaacaatgttgaggacgccatggggaattatatgcttaacaagttcagtccctccagtcctgagtcagccaacgagtgttccaaggtgctgagcgatagcgctctggaggccccggaggctactgagcgtatgacaaatgtcaagtcttcaggatcgacgagtgtcaggaaggggccattgccctttctgattaacagggccatgtcttgcccttccggcgagccacatgcatcaactggcagggaaggtaggaaaaagcctctgacctccggcatggatgcttcagaactgactccccgggcttgggaacgtatcataagccctgtggaatccgactccagcgtccgggactgttcgttgactaaaagacagcaccagaaggagaattttcaggagtacaccgaaaaggagggaaaaatggctgcgtccagacggtcagttttcgctttgagtaacgaggatccactccctttttgttccgatctctctggcaaggaacggggaaaaacattgcataaggtgaaaactactagcacattcagcgtgtccggcgatgaggacaatgtgaaatgcctcgaggtagtgtctatctattataccctgccccggaaaccgtctaagaaattctgtaacttacttcagcaatacacgcagaatactaatctcctaatcgagtctccccaggtggaaactgaaacctttcctaacgccttagagaaagataaacagaattattctactcgagaacagtcgggtaccccttcctgtgaaaacctgaaaatgtctgtgaactccgaccagaccctgacaactgagaatatgactgcatttaggctgagtaatagaggacccttggccccaaccctccaggagatggcctctgttgaggccgccgtgagtctgcccgaagaagaaagtaaggcccgggagatcttttcagataacctcgctaagacgcctttgggggatagcgaaaacaagaaagagaggggaaaaaaattgcagagcgagacgctgcatacatctttgatgctccaaagaaaaaacgttagtgaggaaaaaagcgaaaactgtcagcagtcaatcaactctagtaatagtgggccttcttccttgcccgctctttcagaagtaaacatcgggaattcgcaaactagacggtcgagctgggagtgtactggtagtgggcgcgcaattccttttaccggctctggcaagtgtcctcagaaagaccacacctctaccgccgttggggatggtagctctgggagtcaacctcgggaggggagaggtgacattgggaccaactgtcagaaaatgaccaataagacactgtcgcactctgagagtcaggtctttgcactgactcctgcgctgcacaagctgcagcttggggaagaaacccaaagtgacgaacctaacctggaaagtttacagagcgaaccaagggaacttccgcagcgatcccaggaggccaatatgacagagagcaggaaagctgaagatgagatgcagaagtctgcctgggaccagccgtcactaccagaaggcaataagaacaaaaccaacttggatgaccttgtcaagggggagaatcgcagcagcgttaagcatagacttgcggccatgagcaaagcctcacgcaaattccccgctaaggacgtgagtccgcgccgacacgtggccactattttcccgcagtcgggctcaaggagcggctttgatcacctaagtttagggaccgtggagtgcaacccactgtttcctgagcccacccccaagtcagctgaatctattggcgagtcacgactgtccgagaacggaaagcatgtcaaaaaatctgagaatttgttgccaatcactgtgttaccgaacagggaaccaagcactcatgtgtctaatcagaagagcaattccatcagccagagacatcagaacgagttcaagaatgtgagcgagagcccgagcaaacacgagaactctaaggacgtcacagctgcccaaaatctcgtcagggagagtggtgcacctagcccaatcacatttactagcctgagagaagctgaatttagcgataaccagagaaggttgagccctcccttcccattagagcccgcacagaagagcagagtcagcagcccactcgcgtcatttctccagcaacaaaggtcagcctctagcctcgagtgggagccagagcctcatttgtatagaagcaaatcactgaaaagtatcaatgtgcacggcgacctcctacgaaagtcccaccctcccaaggttcgggagcgccatttttccgagagtaccagtatcgataacgcattgtccaggttgacactcggaaacgagttctccgtaaacaacgggtattccagacgattccggtcctttagtgagctaccgtcttgtgatggcaacgagtcttgggcatatcgatcaggaactaaaacaggcccgaggtcagctatctccatctacaggcctatagattatggcatcttcggcaaggagcagcagttagcattcctcgagaacgtaaaacgcagccttacacagggtagattatggaagccttcctttctgaagaaccctggttttctgaaggacgatctgaggaatcctcccaacccgtctgaaagtcttagctctaatagtccgtctagccaagtcccagaggacgggttatctccttccgaacctttgaatatttacgaagacgaccccgttgattccaattgcgacacagatactaccacagacgacgagtattacctggatgaaaatgataaagagagcgaactgtag

SEQ ID NO: 187229 - DNA, 2583 bp, synthetic construct
  misc_feature 1..2583: note = Description of Artificial Sequence: Synthetic coding sequence
  source 1..2583: mol_type = other DNA
atggccccccccagcacccgggagccccgggtgctgagcgccaccagtgcaaccaaatcagatggcgagatggtattgccgggattcccagacgctgattcctttgtcaagtttgcattaggctccgtggtggcagtaaccaaagcctccggaggattaccccagttcggagacgaatacgatttttaccggtcttttccaggattccaggccttttgcgagactcagggagacagactgctgcaatgtatgagcagggtaatgcagtatcacggatgtcggagcaatatcaaagaccgttctaaggtcactgaactggaggacaaatttgatctgctggtagatgcgaatgacgtcattctggaacgagtaggtatcctcctggatgaagcatccggagtgaataaaaaccaacagcccgtcttgcccgccgggctccaggtaccaaagactgtcgtctctagttggaacaggaaagctgccgaatacggcaagaaggccaagtctgagacctttcgtttactgcacgcgaaaaatatcattagaccacagctcaagttccgcgaaaagattgacaattcgaacactcctttcctgcccaaaattttcataaaaccgaacgcccaaaaaccactacctcaagcgctttctaaagaacggagggagcggccccaggaccggcccgaggaccttgacgtgccacctgcactggccgacttcattcatcagcagaggacccagcaggtggaacaggacatgtttgcacacccgtatcagtacgagctcaaccattttactccagctgatgctgttttacagaagccccagccacaactttacagacctatcgaggagacaccttgtcatttcatctcctcccttgacgagctggtggaattaaacgagaagctcctgaattgtcaagagtttgcagttgatttggaacaccattcttatcggtcctttttgggcctgacatgtctgatgcagatctctaccaggaccgaggactttattatcgacacactggagttacggtccgacatgtatatcctgaacgagtcactgactgaccctgcaatcgtgaaggtcttccatggcgctgattcagacatagagtggctacaaaaagactttggattatacgtggtgaacatgtttgacacacaccaagccgcacgactcctgaatctcgggagacacagcctcgatcacttgcttaaactgtactgcaacgtagactctaacaaacaataccaacttgccgattggcggatcagaccgctcccggaagaaatgctcagctacgcacgcgatgatacacattatttgctatatatctacgataaaatgcgactcgaaatgtgggagcggggaaacggccagcccgtgcagttgcaggttgtgtggcagcggagtagggatatttgtctgaagaaattcataaaaccaatattcaccgacgagagctatctggagctctacaggaagcagaaaaagcacctgaatacacagcaacttacagctttccagctgctgtttgcctggcgcgacaaaaccgctcgtagggaggatgagtcttacggctatgtgctaccaaatcacatgatgctcaagattgcggaggaactgcccaaggagcctcagggtatcatagcttgttgcaacccagtcccaccactggtccgtcagcaaattaacgagatgcatctgctgattcagcaagcacgcgaaatgccgctacttaagtccgaggtggccgcgggagtcaagaaatcagggcctttgccttctgccgagagactggagaatgtattgttcggccctcacgattgcagccatgcccctcctgacggataccccataatcccgacaagtggctctgtgcctgtacagaagcaggctagtctcttcccagacgagaaagaagataatctcctgggaacaacgtgcctgattgccacagcggtcatcactctgttcaacgaacctagtgctgaagactcaaaaaagggcccactcacagtggcccagaagaaggcccagaacattatggaatcattcgaaaacccttttcgaatgatttcaaacagatggaagctagctcaggtccaggtgcagaaggactccaaagaggccgttaagaaaaaggccgctgagcagaccgctgctcgtgagcaagcaaaagaggcatgcaaagccgcagctgaacaggctatcagcgtcaggcagcaggtggtgcttgagaacgctgcgaagaagcgcgaacgcgcaaccagcgatccacgaacaaccgaacagaaacaggaaaagaaacgcctgaagatttccaagaagcccaaagatcccgagcctcccgagaaggagtttacaccttacgattattcacagagcgactttaaggcctttgccggtaacagcaaatctaaagtcagtagtcagttcgatcccaataaacagacacccagcggcaaaaagtgtatcgccgcaaagaagatcaagcaatctgtgggcaataaatctatgtccttcccaaccggtaagtccgatcggggttttcgatacaactggcctcagcggtag

SEQ ID NO: 187230 - DNA, 2658 bp, synthetic construct
  misc_feature 1..2658: note = Description of Artificial Sequence: Synthetic coding sequence
  source 1..2658: mol_type = other DNA
atggccccccccagcacccgggagccccgggtgctgagcgccaccagcgctaccaagagtgacggggagatggtgttgcctggattcccagacgccgattcattcgtgaagtttgccctcggatccgtggtggcggtgactaaggctagcgggggcttaccccagtttggggacgagtacgacttttaccgctcattcccaggctttcaagcattctgcgaaacgcagggagatcgcctccttcagtgcatgagcagggtgatgcagtaccatgggtgcagatcaaatatcaaagaccggtctaaggtgaccgaattggaagataagttcgacctcctagtggacgctaacgatgttattctagagagagtggggattctgctggatgaagccagtggggtgaacaagaatcagcagcctgtgctacccgctggtcttcaggtcccaaaaacggtggtgtcttcatggaatcgcaaagccgctgaatacggaaaaaaagccaaatctgagacctttcgacttctccacgccaaaaatatcatcaggccacaactgaaatttagagagaagatagataatagtaacacgccattcctgcctaagatattcataaagcccaacgcccaaaagccgctccctcaggctttatccaaagagcgtagagagcggccacaggaccgaccagaggatttggacgtcccaccggccctggcagacttcatccaccaacagcgaacacaacaggttgaacaagatatgttcgcgcatccctaccagtatgagcttaaccattttactcccgcagacgctgttctgcagaaaccacagccccagctctaccgccccattgaggagaccccttgccattttatctctagccttgacgagctcgtggaactgaacgaaaaattactgaattgccaagagtttgcggttgacctcgaacaccacagttacagaagctttcttggacttacctgtttgatgcagattagcaccaggaccgaggatttcatcatagatactttggagctgaggagcgacatgtacattctgaatgaatctctcacagaccctgcaatcgttaaggtctttcatggagctgactcagacattgaatggctccagaaagactttggcctttatgttgtgaatatgttcgacactcaccaggctgccaggttgctgaatctcggcaggcattctctagaccatctgctcaagctgtactgtaatgtggatagtaataagcaataccaactcgcagattggaggattcggccgcttcccgaagagatgttgagctacgcgcgcgacgatacacattacctactatacatctacgataaaatgagactggagatgtgggaacgaggaaacggccagccagtgcagcttcaggtcgtctggcagagaagcagagatatttgccttaaaaagttcatcaagccaatttttaccgacgagagttacctggaactgtaccggaagcaaaaaaagcacctcaacacacaacagttgaccgcctttcagctcctcttcgcatggagggacaagacagcaaggcgggaagacgagtcgtacggatacgtgctgccaaaccacatgatgcttaaaatcgctgaggaactccctaaagagccacaaggaatcattgcctgttgtaatcctgttccgccgctagttcgacaacagatcaatgaaatgcatctgctcattcaacaggcaagggagatgccactgcttaaatccgaggtagccgcgggagttaagaaatcagggccgttgccctccgcagagcgtctcgagaacgtgctgttcggaccccacgactgttcgcacgcacctccggatggataccccatcattcccacttcggggagtgtcccagtgcaaaagcaagcctcgctgttccccgacgagaaagaagacaatttgctcggaacgacatgccttatcgcgaccgccgttattacgttgtttaatgagccatccgccgaagactctaagaaaggccctctcacagtggcacagaagaaagcacaaaatattatggagtcattcgagaacccctttcggatgtttctcccatctctcggccacagggcccccgtgagccaagcagcaaagtttgatcctagtactaagatttatgagatctctaatagatggaaattggcccaggtgcaggttcagaaagatagcaaagaggctgtcaaaaaaaaggccgccgaacaaacagcagctagagagcaggctaaggaggcgtgcaaagccgcggcagagcaagccatctcagttagacagcaagtggttctggagaatgcggcaaaaaagagagagcgcgcaacgagcgatccaagaaccacagagcagaaacaagaaaaaaagcgcctgaaaataagcaaaaaaccaaaggatcccgaaccgcctgaaaaggaatttacaccatacgactactcacagagtgattttaaggctttcgctggcaactctaagtctaaggtctccagtcagtttgaccctaacaagcaaaccccgagtgggaaaaaatgcatcgcagctaaaaaaatcaagcagtctgtgggtaataaatcaatgtctttccccaccgggaaatccgaccgcggctttaggtataattggccccagcgctag

SEQ ID NO: 187231 - DNA, 2040 bp, synthetic construct
  misc_feature 1..2040: note = Description of Artificial Sequence: Synthetic coding sequence
  source 1..2040: mol_type = other DNA
atggccccccccagcacccgggagccccgggtgctgagcgccacctctgccacaaagagcgatggcgagatggtcctcccaggattcccagatgcggacagtttcgttaaattcgctctggggagtgtggtcgctgtgacgaaggccagcggtggcctcccccagttcggagacgaatacgacttttaccggtcttttccgggattccaggctttctgtgaaactcaaggcgataggctcctccagtgtatgtctcgtgtaatgcaataccacggctgtcgaagtaacatcaaggataggagcaaagtgacagagcttgaggataaatttgaccttctggtggacgcaaacgacgtaattttagaacgtgtcgggatcctcctcgatgaggcgtcgggcgtaaataaaaatcaacagccagtactgccggcgggccttcaagtgcccaaaacagtggtatcttcgtggaacagaaaggcagccgagtacgggaagaaagctaagagcgagactttccgcttgctccacgctaagaatattatcagacctcagctcaaattcagggaaaaaatcgataattccaatacacccttcctgccaaaaatctttatcaaaccgaacgctcagaaaccactcccacaagcgcttagcaaagagcgtagggagagacctcaggatagacccgaagacctggatgtaccgccagctctcgcggacttcattcaccagcagcgaacgcaacaagtggagcaagacatgtttgcacacccataccagtatgaactgaaccacttcacaccagccgacgcagtccttcagaagccacagccccagttgtacaggccaatcgaggaaaccccctgtcactttatctcctccttagacgagttagtggaactgaatgaaaaactactgaactgccaggaatttgcagtcgacctagaacaccacagttaccgttcattcctgggcctcacgtgtctgatgcagatttccacacggactgaggattttatcattgatactctggaattgcgtagtgacatgtatattttgaatgaatcccttacagaccctgctatagtgaaggtcttccacggcgcagatagcgacatcgaatggctccaaaaggattttggactttatgttgtgaatatgtttgacacccaccaggccgcgcggttgctcaatttgggcaggcattcacttgatcatctccttaaattatattgtaatgtagattctaataagcaataccagctcgccgactggcggattcggccactgcccgaagagatgctgtcgtacgctagggacgatacacattacctgctttacatctacgataagatgcgtctggagatgtgggaaaggggaaacgggcagccagtgcagcttcaggtagtttggcagagaagccgagatatttgtttgaagaagttcattaaacctatcttcacagacgagtcatatttggaactctacaggaaacagaagaagcatctgaacacacagcagctgaccgctttccaactgctgttcgcatggagagataagacggcgcgaagggaggatgagtcttatggttacgtgctgcccaaccatatgatgctgaaaatagcagaagagctgcctaaagaaccccagggtattatcgcctgctgcaatcccgtgcctcctttggtaagacagcaaattaatgaaatgcatcttctgatccagcaggctcgcgagatgcctcttctgaagagcgaagtcgcagcgggtgtcaagaagagtggaccactgccaagcgctgaggttgagtgcaggatttgtttccttcctcaggagggtaaacgccaagtcactgccagtgcctccactccactgacagaggcttgtgccgatagctggcagaaagcgactgccggtcttcacgtactccacgcatccctgctggtttccttcaacgcagaaatcggagaatgcagcctgtggacctcaaggctgctgccttgcccaagcggctggctttccaatcatcctaaccagtggtag

SEQ ID NO: 187232 - DNA, 747 bp, synthetic construct
  misc_feature 1..747: note = Description of Artificial Sequence: Synthetic coding sequence
  source 1..747: mol_type = other DNA
atggccgccggcttcaagaccgtggagcccctggagtactaccggcgcttcctgaaggaaaattgtcgacccgacgggagagaattaggggaatttcgaaccaccaccgtcaatatcggtagcatctctactgcagatgggtccgcattagtgaagcttggtaatacgactgtcatatgcggcgtgaaagcgtttagatctgggcctcccggtgaagaggcacaggtagcctcgcaattcatcgccgacgtgattgaaaactcacagatcatccaaaaggaggacctctgcatctccccggggaagctggtgtgggtactctattgcgatctgatctgcctcgattacgatggtaacatcctcgatgcgtgcacttttgccctgctagcagcactgaagaatgtgcaactaccagaggtgacaataaacgaggagacagcgctcgctgaggtcaatcttaagaagaagtcttacctgaacattaggacacatccggtggccaccagtttcgcagtgttcgacgatacactactgattgttgatccaaccggcgaggaagagcatctggcgaccggaactcttaccatcgttatggatgaagagggcaagctgtgttgtctccataagccaggaggatcaggcttaacaggcgctaagctgcaagactgcatgtcacgagctgtgactaggcataaagaggttaaaaaactgatggacgaggtgataaagtctatgaaaccaaaatag

SEQ ID NO: 187233 - DNA, 831 bp, synthetic construct
  misc_feature 1..831: note = Description of Artificial Sequence: Synthetic coding sequence
  source 1..831: mol_type = other DNA
atggccgccggcttcaagaccgtggagcccctggagtactaccggagatttttgaaggaaaactgccgccccgacggtcgcgaactgggggagtttaggacaacaacggtgaacatagggtccataagcaccgcggatgggagtgccttagtgaaactaggcaatacgacggtgatttgtggagtgaaagccgagtttgcagcaccatctactgatgcgcctgacaaaggctacgtcgtgccgaatgtggacctgccccccctgtgtagctccagatttcgttcgggacctcccggcgaagaagctcaggtcgcatcccagtttatcgctgatgttattgagaattcgcaaatcatccaaaaagaggatctttgtataagtcccggaaagctggtctgggtcttatactgcgacctcatctgtctggactacgatggcaatatcctggacgcatgcaccttcgcactcctggccgctcttaaaaacgtccagctgccagaggtgacaatcaatgaagagaccgccttagctgaagtgaacctgaagaagaaaagctatctcaatattcggactcatccagtggcaacatcctttgctgtttttgatgacaccctcctaattgtcgatcccacaggggaggaggagcatttagcgacggggacgcttacaattgtcatggacgaagaaggcaaactgtgctgcctccataaacccggggggtcggggctgaccggtgcaaagctgcaggactgcatgagtagagcagtgactcggcacaaggaagtaaagaaactcatggatgaggtcattaagtccatgaaaccaaagtag

SEQ ID NO: 187234 - DNA, 1320 bp, synthetic construct
  misc_feature 1..1320: note = Description of Artificial Sequence: Synthetic coding sequence
  source 1..1320: mol_type = other DNA
atgaaggagacccccctgagcaactgcgagcggcggttcctgctgcgcgccattgaggagaaaaaaaggttagacggacggcagacctatgattatagaaatattcgaatatccttcgggaccgattatggctgttgcatcgtggagctaggtaagacgagagttctcggacaggtgtcttgtgagctcgtcagtcccaaacttaaccgcgcaacggagggtatacttttcttcaatcttgagctctctcagatggccgccccagcatttgaacctgggaggcagtctgacctcttggtcaaattgaacaggttaatggaaaggtgcctccggaattccaaatgcattgacaccgaaagcctgtgcgtcgtggccggcgagaaggtatggcagatccgcgtggatctccatctccttaatcacgacggcaacattattgatgctgccagcattgccgctattgtcgccttgtgtcacttccggcggccagatgtcagtgtgcagggtgacgaagtgaccctgtacacacccgaggagcgggaccccgtccctctcagtattcaccacatgcccatatgcgtttcttttgcctttttccagcaggggacttatctccttgtcgatccaaatgaaagggaggaacgagtgatggatggactgttagtgatcgctatgaacaagcacagggagatctgcaccatccaatcaagcggcggtatcatgctcctgaaagaccaagtgctgcgctgttcaaagatagccggggtcaaagtggcggagatcacagagttgatactgaaggcattagagaacgaccagaaggtgcgaaaggaaggcgggaaattcggcttcgctgagagcatcgcaaaccagcggattactgcctttaagatggaaaaagccccaatcgataccagcgatgttgaggaaaaagccgaggagataatcgctgaagccgaacctccatccgaggtcgtgagtaccccagtgctgtggaccccagggactgcacagatcggcgagggagtggagaattcctggggcgacttagaggacagcgagaaagaggacgacgaaggaggaggcgatcaggctattatcctggacggcataaagatggataccggggttgaagtctccgacattggatctcaggacgccccaattatcctgtctgatagcgaggaagaggaaatgattatcttggagccagataaaaatccgaaaaaaatccgcacacagaccacaagtgctaaacaggaaaaggccccctcgaaaaagcccgtgaagcgaaggaagaagaagagggcagctaactag

SEQ ID NO: 187235 - DNA, 1371 bp, synthetic construct
  misc_feature 1..1371: note = Description of Artificial Sequence: Synthetic coding sequence
  source 1..1371: mol_type = other DNA
atgaaggagacccccctgagcaactgcgagcggcggttcctgctgagagctatcgaagagaagaaaaggttggacggacgtcagacctatgactacagaaacatacgcatcagcttcggtacagattatggatgttgcatcgttgagctgggtaaaacccgcgtgcttggccaggtgagctgtgagctggtcagccccaaacttaacagagcaacagagggtatattgttctttaatttggaattgtctcagatggcagcacccgctttcgaaccgggccgacagagtgacctcctcgtgaaattgaacaggctgatggagaggtgcctccgcaattctaagtgtatagacacagaatctctgtgtgtcgtcgcgggggaaaaggtgtggcaaattcgcgtcgacctgcaccttctgaaccatgatggcaacattatcgacgctgccagtatcgcggccatcgtggctctctgccacttcagaaggcccgacgtgtccgtacaaggggatgaggtgacattatataccccagaagagcgggatccagtgccactgtctatacatcacatgcccatttgtgtttcgttcgccttttttcagcaaggaacctaccttctcgtggacccaaacgaacgcgaggaaagggttatggacggcctgctcgttattgccatgaacaagcatcgcgagatctgtacaatccaatccagtggtggtataatgttattgaaggatcaagtcctccggtgttctaagatcgctggcgtgaaggtggctgagatcacagaactcatcctgaaggccttagaaaatgatcagaaggtccgtaaagaaggcggtaagtttggtttcgcagagagcattgccaaccaacggattaccgcttttaagatggagaaagctccaatagatactagtgatgtggaggagaaggccgaggagatcatcgctgaggccgaaccccctagcgaagtcgtctccacccccgtactctggacgccaggaactgcccagattggagagggtgttgaaaactcttggggcgatttagaagattctgaaaaagaggatgacgagggaggtggagatcaggctattattctcgatggcatcaaaatggacaccggggtggaagtgagtgatatcggctctcaggagctcgggtttcaccatgtgggacagactggcctagaattcctgactagcgatgcccccatcattctgagtgattctgaggaagaagaaatgataatacttgagcctgataagaatccgaaaaagatccgcacgcagacaacgtccgccaagcaagagaaagctccctcaaagaaacctgtgaaaagacgaaaaaagaaacgcgctgccaattag

SEQ ID NO: 187236 - DNA, 2031 bp, synthetic construct
  misc_feature 1..2031: note = Description of Artificial Sequence: Synthetic coding sequence
  source 1..2031: mol_type = other DNA
atgcagagctggcggcggcggaagagcctgtggctggccctgagcgcgagctggctactgctggtgctgctgggcggcttttcactgctccgcctggccttgcctccacgaccaagacctggagcatcacaaggctggccaaggtggctggacgccgaactgctgcagtccttctcccagcctggcgagctcccagaggatgctgttagccctccacaagccccccacggaggcagttgcaactgggagagttgctttgatacgtctaagtgcagaggcgatggactgaaggttttcgtttacccggctgtagggaccatttcagagacccatcggcgcatcttggcctcgatcgagggatctcgattttatactttctcaccagctggagcctgcttactgttactactgtcactcgatgcccaaactggagaatgctctagcatgcctctgcagtggaacagaggccgcaaccatctggtgctccgactgcatcccgcgccatgccctagaacattccagttgggccaagctatggtggcagaagcctccccaaccgtggactcttttcgcccaggatttgacgtagccttgccctttctcccagaggcacatcctcttcggggcggggcgccagggcagctacgtcaacactcccctcagccaggcgttgcgttattggccttggaggaggagcgcggcggttggagaacagcagacaccggaagcagcgcgtgtccgtgggatggccgatgtgagcaggacccgggccccggccaaacacagcggcaagagacactccccaacgccactttttgtctgatctcaggccatcggcctgaggcagcctcaaggttcctgcaggcgctccaggccgggtgcatccctgttctgttgtccccccgttgggaactgccattctctgaggttatcgattggactaaagccgccatagtggcggacgaacgccttcctctccaggtgctggctgccctccaggagatgtcccccgctcgggtcctggcccttcgccaacagacacagttcctctgggatgcatacttttccagcgttgagaaagtcatccacactactctggaggtaatccaggataggatcttcgggacatccgcccacccatctctcctttggaacagcccccctggggcgctccttgcgttgtctactttctcaaccagcccccaagatttcccattttattatcttcagcagggctcgaggcctgaggggcgattttccgccctgatctgggtagggcccccaggccagccccctctgaagctaattcaggccgttgcgggctcacagcattgtgcacaaatcctcgtgctctggtccaatgaaaggccactgccttccaggtggcccgaaactgctgtgcccttgacagttatcgatggtcatcgcaaggtgtccgacaggttctacccctactcaactattcgcacggacgcgatcttgtcgctcgatgcgcgaagctccctgtctacaagcgaagtcgattttgccttcctggtgtggcagtccttccctgagaggatggtcgggtttctcacctcttctcacttttgggatgaagcgcacggaggatgggggtacactgccgaacgcaccaacgaattcagcatggtgctgacaacagcagcgttctaccaccggtattatcacacactattcacacatagtctccctaaggccttgcggactctggcagacgaggcacctacctgtgtagatgtattgatgaatttcatagtggccgccgtaaccaagctcccgcccataaaggtcccttatgggaaacagcgtcaagaagccgcaccactcgcccccggcggcccaggcccacgacccaagccacccgctccagcacctgactgcatcaatcagatcgctgctgcctttgggcatatgccgctgttgtcttcccgactgcgcctggatccagtgctgttcaaggacccagtctctgtgcaacgcaaaaagtataggagcctggagaaaccctag

SEQ ID NO: 187237 - DNA, 993 bp, synthetic construct
  misc_feature 1..993: note = Description of Artificial Sequence: Synthetic coding sequence
  source 1..993: mol_type = other DNA
atgcggtgctgccacatctgcaagctgcccggccgggtgatgggcatccgcgtactcaggctttcactggtcgtcatactggtactcctcctggtggccggagcgttgacagccctgctgcctagtgtgaaagaggacaagatgttgatgctgagacgggagattaagtcccaggggaaaagcacgatggacagcttcacgcttatcatgcaaacatataatcgaactgaccttctgctgaaactgttgaaccattaccaggcagtcccaaacctgcataaagtgatcgtagtgtggaacaatataggcgagaaggccccggacgagctgtggaactccttgggtccccacccgatcccggttatcttcaagcagcagaccgccaaccgcatgcgtaaccgcctacaggtctttcccgagctggaaactaatgcagtgctgatggtcgacgatgatactttaatcagcacccctgatctcgtgtttgccttctctgtatggcagcaatttccagaccagattgtggggttcgtgccacggaagcacgtctcgacgtcttctggaatctacagctacggaagctttgagatgcaggctcccggaagcggtaacggagaccagtatagcatggtactcataggtgcttcattctttaactctaagtaccttgaactgtttcaacgtcagcctgcagccgtgcacgccctgattgatgatacccagaactgcgatgacattgccatgaactttattatcgcgaaacatatcggaaagacatctggaatctttgtgaaaccagtgaacatggacaacctggagaaggaaaccaattcaggctattctgggatgtggcaccgtgcagagcatgccttgcagcgttcctattgcatcaataaattggtgaacatatatgactccatgccattacgctattctaacatcatgatcagccagttcggttttccttatgccaattacaagcgcaagatctag

SEQ ID NO: 187238 - DNA, 993 bp, synthetic construct
  misc_feature 1..993: note = Description of Artificial Sequence: Synthetic coding sequence
  source 1..993: mol_type = other DNA
atgcggtgctgccacatctgcaagctgcccggccgggtgatgggcattcgggttcttaggttgtccctggtggtgattctcgtattgttgctggtcgccggagctttaactgcactgctgccaagcgtaaaagaagataagatgctcatgctgcgacgagagatcaagtctcaggggaagtcgaccatggatagctttactctgattatgcagacatataaccggaccgacctgctcttgaagctgctcaaccattaccaagccgttcctaaccttcacaaggttattgtcgtgtggaataatatcggcgagaaggcccctgacgaactctggaactctctgggtccacacccaatcccagtcatttttaaacagcagaccgccaataggatgcgtaataggctccaggtgttccctgagctcgagaccaatgcagttttgatggtggacgacgatactctgatcagtactccggatttagtgttcgcattttccgtatggcagcagtttcccgatcagatcgttgggttcgtgcctaggaaacatgttagtacatcttccggaatctatagttatggcagcttcgaaatgcaggcaccagggtcaggtaatggtgaccaatacagtatggtgcttattggcgcgagctttttcaactcaaagtacctcgagctcttccagagacagccagccgctgtgcacgccctcattgatgacactcagaactgtgacgatattgccatgaactttatcatcgccaagcacatcggaaagacgtcaggaatttttgtaaagcctgtcaatatggacaacctggagaaagagacgaactccggctatagtgggatgtggcatagggcagaacatgcactgcaacggtcttactgtatcaataagctggtaaatatctacgactctatgcccctgcggtatagtaatattatgatatcccaatttggattcccttatgctaactataaacgcaagatatag

SEQ ID NO: 187239 - DNA, 354 bp, synthetic construct
  misc_feature 1..354: note = Description of Artificial Sequence: Synthetic coding sequence
  source 1..354: mol_type = other DNA
atgggcatccgggtgctgcggctgagcctggtggtgatcctggtgctgttgttagtggccggcgcactcacggctttgttgccaagtgtaaaggaagataagatgctcatgctcaggagggaaataaagagtcaggggaagagcacgatggactcgttcacactgatcatgcagacgtacaaccggactgacttgcttctgaaactgcttaatcactaccaggccgtccccaacctacacaaagtcatagtcgtctggaataacattggtgagaaagccccagacgaactctggaatagtttgggaccccatccaattccggtcatctttaagcagcagactgcaaacagatag

SEQ ID NO: 187240 - DNA, 801 bp, synthetic construct
  misc_feature 1..801: note = Description of Artificial Sequence: Synthetic coding sequence
  source 1..801: mol_type = other DNA
atgcggacctggaacagcggcggcaccaagtgctgccacatctgcaagttgccaggacgggtgatgggcatacgcgttctgagattgagtttagtggtcatactggtcctgctcctcgttgctggcgcactgactgcactgctgccatcagtaaaggaagacaaaatgctgatgttgagacgagagatcaaatcgcagggcaagtctactatggacagttttacccttattatgcagacctataacagaactgacctgctcctgaaactgttgaaccattatcaagccgtacctaatctgcacaaggtcatagtagtatggaataacattggcgaaaaggctccggacgagctctggaattctctcgggccacatcccattcctgtgatcttcaagcagcagactgcgaaccgcatgcgtaaccgactccaagtcttcccggaactggagacgaatgccgtcttgatggtggatgatgacactctaatctccactcctgatctagtgttcgcgttcagcgtgtggcaacagtttcccgatcagattgtcggtttcgtgccacggaagcacgtgtcaacgtcgtcaggtatttacagttacggatccttcgagatgcaggccccaggcagtggaaatggggatcaatacagcatggtgttgatcggggcctcttttttcaatagcaaatacctggagttgttccagcgccaacctgctgccgtacacgcccttattgacgacacccagaattgtgacgacatcgccatgaacttcataatcgccaaacacatcggtaagtag

SEQ ID NO: 187241 - DNA, 954 bp, synthetic construct
  misc_feature 1..954: note = Description of Artificial Sequence: Synthetic coding sequence
  source 1..954: mol_type = other DNA
atgggcatccgggtgctgcggctgagcctggtggtgatcctggtgttgctgctcgtggctggggccttaactgcgttacttccatcggtgaaagaagacaagatgctcatgctgcggcgggagattaagtctcaaggaaaaagcacaatggactcattcacacttataatgcagacttataatcggacagacctactcctcaagctgctcaaccattatcaggcagtcccaaacctgcataaagttatagtggtgtggaataacatcggcgaaaaagcccctgacgaactctggaattctctgggtccacaccctattcctgtaatctttaagcaacaaactgccaatagaatgagaaatcgtctgcaggtgttccccgaactcgagacaaatgcagtgcttatggtggatgacgacaccttaatatccacacctgatctcgttttcgccttttccgtgtggcagcagtttccagatcagattgttggcttcgtgcctcggaagcatgtgagtacgtcatccggaatttatagttacgggtcctttgaaatgcaggcccctggaagcggcaacggggaccagtactctatggtgctgattggcgcgtctttcttcaactccaaatacctggaactgtttcagagacaacctgccgcagttcatgcgctgattgatgacacgcagaactgcgacgatattgccatgaattttataatcgccaagcacattgggaaaacaagcggtatcttcgtaaagcccgttaacatggataacctagaaaaggaaaccaacagcgggtattctgggatgtggcaccgggctgagcatgctctgcagcgctcttactgtatcaacaagcttgtcaatatctacgattcgatgcctctacgttacagcaacatcatgatctctcagttcggttttccttacgcaaattataaacgcaagatttag

SEQ ID NO: 187242 - DNA, 519 bp, synthetic construct
  misc_feature 1..519: note = Description of Artificial Sequence: Synthetic coding sequence
  source 1..519: mol_type = other DNA
atgagcgtgcccggccccagcagccccgacggcgccctgacccggcccccctattgccttgaggctggggagcccacccctggcttgtctgacacctctcccgacgaaggccttattgaagaccttaccattgaggacaaggctgtcgagcaattagccgaaggactgctatcacactatctcccagacctgcagagaagcaagcaggccttacaggagctcacccagaatcaagtcgtgcttttagataccctggagcaggagatatctaaatttaaagagtgtcactccatgctcgacattaacgcactcttcgccgaagctaaacactatcacgcaaagctcgtgaacatacgcaaggaaatgctgatgctgcacgagaagactagcaaactgaagaaaagagccttaaaacttcagcagaagaggcaaaaggaggaactcgaaagagaacagcagcgggagaaggaattcgagcgagagaagcaactcaccgccaggcctgcaaagcgaatgtag

SEQ ID NO: 187243 - DNA, 1608 bp, synthetic construct
  misc_feature 1..1608: note = Description of Artificial Sequence: Synthetic coding sequence
  source 1..1608: mol_type = other DNA
atgctgcacaagagcgaggagggccgggtgctggtggagttcacctgcaagaatcagccaaaaccctccctgccaaccgagtgggctctgtgcggggagcgcgaggaccgtttagagctgctgaaactcagcacattcgcactgatcattacacctggcgaccctcgactggtcattagtagcggttgtgctacgagattattcgaagcgctggaagttggcgcagtgcccgttgtcttgggtgaacaggtccaactaccataccaggacatgttgcagtggaacgaggctgctctcgtggtccctaagcctcgcgttactgaggtgcacttcctgttaagatctctgtcagatagcgatctcctggccatgcgacgccaggggcgcttcctttgggagacatattttagtacagccgacagtattttcaataccgtcctggccatgatcagaacacgaatccagatacctgccgctccaatacgggaggaggccgcggcagagattccacaccgtagcgggaaggctgccggaacggaccccaacatggctgacaacggggatctcgatcttggcccagtcgagaccgagcctccatacgccagtcctaggtaccttcggaacttcaccttaaccgtgacagacttctatcggtcgtggaactgcgctcctgggccttttcacctgtttccccacactccttttgatcctgtccttccgagcgaggccaagttcctgggctccgggacaggtttcaggcccatagggggcggagctggtggcagcgggaaagaatttcaggccgccctcggcggcaatgtgccacgcgagcagttcaccgtggtcatgctgacatatgaacgtgaggaagttctgatgaacagccttgagcgacttaacgggctgccctatttgaacaaagtggtggtggtgtggaacagtcccaagcttccctcagaggatctactttggccggacatcggtgttcctatcatggtggtccgaacggaaaaaaactccctcaacaatcggtttttaccgtggaacgagatcgaaacggaggccatcctgagcattgatgatgacgctcacctgcggcatgatgagattatgttcggctttcgggtgtggcgcgaggcgcgtgatcgcattgtaggatttcccggcagataccacgcatgggacatccctcaccaatcctggctctataactctaactactcgtgcgagctttccatggtactgacaggagctgccttttttcacaagtattatgcgtacttgtatagttatgtcatgccgcaggctattagagacatggtggatgagtacataaactgtgaagatattgcaatgaatttcctggtgtcccacatcactcgtaaaccacccattaaggtgacatcaaggtggacctttagatgtcctgggtgtcctcaagcgctcagccacgacgatagtcacttccatgagcgacataagtgcatcaactttttcgtgaaggtttatgggtacatgccactgttatatacgcagttccgggtcgacagtgtgctgtttaagacccgtttacctcacgacaagacaaagtgcttcaagtttatatag

SEQ ID NO: 187244 - DNA, 3216 bp, synthetic construct
  misc_feature 1..3216: note = Description of Artificial Sequence: Synthetic coding sequence
  source 1..3216: mol_type = other DNA
atgcccgccatcatgaccatgctggccgaccacgccgcccggcagttactcgacttttcgcaaaaactggacatcaacctgctggacaatgtggtgaattgcttgtatcatggagagggagcccagcagaggatggcccaggaggtactaactcaccttaaggaacatcccgacgcgtggacacgggtggacactattcttgagttttcccaaaacatgaacactaaatactacggtctgcagatacttgagaatgtgatcaagactcgatggaaaattctgcccagaaaccagtgcgaaggtattaagaaatacgttgtgggactgattattaagacgagctccgaccctacctgcgtggagaaggaaaaagtctacattgggaagctgaacatgatcctcgttcaaattctcaagcaggaatggccaaagcactggccaacattcatcagtgacattgttggcgcttcacggacgtctgaatccctgtgtcaaaataatatggtgatcctcaagttgttatcggaggaggtgttcgattttagctccggtcagatcacgcaggtgaaaagtaagcacctcaaggactctatgtgtaacgagttctcccagatttttcagctctgtcagttcgtcatggagaacagccaaaacgcacctctagtgcatgcaactttagagacactcctaagatttcttaactggatcccattgggatatattttcgagacaaagcttatcagtacactgatctacaagttcttgaacgtccccatgttccgaaacgtgagcttgaaatgcctgaccgagatagctggagtgtcagtgtcacagtatgaagaacagttcgtgacattattcaccctgactatgatgcagcttaagcaaatgctcccacttaatacaaatatcaggctggcttacagcaacggcaaagatgatgagcaaaattttattcagaacctgagcttgtttttgtgcaccttcttaaaggagcacgatcagctaatcgagaagcggctgaacttgcgcgagacattgatggaggctcttcactacatgctcctggtcagcgaggtcgaggagactgagatctttaagatctgtctggagtattggaaccacctggccgctgagctgtatagagagtcaccatttagtaccagcgcctctcccttactatcaggcagtcagcactttgatgtgcctccccggagacagctgtaccttccgatgttgtttaaagtgcggcttctgatggtgtccaggatggcgaagcccgaggaagtacttgtggttgaaaatgaccagggagaagttgtgcgcgagtttatgaaagatacggacagtataaacctgtataaaaacatgcgggagaccttggtctatttgactcacctggactacgtagacacagaaagaataatgacagaaaaactccataaccaagtcaatggcacagaatggtcctggaaaaatctgaatacgctttgttgggccatcggcagcatttctggcgcaatgcacgaggaagatgaaaaacgcttccttgtcactgtaattaaagacctgctgggcttatgcgagcagaagagaggaaaggataacaaagcaatcatcgcgagcaatataatgtatatagtcggccaataccctcgcttccttcgcgctcattggaagttcttgaagactgtcgtgaacaaactctttgaattcatgcatgaaacacacgacggagtgcaggatatggcctgcgacaccttcatcaagatcgctcagaaatgtcggcgacatttcgtgcaggtgcaggtgggcgaggtcatgcccttcattgacgagattctgaataacatcaatactattatttgcgacctgcaaccccagcaggtccataccttctacgaagcagtgggatacatgattggcgcccagacagatcagacggtgcaggagcatctcatcgagaagtatatgctgctgcccaaccaggtgtgggactcaatcatccagcaagctacaaaaaacgtagacatcctgaaggatccggagactgtcaaacaacttggctcaatcctgaaaactaacgttcgggcatgcaaggcagtcggacaccctttcgtaatacaactcggcagaatctacctggacatgctgaacgtgtacaaatgcttgtccgagaacatttccgcggctattcaggccaatggcgagatggttaccaagcagcctctaatcaggtctatgcgcacagtcaaacgggagacactgaagcttatcagcgggtgggtttctcgctcaaacgatccgcagatggtggccgagaacttcgtcccccccctcttggatgcagtcctcatcgactaccagcgaaatgtgccagccgcacgtgagcctgaggtcctcagcacaatggctatcattgtgaataagctcggcgggcacatcacggctgaaattccccaaatatttgacgctgtgttcgagtgcactctcaacatgatcaacaaggatttcgaggagtatcctgaacataggacaaacttcttcctcctgttgcaggctgttaactctcattgttttccagcctttcttgctattccaccaacccaatttaagctggtcctggattctatcatctgggccttcaagcacactatgaggaatgtcgcagataccgggttgcagatcctttttaccctgctgcaaaacgttgctcaggaggaagccgccgctcagagcttttaccaaacgtacttttgtgacattttgcagcacatcttctctgtggtgacagacacatctcacacggcaggcctgacgatgcacgcctccatcttagcctatatgttcaaccttgtggaggaaggaaagattagcacatctctgaacccagggaatcctgttaataatcagattttcctgcaggagtatgtcgcaaacctactcaagtctgcttttccacatcttcaggacgcccaagtgaaactctttgttaccgggttgttttccctgaatcaggatattcctgcatttaaagaacatttgcgcgatttcctggtacagatcaaggaatttgccggcgaggatacctccgatctattcctggaggaaagagaaattgccctgcggcaggcggacgaggaaaaacacaaaaggcagatgtccgtcccgggtatcttcaatccacacgagatcccggaggagatgtgcgactag

SEQ ID NO: 187245 - DNA, 3216 bp, synthetic construct
  misc_feature 1..3216: note = Description of Artificial Sequence: Synthetic coding sequence
  source 1..3216: mol_type = other DNA
atgcccgccatcatgaccatgctggccgaccacgccgcccggcagctgctggatttcagccagaaactggacatcaatctgttagataacgtcgtcaattgcctgtatcacggagaaggtgcgcagcagaggatggctcaggaagtcttgacccatctcaaagaacaccctgatgcttggacacgggtcgacaccatcctggagttttcccagaatatgaataccaagtattatggattgcagatcttggaaaatgtcatcaagaccagatggaagattctgccccgcaatcagtgcgaaggtatcaagaagtacgttgtgggactgattattaagacgtcctcggaccctacctgcgtggaaaaagagaaggtctatattggaaagttgaacatgattctcgtccagatcctgaagcaggaatggccgaagcattggcccacttttatctccgacattgttggagctagtcggacgagcgaatcgctctgtcagaacaatatggttattttaaagctcttgtctgaagaagtttttgatttttccagcggccaaataacacaggtgaagagcaagcacctgaaggattctatgtgcaacgaattcagccagatcttccagctgtgtcaattcgtgatggaaaactcccagaacgcaccactagttcacgccacacttgagaccctgctccggtttctgaactggattccattggggtacatatttgaaaccaagcttatctctactcttatctacaagttcctgaatgtgccaatgtttagaaacgttagtctaaaatgtctgacagaaattgctggtgtgagcgtgtctcaatacgaagaacagttcgtgacactttttactctgacgatgatgcagcttaagcagatgttgcccctaaacacaaatattaggctggcttattccaacgggaaggacgatgaacagaattttatccaaaacctctctctgttcctctgcacttttctcaaagaacatgatcaactgatcgagaagagattaaatctgcgagaaaccctgatggaggcgttgcactacatgctgctggttagcgaggtcgaagagactgagattttcaagatctgtttggagtactggaaccacctggccgccgaactctatagagagtcccccttctccacgtctgctagccctctgttgagcgggagtcagcacttcgacgtcccgccccggaggcagttgtatctaccaatgcttttcaaggtgaggctactcatggtgagccggatggccaaaccagaggaagtgttggtagttgagaatgatcagggggaggtcgtgagggaatttatgaaggataccgattcaatcaacctgtacaagaacatgcgagagactctggtctatttaacacatttagattacgttgatacggaacgaatcatgacagaaaagcttcacaaccaggttaacggaaccgagtggtcatggaagaatctcaacactctttgctgggccatcggaagcatttctggggccatgcatgaagaggacgaaaaacggtttctggtcaccgttataaaggacctgctgggtctgtgcgagcagaaaagggggaaagataataaagctatcattgctagcaacatcatgtatatagtgggacagtaccccagatttcttcgcgcacactggaagttcctcaagacagtggtgaacaagctgtttgaattcatgcacgagacacatgatggagttcaggacatggcgtgcgacacctttataaagatagcgcagaagtgtaggaggcattttgtgcaagtgcaggtgggggaggtgatgccgttcattgacgagatcctcaataatataaatacgatcatctgtgacttgcagcctcagcaggtgcacaccttttatgaggcagtcggttacatgatcggcgctcaaactgaccagaccgttcaggagcacttaatagagaagtacatgctgctccctaaccaggtatgggattctataattcagcaggctactaaaaacgtggacatcctgaaagaccccgagaccgtcaaacagctgggaagtatcttgaagactaacgttcgcgcttgcaaagcagttggccatccctttgttatccagctgggcagaatttacttggatatgctgaacgtgtataagtgcctgagcgagaatatatccgccgccatccaggccaatggcgaaatggtgaccaaacagccactgatcagaagtatgcggacggtgaaaagagagaccctgaaactgatctccggttgggtgtctaggtcaaacgacccccagatggtggcagaaaatttcgtgccgcctctgttggacgccgttctgatcgattaccagcgaaatgtaccggccgcccgagagcctgaagtgctgagcacaatggccattatagttaataagctggggggacacatcaccgccgagatccctcagatctttgatgcagtcttcgagtgtacactgaacatgatcaataaagactttgaagaatacccagaacataggaccaatttttttctgctacttcaggccgttaactctcattgttttcctgcatttctggcaattccacccacgcagttcaagctggtcctagactccataatctgggcattcaagcatacgatgaggaacgttgctgatactgggttacagatcctatttacactgctacaaaacgtggcacaagaagaagccgcggcccagtctttttaccagacgtatttctgcgacatcctccagcatatcttctctgttgtgacagatacaagtcatacagccggccttaccatgcacgctagtatcctcgcgtacatgtttaatctggtggaagaagggaaaattagcacaagccttaatccagggaatcccgtcaacaatcagatttttctacaagagtatgtcgccaacttgttgaaatctgctttcccacatctccaggacgcccaggttaagttgttcgtaaccggtctgttttctctgaatcaggacatccccgcatttaaagagcatctgagagacttcctcgtccaaattaaagaattcgctggagaagatacctctgatctgtttctggaagagcgtgagatcgcactgcgccaggccgatgaggagaaacataagcgtcaaatgagcgtgccaggcatctttaaccctcacgagatccctgaagaaatgtgtgactag

SEQ ID NO: 187246 - DNA, 3216 bp, synthetic construct
  misc_feature 1..3216: note = Description of Artificial Sequence: Synthetic coding sequence
  source 1..3216: mol_type = other DNA
atgcccgccatcatgaccatgctggccgaccacgccgcccggcagctactcgactttagccagaaactggatatcaacctgctggacaacgtggttaattgtctctaccacggtgagggtgcacagcagcgcatggcccaagaggttctcacccaccttaaggagcacccggacgcctggaccagagtggacaccatactcgagttctcacaaaatatgaacactaagtactacggattgcaaattttggaaaacgtgattaagactcgctggaaaatactccccagaaaccaatgcgaggggattaaaaaatacgtggttggattaataataaaaactagctcagatccaacctgcgtggagaaggagaaagtgtatatcggcaaactgaatatgatccttgttcaaattctgaagcaagagtggcccaaacactggccaacctttatttctgatatagtgggcgcatctaggacctccgagtcactgtgccagaacaacatggtgatacttaaactgctgtcagaggaagtgttcgacttctcttccggacaaattactcaggtgaagtcgaagcacttaaaggattcaatgtgcaacgaattttctcagatctttcagctgtgtcaattcgtaatggagaattcccagaatgctccactagttcacgcaaccttggagactctgctaaggttcttgaactggattcctctgggctatatttttgaaaccaagctcatttctacactaatttacaagttccttaatgtccctatgttccgaaatgtcagtcttaaatgcctcactgagatcgccggcgtgagtgtatcccaatatgaagagcagttcgtcacactctttactcttaccatgatgcagttaaagcagatgcttccattgaacactaatatccgactggcatactccaatgggaaagatgacgaacaaaacttcatacaaaatctgtcccttttcctctgtacattcctgaaggagcatgatcagcttattgaaaagcgcctcaatctccgtgaaacactaatggaggctctgcactatatgctgctggtcagcgaggtcgaggagactgagatcttcaagatttgtctcgagtattggaatcacttagcagctgagctgtatagagaatctcctttctccacgtcagcttcccctctcctgagcgggagccagcactttgatgtcccaccacgcagacagctgtatttaccaatgctgtttaaggtgaggttgctgatggtgtctcgaatggctaagccggaggaagtactggttgtggagaacgaccagggcgaggttgtgcgggagtttatgaaggataccgacagcattaacttatataaaaatatgcgggaaaccctcgtgtacttgacacacttggactacgtggataccgagagaatcatgactgagaaactgcataaccaggtgaatgggactgagtggagttggaaaaatctcaatacattgtgctgggcgatcggatctatctctggcgcaatgcacgaggaggatgaaaaacgttttctggtgacggttattaaggacctgcttggactgtgcgagcagaaacgcggcaaagataataaagccattattgcgagcaatattatgtatattgtggggcagtatcctcgatttcttagggctcactggaaatttttaaaaaccgttgttaataagctgtttgagtttatgcacgagactcacgatggcgttcaggacatggcgtgcgacacgtttatcaagatagcacagaaatgcaggcggcattttgtgcaggtacaagtgggagaggtgatgccatttattgatgagatactaaacaatataaatacaatcatctgcgatctccagccgcagcaggttcacaccttttacgaggcagtgggctatatgattggcgcccagaccgaccaaacggtgcaggagcacttgatcgagaagtatatgctgttgcctaatcaggtgtgggattctattatacagcaggccactaaaaacgttgatatcctgaaggaccccgagacagttaagcagctgggcagtatactgaaaacaaatgtgcgagcctgtaaggccgtaggccacccattcgtaatccagctgggcagaatctacctggatatgttgaacgtgtacaagtgcctgtccgagaatatcagcgctgccattcaggcaaacggggaaatggtgactaaacagccgttgattaggagcatgcgcaccgttaagcgggaaaccctaaaactgatctccgggtgggtgtcccgctccaatgacccccagatggtggcagaaaacttcgtccccccccttctagacgctgtgctgattgattatcagagaaacgtccccgccgcccgggagcctgaagtgctctccaccatggcaataatagttaacaagctaggaggacatatcaccgcagagatcccacaaatcttcgatgcagtgttcgaatgcaccttgaatatgataaacaaagattttgaagaatatcctgaacatcggacaaactttttcctcctgctccaagcagtgaactctcactgcttcccagccttccttgcaatccctcctacccagtttaagttagtgctagactctatcatatgggcttttaaacatacaatgcgcaacgtagccgatacaggactgcagatcctgttcacactactgcagaacgttgcccaagaagaggctgcagcccagtccttttatcagacatatttctgtgatattctgcaacacattttttccgtggtgactgacacctcacacaccgcgggcttaactatgcatgccagcattctcgcctacatgtttaaccttgtagaggagggcaaaatttcgacatccctcaatcctggtaatcccgttaataaccaaattttcctccaggagtacgtcgctaatctgctgaagtcggcctttccacaccttcaggacgcccaggtgaaacttttcgtgaccgggctgttctcactgaatcaggacatccccgccttcaaagagcacttgagggattttttagtgcagattaaagaatttgcaggcgaggacacttctgatttgttcttagaagagcgcgagatcgcactgcgccaggctgacgaggagaagcacaagcgacagatgagcgttcccggtatctttaacccacacgagatcccggaagaaatgtgcgactag

SEQ ID NO: 187247 - DNA, 303 bp, synthetic construct
  misc_feature 1..303: note = Description of Artificial Sequence: Synthetic coding sequence
  source 1..303: mol_type = other DNA
atgcccgccatcatgaccatgctggccgaccacgccgcccggcagctgctggacttttcacaaaagcttgatattaacctgctggacaacgtggttaattgtctgtaccacggagaaggtgcacagcagcggatggcacaggaagtgctcacccacctgaaagagcacccagatgcatggacaagagtggatactatcctggaattttctcaaaatatgaacactaagtactacggcctgcagatcctagagaatgtcattaagacgcggtggaagatcctgccaaggaatcaatgcgaatag

SEQ ID NO: 187248 - DNA, 288 bp, synthetic construct
  misc_feature 1..288: note = Description of Artificial Sequence: Synthetic coding sequence
  source 1..288: mol_type = other DNA
atgcccgccatcatgaccatgctggccgaccacgccgcccggcagctcctggacttttcccagaaactggacataaacctcttagacaacgtggttaattgtttataccacggggaaggagcccagcagcgtatggcacaagaggtgctaacccacctgaaggagcatcctgacgcttggacgcgcgtggatacgatcctggaattcagtcagaacatgaacactaagtattatgggcttcagattctcgagaatgtgatcaagactaggtggaagatcttaccctag

SEQ ID NO: 187249 - DNA, 180 bp, synthetic construct
  misc_feature 1..180: note = Description of Artificial Sequence: Synthetic coding sequence
  source 1..180: mol_type = other DNA
atgcccgccatcatgaccatgctggccgaccacgccgcccggcagctgctggatttcagtcaaaaactggatatcaatcttcttgacaacgtggtcaattgtctttaccacggagagggagctcagcagcgcatggcccaggaggtcctcacgcatctgaaggagcaccctgacgcctag

SEQ ID NO: 187250 - DNA, 399 bp, synthetic construct
  misc_feature 1..399: note = Description of Artificial Sequence: Synthetic coding sequence
  source 1..399: mol_type = other DNA
atgcccgccatcatgaccatgctggccgaccacgccgcccggcagcttcttgacttcagccaaaagcttgatattaatctgcttgacaatgtcgtaaattgcctgtatcatggggaaggggcgcagcagcggatggcgcaggaagtgctcacccaccttaaagagcatcctgacgcatggacccgcgtagataccattttggaattcagccaaaacatgaacacaaagtactatggtctgcagattttagaaaacgtgatcaagactcgctggaagattcttcctcgcaatcagtgcgaaggaatcaagaagtatgttgtgggccttatcatcaaaacctccagcgacccaacctgcgtcgagaaggagaaagtctacattgggaagctgaacatgtag

SEQ ID NO: 187251 - DNA, 189 bp, synthetic construct
  misc_feature 1..189: note = Description of Artificial Sequence: Synthetic coding sequence
  source 1..189: mol_type = other DNA
atgcccgccatcatgaccatgctggccgaccacgccgcccggcagcttctcgacttctcccagaaactagatatcaatctactggacaacgtcgttaattgtctgtaccatggtgaaggtgcacagcaaagaatggcgcaggaagtcctgacccacttgaaagagcatccagatgcctggactcgctag

SEQ ID NO: 187252 - DNA, 540 bp, synthetic construct
  misc_feature 1..540: note = Description of Artificial Sequence: Synthetic coding sequence
  source 1..540: mol_type = other DNA
atgcccgccatcatgaccatgctggccgaccacgccgcccggcagcttctggatttttctcagaagctggatatcaatttgctcgataatgtggtcaactgtctgtatcatggggaaggcgcccagcagcggatggctcaggaagtgttgacgcacctgaaggaacaccctgatgcgtggaccagggtggacaccatcctggagttcagccaaaacatgaatactaagtactacggcctgcagattctggaaaatgtgataaagacgaggtggaaaatactacccaggaaccagtgcgaggggataaaaaagtacgtcgtgggtcttatcatcaagacatcgtcggatccaacctgtgtggaaaaggagaaggtatacataggcaaactgaacatgatcctcgtgcagatcttaaagcaagaatggccaaaacactggcccacgttcatctcagacatcgtgggcgccagtcggacaagtgagtcgctctgccagaataacatggtcatattaaaactgctttcggaggaagtgttttag

SEQ ID NO: 187253 - DNA, 285 bp, synthetic construct
  misc_feature 1..285: note = Description of Artificial Sequence: Synthetic coding sequence
  source 1..285: mol_type = other DNA
atgcccgccatcatgaccatgctggccgaccacgccgcccggcagcttctcgacttttctcagaaattggacattaatttactcgataatgtggtaaactgtctgtaccacggagagggcgcacagcagcgcatggcccaggaggtcctgacacatctcaaagaacaccctgatgcttggacgagagtcgatactatcctcgaatttagtcaaaacatgaacaccaagtactacggactccagatcctcgagaacgtgattaaaacgaggtggaagatcctgtag

SEQ ID NO: 187254 - DNA, 3615 bp, synthetic construct
  misc_feature 1..3615: note = Description of Artificial Sequence: Synthetic coding sequence
  source 1..3615: mol_type = other DNA
atggccatggaccaggtgaacgccctgtgcgagcagctggtgaaggccgtgactgtcatgatggacccgaattctactcagagataccgcttggaggctttgaaattctgcgaagaattcaaggaaaagtgcccaatctgtgtgccttgtggcttaagattagcggagaagactcaggttgccatcgtcagacacttcgggctgcaaatactcgaacacgtcgtgaaatttagatggaatggaatgtcccgtctggagaaagtgtatctcaagaacagcgtgatggaactcattgccaacggtacgctgaatatactggaagaagagaaccacataaaggatgcactgtcgaggattgtcgtcgaaatgattaagagagaatggccacaacactggcccgatatgctcatcgaactcgacacgttgagcaagcagggagaaacccagactgaactcgtcatgttcattctgctccgtctggcagaggatgtcgtgacattccaaacgctcccaccacagcggcgtcgggacattcaacaaacactgacacagaacatggaaaggatctttagtttcctcttaaacactctgcaggaaaacgtgaacaaatatcaacaagtgaaaaccgacacttcccaagaatctaaagcacaagccaactgtagggtgggagttgctgccctcaatactctggctggatacatcgattgggtgtcaatgtcccatattacagcagagaattgtaaactgctcgagatactctgcctgctgttgaatgagcaggaactacagcttggggcggctgagtgcctactaattgccgtcagccgcaagggaaaacttgaagatcggaagccacttatggtgttattcggggacgtagcgatgcattatattcttagtgcagcacaaacggctgatgggggtgggctggtcgagaagcactacgtcttcctgaaacgcctgtgccaggtgctctgcgctctggggaatcaactatgtgcactcctgggtgcggactccgatgtggaaacaccttccaatttcggaaaatacctggaatcatttctagccttcacaactcatccgagccagttcctgaggtcttctacccagatgacttggggtgctctctttcgacacgaaatcctttcaagagacccgcttctgctggcgataataccaaaatatctccgcgcctctatgacgaacctggtgaaaatggggttccctagcaagaccgattccccgtcctgcgaatattccagatttgattttgactcagatgaggactttaatgcatttttcaattcgtcgcgggcccaacagggcgaggtgatgagattagcctgccgattagaccctaagacctcattccagatggccggcgagtggctgaagtaccaactttccacctttctggacgctgggagtgtgaactcatgcagtgctgtgggcaccggcgagggcagcctttgctcagtcttttcccccagctttgtccagtgggaagctatgacactcttcctcgaatctgtcatcacgcagatgttccgaaccttgaatcgggaggagattcctgtcaatgacgggatcgaactattgcagatggtgctgaattttgatacaaaggaccccctgatattatcctgcgtgctgactaacgtgtccgctctgtttccatttgttacataccggcccgagtttttgccccaagtgttcagcaagctctttagcagcgtgacttttgagactgtcgaggaatctaaggcacctagaaccagagctgttaggaacgtccgccgccacgcctgctcctcaatcatcaagatgtgtcgggactaccctcaactggtgttaccaaattttgacatgctatacaatcacgtgaaacagctactgtctaatgagctgttactgacgcagatggagaaatgcgcactcatggaggctctggtgctcatcagcaaccaatttaaaaattacgagcggcaaaaggtattccttgaggaactgatggctccagtggcgagcatttggctgagccaggatatgcacagggtgcttagcgacgtggatgccttcatcgcatacgtggggactgatcagaaatcctgtgaccctggcctcgaagacccttgtgggctgaatcgagctcgtatgtccttttgcgtctattcaattctcggagtagtgaagcgcacctgctggcccactgatctggaggaggccaaggcaggtggatttgttgtgggatacacatcaagcggtaaccccattttcaggaacccctgtaccgagcagatactgaaactgctggacaacctactagccctgatcagaacacacaatactctgtatgccccggagatgctggctaaaatggccgagccctttaccaaggcgctggatatgttagatgccgaaaaatcggccatcctcggcctgcctcaaccactcctcgagctgaatgactcccccgtgtttaaaacagtgctggagagaatgcagcggttcttttctactctctacgagaattgctttcacattctcgggaaggctggtccgagcatgcagcaggatttttacacagtggaggacttagccacgcagctgctctcaagtgcattcgtaaacctgaacaatattccagattatcgcctgcggcctatgttaagggtgttcgtgaagccactggtcctgttttgccctcccgaacattacgaggcactcgtgagcccaatcttaggccccttattcacgtatttacatatgcgcctgagccagaaatggcaggtgattaaccaacgctcattgctctgtggcgaggatgaggcagcggacgagaaccccgaatcacaggagatgctggaagaacaactggtgcgcatgctaacaagagaggtgatggatctcattaccgtgtgttgcgtctctaaaaagggggccgaccacagtagtgcaccacccgcggacggcgatgatgaggaaatgatggctaccgaagtgacaccaagcgccatggcagagttaactgatcttgggaaatgtctcatgaagcatgaggatgtgtgcacagctcttttaataaccgcttttaacagtctggcatggaaggacacgctgtcttgtcagcgcaccacatctcagctgtgctggccccttctcaagcaggtgctcagcggtacgttgctggccgatgcggtgacctggctgtttacctctgtgctcaagggtttacagatgcacggccagcacgatggttgcatggcaagcctggtgcaccttgcctttcagatctatgaagccctgaggccacggtacttggagatccgggccgtgatggagcaaatccccgaaatccaaaaggatagcttggatcagtttgactgcaaacttttaaatccctccctgcagaaagtcgcggacaagcgccggaaggaccagtttaagcggttgattgccgggtgtataggaaaaccactgggtgagcaattccgcaaagaggtgcacatcaagaacttaccttctctgtttaaaaaaaccaaacctatgcttgaaaccgaggtgctagataatgacgggggaggtcttgcaaccatatttgaaccttag

SEQ ID NO: 187255 - DNA, 513 bp, synthetic construct
  misc_feature 1..513: note = Description of Artificial Sequence: Synthetic coding sequence
  source 1..513: mol_type = other DNA
atggccggcgagtggctgaagtaccagctgagcaccttcctggacgctggctccgtaaacagttgcagcgccgtaggcaccggtgagggcagcctgtgctctgttttttcccctagcttcgtccagtgggaggcaatgactctgttcctggagtctgttataacacagatgtttcgcaccctaaatcgggaagagatcccagtgaatgacggcatcgagctgctccaaatggttctgaatttcgatactaaagatcctctgattcttagctgcgtactcaccaacgttagcgctcttttcccgttcgtgacatacaggcccgagttcttgcctcaagtcttttccaagctgttctcttcggtcacctttgagaccgtagaggagagcaagcctccccatttccccccgctgtctgcctggaaggagatccaggtctggagctggagggaacaagccctgtgtagaacccgtagtaactacacaaaggtctcacgcaagggagtcagggcgtag

SEQ ID NO: 187256 - DNA, 2166 bp, synthetic construct
  misc_feature 1..2166: note = Description of Artificial Sequence: Synthetic coding sequence
  source 1..2166: mol_type = other DNA
atggccggcgagtggctgaagtaccagctgagcaccttcctggacgccggatccgtaaacagttgctctgcagtcggcactggagagggctccctgtgtagcgtattttctccatccttcgtacagtgggaggctatgaccctgtttctggagtccgtcattacacaaatgttcagaacattgaatcgagaagaaatccccgtcaatgacgggattgagctactccagatggtgttaaacttcgataccaaagatccgttgatcctctcctgtgtccttacaaacgtcagtgccctttttccttttgttacgtaccgacctgaattcttacctcaggtgttctccaaactgttttcatcagtgacattcgaaacagtcgaggagtccaaggctccaagaacacgcgccgtaagaaatgtgagaagacatgcatgctcttccatcataaagatgtgccgagactatccacagctggttcttccgaactttgacatgctgtacaatcatgtcaagcagctgctctcaaacgagctgctcctaactcaaatggagaaatgtgcactcatggaggccctggtgttaatcagtaatcagtttaagaactatgaacggcagaaagtgtttctggaggaattgatggcccccgtcgcgagtatctggctgtcacaggatatgcacagggttctgtctgacgtggacgccttcattgcctatgtcgggactgaccagaaatcttgcgaccctggcctcgaggacccatgcggactaaaccgggctagaatgagcttctgcgtgtactccatcctcggggtcgttaaacggacatgttggcccacagacctggaggaagctaaggccggaggattcgttgtcggctacaccagctctggcaatcccatcttccgtaacccctgtacggaacaaatcttgaaactcctcgataacttgcttgccctcattcgtactcacaataccctgtatgccccggagatgttggcgaagatggctgaaccatttacgaaggccttggacatgctcgatgctgagaaaagtgccatactcggccttccccagcctcttctggaacttaatgatagcccagtctttaagaccgtgttagaaaggatgcagagattcttcagcacattatacgagaactgttttcatatcctaggaaaagccggcccatcgatgcagcaagatttttacaccgtggaagacctcgctacccagctgttgtcttctgcattcgtcaatttgaacaacatcccggattacaggctgcgtccaatgttgcacatcctgagcaagccactggtgttattttgtccgccagaacattacgaggcactggtcagccctatcctcggacccttattcacttatttacatatgcgcctctcacaaaagtggcaggtcataaaccagcgatctttactgtgcggggaggatgaggcagcagatgaaaatcccgagtcccaagaaatgcttgaagagcagttggtgcgtatgctcaccagggaggtgatggacctgatcactgtgtgctgcgtctctaaaaagggggcagatcatagctcggcaccccccgcagacggcgacgacgaagaaatgatggctacagaagttaccccctctgcgatggcagagctcaccgatctggggaagtgtcttatgaaacacgaagacgtttgcaccgctttattaatcactgcctttaactctctggcctggaaagacacactgtcatgccagagaaccacctctcagttgtgttggcccctccttaagcaggtgctcagcggcacactcctcgctgatgctgtgacctggctcttcaccagtgtgctgaaaggcctgcagatgcacggacagcatgacgggtgcatggcaagcctggtgcatctcgcttttcagatctatgaggctctcaggcccagatacctcgagattagggccgtgatggagcagattccggagatacagaaagatagcctggatcaattcgattgcaagctcctgaacccttctctgcagaaggttgccgacaaacgtagaaaagaccaatttaaacgattgattgccggttgcatcggaaagcctcttggcgaacagttccgcaaagaggtgcacattaagaatctgccttttgtggccgatctttag

SEQ ID NO: 187257 - DNA, 2211 bp, synthetic construct
  misc_feature 1..2211: note = Description of Artificial Sequence: Synthetic coding sequence
  source 1..2211: mol_type = other DNA
atgcactacatcctgagcgccgcccagaccgccgacggcggcggcctggtcgagaaacactacgtgtttctgaaacgcctatgccaggtgctgtgcgccttgggtaatcagttgtgcgccctgttgggagccgactccgacgttgagaccccaagtaattttgggaaatacctggagtcatttttggcttttaccacccacccttctcagtttcttcgttcgtctactcagatgacttggggtgccctctttcggcatgaaatcctgagccgcgatccactgttactggccattatacccaagtacttacgcgcaagtatgacaaatctggtgaaaatgggatttccatcaaaaaccgactcaccctcttgtgagtacagtaggtttgactttgactcagatgaggattttaacgcattcttcaattcctcccgagcccagcagggtgaagttatgcggctcgcttgcagattagatcccaaaactagcttccagatggctggcgagtggcttaagtaccagctttccacgtttctggatgccggatcggtcaattcatgtagtgccgttgggaccggagaaggatcattgtgctcggtgttctctccatcattcgtgcaatgggaggcaatgactctgttcttagaaagtgtcataacccaaatgttccgaactttgaaccgtgaggagatcccggtgaatgacgggatcgaattgctccagatggtgctcaactttgatacaaaagaccctttgattctgagctgtgtgctaacaaatgtgagcgccctctttccctttgtcacttaccgccccgaattcctgccccaggtgttttccaagctgttcagtagcgtgacatttgagaccgtggaggagagcaaggctcccaggactcgggccgtgcgtaatgtgagaagacacgcttgctcctccattattaagatgtgccgggactatccgcagctggtgctgcctaactttgacatgttgtataatcatgtgaagcaacttttatctaatgagcttctcttgactcaaatggaaaaatgtgcactgatggaggctctggtactcatttctaatcagttcaaaaattacgagagacagaaggtctttttggaagaactcatggctccagtagcctcaatttggctgagtcaagacatgcaccgagtcctgtcggatgtcgatgccttcattgcatacgtggggaccgaccaaaagagctgcgacccggggcttgaggacccttgtggcctaaatcgggcgcggatgagtttttgtgtgtactctatcctgggagtggttaaacgcacgtgctggccaacagacctggaggaggcgaaggctggcgggttcgttgtcggatatacctcctccggaaacccaattttccggaacccatgcaccgaacagatcctcaaattgcttgacaacttgctggctctgatacgcacacacaacaccctgtatgcacctgaaatgctggctaagatggccgaaccttttactaaggccctggatatgcttgacgctgagaagtccgctatactaggtttgccgcagccattgctggagctcaatgacagtcctgtattcaagactgtgcttgagaggatgcaaaggttcttctccaccctgtacgaaaactgctttcacatacttggtaaagctggcccctctatgcagcaggatttttacacagtcgaagacctggcaacacagttactgtcatccgctttcgttaatctaaacaacatccctgattatcgcttacggcccatgttacatatcctcagcaaaccactggtgctgttttgtcctccagagcactacgaagccctggtaagccctatccttggtcctctgtttacatacttgcatatgaggctctcacaaaaatggcaagtcatcaaccagcggtcactgctgtgcggggaggacgaagccgccgacgaaaatcccgaaagtcaggaaatgctggaggagcagctcgtccgtatgttgacgagggaggtcatggatctgataacggtctgttgcgtgtctaagaagggcgccgaccacagttcggcaccaccagctgatggcgatgatgaggagatgatggctactgaggtaacccctagtgcaatggccgaactgaccgacctggtctccattcagtcaaccgataagcgtgtttccccccgtgcagaagttgattag

SEQ ID NO: 187258 - DNA, 2499 bp, synthetic construct
  misc_feature 1..2499: note = Description of Artificial Sequence: Synthetic coding sequence
  source 1..2499: mol_type = other DNA
atgacctggggcgccctgttccggcacgagatcctgagccgggacccactgttgttggccattataccaaagtacctcagagcatccatgactaacttggttaaaatgggatttccctccaagactgattcccctagttgcgaatactccaggttcgatttcgactcggatgaagacttcaatgctttttttaacagctcacgcgctcagcagggcgaagtgatgcgactggcctgccggctcgatcctaagacctcattccagatggccggggagtggctgaagtaccaactgagcaccttccttgatgccggcagcgtaaatagctgctccgcagtggggaccggagagggctccctgtgctccgttttctctccttcgttcgtacagtgggaggcaatgacactgtttcttgagtccgtgatcacgcaaatgttccggacgttaaatcgtgaagaaatcccagtcaatgatgggatcgagctgctccagatggtacttaattttgacacaaaggacccattgatactcagctgtgtgctgactaacgtttccgcacttttcccatttgtaacttaccggcccgagttcttgcctcaggtattctctaaactatttagttccgtcacatttgagacagttgaggagtctaaagctccacgaacacgggccgtgcggaatgtgcgtaggcacgcttgtagcagcatcataaagatgtgccgtgactatccccagctggttttgcccaatttcgatatgctgtataaccacgtcaaacagttgctgagtaatgaactgctgttgactcagatggagaagtgcgccctcatggaggctcttgtccttataagcaatcagttcaagaattatgagcggcaaaaagtgtttcttgaggaattaatggctcctgtggctagtatatggctttcccaggacatgcatcgagtgctcagtgacgtggatgcctttatcgcttatgtaggcaccgaccagaaaagctgtgatccaggcctggaagacccctgtggcttaaacagggctaggatgtccttctgcgtatacagtatactcggagtggtaaagaggacatgttggcctaccgacctcgaagaggccaaggccggaggattcgtggttgggtacacaagctctgggaatcccatatttcgcaatccctgcaccgagcaaattcttaaactcttggataacctactagcgctcatccggacacacaacacgttgtatgccccggagatgttggccaaaatggccgagccttttactaaggctctggatatgctggacgctgaaaagtcagccatcctcgggctgccccagcccttactcgaactgaacgattctcccgtgtttaagactgtgctcgaaaggatgcaaaggttcttttctactctgtacgagaactgcttccacattctggggaaggccggaccgagcatgcagcaggatttctataccgtcgaggacctcgccacacaactgctcagttcggcttttgtgaacttaaacaacattcccgattacagattgcggcctatgctgagggtttttgtgaagccactcgttctcttctgtcctcccgagcactatgaagcccttgtgtctccgatcctgggacccctctttacgtaccttcatatgcggctgtcccagaagtggcaggtgatcaaccagagatcccttttgtgcggagaagacgaggctgcagacgagaatccagagtctcaggagatgctggaagaacagttggtgcgaatgctaaccagagaggttatggacctcattaccgtgtgctgcgtgtcgaagaagggcgccgaccattccagcgcaccccctgctgatggggatgacgaagaaatgatggccaccgaagtgacaccttcagccatggctgaacttacggacctggggaagtgtcttatgaagcacgaggacgtctgtacagcactgctgatcactgcatttaattccctcgcatggaaagacacactgagttgccagcgtaccacatctcagttatgttggcctttgctcaagcaggttctctcaggtaccctgctggccgacgcagtcacctggctgtttaccagtgtcctgaagggcctccagatgcacggccagcacgatgggtgtatggcctctcttgttcatcttgccttccagatctacgaggctctgaggccacgctatttggagattcgtgcagtgatggagcagattcccgagatccagaaggattctctggaccagtttgactgcaaactcttaaatccttccctccagaaagtggcagataagcgccgcaaggatcagttcaaacgcctgattgcgggttgcatcggcaaacccttgggagagcagttcaggaaggaagtgcacatcaaaaacttgccctctcttttcaagaaaactaagccaatgctggagacggaagtcctagataatgatgggggcggcctcgcaactatctttgaaccttag

SEQ ID NO: 187259 - DNA, 3378 bp, synthetic construct
  misc_feature 1..3378: note = Description of Artificial Sequence: Synthetic coding sequence
  source 1..3378: mol_type = other DNA
atggccagcgaggaggccagcctgcgggccctggagagcctgatgaccgagtttttccacgattgtacaacaaacgaacggaaacgcgagatagaggagttattgaataatttcgctcagcagatcggcgcctggaggttttgcctgtatttcctgagctcaacgcgtaatgactacgtaatgatgtattctttgactgtgttcgagaacctcatcaataagatgtggctcggggttccctctcaggataagatggaaattagatcctgcctacccaagctcttgcttgcgcaccacaaaactctgccttactttataagaaataaactatgcaaggttatagtggacatcgggaggcaagattggcctatgttttaccacgatttcttcaccaatattttgcagcttattcagtcacccgtaaccacacctctcggactgatcatgcttaagaccacctccgaagaattggcttgtccgcgggaagacctgtctgtcgcgcggaaggaggagctacgtaaactgctgcttgaccaggttcaaacagtcctggggctgctcactggcattctagagactgtctgggataagcatagcgtgacggctgctaccccacctccatctccaaccagcggggagtccggcgatctcttgagcaacctcttacagtccccctcttcagccaagctgttgaaccagccgattccaatactggatgtggaaagtgagtatatttgctccctggccctggagtgtctggcacacctgttcagctggattccactgagcgcgtctattactccctctcttctaacaaccatctttcacttcgcccggttcggctgtgacatcagggctcgcaagatggcttctgtgaacggcagctcacaaaactgcgtgagcggacaagaacggggccggcttggggttctggccatgagttgtatcaatgagttaatgagtaaaaattgcgtgcccatggaattcgaagagtacctccttcggatgttccaacagacattttacctcttgcaaaaaatcactaaggataacaacgctcacaccgttaaatcacgcctggaagaactggatgagtcttacattgaaaaatttaccgactttttacggttgtttgtgtccgttcatctgaggagaatcgaatcgtatagtcaatttcctgtggtcgagtttctcacactgttgttcaaatatacatttcatcagccgacccatgaggggtacttttcatgtctagacatatggacactgtttctggactacctgacttcaaaaattaaatcccgcctgggggataaagaagccgtgttgaacagatacgaagacgccctggtattactcttgaccgaggtgcttaatcgtatacagttccgttacaaccaagcccaactcgaggaattggacgacgagactctggacgacgatcagcagacagagtggcaaaggtacctgaggcagagcctcgaggtggtggccaaagtgatggagctcttgcccactcacgccttctccacccttttccctgtgctccaagacaacctcgaagtgtacctgggcttacagcagttcatcgtcacgagtgggagtggccacagacttaatattaccgctgagaacgactgcagaagactgcattgtagccttagggacctctcatcgctccttcaggccgtgggccgactggcagagtactttatcggcgacgtctttgccgccaggttcaatgacgcgctgacagtagtcgagcgcctagtcaaagtgaccttgtacggcagccaaattaagctgtacaacattgaaaccgctgtgcctagcgtcctgaagcctgacctgattgacgtgcacgcacagtccttagccgctctgcaagcatactcacactggttggcacagtactgctcagaggtacacagacagaatacccagcagtttgtcaccctgattagtactacaatggatgccatcacccccctcattagtactaaggttcaggacaagttgctgctgagcgcctgccaccttctcgtgtcgctggcaactacggtgcggccggtgtttctcatttcaatcccagcggtgcagaaagtatttaaccggataactgacgcctccgcactgcgcctcgtcgataaggcccaggtgctggtgtgccgcgctctgtccaatattctactcctcccatggcctaacctgcctgagaatgagcaacaatggccagttcgctcgattaaccacgcaagtctcatatcagctctgtcgcgggattatagaaatctaaaacccagcgcagttgcccctcagcgaaagatgccgctcgacgacacaaaacttataatccaccagaccctgtcagtgctagaagacatcgttgagaatatctccggggagtctaccaaatctagacagatctgctaccaatcattgcaggagtccgtgcaagtcagtctagctctcttcccagcctttattcaccagagtgacgtaactgacgagatgctcagcttttttctgactctgttccggggcctgcgcgtgcaaatgggcgtgccgttcacagagcagattatccagacctttttgaacatgtttactcgggagcagctggccgaatccattctgcacgagggatctaccggttgtagagtggtggaaaagttcttgaagattctgcaggttgtcgtacaggaaccaggccaggtgttcaagccgtttctgccttccatcatcgccctgtgtatggagcaagtctatcctatcatcgccgagcgaccatccccagatgtgaaagccgaactttttgagctgctctttcgtactttgcaccataattggaggtacttcttcaagagtacggtgttggctagtgtgcaaagagggattgctgaggaacagatggagaacgagccccagtttagcgccattatgcaagctttcggacagtcttttcttcaacctgatatccacttatttaaacaaaacttgttctacctggagaccctgaataccaagcagaagctctatcacaagaagatcttccgaaccgcaatgctatttcagtttgtgaacgtcctcctccaggttctcgtgcacaagagccacgatctactccaggaggaaatcggaattgctatctataatatggcctccgtagacttcgatggtttcttcgctgcctttctgcctgagtttctcacgagctgcgacggtgtggacgctaatcaaaagagcgtgctcggacggaattttaagatggacagagatctcccttcttttactcagaatgtccacagattagtgaacgacctgcgatactaccgcctttgcaacgattccctgccacctggaacagttaaactatag

SEQ ID NO: 187260 - DNA, 3336 bp, synthetic construct
  misc_feature 1..3336: note = Description of Artificial Sequence: Synthetic coding sequence
  source 1..3336: mol_type = other DNA
atgaccgagttcttccacgactgcaccaccaacgagcggaagcgggagatcgaagaactattgaataactttgcccagcagatcggggcttggagattctgcctttatttcctatcttccacacgcaacgactacgtgatgatgtatagtctgacggtgtttgaaaatctgattaataagatgtggctcggcgtgcctagccaagataaaatggagattcgcagttgcttgccaaaactgctcctggctcaccacaagactctgccctatttcatccgcaataagctctgcaaggtgatcgtagacatcggccgtcaggactggcccatgttctaccatgatttttttacgaacatccttcagctcatccagtcccccgtgactacgcctctgggcctaatcatgctgaagactacctcggaagaactcgcctgccctagagaagatttgagcgtggcccgaaaagaggagctccgcaaacttttactggaccaggtccagaccgtgttagggctgcttactggcattttagaaacagtctgggataaacacagtgtgaccgcagctactccccctccctcccccacgtccggggaaagtggggatctgcttagcaatctcctacaaagtccctcatcagccaaactcctgaaccagccaatacccatcctggacgttgagtccgaatatatctgcagtctggccttagagtgtcttgcccacctgttcagctggatccctctttccgcttcaatcactccgtcactcctcaccaccatattccatttcgcacgttttggctgtgatattcgagcacgtaagatggcctccgtcaatggcagctcccaaaactgcgtcagcgggcaagagagaggacggctcggcgtcttggcgatgtcatgtattaacgagttgatgtcaaagaactgcgtccccatggaatttgaagaatatctgttgcggatgttccaacagaccttctatctgctgcagaaaataactaaggataataacgcccatactgtgaaatccagactggaagagctcgacgaatcctatatcgagaaattcactgacttcctgcgcttattcgtctcagtgcacttgagacgaattgaatcctactcccagttccctgttgtcgaatttcttactctcttgtttaagtatacctttcaccagcctacccatgaaggatacttctcttgtctggatatatggaccttgtttctcgactaccttaccagcaagatcaagtcgaggctcggagataaggaggccgtgctcaatcgctacgaggacgcactcgtcctactactgaccgaggtgttaaaccgaattcagtttagatataaccaggcccagctggaggagttggacgacgaaacattggacgacgatcaacagacagaatggcagcgatacctgcggcagtcactggaggtggtggccaaggttatggagctcctgccgacacacgcattttcaactttgttccccgttctccaggacaacttggaagtgtatcttggattacagcagtttattgtgacttctggaagtggacacaggcttaacattacggctgaaaacgattgtagaaggctgcactgctcactgcgcgacctttctagccttctgcaagccgtcggccggctcgcagagtattttattggggatgtttttgccgctagattcaacgatgctctgaccgtggttgaaagacttgtgaaggttacactgtacggcagccagattaagctttataacatcgagacagcagtgccatcggtactcaaacctgaccttatagatgtccacgctcagagtctcgccgctcttcaggcatatagccattggctggcccaatactgctccgaggtgcaccggcaaaatacccagcagttcgttaccctgataagtacgacaatggacgccatcactccgttaatttctaccaaagtacaggacaaactgcttttaagcgcctgccacctactggtctctttagccactacggtgcgcccggtatttctgatcagtatacctgccgtgcagaaggtcttcaacagaattactgatgccagcgctctgcgcttagtggacaaggcacaggtcctcgtgtgtcgggctctaagcaatattttgcttctgccttggcctaatctgccagaaaacgaacagcagtggcccgtccgctctatcaatcatgcatcattgataagtgcactgtctagagactatagaaatctcaagccttcggccgtggcgccccagaggaagatgcctctggatgacacaaagcttatcatccatcagactctatccgttctggaagatattgtagagaacatctccggagaatctaccaagagtcgtcagatctgctaccagtctcttcaggagtccgtgcaggtatctcttgccctgtttcctgcattcattcatcagtccgacgttaccgacgagatgctgagtttctttctcacgctttttagagggctgcgcgtacagatgggtgtcccatttacggaacagattatccagacatttctgaatatgtttacccgcgagcagctggcggagagcatccttcacgaaggttcgaccggctgcagggtggtggagaagtttctgaaaattctgcaagtcgtggtacaggaacctgggcaagtatttaagccattcctaccgtctattattgctctttgtatggagcaggtgtaccctatcattgccgagcggcctagccccgatgtaaaggcagagctgtttgagcttttatttcggacactgcaccacaactggcgctactttttcaagtccacagtgttagcttccgttcagagaggcatcgccgaagaacagatggagaacgaacctcaattctccgcaatcatgcaggcctttggacagtcctttctgcagccagatattcatctgttcaagcaaaatctgttttacctggagacccttaatacaaaacaaaaactctaccacaaaaagatttttaggaccgctatgttatttcagttcgtcaacgtgctgctgcaggtactggttcataagtcccatgacctgctacaagaagaaatcggtatcgctatctacaatatggcttctgtcgattttgacggcttttttgccgctttcctgcccgaattcttaacatcatgcgatggggtcgacgctaaccaaaagtccgtgctgggccgcaatttcaagatggatcgcgacctcccaagcttcactcagaatgttcatcggttagtcaatgacctgcgttactacaggctgtgtaacgactctctgccaccagggactgtgaagctgtag

SEQ ID NO: 187261 - DNA, 3264 bp, synthetic construct
  misc_feature 1..3264: note = Description of Artificial Sequence: Synthetic coding sequence
  source 1..3264: mol_type = other DNA
atggccgaccacgtgcagagcctggcccagctggagaacctgtgcaagcagttatatgagaccaccgacactactacacggctccaagctgagaaggcgctcgttgaattcaccaactcacctgattgcctgagcaaatgccagcttctccttgagagaggaagcagcagctatagtcagttactggccgcaacctgccttactaaactagtctcaaggaccaataatccactgcctctcgagcagagaattgacataaggaattacgtcctgaactacctggctacacggccgaaactcgctacatttgtgacccaggcgctgatccagctgtatgcaaggattactaaactcgggtggtttgactgtcagaaagacgattatgtattcagaaatgctatcaccgacgtaactcgcttcctgcaggactctgtagaatactgtataattggcgttaccatccttagtcagctaacaaatgagatcaatcaggcagacacaacacacccactgaccaaacacaggaagattgcttcaagcttccgggacagttctctgtttgatatttttactctgagttgtaacctgctgaagcaggccagcggaaagaatctgaatctcaacgacgagtcccagcacggactactcatgcagctgctgaagctgacacacaattgtttaaatttcgacttcatcggtacatccaccgatgaatcttccgatgacctttgtaccgtgcagatccccacatcttggagatccgctttccttgatagcagcacccttcagctgttcttcgacttatatcactctatccccccttccttcagccccctggttttgtcttgccttgttcagattgcatcagtgaggcggagtttgttcaataatgcagaacgcgcaaaattcctgtcacatctggtggacggggtcaaaaggattctggaaaatcctcagagcctcagcgatcctaacaattaccacgagttctgccggcttctcgcgcggttgaagtctaattatcagctgggggaactagtgaaggttgaaaattatcccgaggtcatacgtctaatcgctaattttactgtcacctctttacagcactgggaattcgcacctaactcagtccattacttactctctctatggcagcggctggctgcctcggtgccatatgttaaagccactgaaccccacatgctggagacttataccccggaggtgaccaaagcttatatcacatcccggcttgagtctgttcacatcatcttgagagacggtctggaagacccactggaggatacaggcttggtccagcagcagctcgatcagttgagcaccatcggacgctgtgaatatgaaaagacctgtgctttgctggtgcaactgttcgatcagagtgcccaaagttatcaagaactactgcagagcgcgtctgcttcccccatggatatcgcagttcaggagggccgactcacctggctcgtctatattatcggagccgtcatcggtgggcgcgtgtcttttgccagtacggatgagcaggatgcgatggacggggaactggtttgccgcgtgctgcagctgatgaatttaacagactcgcggcttgcccaggcgggtaatgagaagctggaactggcaatgctaagcttttttgaacagtttcggaagatttacatcggagaccaggtgcagaagagtagcaaactgtatagacgtctgtccgaagttttgggcctaaatgacgaaaccatggtcctatccgttttcattggcaaaatcatcaccaatctcaaatactggggcaggtgtgaacccattactagtaaaactcttcagcttcttaacgacctatccataggctatagctcggtcaggaaactcgttaaactatctgcagttcagttcatgctcaacaaccacacaagcgagcactttagttttctcggcatcaacaatcagtctaatctcacagacatgcggtgccgcacgacattctatacagccctggggagactgctgatggtcgatctcggggaggatgaggaccaatatgagcagtttatgttaccattgactgcggccttcgaggccgtcgctcaaatgttttcgacaaattcattcaatgaacaggaggctaaacgcactctcgtgggactggtcagagatctgaggggaatagcgttcgccttcaacgctaagaccagcttcatgatgctctttgagtggatctacccctcttacatgcctatcctccagcgcgccattgagttatggtatcacgatcccgcatgcacgacacctgtactgaagctaatggcagaactggtacataatagaagtcagagactccagttcgatgtctcaagtccaaatggcatactgctgttccgagaaaccagtaaaatgattacaatgtacgggaatcgcatccttaccctgggcgaggtgcctaaggatcaggtgtacgccctgaaactgaagggaatatctatctgtttcagcatgctcaaggcagccctctcaggaagctatgtgaacttcggagtttttaggctctacggcgacgacgctctcgataatgcccttcaaaccttcatcaaactgctcttgagcatccctcactctgatctcttggactatcctaagctgtcccaaagttactacagcctgcttgaagttctgacacaggatcatatgaacttcatagcctcactggagccccacgtgatcatgtacatactaagctctataagcgaaggccttacggcattggacactatggtgtgtacaggatgctgctcatgtctcgatcatattgtgacctacctgttcaagcaactaagcaggagcactaagaagcgtaccacacctctgaatcaggagagcgaccgcttcttacacattatgcaacagcatccagagatgatacagcaaatgctgagcacggtgcttaacataattatcttcgaggactgccgcaatcagtggagcatgagccgcccacttcttggcctgatcctgctgaacgaaaaatacttttccgacttgcgaaattcaattgttaactcgcagccgcctgagaaacaacaggccatgcacctctgttttgagaacctcatggagggaatagagcggaacctgttaacaaagaatagggacaggtttacccagaatttaagcgctttccgacgggaggttaacgattctatgaaaaattctacttacggcgtgaactctaatgacatgatgagctag

SEQ ID NO: 187262 - DNA, 3267 bp, synthetic construct
  misc_feature 1..3267: note = Description of Artificial Sequence: Synthetic coding sequence
  source 1..3267: mol_type = other DNA
atgcgggaccccggccggaagagcctggcccagctggagaacctgtgcaaacaactctacgaaactacagacactacaactcgcctccaggcggaaaaggccctggtcgagttcacaaatagtccggactgcttgtcaaagtgtcagctcctgttggagagaggatcaagctcttactcccagttacttgcagctacatgcttaaccaagctggtatctcgcaccaacaatcctttgccactcgagcaacgcatcgacataagaaactatgtgctgaactatctagcaacaagacctaagttggctacatttgtgactcaggcgctgatacagctgtatgctcggatcactaagctcggatggtttgactgccagaaggatgattacgtgttccggaacgccatcaccgatgtcacccgttttctgcaagacagtgtggaatactgcattatcggggtgactatactgtctcagttgaccaacgaaatcaatcaagccgataccacccatccactgaccaagcaccgcaaaatcgcttcctcctttcgggatagttccctctttgacatatttactctgtcatgcaacttgcttaaacaggcctccggcaagaacctaaacctgaacgacgaatcccagcacggtttgctgatgcagttgcttaaattgacccataattgtctgaacttcgacttcattgggacctctacagacgagagtagtgatgatctgtgcaccgtccaaatccctacttcctggagatccgccttcttagacagctcgaccctccaactgttctttgacttataccacagcatacctccatctttttcaccactcgtcctttcgtgcctcgtgcagatcgcaagcgtgagacgaagcctgttcaataacgctgagcgcgctaaattcctttcacaccttgtggacggcgtcaagaggattctcgagaatccgcagtcattgtcagacccaaacaattatcacgagttctgccggctactggctagactgaaatcaaattaccagctaggcgagctcgtcaaggtggagaactatccagaagttatccgtctcatagccaatttcacagtcacatccttgcagcattgggagttcgctccaaacagcgtgcactatctactctcgttatggcaacggttggccgcctccgtgccctatgtcaaagcgacagagcctcacatgcttgagacgtatacccccgaggttacaaaggcctatattaccagcagactggagagcgtgcacattattcttagggacggcctcgaggatcctctcgaggacaccggactggtccagcagcagctggaccagctttcaaccatcggcaggtgcgagtacgagaagacctgtgccctcttggtacaactcttcgatcagtcagcccagtcgtaccaagaactgcttcaaagcgccagcgctagcccaatggacatagcagtccaggagggaagacttacctggttggtgtacatcattggagcagtgatcggagggcgcgtgagttttgcctcaactgacgagcaggatgctatggatggagagctcgtgtgccgcgtgctgcagctgatgaacctgactgattcaagactagcacaagcgggaaatgaaaaactggaattagccatgctctctttctttgaacagtttcgcaaaatttatattggcgaccaggtccagaagtccagtaagttgtatcgacgtctgtccgaagtcctcggtctcaacgacgagactatggtcttgagcgtgtttattggcaaaattatcacaaatctgaagtactggggccgatgtgagcctataacgtccaaaactttacagcttctgaatgatttgtccattgggtacagcagcgtaagaaagctggttaagctgtccgccgtgcagtttatgcttaacaatcatacatcggaacatttctctttcttggggatcaataatcagagcaacttaaccgatatgcgctgccgtactacattttacaccgctctcggccgactgctcatggtagatctgggcgaagatgaggaccagtatgaacagttcatgctgcccctaacagcagccttcgaagcagtcgctcagatgttcagcactaattccttcaacgaacaggaagccaagcgcaccctagtcggcctagtgagggaccttagaggcatagccttcgcctttaacgccaagacctccttcatgatgctctttgaatggatctatcctagttatatgcctatccttcaacgcgcgattgaactgtggtaccacgacccagcctgtaccacaccggtcttgaaattgatggcagaactggtgcacaataggtcgcaaagactccaatttgatgtatcctccccgaatggcattcttctcttcagagagacctcaaagatgataactatgtacggaaatagaattttgacattgggcgaagtccctaaggaccaggtgtacgcacttaaactgaagggcatctctatttgcttctccatgctcaaagccgcgctttccggttcttatgtgaacttcggcgtgttccggctgtatggggatgacgctctcgacaatgccctacagacgttcatcaagctgttactgagcatcccccattccgaccttttagattacccgaaactgtcacagtcttactactcactcctcgaggtgcttacgcaggaccacatgaactttatcgcatcactggagcctcacgtgattatgtatattctgtctagcataagcgaaggactcaccgccctggacactatggtctgtaccggttgttgtagctgtttagatcatatcgttacctatctctttaagcagctttcacgttctacaaagaaacgcaccacacccctgaaccaagaatcggacaggttcctgcacatcatgcagcaacatcccgaaatgatccagcagatgctcagtacggtgcttaatatcattatttttgaggattgccgaaatcaatggtccatgtcacgtcctctgctgggcctcattttacttaacgaaaaatatttctcagacctgagaaatagtattgtgaactctcaaccccctgagaagcaacaagctatgcacctttgttttgagaacttgatggaagggatcgaacgtaacctcttaactaagaacagagacaggtttacacagaacttgagtgcttttagaagggaagttaacgatagcatgaagaatagcacctatggagtcaatagcaatgatatgatgtcatag

SEQ ID NO: 187263 - DNA, 3291 bp, synthetic construct
  misc_feature 1..3291: note = Description of Artificial Sequence: Synthetic coding sequence
  source 1..3291: mol_type = other DNA
atggccgaccacgtgcagagcctggcccagctggagaacctgtgcaagcagctgtatgagactaccgacacaaccacccgactgcaagcagagaaggcccttgtggagttcaccaattccccggactgtttgtcaaagtgccagttactacttgagagagggtctagcagttactcacagctgttggcagcaacctgtttaaccaaactggtgtcacgaacaaataaccctctacctctggaacagcgcatagatattagaaactacgttctgaactacctcgcaaccaggcccaaacttgctacatttgttacccaggcccttattcaattgtacgccagaattacaaaactgggatggtttgactgccagaaggacgactacgtgtttcgaaatgctattacagatgtgacgagatttcttcaggacagtgtggaatactgtatcatcggcgtgaccatcctgtcacagcttacaaacgaaataaatcaagtcagcgccaccgcttttctcatcgaggccgatacaacacaccccttgacaaagcatagaaagattgcctcttcctttcgggattcatcccttttcgacatattcacgctctcctgtaacctcttgaagcaggcttccgggaagaacctcaacctaaatgacgaatctcaacacggacttctaatgcaactgctcaagctgacccataattgcctcaacttcgactttataggtactagtactgacgaatcgtccgacgacttgtgtaccgtacagatccctacttcatggcgctccgcgttcctggactccagtacactccagctgttttttgacttatatcactctatcccaccatctttctctcctttagtgctctcttgtctcgtacaaattgccagtgtgcgccgaagtctctttaataacgccgagagagctaagtttctgtcacatctggtcgatggcgtgaagcggatattagagaatccacagtcactctcagacccaaataattatcatgaattttgccgccttctcgcacggttgaaaagcaattaccagctcggcgaattggtaaaagtggagaactacccagaagtgatccgcctgatcgccaacttcacagtgacctctttgcagcactgggagttcgcaccaaatagcgttcattatctcctttctttatggcagcggcttgcagctagcgtgccatatgttaaagctacggagccacacatgttagagacctatactccagaggtgacgaaggcttacattactagtagactcgaatccgtgcacataatactccgagacggtctggaagatcctctggaagatactggcctcgtccagcagcagctggaccagctgtccaccatcgggagatgcgaatatgagaaaacgtgcgccttattggtgcaacttttcgaccaatccgctcaatcttatcaggagctccttcaatctgccagcgcctcgcctatggatattgccgtgcaggagggcaggctgacctggctggtctatattattggtgcagtgattggaggacgagtgtcatttgcttccactgatgagcaggacgccatggacggggaactggtatgtcgcgtactccagttaatgaatttaaccgacagtcggctggcacaggcggggaacgagaagctggaactggcaatgctaagttttttcgagcagttccggaagatctacattggcgaccaagttcaaaaatcgtccaaactgtacaggcgcttgtcagaagtgctcgggctgaacgacgagaccatggtgctcagtgtgtttatcgggaagataataaccaacctgaaatattggggaaggtgtgaacctataacctctaagacattgcagctgctcaatgacctgagcatcggatacagctctgtccggaagctggttaagctctctgcagtccagtttatgctgaataaccatacctccgagcacttcagcttccttggcatcaacaatcagtccaatttgacagacatgaggtgccgaactacattttacactgcactcgggagactgctcatggtcgacctcggggaagatgaggatcagtatgagcagttcatgctgccactcaccgccgcttttgaggcagtggcacagatgttttcgacaaatagctttaatgagcaggaggcaaagagaactttagtgggactggtaagggatctacgaggtatcgcgttcgcttttaatgcaaagactagcttcatgatgctatttgaatggatctacccatcttacatgcctatcctacagcgggcaattgaactctggtaccacgacccagcatgcactacccccgtgttaaagctaatggctgaactggttcataatcgcagccagcggctgcagttcgacgttagtagccccaacgggatactcctgtttcgggagacctccaagatgatcactatgtacggcaatcgtattctgactttgggggaagtaccgaaagatcaggtttatgctttaaagttgaaagggatcagtatctgttttagcatgttgaaagccgcgctctctggttcctacgtgaactttggagtgttcagactttatggagatgatgctctggataacgcccttcagacttttatcaagctgctgctgtctattccgcacagtgacttgctggattatccaaagctgagccagagctattacagcctgctggaagtcttaacacaggatcacatgaacttcatcgcctcactggagccccatgtaattatgtatattctcagctcgatatccgaaggcttaactgctttagataccatggtgtgtacagggtgctgcagctgcctggaccacatagtcacctacctgttcaaacagctaagccgctcgactaagaagcggactacccctcttaatcaggagtcagaccgcttccttcacatcatgcagcagcatccggaaatgatacaacagatgctctccacagtacttaacattatcattttcgaagattgtagaaaccaatggtccatgtctcggcccttattaggactcattctgctgaacgagaagtacttttccgatctccggaactctatagtgaacagtcagccacccgagaaacagcaggccatgcacctgtgctttgaaaacctgatggaggggatcgagcgcaatctcctcaccaaaaaccgagatcggttcacccaaaacctcagtgcattcagacgggaggttaatgacagcatgaaaaactcaacttatggggtgaattcgaatgatatgatgtcctag

SEQ ID NO: 187264 - DNA, 6363 bp, synthetic construct
  misc_feature 1..6363: note = Description of Artificial Sequence: Synthetic coding sequence
  source 1..6363: mol_type = other DNA
atgcggagcttcaagcgggtgaacttcggcaccctgctgagcagccagaaggaagccgaagaactgctgccagccttgaaagaattcctgtctaatcccccagcagggttcccatctagcagatccgacgcagaacgacggcaagcctgcgacgccatcctgcgtgcctgtaatcagcaacttaccgccaagctggcatgccctcggcatctcgggtccctcttggagctcgcggaattggcttgcgatggttacctggtatcaaccccacagagacctcccctgtatctggagcgcatcctttttgtgctcttacggaatgctgccgctcagggttctcccgaagcaaccctccggctagcacagcctttgcacgcctgcctggtacaatgttccagggaggctgctccccaagactacgaggctgtggccagggggagcttctcccttctgtggaaaggcgcggaggcgttattagagagacgtgccgcctttgccgctcgtctgaaggccttgagttttctcgtgctcctagaggatgagtccaccccatgtgaagttcctcactttgcatctcccactgcttgcagagccgtcgctgcacatcagctgttcgatgctagtgggcatgggctaaatgaggccgatgccgactttctggatgacctgcttagtcggcacgtaataagagctcttgtgggagaacgaggaagttcctctggcctgctctcgcctcagagagccctgtgcctgctggagctgacactggaacactgccgcagattttgttggtccagacatcacgacaaggccatttccgctgtcgaaaaggctcacagctatctccggaacactaatcttgcgccctccctacagctgtgtcagctgggagtgaaactcctgcaagtgggcgaggaaggcccgcaggcggtagcaaagctgcttatcaaggccagcgcagtgctcagtaaatctatggaggccccctcccctccgctgcgggctttgtatgagtcctgtcagttctttcttagcgggctggaaagaggcacgaaacggcgatatagattggatgctatcctgtcactgtttgccttccttgggggatactgttcgctattgcagcagttgcgggacgacggagtgtacggaggctcgtcgaaacagcagcagagcttccttcagatgtattttcagggcctgcacctgtataccgtcgttgtttacgacttcgcccaggggtgtcagatcgtggaccttgctgatttgacacagctcgtggacagctgcaaaagcaccgtagtgtggatgctggaggcgctggaagggttgtctggacaggaactaacagatcacatgggaatgaccgcttcctacacatctaacctcgcctattccttttactcccacaaactttatgctgaagcatgtgcaatatcagagccactgtgccagcatcttggcctggtaaagcccggcacgtatccagaggttcccccggagaaacttcatcgctgctttaggctgcaggtcgagagtctaaagaagctgggaaagcaggctcaggggtgcaagatggtgatcctgtggcttgcagctctccagccttgctccccagagcatatggcagagcccgtgactttttgggtgcgcgtcaagatggatgccgccagggccggagacaaggaactgcagttaaaaacacttcgggatagtctgagcgggtgggaccccgagaccctggcactgctgttaagggaggagctgcaagcatacaaggcagtcagggcggacaccgggcaggagaggtttaacatcatctgtgacctgctggaactgagtcccgaggagaccccagctggtgcctgggcacgggccacccatcttgttgagctggctcaggtgctttgttaccacgattttacgcaacaaactaactgcagcgccttagacgccatccgggaagccctgcagttgctggacagcgtaaggccagaagcccaggcgcgagaccagctcctggacgataaggcgcaggccctgttatggctgtatatctgtactctggaagccaagatgcaggaaggaattgaaagggaccggcgagcgcaggctcccggtaatctcgaagagttcgaagtgaacgatcttaactacgaggacaagttgcaggaggacaggtttctgtacagcaatattgcctttaatctggccgctgacgcggctcaaagcaagtgcctggatcaggcccttgctctatggaaggagctgctgactaagggccaggcaccagccgtccgttgcctccagcagactgccgcctctctccagattctagccgccctctaccagctggtggcaaagcccatgcaggccttggaagtccttcttttgctccggatcgtcagtgaaagactcaaggaccactccaaagcagctggaagctcctgccacataacccaactgctgctcactttggggtgtcccagttacgcccagttacacctggaggaagctgcatccagcctgaaacaccttgaccagacaaccgacacgtacctcttgctgagcttgacctgtgatctgctccgtagccaattgtactggacccaccagaaagtcactaaaggggtctcactgctgctgagcgtactgcgggacccggcgctccagaaatccagcaaggcatggtacctgctgcgggtgcaagttctacagttagtggctgcctacctgagcctgccaagcaacaatctgtctcattccttgtgggagcagctgtgcgctcagggttggcaaacccccgagatcgccctaattgatagccacaagctgctacggagcatcatactccttctcatgggcagtgatatcctctccacccagaaggcagccgtggaaacctcttttctggactacggggaaaatctggtgcaaaaatggcaggtgctttccgaggtgttgtcctgttccgagaagctggtgtgccacctgggcaggctgggctccgtaagtgaagcaaaagccttttgtctggaggcgctcaagctgacaacaaagttgcagatacccaggcagtgcgcactgtttctggtcctgaagggcgagctagaactcgccaggaatgatatcgacctctgccagtctgatttgcaacaggtgctgttccttcttgagtcttgcacagaattcgggggcgttacccagcaccttgacagcgttaagaaggtgcacttacagaaaggcaaacaacaggcacaggtgccatgtcccccgcaactgcctgaggaagaattattccttcgtggtccagctctggagctggtggcaaccgtggcaaaggaacctggaccaattgcccctagtactaatagctctccggtgcttaaaaccaagccccaacctatcccgaactttttgagtcacagcccgacctgtgactgctcactgtgcgctagcccagtcctcacagcggtgtgcttgcggtgggttcttgtaactgccggagtcagacttgcgatgggtcatcaggcccagggactggatcttctccaggtcgtactgaagggttgtcccgaagctgccgaacgtctcacccaggcgctgcaagcgagcctgaatcataagacgcccccgtccctcgttccttccctgcttgacgaaatcttagctcaagcatacacattgttagctttggagggcctgaatcagccctctaacgagagtctgcagaaagtcttacagtctggattaaagttcgtggccgctagaatcccacatttagaaccttggcgagccagtctcctgctaatttgggccctgactaagctaggcggattatcttgttgcacaacccaactgttcgcatcaagctggggctggcaacccccactcattaaatccgttcccggctcggagccttccaaaacccaaggacagaagaggagcggccgcggccgccaaaaactggcctcggcaccactgcgactgaacaatacaagccagaagggacttgagggaagggggctgccttgtacccccaagccaccggaccggatacgacaggcagggccccatgttccttttactgtatttgaagaggtatgtcctactgaatccaaaccagaagttccccaagcaccccgggtacaacagcgagtgcagacacgcctcaaggtaaattttagtgacgatagcgatttagaggatcctgtctcagctgaggcctggcttgcagaggagcctaaacgccgtggtaccgcttctcgcggcagaggcagagcgcggaaggggctcagcttgaagaccgatgccgtggtggctcccggaagcgctcctggaaatccgggactgaacggcaggagtcggcgagcaaagaaggtcgcctctcggcattgcgaggagaggcgcccacagcgtgccagtgatcaggctcgccctggccctgaaatcatgcgaaccatcccagaagaagagttgaccgacaactggcgaaaaatgtctttcgaaatcttgcgtgggagcgatggagaggacagcgcaagtggaggtaaaacccccgcgccgggaccggaagcagcatcgggagagtgggaactcctgaggcttgacagtagcaagaagaaactaccttctccatgtcccgataaggaaagcgataaggacctcgggccccggctcagactcccaagcgcacccgtggccaccgggctctcgaccctcgacagtatctgtgatagtttaagtgtggcatttcgcggtatttctcattgtcctccctcaggcttgtatgcccacctctgccggtttctagctctttgcttgggccatcgcgatccctatgctaccgcctttcttgtgaccgaatctgtgtcgatcacatgtcgtcaccagctgctgacacacctccatcggcagctatcaaaggctcagaagcacagaggcagtttggagattgcagatcagctacaggggctgtccctgcaggagatgccgggtgacgtaccattagccaggatccagagactcttttccttccgcgccctcgagtcagggcacttcccccagcccgagaaggaatcctttcaggaacggctagctctgatccctagcggagtcaccgtctgtgtgctggccctggccaccctgcagcccggaactgttggaaacacactacttttaacgagactagaaaaagattcccccccggtttcagtccagatcccgactgggcagaacaagttgcacctgaggtcagtccttaatgaattcgatgccattcagaaagcgcaaaaggagaattctagttgtactgataaaagggaatggtggactgggcgattagcactcgaccatagaatggaggtactgatcgctagcctcgagaaaagcgtgctgggctgttggaagggcctgctacttcctagcagcgaggagcccggccctgcccaggaggcttcccggttacaggaactcctgcaagactgcggctggaagtatccggaccggacactattgaaaattatgttgagtggggcaggagccctgaccccacaggatatacaagcgctggcatatggtctgtgtcccactcagcccgagagggcccaggaactcctgaacgaggccgttggcagactccaggggctgactgttccttctaattcccatttggtactggtcttagacaaggacttacagaaactgccttgggagtcaatgcccagcctgcaggcactgccagtgaccagattaccgagcttcaggtttctcctttcctactccatcattaaggaatacggagcttcacctgtgctgtctcagggggtcgaccctcgcagcacattctacgtgctcaatcctcataacaacttgagctctacagaggagcagtttcgggctaacttcagcagcgaagccggttggcgtggcgtcgtgggggaggtacctcgccctgagcaggtgcaggaggccctcacgaagcatgatctctacatttacgcgggtcatggtgcgggggctcgctttctggatggtcaagccgttctgaggctttcttgcagggctgtggccttactttttgggtgttcttccgccgccctggccgtccgcggcaacttggagggtgccgggattgtgcttaagtacattatggctggctgccctttattcctcggaaatctgtgggacgtcacggacagggatatcgatcgttatacagaggcgctcttgcaaggctggctgggtgcaggtccgggcgcccctctgctctactacgtcaatcaagctcgccaggcccctaggctaaaatatctgatcggagcagctccaattgcctacggattgccagtgagtctgaggtag

SEQ ID NO: 187265 - DNA, 6363 bp, synthetic construct
  misc_feature 1..6363: note = Description of Artificial Sequence: Synthetic coding sequence
  source 1..6363: mol_type = other DNA
atgcggagcttcaagcgggtgaacttcggcaccctgctgagcagccagaaggaggccgaggagctccttcctgctctcaaggagttcctgtctaaccctcctgccggttttccaagctcacgcagcgatgccgaacgccgccaggcttgtgacgcaattctgagggcatgtaatcaacagctgaccgccaagctcgcatgtcccaggcacctcggaagtctgcttgaactggctgagcttgcctgtgacgggtacctcgtgagcactccacagcggcctcccctttacttagaacgaatcctattcgtgttacttagaaatgctgcagcacagggttcgcctgaggccactttgcgtctggcccagccactccacgcgtgcctggtgcagtgctcgagagaagccgctccacaggactatgaggctgtggctcgggggtcattctccctgctttggaagggtgccgaggccttacttgaacgtcgggcagcttttgccgcgcggctgaaagctctgagttttctggttctgcttgaggatgagtccaccccttgtgaggtgcctcatttcgcgtcacccacagcctgcagggcggtggctgctcaccagctttttgacgctagcggtcacggcctgaatgaagctgatgctgatttcctggacgacctactcagtcgtcacgtcatacgcgctctggtaggcgagcggggctcttcctcgggtctgctgagtcctcagcgagctctgtgcctcctggagttgacgcttgagcattgtcggaggttctgctggtcccgccaccacgacaaggctatttccgcagtggagaaagctcactcatatctcagaaatactaacttggcaccttcgctccagttgtgccaactgggcgtgaagctcctacaagtcggtgaggaagggccccaagctgtggctaagctacttatcaaggccagcgcagtactgagcaagtctatggaggccccttccccacctctgcgggccctctatgagtcttgccagtttttcctaagcggcttggagcgagggaccaagaggaggtaccgcctcgatgctatactgtcactgtttgcctttctcggcggctattgtagtctgctgcagcagctccgggacgacggtgtgtacggagggtctagcaaacaacagcagtcattcctacagatgtattttcaggggttacacttatacaccgtggtggtgtacgattttgcacaggggtgccaaattgtggacctcgctgacttgactcagcttgtagacagctgcaagtcaacagtggtgtggatgctcgaagcactggagggattaagtggccaggaacttacggaccatatgggcatgaccgctagctacacctcgaatcttgcttacagtttttactctcacaagctgtacgccgaagcttgcgccatttctgagccgctatgtcaacaccttgggctggtaaaacctgggacctatccagaagtgcctccagaaaagctccacagatgcttccgactacaggtggagtcgctgaagaaactcgggaagcaggcacagggctgcaaaatggtgattctctggctcgccgccctgcaaccctgctcacccgagcatatggctgaacctgttacattttgggtgcgggtgaaaatggacgccgcccgagccggggacaaggaactccagttgaaaaccctgagggattctctgagcggctgggaccctgagacactcgctcttctcctcagggaagaacttcaagcatataaggccgtgcgagcagataccgggcaggaaagattcaacatcatttgtgacctgctggaattatcacctgaggaaacccccgcaggcgcgtgggctcgtgcgacacacttagttgagttggctcaggtactctgctaccatgattttacacaacagacaaactgcagtgccctggatgcaatccgggaggctctccagctgttggacagtgttcggcccgaggcccaggctcgggatcagctcctcgacgataaagcacaggcacttctgtggttatacatttgcacactggaggcaaagatgcaggagggcattgagagggaccgccgggcacaggctccaggtaacctcgaggagttcgaagtgaacgaccttaactatgaggacaagctgcaggaggacagattcttgtattcaaatatcgcattcaacttggctgcggacgccgcacagtccaagtgcttagatcaggccctcgctttatggaaggaactcctgactaagggccaggcacccgcagtgaggtgcctccagcagactgccgctagcttgcagatccttgcggcactgtatcagttggttgctaagccaatgcaggccctggaggtgcttctcctgttgcggatcgtgtccgaacggctcaaagatcatagcaaagccgccggcagctcctgccacattacccaactgcttttaactctcggatgccctagttacgcccagttacacctagaggaggcagcctcgagccttaaacacctagaccaaacaactgacacctatctgcttctctcgttaacctgcgatctactcaggagtcagctatactggacacaccagaaagtgacgaagggcgtgagtctgctactgagcgtgctgcgggacccggcgctccagaaatcttctaaagcctggtacctattacgggtccaggtcttacaactggtggcggcctatttgtccctacccagcaataacctatcccatagcttgtgggagcagctatgcgcacaggggtggcagacacctgagattgcccttatcgattcccacaaactgctgcggtctataatcctgctgctgatggggtccgatatcttaagtactcaaaaggccgctgttgagacatcctttctcgattatggggagaaccttgtccaaaagtggcaggtgctctccgaggtcttgtcctgctccgaaaagcttgtgtgccatttggggcgactgggtagcgttagtgaagccaaggcgttttgtttagaagctctgaaactgacaactaagttgcagatcccacggcagtgcgcattattcctcgtccttaagggagagctcgagctggcaaggaacgatatcgatctttgtcaatccgatctgcagcaggtgctattccttcttgagtcctgcaccgaatttggtggggtaacgcagcatttagattccgtcaagaaggtccaccttcagaaaggcaaacagcaagcccaggtaccatgtccccctcaactcccagaagaagaattgtttttgaggggaccagctctggagttggttgctactgtcgccaaggagccaggtcccattgcaccttcaactaacagctccccagtgctaaagactaagccacagcccatccccaattttctgtcccactcaccaacctgcgactgtagcctgtgtgcatcccctgtcctgaccgctgtctgcctgcgttgggtgttggtaactgctggggtgcgtcttgccatggggcaccaggcccagggtctggaccttctccaggtggtgttaaaaggctgtcctgaggccgcagaaaggttaactcaggcattacaggcgtccttaaaccacaaaacccctcctagccttgtcccctccctgctggacgagattctcgcacaggcttacactttattagcactcgaggggctgaaccagccttcaaacgagagcctacagaaagtgctgcagagcggccttaaatttgtggcagcacggatcccacacctggagccctggagagctagcttgctgctcatctgggcactcacaaaactgggcggtctttcatgttgcactacccagctgttcgcctcctcttggggctggcagccgccgctgatcaaatctgtccctgggtcagaaccctctaaaacacagggacagaaacgatccggcagggggcgacagaagttagcatccgcccccctgcggttaaataacacctcacaaaagggcctcgaaggaagagggttgccctgcaccccaaaaccccccgaccgcattagacaggccggcccccacgtgccgtttacagtgtttgaggaagtgtgtcctaccgagtctaagcctgaagtcccccaggcgcccagagttcagcaaagggtccagacccggctgaaagtaaacttctcggatgattcagatctcgaagacccggtgagcgccgaggcatggttggctgaggaaccaaagaggcgcggaaccgcatcacgcgggcgagggcgggcgaggaagggactgtccttgaaaacggacgccgttgtggcccccggctcggctcctggtaatcctgggctgaatggccggtctagacgggcaaaaaaggtggcttctcgtcactgcgaggaacgtaggccccaacgagcgtcagaccaggcccgccctggcccagagatcatgaggactattccagaggaagaactgaccgacaattggagaaagatgtcgttcgaaattctgagaggaagcgatggggaagatagcgcctccggcgggaaaactcctgctccaggacctgaggctgcgtctggcgagtgggaactgctgcggctggactcctcgaaaaaaaaattaccatccccctgtccagacaaggagtcagacaaagacttaggaccgagactgcggctacctagcgcccccgtggcaacaggtttatctactcttgactcaatctgcgattcactgtctgtagcatttagaggcattagtcactgcccccccagcggattgtacgctcatttgtgcagattcctggccctatgccttggacaccgggacccctatgctacagcattcttggtgaccgagagcgttagtataacgtgtcgtcatcagctccttactcacctgcatagacaactgtccaaagcacagaaacatcgtggatctctggagatcgcagatcagttgcaaggactgagtctacaggagatgcctggggatgttcccctggcccgcatacagagactgtttagctttagagcccttgaaagcggccactttccgcaaccggagaaggagtctttccaggaacggctggcgctgatcccctccggcgttacggtatgcgttttagcgttagcaacactccaaccggggaccgtcgggaacacgctgctactcacaagattggagaaagattctcctcctgtgagcgtgcaaatcccaactgggcaaaacaaactgcatttgagaagcgttctgaacgagtttgatgcaattcaaaaggcgcaaaaggagaactcatcctgcaccgataagcgggagtggtggacaggtagattagcgctggatcaccgaatggaggtgcttattgcttccctagaaaagtctgtgctggggtgttggaaaggccttctgctgccaagctcagaggaaccgggccctgctcaggaggcatccaggctccaggagttgttacaggattgtggctggaagtaccccgaccgcacactcctcaaaattatgctctccggtgcaggggctctgactccacaggacattcaggcattagcatatggactctgtccaactcagcccgaacgagcacaagagttgctaaacgaggctgtggggcgcctgcaaggacttactgttccatcgaacagccacttagtgctggtcctggacaaggacctccagaaactgccctgggaatcaatgcccagtctccaggcattgcccgtgacccggctccctagcttcagattccttctaagctattccattatcaaggagtatggcgccagccccgtgctgagtcagggcgtcgatcctcggtccacattctatgtgctgaatcctcacaataatctcagtagcaccgaggaacagttcagagccaactttagcagcgaggccggttggcgaggtgtggttggcgaagtgcccagacccgagcaggtgcaagaggccctgactaagcacgacctgtatatatacgctggccatggcgccggagcccgattcttggacggccaagctgtgctgcgtttaagttgccgggcggtggccctcctcttcgggtgttctagcgccgccctcgcagttcgggggaacctggaaggcgctgggatagtgctcaagtatataatggcagggtgtcccctatttctaggcaacctctgggatgtgacggatagggacatcgatcggtacactgaggccctgcttcagggatggctcggggccggacccggcgctccactcctatattatgttaaccaggctagacaggcccccagattgaagtatctcatcggagccgcaccaatagcttatggacttcccgtaagcctgcgctag

SEQ ID NO: 187266 - DNA, 5388 bp, synthetic construct
  misc_feature 1..5388: note = Description of Artificial Sequence: Synthetic coding sequence
  source 1..5388: mol_type = other DNA
atggaggcccccagcccccccctgcgggccctgtacgagagctgccagttctttcttagtggccttgagagggggactaaacgaaggtaccggctggatgccattctgagtctgttcgcatttttgggtggttattgcagcctgctgcagcaactgcgggatgacggcgtttacgggggatcttcaaaacaacagcaatctttcctccaaatgtactttcagggccttcacctatatactgtggtcgtctacgatttcgcgcagggctgccagattgtcgaccttgccgacctgactcagctggttgacagttgcaagagcacggtagtgtggatgctagaggctctggaaggcctgtccggtcaggagttgacagatcacatggggatgactgcttcttatacttcgaacttagcttatagtttctactcccacaagctctatgccgaagcctgtgctatctctgaacctctgtgtcagcacctaggtctcgtgaaaccgggaacatacccagaggtgcccccagagaaattgcaccgctgttttcgacttcaggttgagagtttaaaaaagctcgggaagcaggctcagggctgtaagatggtgatactatggctagccgccctgcagccctgctctccagagcacatggccgagcctgtgaccttctgggtaagggttaagatggacgccgccagggctggagataaggaattacagttgaaaacgcttcgtgattcattgtcgggttgggaccccgagaccctagctctcctgcttcgcgaggaactccaggcctataaagccgtccgagcagacacgggccaagagcgtttcaatatcatctgtgaccttctcgagctctctccagaagagactccagccggagcttgggcccgcgccacacaccttgttgaactggcccaggtcctctgttaccacgattttactcagcaaaccaactgttcagctcttgacgcaatccgcgaagctctgcagctgctggacagcgtgcgacctgaggcccaggcacgggaccagttgctggacgataaagcacaggccttactgtggctttatatttgcactctggaggccaagatgcaagagggtattgagagggatcggcgggcacaagctccgggtaatcttgaggagttcgaagtcaacgacctaaattatgaggacaaactccaagaggaccgttttttgtactcgaacattgctttcaacttggcggccgatgccgcacaatccaaatgcctggaccaagccttagcactgtggaaggagcttctgacaaaaggtcaggcccccgcggtccgttgcctgcaacagacagccgcatccctgcaaatcctggcagctctgtaccagttggtggcaaagccgatgcaggccctggaggtcttgctgctgctgcgtatcgtgagcgagagactgaaagaccacagtaaggcagcaggcagcagctgtcacataactcagcttttactcacgctgggctgtccatcttatgcccagctccacctggaggaggcggcatcttccttgaaacatctcgatcagacaaccgatacctacctgcttttgtctctgacctgcgacctactccgctctcagctctactggactcatcaaaaggtgactaaaggggtatcgctgctgctcagcgtcctccgggatcctgctctgcagaagtcttctaaagcttggtatctcctccgggtgcaagtactccagctggttgccgcatacttgtctctaccaagcaataatttgtctcacagcctgtgggagcagctctgcgcgcaggggtggcagacaccggagattgctctgatcgatagtcacaagttgcttaggagtatcattctcctactgatgggaagtgatatcctatcgacccagaaggccgccgtagagactagtttcctggactatggagaaaacctggtccagaagtggcaggtcctgtctgaggtcctgagctgttcagaaaagctggtgtgccacctggggcgcctgggatccgttagtgaggcaaaggcattttgcttagaagctctgaagcttacaacaaaactccagatcccccgtcagtgtgccctattcctcgtgttgaagggtgaacttgagctggctcggaatgacattgatctctgtcagtcagatctgcagcaggtactgtttctactggaatcctgcaccgaattcggcggagtgacacaacacctggattccgtgaagaaggtccacttacagaaaggcaaacaacaggcccaggtgccttgtcctcctcagctaccagaggaagagctgttcctgcgcgggcccgcactggaactggttgccacagtggccaaggaacctgggcctattgccccaagcaccaactcaagtcccgttctgaagacaaagccacagcctattccaaactttttgagccactcaccaacctgcgactgttccttatgtgcttcccccgtgctgactgcggtctgtctgcgctgggtgctagtcacggcaggagtgcgcctggctatggggcaccaggctcaggggctggacctccttcaggtggtcctcaaaggctgcccagaggccgctgagaggctgacccaggctttgcaggccagtcttaaccacaagacgcctccatcgctggtgcccagcctgttagatgaaatactggcccaggcttacactttgctggcactggaggggttaaaccagccatccaacgaaagtctgcaaaaagtgctgcagtccgggctcaaattcgtggctgcacgaatcccccatcttgaaccttggcgtgcgtctttgctgctgatttgggcattgacaaagctggggggactgtcatgctgcaccacgcaattgtttgcgtcttcttggggctggcagccgcccctcatcaaaagcgtgcctgggtccgaaccttctaagacccagggccagaagaggtccggccggggccgacaaaagctggcctccgcacctctcagactgaataatacttctcagaagggtctggaaggccggggacttccttgcaccccaaagccacccgatcgaatcaggcaggcaggaccacatgtgcctttcacagttttcgaagaggtgtgcccaaccgagtcaaagcccgaggtcccgcaggcacctcgggttcagcagagggtgcagacaagactaaaggtgaattttagcgatgatagcgacctggaagatcccgtgtctgccgaggcttggctcgccgaggagcccaaacgccgtggcaccgcctcccgagggcgcggccgggctagaaaaggcctgtcactgaagaccgacgccgttgtggcaccaggcagtgctcccggaaaccctggcctgaacgggcggagtcgacgggctaagaaagtagcgagcagacactgcgaagaacgaaggcctcagagagccagcgaccaggcaaggcccggccctgagatcatgcgcactattcccgaagaagagttgactgacaattggaggaaaatgtcttttgaaattctgagaggcagcgacggtgaagattccgccagtggaggcaagacgcctgcacccgggccggaagccgcctccggcgaatgggaattactgcgccttgactctagcaagaaaaagctcccatctccatgtcccgacaaggaatccgataaggaccttgggcctcgtctgcggctaccttctgccccagttgctaccggtctgtccaccctcgacagtatttgcgattccctgtctgtggcgttccggggcatttcacattgtccccctagcggtctgtatgcccacctctgccggtttctcgccctctgtttaggtcatagggatccttacgcaactgcttttctggttacagaatcggtgagtataacttgtcggcatcaattgctgactcatctgcaccgccagctcagcaaagcccagaaacaccgcgggtctcttgagattgctgaccagctacagggattgtccttgcaggaaatgcctggcgatgtccctctggcacgaattcaaagactgttcagttttagagccctggaaagcgggcatttcccccaacccgaaaaggaaagtttccaagaacgtctcgccttgatcccttctggcgtgacagtgtgtgtactggccctggctacactgcagcccggcaccgtgggtaatacactgcttcttacaagacttgagaaagactctcctcccgttagcgtccagatcccaaccggccagaacaagctccacttgaggtcggtgctcaacgagttcgacgccatccagaaggcccagaaagagaatagttcatgtacagacaagagggaatggtggacaggccggttggcactcgatcatcgcatggaggtgctgatagcaagcctggaaaaaagcgtgcttggctgctggaaggggctgcttttaccatctagtgaggaaccaggcccagctcaggaggcatccaggctgcaggagctgcttcaggattgcgggtggaaatatccagatagaaccttgctgaagataatgctgtctggggccggcgcacttacaccccaggatatccaggctcttgcatacggcttgtgccctacacagccagagagggctcaagagctcctgaacgaagccgttggcagactgcagggccttacagtgccttctaactctcatctcgtcctggtcctcgacaaggacctgcagaagctcccctgggaatccatgccttcactgcaagctctgcctgtcacccgcttaccatcattcagattcctcctctcctatagtatcattaaggaatacggggcctcacccgtgctgtctcagggtgtggatccaagatctacattctacgtgctcaatcctcacaataatttgtcgtccaccgaggaacagtttcgtgctaatttctccagtgaggctggctggcggggcgtggttggggaagtccccagacccgaacaggtgcaggaagcccttaccaagcatgacctgtatatctatgccggccatggtgctggggcaagatttctcgatggacaggcggtcttacggctgtcctgccgggccgtagcccttctgttcggatgctctagcgcagctctggcagttcgaggaaacctcgaaggcgcaggcatagtgcttaagtacatcatggccggctgtccattgttcctgggaaatctgtgggatgtgaccgaccgagatatcgataggtacactgaagctctgctgcagggatggctgggtgctggtcccggagcacctctgctctactatgtaaatcaggccaggcaggcccctagactaaagtatctgattggtgccgcgcctatagcctacggcttacccgtgagcctgaggtag

SEQ ID NO: 187267 - DNA, 1248 bp, synthetic construct
  misc_feature 1..1248: note = Description of Artificial Sequence: Synthetic coding sequence
  source 1..1248: mol_type = other DNA
atgggcaccaccgcccgggccgccctggtgctgacctacctggccgttgcttcagcagccagcgagggaggctttactgccaccggccagaggcaactccggccagagcattttcaggaggtaggatatgccgctcctcccagcccaccactgtccaggagcctacccatggaccaccccgactcaagtcaacatggccctccattcgagggccagagtcaggtgcagccccctcccagccaggaagcaacacctctgcagcaggagaaattactgccagctcagctccctgccgaaaaggaagtcggtcctcctctgccacaggaagctgtgccccttcagaaagaactgcctagtctacagcacccaaacgagcagaaagaggggactccagctccatttggtgatcagtcccacccagaacccgaatcttggaatgccgcccaacattgtcaacaggacaggtcccagggtggttggggacaccgattggatggcttcccccctgggcggccctcgccagataacttgaatcaaatttgtcttccaaaccggcagcacgtggtctacggcccctggaatttgccccagtccagttattcccacttgacccgtcaaggtgaaacactcaactttcttgagatcggctactccaggtgctgtcattgcagatcccacacaaacaggcttgagtgcgcaaagctcgtgtgggaagatactctagacaagtactgcgaccgagagtatgccgtaaaaactcaccaccatctgtgttgtcgccatccgccaagccctaccagagatgaatgttttgccagacgggctccatatcctaattacgatcgggacatcctgactattgatatcggcagagtcaccccaaatctcatgggacatctgtgcggcaaccaacgggtgctcacaaaacataaacacatccccgggctgattcacaacatgacagcacggtgttgtgacctgcctttcccggagcaagcctgttgcgcagaagaagagaagctgacttttattaatgacctctgcggccctagaaggaacatttggcgcgatcctgccctgtgttgttatctgagccccggagatgagcaggttaactgtttcaacataaattatctgaggaacgtggccctggtgtccggagacactgagaacgctaagggccagggagagcagggcagcaccggcggcactaacatctcatctacatcagagcccaaagaggaatag

SEQ ID NO: 187268 - DNA, 1623 bp, synthetic construct
  misc_feature 1..1623: note = Description of Artificial Sequence: Synthetic coding sequence
  source 1..1623: mol_type = other DNA
atgggcaccaccgcccgggccgccctggtgctgacctacctggccgtggctagcgccgcgtctgaaggcggcttcacggccacaggtcaacgccaactgcgaccggagcactttcaagaagttggctatgccgcccccccttctccaccactgtctagatccttacctatggaccatccagacagctcccagcacggacctccctttgagggtcaatcccaggtccagcccccgccatcacaggaagccaccccgctgcagcaagaaaagctgctacctgcccaactgcccgccgagaaagaagtgggccctccactccctcaggaagctgttccgcttcagaaggaactgccgtccctccagcatcctaacgaacaaaaggagggcactcccgctccctttggagaccaaagtcatcccgaaccggaatcttggaacgccgctcaacattgtcagcaggatcgcagccagggggggtggggtcatcgtctcgatggattccctcctggacggcctagccctgacaaccttaaccagatttgcctgccaaacagacaacacgtggtttacggtccatggaacctgccccagagctcatattcccatctgacaaggcaaggagaaaccttgaattttctggagattggctactctaggtgctgtcactgccggtcccacactaacaggctggaatgtgctaaactggtgtgggaagaggcaatgtcgcgcttctgtgaagcggagtttagcgtgaaaacaaggccgcactggtgttgcacgcggcaaggcgaggcccgctttagctgcttccaggaggaggcaccccagcctcactatcaactccgagcgtgcccctctcatcaaccagatatctccagtgggctagagttacccttccctccaggcgttcccacactggataacatcaaaaatatctgtcacctacggcggtttagatccgtgccacgaaacctgccggcgaccgacccgcttcagcgggaattgctggcacttattcaactggagagagagttccagcgatgttgtagacaaggcaataaccacacctgtacgtggaaggcctgggaagacaccttggacaagtactgtgaccgagaatacgccgtaaaaactcatcatcacctctgttgccggcacccacccagccccacccgcgatgagtgcttcgcccggagggccccctaccctaactacgatcgggatatcttaacaattgatattgggcgagtgaccccaaatctcatgggccatttgtgcggtaaccaacgggtactgactaaacacaagcacatccccggactgatacacaacatgaccgcccgctgttgtgacctgccttttccggaacaagcttgctgtgcagaggaggagaaactgacctttataaacgacctttgcggtcctaggaggaacatatggcgagatccggctctctgttgttacctgagtcctggggatgagcaggtaaactgtttcaatatcaactatcttcgaaacgtggccctagtgagcggggacacagagaatgccaaggggcagggcgaacagggcagtacaggcgggactaatatttcatcgacaagtgagcctaaggaggagtag

SEQ ID NO: 187269 - DNA, 1704 bp, synthetic construct
  misc_feature 1..1704: note = Description of Artificial Sequence: Synthetic coding sequence
  source 1..1704: mol_type = other DNA
atgggcaccaccgcccgggccgccctggtgctgacctacctggccgtcgctagcgccgcatctgaaggcggttttactgcaacagggcagcgccagttgcggcctgaacacttccaggaagtgggctatgctgctcccccgagcccacccttgtccaggagtttgccaatggaccatccggactcatctcagcatggcccccccttcgaggggcaatcagggaaggaggggcgcggtcccagaccacattctcaaccatggctgggagaaagagtcgggtgcagtcacatcccaccatccattgtgcagcctccaccctcacaggaagcaacaccactgcagcaagagaagctgctgcctgctcagctccctgccgagaaagaggtcggccccccactgccccaggaagctgttccattgcaaaaggaactccctagcctccagcacccgaacgaacagaaggagggaacccctgcgccttttggcgaccagtcccacccggagcccgagagttggaatgcagcccagcattgccagcaagaccgatcccagggggggtgggggcataggctggatggctttccaccaggccgaccttcacccgataacttgaatcagatctgcctgcctaataggcagcatgttgtgtacgggccatggaaccttccgcagtcaagttatagtcatcttacacgccagggggagaccctgaacttcttggagatcgggtattcccgctgctgtcattgcaggtcgcacactaatcgccttgaatgcgctaagctggtgtgggaagaggccatgtccagattttgtgaagcagagtttagcgtgaaaacaagaccccattggtgctgtacccgacaaggggaggctagatttagttgttttcaggaggaagccccacagccccattatcagttgcgggcgtgcccctcacaccagccagacatcagttccggcttggaactcccgtttcctcctggggtgcccacccttgataacatcaaaaacatctgccacttaagacggtttagaagcgtgccgaggaacctgcctgctactgacccactccagagggagttgctggctctgatacagttagagcgggagttccagcgctgctgtcgtcagggaaataaccatacatgtacctggaaggcgtgggaggatacacttgacaaatactgcgatcgcgagtacgccgtgaagacacatcaccatctatgctgtaggcaccctcctagccccaccagggacgaatgtttcgctagaagggcaccctatccgaactacgaccgggacattctgaccatcgacatcggccgggtcacccccaacctgatgggacatctatgtggaaaccaacgggtgctcactaagcataagcacatcccgggcctgatacataatatgacagcccgatgttgcgacctgcctttcccagagcaagcatgttgcgctgaggaggagaagctaacttttatcaatgatctctgcggccctagacgaaacatctggcgggacccagcgctgtgttgctacctctctcccggggatgagcaggtcaattgttttaacattaactatcttagaaatgtcgcattagtgagcggcgacaccgaaaacgcgaagggacaaggcgagcaggggagcaccggtggcacaaacatctcaagtacatcggagcccaaagaggagtag

SEQ ID NO: 187270 - DNA, 2100 bp, synthetic construct
  misc_feature 1..2100: note = Description of Artificial Sequence: Synthetic coding sequence
  source 1..2100: mol_type = other DNA
atgaagatcgccgtgctgttctgcttcttcctgctgatcatcttccagactgacttcggaaagaatgaagagatacctcgcaaacaacggagaaaaatctaccacaggcggctcaggaaatccagcaccagtcataagcaccgatcgaaccgacagctgggtatccagcagaccacggtttttacccccgtcgcacggttgccaatcgtgaacttcgattattccatggaagaaaagttcgaatcctttagctctttccccggcgtcgaaagctcgtacaatgttctgcctgggaaaaagggccattgtctcgtcaagggcataaccatgtacaacaaggcagtctggagcccagaaccctgcaccacttgtctgtgttccgatggacgcgttttatgcgacgagactatgtgccatcctcaacgatgccctcagaccgtgataccagaaggagaatgctgccccgtctgcagcgccacagtctcttactccctcttatctggtatcgccttaaacgacagaaatgaattctcaggagactcgagcgagcaaagagaacccacaaacctgctacacaagcagttacctccacctcaggtgggtatggaccgaatcgtgcggaaagaggcacttcaaagtgaagaggacgaagaagtgaaggaggaggacacggagcagaagagggagacgcctgaatctaggaatcaagggcagctgtactcagaaggggactcccgcggtggtgacaggaagcagcggcccggagaagaaaggcggctggcccaccagcagcagagacagggaagggaggaggaggaggacgaagaggaggaaggggaggagggggaggaagatgaagaagatgaggaggacccagttcgcggagatatgtttaggatgccctcccggagtcctctgcctgcgccaccaagagggaccttgagactaccatccggctgtagcctatcttaccgaaccatcagctgcattaacgcaatgttaactcaaatccctccactaaccgcaccccaaatcactagtctggagttgacaggtaatagtatcgctagcatccctgatgaggcatttaacggcctgccaaatctggagcggctcgacctgtcaaagaataacataacctcgtctggcatcggtcctaaggctttcaagctgctgaaaaaactgatgcgcctgaatatggatggcaataatctgattcagatcccttcccagctgccttctaccttagaagaactgaaggtaaatgaaaacaatcttcaggccattgacgaggaatccttgtcggacctaaaccagctggttacccttgagttggaaggcaacaatctctctgaggccaatgtcaaccctctggcgttcaagccactgaagagcctggcatacctcagattgggcaagaataaattccggataatccctcagggcttacccggcagtatcgaagagctttacctggagaacaaccagatcgaggagattactgagatctgttttaatcacacccgaaagatcaacgtcattgtgctgcgctacaacaagatagaagagaatcggattgcgcccctggcatggattaatcaggagaacctcgaaagcatcgacctctcctacaataaactgtatcacgtgcctagctacctgccgaagtctctactgcacctggtcctgctggggaatcaaatcgagcgcatcccaggttacgtctttggacatatggagcctggcttagaatatttgtacctttccttcaacaagctcgcagatgacggcatggaccgagtgagcttttatggggcctaccatagccttagagaattattcttagatcacaatgacctcaaaagtatcccaccgggcatccaggaaatgaaagctttgcactttctccgcttgaataataacaagattcgtaatatcctgcctgaagagatatgtaatgccgaggaggatgatgattccaatctggagcatctgcatttagaaaacaattacatcaaaatccgcgagataccaagttacactttttcctgtattagatcttactctagcatagtgctgaaaccgcagaatatcaagtag

SEQ ID NO: 187271 - DNA, 495 bp, synthetic construct
  misc_feature 1..495: note = Description of Artificial Sequence: Synthetic coding sequence
  source 1..495: mol_type = other DNA
atgaagatcgccgtgctgttctgcttcttcctgctgatcatcttccagacagatttcggtaaaaacgaagagattcctcgcaagcagaggaggaagatctatcatcgtagattacgcaagtcaagcacctcgcacaaacatcgatcaaatcggcagctgggaatccagcaaaccaccgtctttacccctgtcgcacgccttccgatcgtgaactttgactactccatggaagagaagtttgaaagcttttcttctttcccgggagttgaatcatcctacaatgtcttgccggggaaaaagggccattgtctagtcaagggtattaccatgtacaacaaggccgtgtggtcccctgaaccgtgtacaacatgtctttgcagcgacggaagagtgctatgtgacgagactatgtgccacccgcagagatgcccacagaccgtaatacccgaaggcgagtgttgtcccgtctgttcagcaactgggacagagatttag

SEQ ID NO: 187272 - DNA, 483 bp, synthetic construct
  misc_feature 1..483: note = Description of Artificial Sequence: Synthetic coding sequence
  source 1..483: mol_type = other DNA
atgaagatcgccgtgctgttctgcttcttcctgctgatcatcttccagacagactttggaaagaacgaagaaatacccaggaaacagcggcgcaagatctaccaccgccggctgcgcaagagtagtaccagccacaagcaccggtccaacaggcagttgggaattcagcagaccaccgtgtttacaccagtggctaggctgccaatcgtgaactttgattattccatggaggagaaatttgaatcattttccagctttccaggcgttgagtcatcctacaacgtgctccctgggaagaaaggtcactgtttagtgaaaggcataacaatgtataacaaagctgtctggtcaccggagccatgcacaacttgtctttgtagtgacggcagagtgctttgtgacgagaccatgtgccaccctcaacgatgtccgcaaacggtcatccctgagggagagtgctgtccagtctgcagcgcaacctag

SEQ ID NO: 187273 - DNA, 1932 bp, synthetic construct
  misc_feature 1..1932: note = Description of Artificial Sequence: Synthetic coding sequence
  source 1..1932: mol_type = other DNA
atgaagatcgccgtgctgttctgcttcttcctgctgatcatcttccagaccgattttgggaagaatgaagagataccccggaagcaacggcggaagatctaccatcgaaggctgcggaagtccagcacttcccacaaacaccggtccaacaggcagttgggtatccaacaaactaccgttttcacacccgtagctagactgcctatcgttaatttcgactactctatggaagaaaaattcgagagcttttcttccttcccgggcgtcgagagttcgtataatgttcttccgggcaaaaaagggcattgtctagtgaaaggaattaccatgtacaacaaggctgtgtggtcacctgaaccatgcacaacttgcctgtgcagcgacggccgggtcctgtgtgatgagacaatgtgccacccccaaagatgccctcagacagtcattccagagggcgaatgctgcccggtttgtagcgctaccgagcagagggaacctacaaacctgcttcacaaacagcttccccctccacaggtgggtatggatcgcatcgttagaaaggaggccctgcagtcggaggaggatgaagaagtgaaagaggaagataccgaacagaaacgtgaaacaccagaatcacgtaatcagggtcaactgtattccgagggcgactctagagggggcgataggaaacagaggccaggagaagagagacggctggcacaccagcagcagcggcagggacgcgaggaagaggaagacgaggaggaagaaggcgaggagggcgaagaagatgaagaggacgaagaggacccagttcgtggggatatgttccgcatgccatccagatctcctcttcctgctcccccacgcgggacactgcgactgcctagtggttgctctctcagctatagaacaatctcatgcattaacgccatgcttacccaaatcccccctctgacagcgccacagatcacctcccttgagctgactggtaactccattgcctccattcccgatgaggcattcaacgggcttcccaatctggaacgattagacctgtccaaaaataatatcacctccagtggcattggacccaaggcttttaagctcctaaaaaagcttatgcgacttaacatggatggtaacaatctcattcagataccctcacagctcccttcaaccttggaggagctgaaggtgaacgagaataatctgcaggcaatcgacgaagaaagcctgtctgacctcaatcagctggtaaccctggagcttgaaggaaacaacttgagcgaggctaatgtgaaccccctggcctttaaaccactgaaaagcctggcctacctcaggctgggtaaaaataagttcagaatcatcccacaggggctacccggctcaatagaggagctgtacttagaaaataatcagatagaggaaatcacagaaatttgtttcaaccacacgagaaagattaacgtgatcgtcctgcgttacaataaaattgaggaaaacaggatcgccccactggcctggatcaaccaggagaatcttgaatccattgatttgtcatataacaaactctatcatgtcccaagttacttaccaaaatccctgctgcatttggtgttactcgggaaccagatagagaggattccgggctatgtgtttggccatatggagcctggcctagaatatctctatctttcattcaacaagcttgcagacgacgggatggaccgcgtgagtttctacggagcctatcacagtctgcgcgaacttttcctggaccacaacgacctgaagtcgattccacccggaatccaagagatgaaagccctgcatttccttaggctcaacaacaataaaataaggtgcgtttcagacgccgtgctcgagactgtcaccaataggtcagacgtcgcgtttcccctctggtag

SEQ ID NO: 187274 - DNA, 1779 bp, synthetic construct
  misc_feature 1..1779: note = Description of Artificial Sequence: Synthetic coding sequence
  source 1..1779: mol_type = other DNA
atggagatgcaggacctgaccagcccccacagccggctgagcggctcatccgaaagccccagcggtcctaagttaggcaatagccacatcaattccaattctatgaccccgaacggaacggaggtgaagaccgaacccatgtcatccagtgagaccgcctcaactaccgcagacgggagtcttaacaatttctccggcagtgctattggctctagtagcttctcaccgaggcctacccatcagttcagccccccccagatctacccaagcaatagaccgtacccccacatcctgcctacaccttcatctcagactatggccgcatatggtcagacccagttcaccacagggatgcagcaggcgacggcgtacgctacgtatccacagccagggcagccttatggcatctcttcatacggggcactctgggccggcatcaaaactgaaggtggtctgagccagtcccagtctccaggccagacaggattcctcagttacggcaccagctttagtaccccgcagcccgggcaggccccctactcataccagatgcagggatcttcctttactacctcctccggcatctacacaggcaacaactccttaaccaacagtagcgggttcaacagcagccagcaagactatccaagctacccttcctttggccaaggacagtatgcccagtactacaacagtagtccgtaccccgctcattacatgacgagttccaacaccagtcctaccactccaagtaccaatgcgacgtatcagttacaggagccaccttctgggattacctctcaagccgtgaccgatcccacagccgaatactccaccatacattcaccctcaacaccaattaaggactctgattctgatagattacggcgcggctccgatggtaagtcacgcgggagaggccggagaaataacaatccatcaccgccccccgactccgaccttgaacgcgtctttatctgggatctagacgagaccatcatcgtgttccattctctcctaactggaagctacgcgaatagatacggcagagatccccctacatcagtctctctggggctcagaatggaggagatgatcttcaatctcgccgatactcatttgttttttaatgacttggaagaatgtgatcaggttcacattgacgacgtctcaagcgatgacaacggccaggacctgagtacatataattttggcacagacggttttccagctgccgccacatcggctaatctgtgcctggccacgggagttcgtggaggggtggattggatgaggaagctcgcttttcgatacaggcgcgttaaggagatttataatacatacaagaacaacgtgggcgggctgctgggcccagctaaaagggaggcttggcttcagttgagggctgaaattgaggcactgaccgactcttggctgacactggccctgaaggccctgtccctgattcattcgcgcactaattgcgtgaacattctggtcacaacaactcagttgatacctgccttggccaaggttttactgtatgggctcggcatcgtgttcccaattgagaatatatatagtgccacaaaaatcgggaaggagtcctgcttcgagcgaatcattcaaaggttcggacgcaaagtggtgtacgtggtgatcggagacggtgttgaagaggaacagggcgccaagaaacacgcaatgcccttttggagaatctccagccattccgacttgatggctctgcaccatgcattggagttagagtatctgtag

SEQ ID NO: 187275 - DNA, 1680 bp, synthetic construct
  misc_feature 1..1680: note = Description of Artificial Sequence: Synthetic coding sequence
  source 1..1680: mol_type = other DNA
atgctgctgttcccccaggtggccgtgaagaccgagcccatgagcagtagtgaaacagccagcaccaccgcagacggaagtctgaataacttctccgggtcagccatcggcagttcctccttttcgcctagaccaactcatcagttcagccctcctcagatttaccctagcaacagaccgtacccgcatattcttccaacaccaagcagtcagactatggctgcttatggacagactcagttcacaactggaatgcagcaggccaccgcttacgcaacctatccccagcctggtcaaccctacgggataagttcttatggggctttgtgggccgggatcaagacagaaggggggttgtcgcaatcccagtcgccaggtcagactggattcctcagctatgggacgagctttagtacaccgcagcctgggcaggccccatactcgtatcaaatgcagggcagctcttttactacctccagtggcatttataccgggaacaatagcctgacgaacagctctggtttcaattcctcacagcaggattacccatcttacccaagtttcggacaaggtcagtatgcgcagtattacaattctagcccgtatccagcccactatatgacctccagcaacacctcacctacaaccccctcaaccaacgctacatatcagctgcaggagccaccatctggtatcacatctcaggcagtgactgaccccactgcagagtactctaccattcacagcccttccacgccaattaaggatagtgattccgacaggcttcgacggggatcagacgggaaaagcagagggaggggcaggaggaacaacaaccccagtcctcctcctgattccgatctggaacgggtgtttatttgggatctggacgagaccatcatcgtgttccactccctcttaactggaagttacgcgaatcgatacggcagggatccccctaccagcgtcagtctgggactcaggatggaagagatgatattcaatttggctgatactcacctgttcttcaacgatttggaagaatgtgatcaggtgcacatcgatgatgtaagttctgatgacaatggacaggatctttctacatataactttggaacagacggatttcctgcagccgcaacctcagcaaacctctgtctcgcaacgggtgtccggggtggggtcgactggatgagaaaactcgcttttcgttaccgacgagttaaggagatttacaacacatacaagaacaacgtggggggcctcctgggccccgctaagcgtgaagcgtggctgcagttgcgtgctgagattgaggctctcaccgactcatggctaacgttggctcttaaggctctgagcctgatccatagccgcaccaactgtgtcaacattctggtcacaaccacgcagcttattcccgccttagcgaaagtacttctctacggccttggcattgtcttccccatcgagaacatctacagcgctaccaagatcggtaaagaatcatgtttcgagcgcattatacagcggtttgggaggaaagtcgtttatgtcgttattggcgatggggtggaagaagagcagggagcgaagaagcacgcaatgcccttctggagaatcagcagccacagcgatctgatggcactgcaccatgccctggaactggaatacctgtag

SEQ ID NO: 187276 - DNA, 1779 bp, synthetic construct
  misc_feature 1..1779: note = Description of Artificial Sequence: Synthetic coding sequence
  source 1..1779: mol_type = other DNA
atggagatgcaggacctgaccagcccccacagccggctgagcggctcttcggaatcccccagtggacctaagttgggcaactctcacataaattctaactcgatgacccctaacggcacagaggtaaagacagagcccatgtctagttctgaaaccgcatcgaccaccgccgatggatcactgaataatttttcggggagtgcgatcggatcatcatctttcagccctaggcctactcatcagttttctcctccccagatttatccctctaaccgaccttacccacatatccttccgacacccagttctcagaccatggctgcttatggccagactcagttcactaccggaatgcagcaggcgaccgcctatgctacctacccacaaccaggacagccatatggcatttcatcatatggcgccctgtgggcaggaatcaaaaccgagggcggactcagccaatcccagtcgcctgggcagactggtttcctgagctacgggactagcttttccacgccccagcccgggcaggccccctatagctaccagatgcaaggcagcagcttcactacgagcagcggaatttacaccggcaacaattccctcaccaacagctccggtttcaattcttcccagcaggattacccctcttacccgtccttcggccaggggcagtacgcgcagtattataactccagcccctaccctgcccactacatgacatcttccaatacatctccaacgacacctagtaccaatgcgacttaccagttacaggaacctccctccggtataaccagccaagccgtgactgacccaactgccgagtactcgacaatccacagcccaagtaccccaatcaaggactcagatagtgacaggctgcgtagaggaagtgatgggaagagccgtggaagggggcgccggaataacaacccctcaccacctccagatagcgaccttgagcgggtgtttatctgggacctagatgaaactatcattgtgtttcactccttactcaccgggagttatgccaaccggtacgggagggatcctccaacgagtgtgtcactcggtctgagaatggaggagatgatttttaacctggccgatacacacctgttttttaatgacttggaggaatgtgaccaggtacacatcgacgatgtgagtagcgatgataatggtcaggatttatctacatacaatttcggaacggacggctttcccgccgctgccacatcagccaacttgtgtcttgctaccggggtgcgcgggggagttgattggatgaggaaacttgcatttcggtaccgcagagtgaaagaaatatacaatacttacaagaacaatgtcggaggcctcctggggcctgcaaagagagaggcatggctgcaactgcgagcagagattgaagctttaactgacagctggcttactctcgcacttaaggcattgtccttgatccattctaggacgaattgtgttaacattctggtgaccacaacacagctgatccccgcccttgcaaaggttctgctctatggactggggatcgtgttccctattgaaaacatctactcggccacaaaaatcggcaaggagtcgtgctttgagagaatcattcagcggtttggacgcaaggtggtttacgtggtgattggcgacggagtggaagaggaacagggagcaaaaaaacacgcaatgcccttttggcgtattagctcgcattctgacctgatggcactgcatcatgcactcgagctagaatacctttag

SEQ ID NO: 187277 - DNA, 1683 bp, synthetic construct
  misc_feature 1..1683: note = Description of Artificial Sequence: Synthetic coding sequence
  source 1..1683: mol_type = other DNA
atgctgatgatctacgtgcagctggtggtgaagaccgagcccatgagctcatctgagaccgcatccacaaccgcagatggttcacttaacaacttcagcggatctgctataggaagctctagtttttcccccaggccaacccatcagttttctcctccccagatctacccgtctaaccgaccttacccgcatattcttcctaccccaagcagtcagaccatggctgcctacggccagacacagtttactacagggatgcagcaggctacagcctacgcaacttatccacagccaggccagccgtacggcatcagttcctatggcgcactgtgggcgggaatcaagaccgaaggtggtctgagccagagtcagagcccggggcaaacaggcttcctgagttatggcacttctttcagcacacctcagcctggccaagccccatactcataccagatgcaaggctctagttttacaacgtctagcggcatttatacaggaaataattcgctgactaatagtagtggctttaatagtagccagcaagactatccatcctacccttcttttgggcagggccagtacgcacagtattataacagtagcccttatccagctcactacatgactagctctaacacctcccccacaacgcccagcaccaatgctacctaccaactccaggagcctcccagtgggatcactagccaggccgtcacagaccccaccgctgaatactccacgatccacagtccttcaactcctatcaaggactcggacagcgaccgccttaggcggggatcagatggaaagtctaggggaagagggcgcaggaataacaatccctccccgcctccagactcagaccttgagagggtgtttatttgggacctcgatgaaactataatcgtgtttcatagtctgctgacaggatcctatgcaaatagatacggtcgggatccacccacatccgtttccctcggactgagaatggaagagatgatcttcaatttggccgatacccacctgttttttaacgacttggaggaatgtgatcaggtgcacatagacgacgtgagcagcgatgataacggccaggacctgtcaacctacaacttcgggaccgatggattcccggctgctgcaacttccgctaacctttgcttggctaccggagtcagggggggggtggactggatgagaaagttggccttcagataccgccgggtgaaggagatctacaatacatacaagaacaatgtggggggtctgctgggtcccgctaaaagagaagcctggcttcaattaagggccgagatcgaagcactcacagattcctggctgacattggccctgaaagccctctcactgatacattcccgcacaaattgtgtgaatatcctcgtcaccacaacgcagctaattcccgccctggctaaggtgctgctctatggactgggcatcgtgtttcctattgagaatatttatagtgccaccaaaataggcaaagagtcgtgttttgagaggattatacagcgcttcggcagaaaagttgtctacgtagtcatcggggatggggtagaggaggagcagggagccaagaaacacgccatgccattctggcggatctccagtcacagtgatctaatggctctgcaccatgccctcgagttagagtacctgtag

SEQ ID NO: 187278 - DNA, 1674 bp, synthetic construct
  misc_feature 1..1674: note = Description of Artificial Sequence: Synthetic coding sequence
  source 1..1674: mol_type = other DNA
atggagatgcaggacctgaccagcccccacagccggctgagcggcagcagtgagtcaccaagtggtcctaagctcggcaacagccacatcaactccaattcaatgactcctaatggcaccgaggttaaaactgaacccatgagtagctctgaaacagccagtacgaccgccgacggcagcttgaacaactttagtgggtcagctattggatcatctagtttttcccctaggcccacacaccaatttagtccccctcagatatacccatctaacagaccttatccgcatatccttcctaccccgtcgtcacagaccatggcagcttacggccagacacagtttaccaccggaatgcagcaggctaccgcttatgcaacctatcctcagcccggccagccatatgggattagcagctatggcatcaagactgaaggtgggctgtcacagagccagtcccccggccaaactggcttccttagttatggaacatcgttctccacaccccagcctggacaggccccgtatagttatcaaatgcagggctcgagtttcaccacttcctctggcatttatacaggtaataacagtctgaccaactcatccggtttcaattccagccagcaggactaccctagctaccccagcttcggccagggacagtatgctcagtactacaatagctctccataccctgcacattacatgaccagttccaacacatctcctactacaccatctaccaacgctacatatcagctgcaagagcctccctctggcattacctcacaggcagtgacagatcccacggctgagtacagcaccatccatagtccatcaacgcctataaaggattcagattcagacaggctaaggagagggtccgacggcaagtcaagggggaggggaaggagaaataataacccttcccccccccccgactccgatttagaaagagtgtttatctgggatttagacgagactatcatcgttttccacagcctcctcacaggaagctacgccaaccgatatggacgggagtgtgatcaggtgcacattgacgacgtgagctcagacgacaacgggcaggatttgagcacatacaattttggaacagatggcttcccagccgctgccacttctgctaacttatgtctggcaaccggggtgcgcggtggagtggactggatgagaaagctagcttttcggtataggagggttaaggagatttacaatacctataagaacaacgtgggcggtcttctggggccggcaaaacgtgaagcgtggctacagctccgtgctgaaatcgaggcacttaccgattcttggttgaccctggcactaaaggcccttagcctcatccacagtcgtacaaattgtgtcaatatactcgtgacaactacacagctgatccccgctctggccaaggtgctgttatatggccttggcattgtttttccaattgaaaacatctattccgcgactaagattgggaaggagtcctgcttcgaaaggatcattcagcggttcggccgcaaagttgtttacgtcgtcattggcgatggagtcgaggaggagcaaggggcaaaaaaacatgccatgcccttctggaggatctcaagccactctgatctgatggccctccaccacgcactagagttggagtacctgtag

SEQ ID NO: 187279 - DNA, 1527 bp, synthetic construct
  misc_feature 1..1527: note = Description of Artificial Sequence: Synthetic coding sequence
  source 1..1527: mol_type = other DNA
atggtggagctggtgatcagccccagcctgaccgtgaacagcgactgtttggacaagcttaaatttaaccgagcagatgccgctgtttggactcttagcgataggcaaggaattactaaatctgcccccttgcgagtgagccaactgttttcacgtagttgcccaagggtgctcccacgccaacccagcactgctatggcagcatacggccagacgcagtacagcgccggcatccagcaggccactccatacacagcgtatcctccccccgcccaagcatatggaatcccttcttatagtataaagaccgaagatagcctgaaccactccccaggacaaagcggatttctctcatacggatcttccttttctactagtccaacggggcagtctccgtacacgtatcagatgcatgggacgaccggcttctatcaaggtggcaacggattaggcaacgccgctggcttcggatcagtccaccaggattatccttcttatccgggcttccctcaatcgcagtatcctcaatactatggatctagttacaatcctccctatgtgcccgctagctccatatgtcccagtcctttgagcactagtacttacgtgcttcaggaggcctcacacaacgtacccaatcaatctagtgaaagcctggcgggcgaatataacactcataatggccctagcaccccggcaaaggaaggggacacagaccgtcctcatcgggcctccgatggcaagcttaggggtagaagcaaaagatcgagcgacccctctcccgccggggacaacgagatcgagcgcgtgttcgtgtgggatctggacgagacaattataatcttccatagtcttcttacaggaacgttcgcctcccggtatggaaaagactgcgaccaaatacacgtggatgacgtctcgagtgacgacaatggtcaagacctgagtacttataatttttctgccgacggattccacagctcagcccccggcgctaacctgtgcctcggcagcggggtgcatggaggggtggattggatgagaaagcttgcattcagatatagacgtgttaaagagatgtataacacttacaaaaataacgtgggcggcctcatcggcacacccaagagggaaacatggctgcagctgagagccgagctagaagcccttactgacctatggttgactcacagtttaaaggcgttgaacctgatcaatagtcgcccaaactgtgtgaacgtgttggtaaccacaacgcagctgatccccgcattagccaaggtcctgctgtatggactgggctccgtgttccccatcgaaaatatctactcggcaactaaaacaggcaaggaaagctgcttcgagcgcatcatgcagcgctttggccgtaaagccgtttacgtggtgattggagacggtgtagaggaggaacagggtgccaagaagcataatatgcctttttggcggatttcatgccatgcagatctggaagccctgaggcatgcattggagctggaatacctgtag

SEQ ID NO: 187280 - DNA, 1617 bp, synthetic construct
  misc_feature 1..1617: note = Description of Artificial Sequence: Synthetic coding sequence
  source 1..1617: mol_type = other DNA
atggtggagctggtgatcagccccagcctgaccgtgaacagcgactgtctcgataagctgaaattcaacagggctgatgccgccgtatggactctcagtgatcgacaggggatcactaagtctgcgcccctgcgggtgtctcagttgttcagtagatcatgtccaagagtcctgccacggcagccatcaactgctatggccgcatacggccagacacaatatagcgcggggatccaacaagccaccccgtacacggcctacccaccaccagcccaggcctatgggatcccctcctacagcatcaaaaccgaggattcactcaaccacagcccaggccagtctggcttcctgagctatggatcttccttcagcacatcgcccaccgggcagtccccttatacctaccaaatgcacggaaccactggcttctatcaggggggcaacgggctaggcaatgccgctggcttcgggagtgtacaccaggattaccctagttacccggggttccctcagtcacagtatccccagtattatgggtcaagttacaaccctccatacgtccctgcctcctcgatctgtccaagtcctctgagcacctccacctacgtgctccaggaggcatcacacaacgtcccaaaccaaagttctgagtccctggctggagagtataatacacacaacggaccatccacgcccgcaaaagagggagataccgataggccccaccgcgctagtgatgggaagctgagaggcaggagcaaaagaagctctgatccctccccagcaggagacaatgagatcgaaagagttttcgtgtgggacctggatgagactatcattatattccatagcctgctgaccggaactttcgcctcccgttacggcaaagatacaaccactagcgtgagaatcggcctgatgatggaagagatgatcttcaatttggcagacacccacctgttctttaatgatcttgaagattgcgatcagatccacgtcgatgacgtaagttcagatgacaacggacaggacctgtctacatacaacttcagcgctgatggattccactctagtgcacctggagccaacctgtgccttggctcaggcgtgcacgggggtgtggattggatgcgcaagctggctttccggtatagacgcgtgaaagaaatgtacaacacttataaaaacaacgtgggaggcctgatcgggaccccaaaaagagaaacatggctacagctccgagcggaattagaggcattgaccgatctgtggctgacacactccttaaaggccctcaaccttatcaattctcggcctaattgcgttaacgtcctcgtgacgaccacgcaactgatccccgcattggctaaagtgctgttatatggcctcggaagcgtgtttccgatcgagaatatatattccgccacgaaaacgggaaaggagtcatgcttcgagcgaattatgcagcggtttggacggaaagctgtttacgttgttatcggcgacggcgtggaggaggagcaaggcgcaaaaaagcataatatgccattctggaggatctcatgccacgctgatctggaggcgctgagacatgccctcgaactggagtatctttag

SEQ ID NO: 187281 - DNA, 1380 bp, synthetic construct
  misc_feature 1..1380: note = Description of Artificial Sequence: Synthetic coding sequence
  source 1..1380: mol_type = other DNA
atggtggagctggtgatcagccccagcctgaccgtgaacagcgactgtctcgataaattaaagttcaacagggcagacgctgccgtgtggacactgtctgacaggcaagggattaccaagtccgcccctctgagagtctctcagttgttcagtcgaagttgtccacgcgtacttccacggcaaccatcaactgctatggctgcctatggtcagacgcagtattccgccgggatccagcaggctacgccttatactgcataccctcccccagcgcaggcttatggcatcccatcatacagcatcaaaaccgaggactccctgaatcatagtccgggccagtccgggttcctgtcctacgggagttctttctcaaccagcccgaccggacagtcaccctatacctaccagatgcacgggacaactggcttctatcaggggggaaatgggctggggaatgcagccgggttcggctccgttcatcaggactatccgtcttatccgggcttcccgcagtcacaatacccacaatattacggtagctcttacaatcccccatacgtgccagcaagctccatttgtcccagcccgctcagtacgagtacctacgtgttgcaagaggccagccacaatgttccaaatcagtcgtcagagtctctcgcgggagagtataacacacacaatggacccagcactcctgccaaagagggcgataccgacaggccacatagggctagtgatgggaagctgagggggcgaagcaagcgttcctctgacccctcaccggctggtgataacgaaatcgagcgcgtgttcgtttgggatctagatgaaacaatcataatctttcactccctgttaacggggacattcgcttctaggtacggaaaagataccactactagcgtgaggatcggattaatgatggaagagatgatctttaatctggcagatacccacctgttctttaacgacctggaagactgtgaccagattcacgtggacgatgtatcttccgatgacaatgggcaggacctttcaacgtacaacttttcagctgacggttttcacagctctgccccaggggccaacctgtgtctcgggtccggagtacatggcggcgtggattggatgcgtaagctcgcttttcggtacagacgtgtcaaagagatgtacaatacctacaagaacaacgttggaggcaaagagtcctgtttcgagcgtattatgcagcgctttggacgcaaagccgtctacgtcgttataggggatggggtggaagaagaacagggcgccaagaaacacaacatgcccttttggagaatttcatgtcatgcagaccttgaggctctgcgccatgccctcgaactggagtacttatag

SEQ ID NO: 187282 - DNA, 1527 bp, synthetic construct
  misc_feature 1..1527: note = Description of Artificial Sequence: Synthetic coding sequence
  source 1..1527: mol_type = other DNA
atggtggagctggtgatcagccccagcctgaccgtgaacagcgactgcttagataaacttaaattcaacagggctgacgcagccgtatggacactttccgatcgacaaggaatcacaaaaagtgcccctctgcgtgtgtcacaactatttagccgcagttgtccccgggtcctccctaggcagccctccaccgccatggcagcttacgggcagacacagtattccgctggcatccagcaggccactccctatactgcttatccaccccctgcacaggcctatggaatcccttcctacagtataaagacagaggattcgctcaatcacagccctgggcaaagcggattcttgtcctacggtagcagtttttcaacttcaccaactgggcaatccccttacacttaccagatgcacggaaccacagggttctatcagggggggaatgggctcgggaacgctgctgggtttggctccgtgcaccaggactatccttcctatcccggattcccgcagtcccagtacccgcagtactatggtagttcttataacccgccttatgttccggcatccagcatatgtccaagccctttgtccacctcaacgtacgtcctgcaggaagccagccacaacgtcccaaatcagtccagcgaatctctggccggcgagtacaacacccacaacggtccctcaaccccagctaaggagggagataccgataggcctcaccgcgcttcagacggcaaactgcgaggacggagcaagagaagcagcgaccctagccccgccggagataacgagattgagcgcgtctttgtttgggaccttgatgaaactattatcatctttcatagtctgctgacaggaacttttgcatcacgatatggcaaagactgcgaccaaattcacgtggatgatgtgtcctcggacgacaatggccaggatctctcaacctataacttttctgccgacggatttcattcatccgcacccggcgcaaatctctgcctgggctcaggcgtgcacggtggtgtcgattggatgcgtaagctcgcctttcgctaccgccgggttaaagaaatgtacaacacgtataagaacaacgttggaggcttgattggtacaccaaagcgggaaacatggcttcaactgcgcgcggaactagaggctctgacagacctatggttaacccattccttgaaagctcttaatctgattaacagccgacaaaactgcgttaatgtcctggtgactacaacgcagttgattcccgccttagcgaaggtactactctatggccttgggtccgtgttcccaatagaaaatatctactctgctactaagaccgggaaagagtcatgctttgaacgaattatgcagagatttgggagaaaggctgtttatgttgttataggagacggcgtcgaggaggagcagggagccaaaaagcacaatatgcccttttggcgcatttcctgtcatgctgatcttgaagccctaagacatgctctggagttagaatacctctag

SEQ ID NO: 187283 - DNA, 1611 bp, synthetic construct
  misc_feature 1..1611: note = Description of Artificial Sequence: Synthetic coding sequence
  source 1..1611: mol_type = other DNA
atggaggaggagcaggacctgcccgagcagcccgtgaagaaggccaagatgcaggagagtggagagcagaccatcagtcaggtgtctaacccagatgtgtcagatcagaaacccgaaacatcgtctctggcgtctaacttgccgatgagcgaagagattatgacctgcacagactacattccccggagctcaaatgattatacaagccagatgtacagcgccaagccgtatgctcatattttgtctgtgccagtttctgagacagcctatccaggacaaacacagtaccagacactgcagcagacgcaaccctatgcggtatatccgcaagctacccaaacctacggtctgccccctttcgccagctccaccaacgctagcctcatttctacgtcgagcaccatcgcgaatatccccgccgccgctgtagccagcattagcaaccaggactatcctacttatactatcctgggacagaaccaatatcaggcctgctatccatcgtccagcttcggcgtgactggacagaccaatagcgacgccgaatccaccactctcgccgccacaacatatcagtccgagaaaccaagtgtaatggccccagcgccagcggctcagagactgagctcaggggacccctctacaagcccctcactgtcccagacaaccccaagtaaggatacagacgaccagagcaggaagaacatgacgagtaagaatagaggaaaaaggaaggctgacgctacctctagccaggatagcgagttggagagagttttcctgtgggatctagacgaaaccatcattatttttcactcactgttgacgggttcttatgcacaaaagtacgggaaagaccccaccgtggtcatcggcagcggtttgaccatggaagagatgatcttcgaagtggccgacacccacctcttttttaacgaccttgaagaatgcgatcaggtgcatgtcgaggatgtggcgtcggatgacaacggtcaagacctgagcaactactcgtttagtacggacggtttctctggatccggtggatccgggtcacacggaagcagcgtgggggtccaggggggcgtggactggatgaggaagctcgcttttcgctatcggaaagttcgggagatctacgataagcataaatctaacgtgggtgggctgctttcaccacaacgcaaggaggcactgcagcggctgcgggccgaaatagaggtcctgacggattcgtggttggggactgccctgaagagcttgctcctgatacagagtaggaaaaactgtgtcaacgtacttatcactacgacacagctggtgccagcactcgccaaggttctgttgtatggccttggcgaaatctttcctatcgaaaatatatactccgcaactaagataggaaaagaatcctgctttgagagaatcgtgtcccgatttggcaagaaggttacctacgtcgttatcggagatgggcgtgatgaggaaatagctgcgaaacaacaactctactttttagacatggaggcattgggctgtcagcttgaacccacagcactgatcctcttcatccagctctccgggaaccttagcaattacaataagctttag

SEQ ID NO: 187284 - DNA, 1251 bp, synthetic construct
  misc_feature 1..1251: note = Description of Artificial Sequence: Synthetic coding sequence
  source 1..1251: mol_type = other DNA
atgatcatcccccacaagtgcatcctgcagaccagcagcaccaacgcttctttaatcagcaccagttccacaatcgccaacatcccagctgctgcagtggcctcaatttcaaatcaggattatccgacatacacaatcctgggccagaaccaataccaagcgtgttaccctagttcttcattcggggttaccggccagacgaacagcgatgcagaaagtaccaccttggcggccactacgtatcagtcggagaaaccaagtgttatggctcctgcccctgcggcccagcgcctgtcctcagacccgtccactagccccagtttgtcacaaactactcccagcaaggacacagatgatcagagtaggaagaacatgacctctaagaacagagggaaacggaaagccgatgctacttcctcacaagatagcgagctggaacgcgtgtttctttgggacctggacgagacaatcataatctttcacagcctacttaccggaagctatgctcagaaatatggcaaagatcccaccgtggtgatcgggtctgggctgacgatggaggagatgatctttgaagtggccgatactcacctgttcttcaatgatctggaagagtgtgaccaggttcacgtcgaagatgtcgcctcagacgataatgggcaggatctgagcaattatagcttttcaactgatgggttttccgggtctggtggttctggaagccacggaagttccgtgggagtgcaaggtggggtggattggatgcgaaagctggcattcagatatcgcaaggtacgtgaaatctacgataagcacaagtccaacgtgggtggattgctttcgccacagcgcaaagaggcattgcaaaggctcagggccgaaatagaagtactgacagattcctggctcggtactgcgctaaagagtctgctgctgatccagtcacggaagaactgcgtcaacgtgctgatcacaaccacccagttggtgcctgcattagccaaagtattgctgtatggactgggggaaatctttcccatagaaaatatttactctgcaacgaagattggcaaagaatcatgtttcgagagaatagtgtctcgcttcggaaagaaagtgacctatgtggtaatcggcgacgggagggacgaggagatcgcagcaaagcagcataatatgccattctggcgcattacaaaccacggggatctggtatctctgcatcaggcactagaattagacttcctgtag

SEQ ID NO: 187285 - DNA, 1722 bp, synthetic construct
  misc_feature 1..1722: note = Description of Artificial Sequence: Synthetic coding sequence
  source 1..1722: mol_type = other DNA
atggaggaggagcaggacctgcccgagcagcccgtgaagaaggccaagatgcaggagagcggagagcagaccatttctcaagtatccaacccagatgtctccgaccagaagccagagactagttctctagcctccaacctgcccatgagtgaggaaataatgacatgtaccgattatatccctaggagctctaacgattatacttcacaaatgtatagcgccaagccgtatgcccacattctgagcgtccctgtcagtgaaactgcatatcccgggcagacacaataccagacattgcagcagacccagccttacgctgtctatccgcaggccacccaaacctatggtcttccaccatttggtgccctgtggcccggcatgaagccggagtcaggactgatccagacaccctctcctagccagcactcagtgctcacttgcacgactggacttacaacttctcagccctccccagctcactactcttatcctattcaagcctcgagtactaatgcaagcctaatttcgacttcctctacgatagcgaacatccccgccgctgctgtggcttctatatctaaccaggactacccgacctacacgattctggggcagaaccaataccaggcttgctacccaagtagtagcttcggcgtcaccggtcagactaatagcgacgcagaaagcaccaccctggcagctaccacttaccagagtgaaaaaccatccgtcatggcacctgctcctgcagcccagcgcctctcttctggcgatcccagcacttccccttccctatcgcagactacgccctcgaaagacacagacgatcaaagtaggaaaaacatgacgtcgaagaataggggcaaaaggaaggccgacgccacctcaagccaggattctgagctcgagcgggtcttcctgtgggatctcgatgaaactatcatcattttccatagcctgctgactggcagttatgctcagaaatacggcaaggacccgaccgtggtcattggctcagggctgacgatggaagaaatgatctttgaagtcgccgacacccatctgtttttcaatgacttagaagagtgcgaccaggtccatgtggaagacgtggcgagcgatgataacggccaagacctaagcaattactcatttagtacagacggcttcagtggatccggggggtcaggaagtcacggctcctccgtgggcgttcaggggggagttgactggatgcgtaaactcgccttccgctataggaaggtgagggaaatttacgacaaacataagagtaacgttgggggcttgttaagcccccagagaaaggaagcactacagcgcctgcgggctgaaatcgaagtgttgaccgattcttggcttggcacagcattgaagtctcttctcctgatccaatcccgcaagaattgtgttaacgtgctcattacaaccacacaattggtgcccgctctagctaaggtgctgctttatggcctaggagagatctttcccattgagaatatctattccgccaccaagatcgggaaagagagctgtttcgagcgcattgtcagcagatttggaaagaaagtgacgtatgttgtgatcggcgacggcagagacgaggagatagctgctaagcagcacaatatgcccttctggcgcattactaaccacggggatcttgtctcactgcaccaagcactggagctggactttttatag

SEQ ID NO: 187286 - DNA, 1344 bp, synthetic construct
  misc_feature 1..1344: note = Description of Artificial Sequence: Synthetic coding sequence
  source 1..1344: mol_type = other DNA
atgaagcccgagagcggcctgatccagacccccagccccagccagcacagcgtgctcacttgtaccacaggtctcaccactagccaacccagccccgcgcattattcatacccgattcaggccagcagcacgaatgccagcttgattagcacctccagtaccattgctaacatccccgcagcagccgtcgcaagtatatctaaccaagactatcctacatatactatactggggcaaaatcagtaccaagcttgttaccctagttccagcttcggagtcacagggcagaccaattctgatgcagaatcaacaaccctagccgcaaccacctatcagtcagagaaacctagtgtcatggcccccgccccagcggctcaacggttgtctagtggggatcccagcacctcaccatctttgtctcagaccaccccatctaaagatacagatgaccagagccgtaaaaacatgacatcaaagaatcgcggcaaaagaaaagccgacgctacttcctcacaggactccgaactggagagagtcttcctgtgggacttggatgaaaccattataatttttcatagtcttttgactggttcctatgcacaaaagtacggtaaggatccgactgtggtgattggctccgggctaaccatggaagaaatgatcttcgaggttgctgacacacatctcttttttaacgatttggaagagtgtgatcaggttcacgttgaagatgtggcctccgatgataacgggcaagatcttagcaattattctttcagtacagatgggttcagcggctcagggggttctgggtctcatggaagctccgtgggtgtgcagggcggcgttgactggatgcgcaaacttgcattcagatacagaaaggtgcgtgagatctacgacaagcacaaatctaatgttggtggtcttttgtctcctcaacgtaaggaggccctgcaacggctgagggccgaaatcgaggtgttgacagactcttggctgggcactgcgctgaaaagtctcctgctcatccaatctcgcaagaattgtgtgaacgtcctgattactaccacccagctcgtacccgccctggccaaggtcctgttatacggactgggcgagatcttccctattgaaaacatttactctgcgacgaagatcggcaaggagtcatgttttgagcgcattgtcagtagattcggcaagaaggtgacctacgtggtgatcggtgatgggagagacgaggagatcgccgcaaaacagcacaatatgccgttttggagaatcaccaaccacggtgacctcgtaagtctccaccaggccttagaactggattttttatag

SEQ ID NO: 187287 - DNA, 1584 bp, synthetic construct
  misc_feature 1..1584: note = Description of Artificial Sequence: Synthetic coding sequence
  source 1..1584: mol_type = other DNA
atggaggaggagcaggacctgcccgagcagcccgtgaagaaggccaaaatgcaggagagtggggaacagacaatctcgcaggtgagtaaccccgatgtgtcagatcagaagccagaaacgagttcactggcttctaatctgccaatgtcagaggagattatgacctgcaccgattatattccaaggagtagtaacgactatacaagccagatgtactctgccaaaccttatgctcacattttgagtgttccagtcagcgagactgcttacccagggcagactcagtaccagaccctgcagcagacgcagccctacgccgtgtatcctcaggctacccagacgtacggcctgccccctttcgctagttcaacaaacgccagcctgatctcaaccagttcaacaatagctaacattcccgcggcagccgtggcctccatttcgaatcaagattaccccacgtacactatcttgggccagaaccagtaccaggcctgctatcccagcagtagcttcggtgtaacaggccaaaccaactccgacgccgagagtactacgctcgccgccacaacgtatcagagcgagaagccttcagtcatggcgcctgctcctgctgcgcaacgcctctcttccggcgatccctccactagtcctagcctgagccagaccactcccagtaaagacacagatgatcagtcgaggaagaacatgacctctaaaaaccggggcaagcgcaaggccgatgccacgagcagccaggattcagagctcgagcgggtgttcctgtgggacttagatgagactattatcatcttccacagtctgttaactggtagttatgcacagaaatatggaaaggatccgacagtggtgattgggagcggactcaccatggaagaaatgatctttgaagttgcagacacccacctgttttttaacgatctcgaggagtgcgatcaggtgcatgtggaggacgtggcttcagacgacaacgggcaggatttatctaattactcttttagcactgacggcttttccgggtcaggagggtctggcagtcatggctccagcgtaggtgtacagggtggcgttgactggatgagaaagttagcttttcgttataggaaagttagggaaatctacgacaagcacaaatctaacgtgggaggactcctgtcaccacagagaaaagaggccctgcagcgccttagggcggaaattgaagtcctgactgattcatggctggggacagccctgaaatctctcttgttgattcagtctcggaagaattgtgtcaacgtgctcattaccacaacacaactggtaccagccctggctaaggtattattatacggactgggagagatcttccctattgaaaacatatatagcgccactaaaattggtaaggagagttgttttgaacggatcgttagccgcttcgggaaaaaagtaacttatgtcgttattggagatggaagagacgaggaaattgctgcaaaacagcataatatgcccttctggagaataactaatcatggcgaccttgtctccctacatcaagctttagaattggattttctctag

SEQ ID NO: 187288 - DNA, 1563 bp, synthetic construct
  misc_feature 1..1563: note = Description of Artificial Sequence: Synthetic coding sequence
  source 1..1563: mol_type = other DNA
atgacctgcaccgactacatcccccggagcagcaacgactacacctctcagatgtattcagctaagccatacgctcacatcctgtccgtgcccgtatcagaaactgcctaccccgggcagactcagtatcaaactctacagcagacacagccctacgccgtatacccgcaggctacccaaacatacggacttccccccttcggcgcactttggcctggcatgaaacccgagagtggattgatacaaactccatctccaagtcagcattcagttctaacctgtaccacggggctaaccactagccagccatcaccggcccactattcgtaccccatccaggcctcctctacgaatgctagtctgatcagtacaagcagcacaatcgctaatataccagctgctgccgtggccagtatttcgaaccaggattaccctacatataccattttaggccagaatcagtaccaggcgtgctatcccagttcatcctttggtgtcacaggacaaacgaactctgatgcggagtcaactaccttggcggcaaccacttatcaatcggaaaagccgtctgtaatggctccagcgccagctgcacagcgattgtcttcaggggatccctccacctccccctctctatcacaaaccaccccctctaaggacacagatgatcagtccaggaagaacatgacaagcaaaaacaggggcaaaaggaaagccgacgccacctcgagccaggattctgaacttgagagagtgttcttgtgggatcttgacgagaccatcatcattttccactccctcctgacgggctcatacgctcagaagtatgggaaagatccaacagtcgtgatcggctccggcctgaccatggaggaaatgatctttgaggttgccgacactcatctattttttaatgatcttgaggagtgtgaccaggtccatgtagaggacgttgcttcagatgacaatggtcaagatctaagtaactactccttctccacggacggattcagcggcagtggtgggagtgggtctcatggttcttcagtcggtgtgcagggcggggttgattggatgcgtaaactggcttttaggtaccgtaaggttcgggagatctatgataaacataagtccaacgtcggtggcctgctgagtccacaacggaaggaagcccttcagcgactccgtgcagagatcgaagtcctaaccgactcttggctggggacggcacttaagtccctcctcttgattcagtcccggaaaaattgtgtgaacgttctgatcacgaccactcagctagtccccgccctggctaaagtgcttttgtacggattaggggagatttttcctatcgagaatatctattccgcaacaaaaataggcaaggaatcctgcttcgagagaattgtttcaaggtttgggaagaaggtgacttacgtggtgatcggcgatggtagagacgaggagatcgctgccaagcagcacaacatgcccttttggagaattaccaaccacggtgatttggtgtccctgcatcaagccctggaactggacttcctttag

SEQ ID NO: 187289 - DNA, 1920 bp, synthetic construct
  misc_feature 1..1920: note = Description of Artificial Sequence: Synthetic coding sequence
  source 1..1920: mol_type = other DNA
atggaggacagccaggacctgaacgagcagagcgtgaagaagacctgcactgaatctgatgtgagccagagtcaaaactctcgctctatggagatgcaggacctagcttctccccacaccctcgtcggcgggggggatacccccggctccagcaaactcgagaaaagcaacctttcttcaacttccgtcacaactaacggaacagggggtgagaacatgaccgtgttgaataccgcagactggcttctctcatgtaatacaccctcttccgccacaatgagtctcctcgccgtgaagaccgaacccctgaattcttccgagacgaccgccacaaccggcgatggcgcgctcgatacatttaccggctccgtgatcacatcaagcggttattccccccgctcggctcaccagtactcaccgcaactgtacccaagtaaaccctatcctcatatcctgtccacccccgctgcgcaaactatgagtgcctacgctggccagactcagtatagtggcatgcagcagccagcagtctacaccgcctactctcagaccggtcagccttactccctccccacttacgatctgggagtgatgctgccggcaattaagactgagtctgggttaagtcagactcagtctcccctgcagagcggctgcctgagctattctccggggttttccaccccacaacctggacagactccatattcttaccagatgcctggctccagttttgctccgtcgagtacaatttatgccaataatagtgtctcaaacagtaccaacttttcaggctcccagcaggattatccctcttacactgcatttggacaaaaccagtacgcccaatattactcagctagtacgtatggcgcttacatgacgtcaaacaacactgctgatggcacccctagtagcactagtacctatcagctccaggaaagcttacccggactgaccaaccagcctggggagttcgacactatgcaatctccctcgacgcctattaaggacctggatgagcgcacctgtcgatcttccgggtccaagtcccgaggcagagggcgaaagaacaacccgagcccccctcccgatagcgaccttgaaagagtattcgtttgggatttggacgaaacgatcatcgtcttccactctctcctcacagggagttatgcacagaagtacggcaaggacccacctatggcagttacactaggactgcgaatggaggaaatgatttttaacctcgcggatacacatcttttttttaacgaccttgaggagtgtgaccaggtgcatattgatgacgtgagctcagatgacaatgggcaagacttgtctacttatagctttgccacagatgggtttcatgccgccgcatctagtgctaatctgtgcttgcctactggagtgaggggaggtgtcgactggatgagaaagctggccttcagatatcgccgtgtgaaagagctgtacaatacttacaaaaacaatgtaggagggttgctggggcccgcaaagagagacgcctggttgcaactgcgcgcggagatcgagggcctgacggacagttggctgactaacgcattaaagtccctgagtatcatatccacccggagtaattgcataaatgtgttggtgacaacaacgcaactgattcctgccctggccaaggtattgctctatagcctcggaggggcatttccgatagaaaacatctactctgccacaaagattggaaaggaatcctgtttcgagagaattgtgagccggttcggcacaaacatcacatacgtggtgatcggagatggcagagacgaagagcatgcagcaaaccagcataacatgccgttctggaggatcagttctcatagcgatctgttagccctgcaccaagcacttgagctcgagtacctctag

SEQ ID NO: 187290 - DNA, 1851 bp, synthetic construct
  misc_feature 1..1851: note = Description of Artificial Sequence: Synthetic coding sequence
  source 1..1851: mol_type = other DNA
atggaggacagccaggacctgaacgagcagagcgtgaagaagacctgtactgaaagcgatgtgtcccagtctcagaacagcaggagcatggaaatgcaggacctggcatcccctcatactcttgttggaggaggcgacacaccgggctcttctaaactcgaaaagtccaacctgtccagcacatcagttaccaccaatgggaccggagtctcgctgttggcagtgaagactgagcccctgaactcatcagagacaactgcaactacaggggacggcgcattggacacattcacaggctccgttatcacatcttcaggctattcgccaaggtctgcgcatcagtatagtccccagctgtatccttctaagccgtacccgcacatcctttctacccctgcggcacaaactatgagtgcctatgctgggcagacccagtactccggcatgcaacagccggcagtttacacagcctacagtcagaccggacagccctactccctgccaacgtacgacttaggggtgatgctgcctgccatcaagaccgaatcaggcctgagccagacacagagccctttgcagtcaggctgtctgtcttatagccccggctttagcacacctcagccagggcaaacaccatactcttaccaaatgcccggatccagctttgctccttctagcacaatttacgctaacaacagcgtgtccaatagtactaatttctctggttcgcagcaggactatccttcttacaccgccttcggacagaaccaatatgcccagtattactctgcttctacatacggggcctacatgaccagcaacaacaccgcagacggcacccccagttcaacatcaacgtatcagctgcaagagtcactgcccgggctgacaaatcagccaggcgaatttgatactatgcaatctcccagcactcctattaaggacctggacgagagaacctgtcgcagcagcggcagcaaatcaaggggtcggggccgcaaaaacaacccgtccccgcctccagacagcgatctggagagggtgttcgtatgggatctggatgaaactataattgtattccacagcctgcttaccgggtcatacgcccaaaaatacggaaaggaccctcctatggctgtcacgctcggtctgagaatggaggagatgattttcaatctggccgacactcatctgttcttcaatgacctggaggagtgcgaccaggtgcatatagatgacgtgtcatctgacgataacggacaggacctgagcacgtactcctttgctacagacggcttccacgcagctgcatcgagcgccaacctatgtctgccgactggcgtaaggggaggtgtggattggatgcgcaagctggcctttaggtacagaagagttaaggaactgtataacacttataagaataatgtcggtggccttctggggcctgctaagagagacgcttggttacaactgcgggccgagatcgaaggtttgacagattcttggctgacaaatgctttaaagtccctgagtatcatctcaactagaagcaattgtatcaacgtgctcgtgaccaccacacagctcattccagctctggcgaaggtgcttctttattcacttggcggcgctttcccgattgaaaacatctattcggccactaagatcggcaaggaaagttgcttcgaacgtataatgcagcgcttcgggcgtaaggtggtatatgttgtcatcggggacggcgtggaagaagagcaggccgccaaaaaacacaacatgccattttggaggatcagctcacactccgatttgctcgccctccaccaggcattggaactagagtacctctag

SEQ ID NO: 187291 - DNA, 1920 bp, synthetic construct
  misc_feature 1..1920: note = Description of Artificial Sequence: Synthetic coding sequence
  source 1..1920: mol_type = other DNA
atggaggacagccaggacctgaacgagcagagcgtgaagaagacctgcactgagtccgacgttagtcagagccagaattcgaggtccatggaaatgcaggacttggcaagcccgcatactctcgtggggggcggggatacgccagggtcttctaagcttgagaagtccaacctgtcttccacatcagtcacaactaatggtaccggtggagagaatatgacagtgctgaatacagcggactggctgttgtcctgcaacacacctagttccgcgacaatgtcactcctcgctgtgaagactgagccattaaattcaagtgagaccaccgctacgaccggagatggtgcccttgatacttttaccgggagcgtgattactagtagcgggtattcaccaagatccgcccaccagtatagtccccaactgtacccatctaagccctacccacacattttgagcacaccagccgcgcagacgatgtccgcctatgctgggcagacccaatattccgggatgcagcagcccgctgtctataccgcatactcacaaactggacagccatactccctgcctacttacgatctgggtgtcatgctgcctgccatcaaaaccgaatccggcctgagccagactcaatctccgcttcagagcggatgcctttcatactctcccggtttttcaacccctcagcccggtcagacgccatatagttaccaaatgccaggatctagctttgctcccagtagtacgatttacgctaataacagcgtgtctaattccacaaacttcagtggttcacagcaagattaccccagttatacagccttcggccaaaatcagtatgctcaatactactcagcctctacatacggggcttatatgacatcaaataatacagctgacggaacaccctcttctacatcgacatatcagttgcaggaatctctaccgggactgacaaaccagccaggggaattcgacaccatgcagtcccctagcacccccattaaagacttagacgaacgaacctgccgctcgagtgggagcaaaagccgcggcagaggccggaagaacaatccgtccccccctccagattcagacctcgaacgagtattcgtgtgggacctcgacgagacgatcattgtcttccattctttattgacaggctcctacgcccagaaatacggaaaggatccaccaatggcagttactctaggactgcgaatggaagaaatgatcttcaatctggccgacactcacctgttcttcaatgatctggaggagtgcgaccaagtgcatattgacgatgtgtcatccgacgataacgggcaggacttgtctacctattctttcgccactgatggattccatgctgcagcttccagcgccaatctgtgcctgcccaccggcgtgcgtggtggcgttgactggatgcgcaagctagcctttcggtataggcgggttaaggagctctacaatacctacaaaaataacgtgggagggctgctgggcccggcaaaacgcgatgcatggctgcagttgcgggcggaaatcgaagggttaaccgactcttggcttaccaatgcacttaaatccctgtccattatcagcacccgaagtaactgtattaatgttctggtgactacaactcagcttattccagcactcgccaaagtgctgctctatagtcttgggggagcctttccgattgaaaatatttactcagctactaagattggaaaagaatcttgcttcgagcggatcatgcagcgattcgggaggaaggtcgtgtacgtggtgatcggtgacggcgtggaggaggaacaggctgccaaaaagcacaacatgcctttttggaggatctcttcacactcagatctgttggccctgcatcaggctctggagttggagtatctgtag

SEQ ID NO: 187292 - DNA, 9498 bp, synthetic construct
  misc_feature 1..9498: note = Description of Artificial Sequence: Synthetic coding sequence
  source 1..9498: mol_type = other DNA
atgaccgacaagagcatcgtgatcctgagcctgatggtgttccacagcagtttcatcaacggaaagacgtgccgtaggcagctggtagaagaatggcatcctcagccaagcagctatgtagtgaactggacactgacagaaaacatttgcctggacttctatcgggactgttggttccttggcgttaatacgaagatcgacacatcgggcaatcaagccgttccccagatatgcccccttcagatccagctgggcgacattctcgtgatttcctcagaaccctcactgcagttcccggaaattaacctgatgaacgtgtccgaaacaagctttgtgggatgtgtccagaataccaccaccgaggaccagctcctgttcggctgtcgattgaagggaatgcatacggttaactcaaagtggctatcagttgggacacattatttcataaccgtgatggcctccggacctagcccatgtcctctggggctccgactcaacgtgaccgttaaacagcagttttgtcaggaaagcttgagctcagagttttgttctggccatggcaagtgcttgagtgaggcctggtcaaagacctatagttgccactgccagcccccttttagtggcaagtactgccaggaactggacgcctgctcttttaaaccttgcaaaaataacggatcttgtatcaataaaagggaaaattgggacgaacaggcatacgaatgtgtgtgccaccccccatttactgggaagaattgttcagagataatcggccagtgtcagcctcatgtatgcttccacggcaactgctccaatataacatccaactcctttatttgcgagtgtgacgaacagttctctgggccattttgcgaagtaagtgcaaaaccttgtgtgagtttgttgttctggaaaaggggcatctgccctaacagcagcagcgcctatacgtacgagtgtcccaaaggatcctcttcacagaatggcgaaacagacgtgagtgagttctcactggtgccctgccagaacgggactgactgcattaagatttctaacgatgttatgtgcatttgctcccctatttttactgaccttctatgtaagtctatccagacgagctgcgagagtttccctctgagaaataatgctacttgtaaaaagtgtgagaaggactacccttgctcctgcatttcagggttcaccgaaaagaattgcgaaaaggccatcgaccactgcaaactcttgagtataaattgcctgaacgaggaatggtgctttaatattatcggccggttcaagtacgtctgtataccggggtgcaccaaaaacccttgttggtttctgaagaacgtctatctaatacatcagcatttgtgttactgcggagttacgtttcatggcatctgtcaggataaggggcctgcccagtttgaatatgtttggcagctggggtttgcagggtccgaaggcgaaaaatgtcagggtgtcatagacgcttatttctttttggctgccaattgtacggaggatgccacctatgttaatgacccagaggataacaacagctcgtgttggtttccccatgagggaactaaagagatctgcgccaacggatgctcctgcctctctgaggaagactctcaggagtatagatatctatgttttctccgttgggccggcaacatgtacctggaaaatactaccgatgaccaagagaacgaatgccaacacgaagcagtatgtaaggatgaaattaaccggcctaggtgttcttgtagtctctcttacatcgggaggctgtgcgttgttaatgtggactattgcctcggaaatcattctatctcagtacatggcctgtgtctggcgttgtcccacaactgtaactgctctggcctccagaggtacgagaggaacatctgcgagatcgacactgaagattgcaagtctgcctcgtgtaaaaacgggaccactagcacgcatctgcgcggttatttttttcggaagtgtgtgcccgggtttaaagggacccagtgcgagattgacatcgacgaatgcgcctcccatccttgcaagaacggtgctacttgcatcgaccagccgggtaactacttctgtcagtgtgtgcccccattcaaggtggtcgatggtttttcatgtctgtgcaaccctgggtacgtgggcatccgatgcgaacaggacatcgatgattgcatccttaatgcttgcgagcataactcgacttgtaaggatcttcacctgtcttaccagtgcgtgtgcctgtccgattgggagggcaacttttgtgaacaggaatcgaatgagtgtaagatgaacccatgcaaaaacaattcgacctgtactgacctgtacaagagttaccgttgcgaatgtaccagcgggtggacgggacagaactgcagcgaagaaatcaatgaatgcgactcagacccctgcatgaacggagggctctgccatgagtcaaccatcccaggccaatttgtgtgtctgtgccctcctctttacactggccagttctgccaccaaaggtacaatttatgtgacctgctgcacaatccctgccgcaacaacagcacctgcctggcccttgttgatgcaaatcaacactgcatctgtagggaggaattcgagggcaaaaactgtgaaattgatgtgaaagactgtctgtttctgtcttgccaggactacggggactgcgaggatatggtgaataatttccggtgcatatgtcgacccggattcagcggctccctctgtgagatcgagattaacgagtgctcctccgaaccgtgtaaaaataatggcacctgcgtggacctgaccaaccggtttttttgtaattgcgagcctgagtatcacggccctttttgtgagttagatgtgaacaaatgtaaaatttctccctgcctcgatgaggagaactgtgtttacaggactgatggatacaattgcctctgcgctcccggatacacaggcattaattgcgagataaatcttgacgaatgcctcagcgagccctgtctccacgatggggtgtgcatcgacggcataaaccattacacctgcgactgcaagtccggattttttggtacccactgtgaaaccaacgcaaacgactgtctgagtaacccgtgtttacatggccgctgcaccgagttaatcaacgagtacccctgctcctgcgatgcagatggcacttcaacacagtgcaagatcaagattaacgattgtacatctataccgtgcatgaatgagggattctgtcagaagagtgctcacgggttcacatgtatctgtccccggggatatactggggcgtactgcgagaagtccatcgacaactgcgcagaaccagaattgaattctgtcatctgtctaaatggagggatctgtgtagatggccccggccatacttttgactgccggtgcttgcctgggttttctggacagttctgcgagattaatataaacgaatgctcttcctcaccctgtctgcacggggctgactgcgaggaccacattaacgggtatgtgtgtaagtgccagcctgggtggtctgggcaccattgtgagaacgaactggagtgtatccccaacagctgcgttcatgagctctgtatggagaatgagcctggttcaacatgtttgtgtactccagggtttatgacttgtagcataggcctgctctgtggggatgaaatccggagaatcacttgcctgacccccattttccaacgcaccgaccccatatctactcaaacatatacaatcccaccaagcgagaccctagtgtcaagtttcccgtcaataaaagcgaccagaatacccgctatcatggatacctacccagtggaccaaggtcctaaacagacaggcattgtgaaacatgatatactccccaccactggcctcgcgacccttcggatctcaacaccattagagtcctaccttttgcaggagttaattgtcacccgcgaattgtcagccaagcactccctgctgtcatccgccgacgtctcaagtagccggttcttaaactttggaatccgggatcctgcgcagattgtgcaagacaaaaccagtgtgtcacatatgccaatccgcacaagcgccgctactttagggtttttctttccagaccgtagggcaagaacgccttttataatgtcctccttgatgtctgatttcatcttcccgacacagagtctcctatttgagaattgccaaacggtcgcgttgagcgcaacccccacaacttcggtcatacgctcgattcccggggcagacatagaattgaataggcagtctctcctttctcggggcttcctcctgatagcagccagcatctcagccacgcccgtagtctcgagaggcgcccaagaagatattgaagaatacagcgctgatagtttgatctctaggagggaacactggcgcctgttgtccccatcaatgtcacctatcttccctgcaaaagttatcattagcaaacaggtcaccatattgaactctagcgccctgcaccgtttcagcaccaaagcctttaaccccagcgagtatcaagccattactgaagccagttctaaccagagattaactaatatcaagagccaggctgcagactcccttagggagctatcacaaacatgcgcaacgtgttctatgaccgaaataaaatccagccgggagttctcagatcaggttctccatagcaagcagagccacttctacgagactttttggatgaattcggctatcctagcttcctggtacgcactaatgggggcccagacaattacatccggccattcgttttcgagtgccaccgagattacaccttctgtggcttttactgaagtgccttctttatttccgtctaagaagtctgcgaagcggaccatactgtcatcatcactcgaggagtccattactctttccagcaacctggacgttaatctgtgcttggacaaaacttgtctttccatagtaccttctcagactatttcctctgacttgatgaactccgatctcacgtccaagatgaccaccgatgagctgtccgtgagcgaaaatatccttaaactgttgaagatcaggcagtacggcattactatggggcccacagaagttctgaatcaagaatcccttcttgatatggagaagtctaaagggtcacacactctcttcaagctgcacccttccgactcatcgttggacttcgaactgaacctgcagatctaccctgacgtgactctcaagacttactcagagataactcacgcaaacgactttaagaataatctgcccccattgactggcagcgtcccagactttagcgaggtgacaaccaatgtcgcattctacaccgtcagcgcaacgccagcactgagtattcagactagctcctctatgtccgtcattagacctgactggccgtacttcactgattatatgactagtctcaagaaagaggtaaagacttcctccgagtggtctaagtgggagctgcaaccgtccgtgcagtatcaggaattccctacagcctcaaggcacctgccgtttacaaggtctctgaccctaagttctcttgaaagcattctggcacctcagaggctgatgatatctgactttagctgtgtacggtactatggcgattcttacttggagtttcagaatgtagctctcaaccctcaaaataatataagtctcgagtttcagacattttcatcctatggccttttactatacgtaaagcaggactctaatctcgtggatggtttcttcattcaactctttatcgaaaacgggacattgaagtaccacttctattgtccaggagaagctaagttcaagtctatcaataccaccgttagagtagacaatggccagaaatatacattgttgatcaggcaggaactggacccgtgtaacgcagagcttacaatcctgggtcgcaatactcagatctgcgagtcgatcaatcacgttctcggcaagcctctgcctaaaagtggatctgtgttcattggaggattcccggatctgcacggcaaaatccaaatgcccgtgcctgttaagaactttaccgggtgcatcgaggtgattgaaatcaataactggaggtcctttatcccgtccaaggcagtaaagaactaccatattaacaattgtcgaagtcaaggattcatgctctctcccacggcgtccttcgtcgatgcctccgatgtgacacagggcgttgacacaatgtggacgagcgtgagcccttccgtggctgctcctagtgtgtgccagcaggacgtgtgccacaacggaggcacttgccacgccattttccttagtagcggcattgtgagtttccaatgtgactgtcctctgcacttcaccggcagattctgcgaaaaggatgcaggtctgtttttcccatctttcaacgggaattcatatctcgaactccccttccttaaatttgtgctggagaaggagcacaaccggactgtgacaatctacctgactattaaaactaactctttgaacggaacgatattatactctaacggaaataactgcggaaaacaattcctgcacctttttctggtagaaggaaggcctagcgtgaagtacggctgcggtaactcgcaaaatatcctcactgtaagtgctaattacagcattaacactaacgcttttacccctataacaattagatacacaactcctgtgggaagtcccggggtggtgtgtatgatcgagatgaccgctgacggcaaacctcctgttcagaaaaaagatacagagatctcccacgcttcacaggcttatttcgaatctatgtttctaggtcacattcctgccaacgtgcaaatccataagaaggcagggcccgtgtatgggttcagggggtgtatcctggatctgcaggtcaataacaaagagtttttcattatcgatgaggcacgacatggcaaaaacattgaaaattgccacgtgccttggtgcgcccaccatctgtgtcgcaacaacggaacctgtatctcagacaatgagaaccttttttgtgagtgtcctcggttgtactctggcaagctttgtcaattcgcaagctgcgagaacaatccgtgcggaaatggggcaacatgtgtgcccaaatctggaacagatattgtctgtctctgcccttatggccggtcaggtcccttgtgcactgacgccatcaacattacacagccccgcttctccggcactgacgccttcggctatacatcctttcttgcatatagcagaattagcgacatctctttccactatgagttccacctaaagttccagttggcgaacaaccattctgctttgcagaacaatctgattttcttcaccggccaaaagggccacggcctcaacggtgatgatttcttggctgttggattactgaacggaagcgtggtttacagctacaaccttgggtctggcatcgcctctatcagatcggagcccctgaacctctccctgggggtccacaccgtgcacctcggcaaattcttccaagagggatggctcaaagtagatgaccataagaacaagtctataatcgccccaggccggctagtggggctgaatgtatttagtcagttctatgtcggcggctacagcgaatacactcccgacctgcttccgaatggcgccgacttcaaaaatggtttccagggatgtatctttactctgcaggtgcgtaccgaaaaagacggtcactttcgtggtctgggcaaccctgaaggccaccctaacgctggtcggtctgtaggccagtgccacgcctccccttgctcgctgatgaagtgcgggaatggagggacttgcatagagagcggcacctcagtctattgtaactgtactactgggtggaagggcagcttctgcacggagactgtgagcacttgcgatccagaacacgatcctcctcatcattgtagcagaggagccacatgtattagcttgccccacgggtacacatgcttttgcccgctcggaaccacaggcatctactgtgaacaggccttgatcctgatcgtgatcctggaaaaacctaaacccgctgagaggaaggtcaaaaaggaggctttgtcaatctcagacccctccttccgcagtaacgaactgagttggatgtcctttgcaagcttccacgtgagaaaaaagacccatattcagctgcaatttcagccgctggccgccgatgggattcttttttatgctgcccagcatctgaaggctcagagtggcgactttctgtgtattagcctcgtgaacagtagtgttcaactccgctacaatctgggagaccgcactattatccttgaaactctccagaaggtgactatcaatgggagtacatggcatattataaaagctgggcgtgtcggcgctgaaggatacctggaccttgatggcataaatgtgactgagaaggcctcaacaaagatgtcatcgcttgatactaatactgacttttatattggcggggtctcctccctgaacctcgtgaaccctatggctatagagaacgaaccagtgggatttcagggctgcattaggcaagtgatcatcaataatcaagagctacagctcacagaatttggagcgaaagggggcagcaatgttggcgactgcgatggtaccgcttgcggctacaatacttgcaggaatgggggtgaatgcaccgtgaacggcactacattcagctgcagatgcctgcccgattgggctgggaatacgtgtaaccagtcagtgagctgtctaaataacctctgcctacatcagtctttatgcattcctgaccagtcctttagctatagctgtctgtgtaccctcggctgggtgggccgctattgcgagaacaagacttcttttagcaccgcaaaatttatgggcaatagttatattaaatatatcgatcccaactatcgcatgcgaaacctgcaatttacaaccattagtcttaacttctctactactaagactgagggcttaattgtctggatggggatcgcccaaaatgaggagaacgatttcctggccatcgggctccacaaccagacccttaagatcgctgtgaacctcggtgaaaggatttctgttccgatgagctataataatgggaccttttgctgtaacaaatggcatcacgtggtcgtgatccagaatcaaacccttatcaaagcctacatcaataactccctgatacttagcgaggacatcgacccccataagaatttcgtggctctgaattacgatggtatctgctacctggggggctttgagtatggacggaaagttaatatcgtcactcaggaaatttttaagactaactttgttggcaagatcaaggatgtggttttttttcaggagcctaaaaacattgagttaatcaagttggagggatataatgtgtacgatggggatgagcagaacgaagtcacatag

SEQ ID NO: 187293 - DNA, 1785 bp, synthetic construct
  misc_feature 1..1785: note = Description of Artificial Sequence: Synthetic coding sequence
  source 1..1785: mol_type = other DNA
atgaccgacaagagcatcgtgatcctgagcctgatggtgttccactctagctttattaacggaaaaacatgtcgccgccagttggtcgaagaatggcatcctcagccctccagttacgtcgtcaattggaccctcaccgagaacatctgccttgacttctaccgagactgttggtttctgggggtcaacacaaagattgacacgtcggggaaccaggccgttcctcaaatttgccctctgcaaatccagctgggggatattctagtcatcagctcggagccatctctgcagtttccagagatcaatctgatgaacgtatcagagacatcatttgtaggatgcgtacagaacaccactaccgaggatcagctcctgtttggttgccgcctgaagggcatgcacacggttaactccaagtggctgtccgttggcacacactatttcatcaccgtgatggcctctggaccaagcccgtgtcccctgggactcaggctgaatgttaccgtcaagcagcaattctgtcaagagtccctgtcatcggaattctgctccggtcacggcaagtgtttgtctgaggcctggtcgaagacgtatagttgtcactgtcagcctcccttctcgggcaagtactgccaggaactcgatgcatgcagctttaaaccctgcaaaaacaatggatcttgcatcaataagcgggagaattgggacgaacaggcttacgaatgcgtttgtcatccgccgtttaccggcaagaattgcagcgagataatcggacagtgtcagcctcatgtttgcttccacggaaattgttccaatataacttcgaattctttcatttgtgaatgcgacgagcagttcagtggaccattttgcgaggttagcgctaagccatgcgtatctctactgttctggaagagaggcatctgccctaacagttcatctgcatacacctatgaatgtcccaaaggctcctctagccaaaatggcgagacggacgtgtctgaattcagtctggtgccgtgccagaacggcaccgactgcattaaaatcagcaacgacgtaatgtgcatctgttcccccatcttcacagatctgctgtgcaaatcgattcagactagttgcgaatccttccccctgagaaataatgctacctgcaaaaagtgtgagaaggactatccgtgctcctgcatcagtggattcacagagaaaaattgcgaaaaggccatcgatcactgcaagctgctgtcaatcaattgtctcaatgaggagtggtgtttcaacattataggccgattcaagtacgtctgcatccctggctgtactaagaatccttgttggttcctgaagaatgtgtatctcatccatcagcacctttgctactgcggagtgacttttcatgggatctgccaggacaaaggccccgcacaattcgaatacgtctggcagcttggtttcgctggttcagagggagaaaagtgccagggggtgatcgatgcttatttttttttggcagccaactgtaccgaagatgccacttatgtcaacgaccctgaagacaataactcttcttgctggtttccacatgagggcacgaaagaaatctgcgccaatggatgcagttgcctctccgaggaggactctcaagagtacaggtacttatgctttctgaggtgggccgggaacatgtatctcgagaataccaccgatgaccaggagaacgagtgccagcacgaagccgtctgtaaggacgagatcaaccgtcctaggtacctctgcatcatctag

SEQ ID NO: 187294 - DNA, 9498 bp, synthetic construct
  misc_feature 1..9498: note = Description of Artificial Sequence: Synthetic coding sequence
  source 1..9498: mol_type = other DNA
atgaccgacaagagcatcgtgatcctgagcctgatggtgttccactcatcatttatcaacggcaaaacttgccggcgccaactcgtggaggaatggcacccccaacccagcagttatgtggtgaactggactctaactgagaatatatgcctggatttctaccgagattgttggtttctcggcgttaatacaaaaattgatacctccggaaaccaggccgtgcctcagatttgtccactgcaaatccaactcggggacatactagtcatttcaagcgaaccgtcactccaattccccgagatcaaccttatgaacgtgtcagaaacttcctttgttggatgcgtgcagaataccactaccgaggaccagctcctgttcggatgtagactcaaagggatgcatactgttaatagtaagtggctgagtgttgggacccactacttcattactgttatggcaagcgggccttctccgtgtccgctaggcctcaggctgaacgtcacagttaagcagcaattttgccaggaatcactgtccagtgagttttgcagtggtcatggtaagtgcctgtcagaagcctggagcaagacttacagctgccattgccaacctccattctctggcaagtattgccaggagctagacgcctgctcctttaaaccttgtaagaacaacggttcctgtattaacaaacgagagaattgggacgagcaggcatatgaatgcgtttgccatcccccttttacaggcaagaattgcagtgagattatcggccaatgccagccccacgtgtgcttccatggcaattgcagtaacatcactagtaacagcttcatctgtgaatgcgacgagcagtttagcggtcccttttgtgaggtgagcgcaaagccctgcgtcagcctccttttctggaaacgaggcatttgcccgaattcctcctctgcctacacatatgagtgcccgaagggaagctcatcgcagaatggggagactgacgtttcggagttctctctcgtcccatgtcagaacggtacggattgtattaagatctcaaacgacgtgatgtgtatctgttctccaatctttactgacctgctatgtaagtctatccaaacctcttgcgaaagttttccactgcgtaacaacgcaacttgtaaaaaatgtgagaaggattatccctgttcttgcatctctggtttcaccgaaaagaattgtgagaaggctatagaccactgtaaactgctgtctatcaactgcctgaatgaggagtggtgtttcaatattattggccgttttaaatacgtgtgcatacctggatgcaccaaaaatccctgttggttcctgaaaaacgtttatcttatacatcagcacctgtgctattgtggggtgacctttcatggcatttgccaggataagggcccggcccaatttgaatatgtctggcagctggggttcgccggatctgagggcgaaaagtgccagggggtcattgacgcatatttctttctcgccgccaactgtactgaggacgccacctacgtcaacgatcccgaagataataattcctcttgttggtttcctcatgaaggtaccaaggagatctgcgcgaacgggtgctcctgtttatccgaagaggatagccaggagtacagatacctgtgttttcttcggtgggccggaaacatgtacctggagaacacaacagacgaccaggagaacgagtgccagcacgaggcagtgtgcaaagacgagattaatcgaccgagatgctcctgttcactcagttatatcggcaggttgtgcgtcgtgaatgtggactattgcttaggtaatcactctatctcagtgcatgggctctgtctcgctctatctcacaactgcaattgttctgggttacaacgatatgagcgtaacatatgcgagattgacacagaggactgtaagtcagcatcatgcaaaaacggcacaacttcgacacacctgcgtggttattttttcaggaagtgcgtacctgggtttaagggaacccagtgcgagatagacattgatgagtgtgcctcacacccatgtaagaatggggccacctgcattgaccagcctgggaactacttttgtcaatgcgtccctcccttcaaggttgtcgatgggttctcctgcctgtgtaatcctggatacgttggaatccgctgtgagcaggatattgacgattgcatactgaatgcgtgtgagcacaatagcacgtgtaaggatctgcacctctcataccagtgcgtgtgtctgtcggattgggaaggcaacttttgtgagcaggagagcaatgagtgcaaaatgaacccttgtaaaaataattcaacctgtaccgatctctataagtcttaccgctgcgaatgcaccagtgggtggacagggcaaaattgcagcgaagagatcaatgagtgtgactctgacccgtgcatgaatggcggattgtgccacgaaagcaccatccccggacagttcgtgtgcctgtgcccaccactttatacaggccaattttgccatcagaggtataatctgtgtgatctcctgcacaacccttgtcgtaataactctacgtgtctcgccctggtggatgcaaaccagcactgcatctgtagggaagaatttgaaggaaagaactgtgagatcgatgtgaaagactgcctgttcttgtcttgccaagactatggagactgcgaagacatggtcaataactttaggtgcatatgtcggcctggtttttctggctcactatgcgaaatcgagataaacgagtgtagctcagaaccatgtaagaacaatggcacatgcgtcgatctcaccaaccgcttcttttgtaactgtgagcctgagtatcatgggcccttttgtgagctcgatgtgaacaagtgcaaaatttcaccctgcctcgacgaagagaattgcgtgtaccggaccgacggatacaactgtctctgtgctcctgggtataccggaattaattgcgagatcaatctggacgagtgcttaagcgaaccatgtttacacgacggggtttgcatcgatggcatcaatcactacacttgtgactgtaagagtggattctttggcactcactgcgagacaaacgccaacgattgcctatcgaatccctgtctgcatggtagatgcacagaactcatcaatgaatacccatgctcatgtgatgccgatggcacatctactcagtgtaagattaagattaacgactgcacttccataccttgtatgaatgagggcttctgtcagaagtctgctcatggctttacctgcatctgcccccggggctacacgggagcctattgtgaaaagtcgatagacaactgtgcagagcctgaactgaattccgtgatatgcttgaacggcggaatatgtgtcgacgggcctggacacacattcgattgccgttgccttcctggattcagcggtcagttttgtgaaataaacataaatgagtgttcaagcagcccatgtctgcatggcgcggactgcgaggaccacattaacggctatgtatgcaagtgtcaaccagggtggagcgggcaccattgcgagaatgagttagaatgtatcccaaactcatgcgtgcatgaattgtgcatggagaacgaacctggctctacttgcctgtgtactcccggtttcatgacttgctccataggcctgttgtgtggggacgaaataagaaggatcacttgccttacacctatctttcaacgaaccgatcctatctccacacaaacttataccattcccccctcggagaccttggtatcttcttttcctagcatcaaagctacaagaatcccagctatcatggacacatatcccgttgatcagggaccaaagcaaactggcatcgtaaagcatgacatcctccctacaactggcttagccacattgaggatatccacccctttggagagctatctgcttcaggaactcattgttactagggagctgagcgccaagcattccctcttatctagcgcagatgtatcttcatctcggtttctgaactttggcatcagagatcctgctcaaattgttcaggacaagacatcagtctctcacatgccaataaggacctcggcagcgacgctgggatttttcttcccggaccgacgagctcgaactccctttattatgagcagccttatgagtgattttatcttcccaacccaatcccttttgtttgaaaactgccagactgttgctttatcggccacaccaacaacatctgtgattcggtctattccaggcgctgacattgaactgaaccgacagagtctcctgagtagaggcttcctgctgattgccgcaagcataagtgccaccccagttgtcagtaggggcgctcaggaggacatagaagaatactctgccgattcgttgatctctaggcgggagcactggcgtctcctgtctcctagtatgtcaccaatctttccagccaaagtgatcatttccaagcaagtgactatattgaattcttcagctctgcacagattctccacgaaggcctttaatccctctgagtatcaggccattaccgaggcctcctcaaatcaaagattaactaacataaagtcccaggctgccgattccctaagagaactcagccagacatgtgctacctgttctatgaccgagatcaaaagcagcagagagttttcagatcaggtgcttcatagtaaacagagtcacttctacgagaccttttggatgaacagcgctattctcgcctcctggtatgcactgatgggcgcacagacgattaccagtgggcactccttttccagtgcgactgaaatcacaccatcagtggcctttactgaagtgcccagcctgttcccctcaaagaaaagcgcaaaacgtaccatactttccagttcgttagaggagtctatcacgctcagtagcaatctggatgttaacctgtgcctcgataagacctgtctgagtatcgtcccctctcaaaccataagctctgacctgatgaactctgacctcacttccaagatgacgacagatgagctgtcagtctccgagaacatactgaaacttcttaagatacgtcagtacggtatcacgatgggtcctacagaagtgctgaatcaggaatctctcctagacatggagaaaagcaaagggtcacatacactttttaaactacacccgagcgattcatcattggactttgagctgaacctgcaaatttatcctgacgtcacactcaagacatactctgaaattactcacgctaatgattttaagaataacctccctccactgaccggaagcgtgcccgacttttcagaagtcaccactaatgtggccttctacacagtgtccgcaactcctgcactcagcattcagacatcaagctccatgtccgttataagaccagactggccatattttaccgactacatgactagcttgaagaaggaagtaaagaccagctccgagtggtccaagtgggagctccaaccctcggtgcagtaccaggagtttcctacggcttccagacatcttcctttcacacggtccctcaccctttcatcactagagtccattctagccccacagaggctgatgatctcagacttctcatgtgttcgttattatggtgatagctacctggaatttcagaatgtggctcttaaccctcaaaacaacatcagcctggaattccagactttcagcagttacgggttgctgctgtatgtgaaacaagattcaaatttggtggatggcttttttatccagctcttcatagagaatggcacattgaagtatcatttttattgtccaggagaggcaaaattcaagagcattaacactaccgtgcgtgttgacaatggccagaaatacaccctgctgattagacaggagttagacccttgtaatgcagagctgaccatcctggggagaaacacacaaatttgcgaaagcatcaatcacgtgctcggcaaacctctccctaagtcagggtccgtgttcatcggaggcttccccgacctgcacggcaaaattcaaatgcccgttcctgtaaaaaactttaccggctgcattgaggtgatcgaaatcaacaactggcgcagcttcatcccgtccaaggcagttaaaaattaccatatcaacaattgcagatcgcagggattcatgttgtcccccacagcttcgtttgttgatgcatcggacgtgacccagggcgtggacacgatgtggacttcagtgtccccaagcgtggcggcaccttcagtctgccagcaggacgtatgtcacaacggtggaacatgtcacgctattttcttgagctcaggcattgtatctttccagtgtgattgtcccctgcactttacaggccgcttttgcgaaaaggatgctggccttttctttcctagtttcaatggcaacagctatttagaactgccgttcctgaagttcgtacttgagaaggaacacaacaggactgtaactatttacctgaccattaagaccaactccctgaacggcacgatcttgtattccaatggcaacaactgcgggaagcagttcctgcatctcttccttgtggagggtcggccgagcgtgaagtatgggtgcgggaatagtcagaacatcctcacagtgagtgcaaattactctatcaacacaaacgccttcacccctatcaccatccgttatacgacaccagtgggatcccccggggtggtctgcatgattgagatgactgcagacggtaagcccccagtgcaaaaaaaggacaccgagataagccatgcatcccaggcctattttgagagcatgttcctgggccacattccagctaatgtgcaaattcataagaaagccgggcccgtttatggattcagaggctgtatactggaccttcaggtgaacaataaagagttctttatcatcgacgaggctagacatggaaagaatattgaaaattgtcatgtcccatggtgcgctcatcatttatgtagaaacaatggcacgtgtatttcagacaacgagaacttattttgtgagtgccccaggctttactccggaaagctctgccagttcgccagttgcgaaaacaacccttgcggcaatggcgccacgtgtgtgcctaaaagtggaactgacattgtctgtctgtgtccttacggcaggagtggacccttgtgcacagacgctatcaacataactcagccgcgcttttcaggtacagatgcctttggatacacaagctttctggcgtattcgagaattagcgatatcagtttccattacgagttccaccttaaattccagttggctaacaatcactctgccttacagaacaacctcatcttttttaccggacaaaaagggcacggtcttaatggagacgacttcctggctgtgggtcttctcaatggaagcgtggtgtatagctataatcttggctctggcattgcttcgatccggtccgaacctctcaatttgagcctgggagtccatacagtacacttaggaaagttcttccaagagggatggctcaaggttgatgatcataaaaacaaaagtatcatagcaccagggaggctggtcgggctgaacgtgttctcccagttctatgtaggcggttattccgagtacactcccgatctgctccccaatggggccgatttcaaaaacggatttcaggggtgcattttcaccctacaggtacgtactgaaaaagacgggcacttcagaggcctggggaacccagagggccaccctaatgcaggacgaagcgtcggccagtgccatgcctctccctgctctttaatgaaatgcgggaatggagggacctgcatagagagcggcacttcagtttattgcaattgtacaaccgggtggaaaggctccttctgcaccgaaaccgtgagcacatgtgacccagagcacgatcctccccaccactgttcacgcggcgctacgtgcataagtttgccgcacggatatacctgtttttgtccgttaggtaccaccggaatttactgtgagcaagcgcttatactgatcgtcatactggaaaagcctaaacccgcagagcgtaaagtcaaaaaggaagcattaagtatctcagacccctctttccgctcaaatgaactgagctggatgagcttcgcgagcttccacgtcagaaagaaaacacacatacagctgcagtttcagccgttagccgccgatgggatcttattttacgccgcacagcacctgaaggctcagtctggagatttcctgtgcatctccctcgtgaattcttcagtacaactgcgatacaacctgggcgacagaaccattatcctcgaaacactgcagaaggttaccattaacggctctacttggcacatcatcaaagctggtcgtgtgggcgcagaggggtacttagacctagatgggatcaacgtcacggagaaagcctctaccaagatgtcttctctcgatactaacacagacttttacattggtggggtgtcctcacttaacttggtgaaccctatggcaatcgaaaacgaaccggtgggattccaggggtgcatcaggcaggtgatcatcaacaaccaagaactgcaactgaccgaattcggcgccaagggcgggtccaatgtgggcgattgcgacggcacagcttgcggctacaacacatgcaggaacgggggtgagtgtaccgtgaacggtactacattcagctgtcggtgcctgccagattgggccggaaatacatgcaatcagagcgtgtcctgtctcaacaatctgtgtcttcatcagtccttgtgtatccctgaccagtcatttagttattcttgtctttgtaccctggggtgggttggtagatactgtgaaaataagacctctttcagcactgcgaagttcatgggaaattcatacatcaagtatattgatccaaactacaggatgcggaacctgcaatttactaccatatcattgaactttagtacgaccaagaccgagggactgatagtttggatgggcatagcccaaaatgaagagaatgattttttagctatcgggctccacaaccagaccttgaagattgccgtaaaccttggtgagcggatcagcgtaccaatgagttataacaacgggaccttctgctgtaataagtggcatcacgtcgtggtgatccagaaccagaccttgattaaagcatatataaataatagtctgatcctgtctgaagacatcgatccacataaaaacttcgtagccctcaactacgacggaatttgttacctaggaggattcgaatacgggcgaaaggtgaatattgtgactcaagaaatttttaaaacaaacttcgtaggcaaaattaaggacgtggtgttcttccaggagcccaagaatatcgagcttattaagctggagggatacaatgtatatgacggagacgagcagaatgaggtcacatag

SEQ ID NO: 187295 - DNA, 9435 bp, synthetic construct
  misc_feature 1..9435: note = Description of Artificial Sequence: Synthetic coding sequence
  source 1..9435: mol_type = other DNA
atgaccgacaagagcatcgtgatcctgagcctgatggtgttccactcatctttcattaatggcaaaacatgtcggagacagttagtcgaggaatggcacccccagccgtctagttacgtcgtaaattggaccctgacggaaaatatctgccttgacttttatcgggattgctggtttctaggagtgaataccaagattgatacgtctggaaaccaggccgttccacaaatctgtccactgcagatccagctgggcgacatcctggtcatctccagcgaaccaagcctgcagtttcctgagattaacctgatgaatgtgtcagagacaagttttgtcgggtgtgtgcagaacaccacaacagaggaccagttgttattcggttgccggctcaagggtatgcacaccgtcaattccaaatggctgtctgttggtacgcactactttattactgtgatggcctccggacctagcccatgtccactgggcctgcggttgaatgtgaccgtcaagcagcagttttgccaggaatccctttcttcagaattttgtagcggacacggaaagtgccttagcgaggcttggtctaaaacctactcctgccattgccagcccccattctcgggaaaatattgccaggaactggatgcttgcagttttaagccatgcaagaataacggctcttgtatcaacaagcgggagaattgggacgagcaggcttacgagtgcgtttgccatccgccttttactggcaagaactgctcagaaatcatcggtcagtgtcagccccatgtgtgttttcatgggaactgttctaacatcaccagtaactcatttatttgtgaatgtgacgaacaatttagcgggcccttctgcgaggtgtccgctaaaccgtgtgtgtctttactgttctggaaacggggcatttgtcccaactccagttctgcgtacacatacgaatgccctaaaggttcatcttcccagaacggcgagacggacgtgagcgaattttcccttgtgccgtgccagaacggtacggactgcatcaaaattagtaatgacgtcatgtgcatttgctcgccaatttttaccgatcttttgtgcaagagcattcagacctcatgcgagtctttccccctccgcaataacgcaacctgtaaaaagtgtgagaaagattatccttgttcctgcatttcggggttcaccgaaaaaaattgcgaaaaggctatcgaccattgcaaattgctatctattaattgcctgaacgaagagtggtgtttcaacatcataggcaggttcaaatatgtctgcattcccggctgtactaaaaacccatgctggttcctcaagaatgtctatctcattcaccagcacctttgctattgcggggttacgttccatgggatctgtcaggataaaggtcccgcgcaattcgaatatgtatggcaactcggctttgctgggtcagagggtgaaaagtgtcagggagttattgacgcctacttttttctggccgccaactgtacagaggatgccacctacgtgaacgacccagaggacaacaatagctcctgttggttcccgcatgaaggtactaaggagatttgcgctaacggctgctcctgtctctcagaagaagattctcaggaatatagatacctgtgctttctccgttgggccggcaacatgtatctcgaaaatactaccgacgaccaggaaaacgagtgtcagcacgaggccgtttgtaaggatgagatcaaccggcctcgttgttcatgctccctgtcttatataggccgcctctgcgttgttaatgtggactactgcttgggcaaccactctatctccgtccacggtctgtgtttagccttaagccataattgcaactgttcaggtttacagcgttatgaacgtaacatatgcgaaattgataccgaagactgcaaatccgcgagttgcaagaatggcaccactagcacccatctgcgcggttatttcttccgaaaatgtgtccctggatttaaggggactcagtgtgaaattgacatagacgagtgcgcctcacacccttgcaagaacggcgctacgtgtattgaccagccaggcaactatttttgccagtgcgttcccccctttaaggtggtggacggtttttcctgcttgtgcaatcccggttacgtagggattcgttgcgaacaggacatcgacgactgtatactgaacgcttgcgagcacaactcaacttgcaaggatctgcacctctcttaccagtgcgtttgccttagtgattgggaaggcaatttctgcgagcaagagagtaatgagtgtaagatgaacccttgtaagaacaacagcacttgcactgatttgtacaagtcttacaggtgcgagtgtacttcagggtggacagggcagaattgctcagaagaaatcaacgaatgtgatagtgacccatgtatgaatggtggtttgtgccacgagtctaccatccccgggcagtttgtttgtctttgtcccccgctgtatacagggcagttctgtcaccaacgctataatctttgcgatctgctccacaacccgtgtcgaaacaactccacttgcttggctctggtggacgcgaaccaacattgcatctgcagagaggaattcgaaggcaagaactgtgagattgacgtcaaagattgtcttttcctttcttgtcaggattacggcgactgcgaggacatggtcaataatttcaggtgtatatgtcgtccgggttttagtgggtccctttgcgagatcgaaattaatgagtgttcgtctgagccctgtaagaacaatggtacgtgtgtggatttaaccaacaggtttttttgcaattgtgagcctgagtatcacggccctttctgcgagctcgacgttaataaatgtaagatctctccttgtctcgatgaagaaaactgcgtgtaccggaccgatggctataactgtctctgcgcgccgggctacacaggtatcaattgcgaaatcaatctggacgagtgcctgagtgaaccttgtttacatgacggcgtctgtattgacggtatcaatcattatacatgcgattgcaagagcggcttttttggaacccattgcgagaccaatgccaacgactgcctgtccaacccatgtctgcacgggcggtgcaccgagttgataaacgagtatccctgctcatgcgatgctgacgggactagtacacagtgcaaaatcaagattaatgattgcacctcaattccctgcatgaacgagggtttttgccagaaatctgcgcacgggttcacatgtatttgccctagagggtataccggcgcttactgtgagaagagcatcgacaattgcgcagagccagagctaaactccgttatctgcctaaacggcggtatttgcgtggacggacctggacatacctttgactgccggtgcttacccggtttcagcgggcaattctgcgagatcaacatcaatgaatgtagctcatcgccctgtttgcatggagccgactgcgaggaccatatcaacggatacgtttgtaagtgccagccaggatggtccggccatcactgcgaaaacgagcttgaatgcattccaaactcctgtgtgcacgagctctgtatggaaaacgaacccggcagcacatgcctgtgtacacccggattcatgacatgttcaatcggtctgctttgtggagatgagatcagaaggatcacctgccttacgcctattttccagcgcacggaccctatctctacacagacatacaccatccccccatccgagaccctcgtgtcctcattcccaagtattaaggctacaaggatccccgctataatggacacctatcccgtcgaccagggcccaaaacagactggaattgtcaaacacgatatactgccgacaacaggactggccaccctgagaatcagtacaccgttggaaagctaccttctgcaggaactcatcgtgacaagggagctaagtgcgaaacactccctgttaagttcggccgacgtttcttcatctcgtttcttgaacttcggcataagagatcccgcccagattgtccaggacaagacatcagtgagccatatgcctataagaacatctgccgccaccttgggcttctttttccctgacagacgcgcccgcactcccttcatcatgtcctcactgatgagcgattttattttcccaacacaatctctgttgtttgagaactgtcaaacggtcgccctgtcggccacacccacaacaagtgtgatacgtagcatcccaggggctgatatcgagcttaaccgccagtccctcctatcccgcgggttcctgcttatcgctgccagcattagcgccacaccagtggtttccaggggagctcaagaggatattgaggagtattcagccgactccctgatctcacgtagggaacactggagactccttagcccctcaatgagcccgatattcccagcaaaggtgatcatatctaaacaggtaaccatcctgaattcttctgccctgcatcggtttagtactaaggctttcaacccttccgagtatcaggcaatcacggaagccagctccaaccagcggctgacaaacatcaagagccaagccgccgatagccttagagaactatctcaaacatgcgcgacttgctcgatgactgaaattaaatctagtcgcgagttctccgaccaggtgctgcacagcaaacagagccacttctacgagacgttttggatgaacagtgccattttggcttcatggtatgctttaatgggcgcccaaaccattacaagcgggcatagtttttctagcgctacagagattacaccaagtgtggcttttactgaggttcctagcctcttcccctcgaagaagtcagctaagagaacaattctgagcagttccttggaagagtctattactttatcctccaatctggacgtgaatttgtgtttggacaagacctgcctttcgattgtaccctctcagacgatttcgtcagacctaatgaattcagatctgacgtctaagatgacgacggacgagctgtcagttagtgaaaacatcttaaaattgttgaaaattcgacagtacggaataacgatgggacccacagaggttttgaatcaggaatcactgctggacatggaaaagtccaagggatcacacacactttttaagctccatcccagcgatagcagcctggatttcgaactgaacctgcaaatataccctgacgtgacgctgaaaacatacagcgagataacccatgccaacgattttaaaaacaatcttcctcctttgaccggatcagtgccggacttttccgaggttacaacaaatgtggccttctacacagtgtcagctactcccgcattatcgatccagacatcttcctccatgtccgtgatccgacccgactggccctatttcactgactacatgaccagtctgaagaaggaggtaaaaacgtcgagcgagtggagtaaatgggagctacagcccagcgtgcagtatcaggaattcccaacagccagtagacacctgccgttcaccaggtctctgaccttgagctctctcgagtccatcctagctccgcagaggttaatgattagcgacttttcctgcgtccggtattatggcgactcttacctcgaatttcagaacgtcgcacttaatccacaaaacaatatctctctggaattccagaccttctcatcgtacgggttgctgctgtacgttaagcaggacagtaatctcgttgacggattcttcatccagctcttcatcgaaaacgggaccctcaagtaccatttctactgtccaggagaggccaagtttaaaagtattaacaccacagtgcgagtagacaatggtcagaagtatactctccttatcagacaggaattagacccttgcaacgcagaactcacgatcctgggacgcaatacccagatttgtgaaagcataaaccatgtgctcggaaaaccactgcctaaatccgggagtgtgttcatcgggggatttcccgatctgcacggcaagatacagatgcccgtgcccgttaagaattttacagggtgcatcgaagtgattgagataaacaactggagatccttcatcccctcaaaggcagtgaagaattaccacataaacaactgtagaagccagggctttatgctgtccccaaccgcgtcattcgttgatgcctctgatgttactcagggcgtggataccatgtggaccagcgttagcccaagtgtggcagctccaagtgtgtgtcagcaggacgtctgccataatggcggcacatgccatgcaatcttcttaagtagcgggattgtgagcttccagtgtgactgccctctgcatttcaccggcagattctgtgagaaagacgccggcttattttttccctcattcaatggaaactcgtatttggaactgccatttcttaaattcgtgctggagaaagagcacaaccgcaccgtgacgatctacttaaccattaagactaacagcttgaatggaacgatcctgtactcaaatggcaacaactgcgggaaacagtttttgcatctgttcctcgtcgagggaaggcctagcgtcaaatatggctgtggaaatagtcagaacattttgactgtgagtgcaaattacagcatcaatacaaacgccttcacacccattaccatccgctacaccacgcctgtcggttctcccggcgtggtgtgtatgatcgagatgactgccgacggcaagccgcccgtgcagaaaaaggatacagaaattagccacgcttcccaagcctacttcgagagtatgtttctgggtcatattcctgccaatgtgcagattcataaaaaagcaggccctgtgtacgggttccggggctgcattctagatctccaggtcaacaataaagaattcttcattatcgatgaggctcggcatggaaagaacatcgaaaactgccatgtgccctggtgtgcccaccacctgtgcaggaataatggcacttgtatctcagataacgagaatttgttctgcgaatgtccccgattgtattctggtaagttgtgccagttcgcaagttgtgagaacaatccttgtggcaatggcgcaacctgtgtcccaaaatctgggactgacatcgtgtgtctgtgcccctatggaagatccggacctctgtgtactgacgctataaacatcacgcagcctcggttctctggcacagatgcgtttgggtatacttcctttcttgcatactctcgaatctccgacataagcttccactacgaatttcaccttaagtttcagctcgctaataaccacagtgctttgcagaataacctgattttctttaccggacagaaaggacacggactcaacggtgacgatttcctggcagtagggcttctcaatggaagtgttgtatattcttacaatcttggaagcggaattgccagcattcggtcagaacccctgaatctgagcctgggggtccacactgtgcaccttgggaaattcttccaggaaggttggttgaaagtcgacgaccacaagaataagtctatcatcgcccccggcagacttgtaggcctcaatgtcttttctcaattttacgtgggcgggtactctgagtacacacccgaccttctgcctaacggcgccgactttaagaacgggtttcagggatgcattttcaccctacaggtgcgaactgaaaaggatggtcactttagagggttaggaaaccctgagggccatccaaacgccggacgctctgttggacagtgtcatgccagtccctgtagcctaatgaagtgcggcaatggcggcacctgtatcgagagtgggactagtgtatactgcaattgcaccacagggtggaagggtagcttttgcacggagaccgtgagcacatgtgatcctgaacacgaccctccccatcattgcagtcggggcgcaacctgcatcagccttccacatggctacacctgtttttgccccctggggacgaccggcatctactgcgagcaagcgctttctatctctgacccttccttccggtcaaatgagttgtcatggatgagcttcgcatcgtttcacgtgagaaaaaaaacccacatacagctgcaatttcaaccactggccgcggatggcatactattttacgctgctcagcatttaaaggcacagagcggcgatttcctctgtattagcttagttaattcctccgtccagcttcgttacaatcttggcgatcgcacaataatcctagagaccctgcagaaggtaacgataaatggctccacttggcatataataaaagcagggcgtgtgggtgccgagggatacttggaccttgatggcatcaatgtcaccgaaaaggcctcaacaaagatgtcttctttagatacaaatacagacttctatatcggaggtgtatcatctcttaaccttgtgaaccccatggctatcgagaacgagccagtgggcttccagggttgtattaggcaggtaattattaacaatcaagagttacagctcactgaatttggcgccaaaggcggatctaatgttggcgactgtgatgggactgcttgcggctacaatacttgcaggaacggaggcgaatgtacggtgaacggaactacattttcctgtcgttgtctgccagattgggcaggtaatacatgtaatcaaagcgtctcatgcctcaacaatctgtgtctccaccagagtctgtgcataccagaccagtcctttagctattcttgtttgtgcacccttggatgggttggcagatattgtgagaataagacctctttctcaacagctaagttcatgggaaacagttacattaaatatatcgaccccaactaccgaatgcggaacttacagttcacgacaatctcattgaatttttccactaccaaaacagaagggctaatagtttggatggggattgctcaaaatgaggaaaatgactttctagccatcggccttcataaccaaactttgaagatcgccgttaacctcggggaaaggatttcagtccccatgagctacaacaatggaaccttttgttgtaataaatggcatcatgtggttgtgatccagaaccaaacacttattaaagcctacattaacaattccctgatcctttcagaggacatcgaccctcacaagaactttgtggctctgaactacgacggtatttgctatttaggtggatttgagtacgggaggaaggtcaatatcgttactcaggaaatctttaagacaaactttgtcggtaagataaaagatgttgtattttttcaagaacctaagaatatcgagttaatcaaattagagggttacaatgtgtacgacggagatgagcaaaatgaagtcacatag

SEQ ID NO: 187296 - DNA, 1785 bp, synthetic construct
  misc_feature 1..1785: note = Description of Artificial Sequence: Synthetic coding sequence
  source 1..1785: mol_type = other DNA
atgaccgacaagagcatcgtgatcctgagcctgatggtgttccactcaagcttcattaacggcaagacctgcagacgccaactagtggaggagtggcaccctcagcctagcagttacgtggtgaactggacattaaccgagaatatttgcttggacttctaccgagattgttggttcctgggggttaacactaagatagacacatctggaaaccaagccgttccccaaatttgcccattgcagattcagttgggcgacattctggtcatttcctctgagcccagtttgcagttcccagagatcaacctgatgaatgtgagcgagacaagtttcgttggatgtgtacagaatacaaccacggaggatcagctcctgttcggatgtcggctgaagggtatgcacacagtgaattcaaagtggctcagcgtcgggactcattacttcatcacagtgatggccagcgggccaagcccatgccccctcggattgcgactaaacgtgaccgtgaagcagcagttttgtcaggagtccctgagcagtgaattttgctccggccacgggaagtgtcttagtgaggcttggtccaaaacctatagctgccactgtcagccacctttttctggcaagtactgccaggaattggacgcttgttcattcaagccgtgcaagaacaatggtagctgtatcaacaagcgagagaactgggacgagcaggcatacgagtgtgtctgccacccgccttttactggcaagaattgctccgaaatcattggacagtgtcagcctcatgtctgttttcacgggaactgtagcaacataacgtccaattcatttatatgcgaatgtgatgagcagttttccggccccttctgtgaggtttcagctaaaccttgtgtttccctcctcttctggaagagaggaatctgcccaaattctagttctgcctacacatatgagtgtcctaaggggtcctcaagtcaaaatggtgaaacagacgtctctgaattctctttagtcccgtgccagaatggaactgactgtatcaaaatcagcaacgacgtgatgtgcatttgctcaccaattttcacagacctgctgtgtaagtctattcagacgtcttgtgagtccttccccttgcgaaataacgccacttgcaagaagtgcgagaaggactacccttgcagctgcataagtggtttcactgaaaaaaactgcgagaaagccatagatcactgtaaacttctctcaatcaattgcctgaatgaggaatggtgcttcaacatcatcggcaggttcaagtatgtgtgcattccgggctgcaccaagaacccttgctggttcctgaagaacgtgtatctcatccatcagcatctctgctactgtggtgtgacattccatggaatttgccaggacaaaggccccgcacaatttgagtacgtgtggcagctaggatttgccgggagtgagggcgaaaagtgccagggagtaattgatgcctatttctttctcgccgccaattgcacagaggatgctacatacgtaaatgatccagaagacaataatagctcttgttggttccctcatgaggggaccaaggaaatttgtgctaacggctgctcatgtttgagcgaggaagattcccaggagtacaggtatctgtgcttcctccgctgggccggcaatatgtacctagagaacactaccgacgatcaggaaaatgaatgccagcacgaggcggtatgcaaggacgagatcaataggccccgttacctctgcataatttag

SEQ ID NO: 187297 - DNA, 1860 bp, synthetic construct
  misc_feature 1..1860: note = Description of Artificial Sequence: Synthetic coding sequence
  source 1..1860: mol_type = other DNA
atgaccgacaagagcatcgtgatcctgagcctgatggtgttccacagctcgtttatcaatggcaagacctgtaggaggcagttggttgaggagtggcacccccagccaagcagctatgtagtaaactggaccctcactgagaacatttgcctggatttctacagagattgctggttcttgggcgttaataccaaaattgacacttcaggcaatcaagcagtccctcagatctgtccgctgcaaatccagttgggggacattcttgtcatctcatcagagccctcactccagttcccagaaattaatctcatgaacgtctctgagacgtcttttgtaggatgcgtgcaaaacaccactaccgaggaccaactcctgttcggatgcagactgaaggggatgcacaccgtcaattcaaagtggctgtctgttggaacgcactattttatcactgttatggcgagcggaccctcaccttgcccccttgggctgcgacttaatgtcaccgttaaacagcagttctgccaggaaagcctatcaagcgagttctgcagcggacacggcaagtgtttatcggaggcgtggtcgaagacgtacagctgtcactgtcagcctcctttcagcggcaagtattgtcaggaactggatgcctgtagctttaaaccctgcaagaataatggcagctgtatcaacaagcgcgagaactgggatgaacaggcatatgagtgcgtttgtcatcccccctttacaggaaagaactgtagtgagattattggacagtgccagccacacgtgtgtttccacggcaattgttcaaacattacctcaaattccttcatctgcgagtgtgatgaacagtttagcggccccttctgtgaggtttccgctaagccctgtgtaagcctcctgttttggaagcggggtatatgcccaaatagctcctctgcatacacctacgaatgtccaaagggcagcagttcacagaacggcgaaaccgatgtgagtgaattctcactggtgccttgtcagaatggaaccgattgcatcaaaatcagcaacgatgtgatgtgcatttgttcgcctatattcactgaccttctgtgcaagtcaatccaaacctcctgcgagagttttccgcttagaaacaacgctacgtgtaaaaagtgtgagaaggactacccttgttcctgcatttctggttttacggagaagaactgtgagaaggcgatcgaccactgtaagctgttgtccatcaactgcctgaatgaggagtggtgcttcaatattatcggccgctttaaatacgtgtgtatccctgggtgcactaagaacccgtgctggtttctgaaaaatgtatatctgatccatcaacatctgtgctattgtggcgtcacctttcatgggatctgtcaggacaagggtcctgcacagtttgagtacgtctggcaactgggcttcgctggatctgaaggggaaaagtgtcagggagtcatcgacgcatactttttcctcgccgccaactgcactgaggacgctacctacgtgaatgaccccgaagataataacagtagctgttggttcccccatgaaggcactaaggagatctgcgccaatggctgcagttgcctatcagaggaggatagtcaggagtatcggtatctttgctttctaagatgggcaggtaacatgtatctcgaaaacactacagatgaccaggaaaatgagtgtcaacatgaagctgtttgcaaagatgagataaatcggccacgtcgtatcctgaacacggttattccacatcagatccagcagcatatagagcggtttatccagcacgaccaggtcggcttcattgtgagaatctag

SEQ ID NO: 187298 - DNA, 1764 bp, synthetic construct
  misc_feature 1..1764: note = Description of Artificial Sequence: Synthetic coding sequence
  source 1..1764: mol_type = other DNA
atgggctgggacctgggcacccggctgttccagcggcaggagcagagatccaggctgtccagaatttggctggaaaagaccagagtgttcctggaggggagcacacggacaccggctctccctcactgtctgttctggttactgcaggttccatcaacacaggatcccctgtttcccggttatggaccacagtgtccggtggatctggccggtcctccttgcctgagacctttattcgggggccttgggggttattggagggcattacaaagaggtagggaggggcgtactatgacctcgcgcgcgtctgagttatctccaggtagatctgtaaccgccgggattattatagtgggtgatgaaatcttgaagggccatacacaggacacgaataccttttttctctgtagaactctccgttctctgggcgtgcaggtgtgccgggttagtgtggtcccggatgaggtggccacaatagcagcagaggtcacctctttctctaaccgattcacgcatgtgctgactgctggtggtatcggcccaacgcacgatgacgttaccttcgaggccgtggcccaagcatttggggacgagttgaaaccccaccctaagctggaggcggccaccaaggccctgggcggtgagggatgggaaaaactgtctcttgttccgtcgtcggctagactgcactacggaaccgacccatgcacgggccagccttttaggttccccctagttagtgtgaggaacgtatatctattcccggggattccggaactactgcgccgcgttctggaaggcatgaaaggcctgtttcagaatccagctgtacagtttcacagcaaggaactgtatgtcgctgctgatgaggcaagcattgcgcccattctggctgaagcgcaggcccacttcggacggcggcttggcctgggctcctaccccgattggggcagcaattactatcaggtgaaattgacccttgacagcgaagaagagggccccctcgaagaatgcctagcgtacttgaccgctcggttgcctcaaggtagccttgtgccatacatgccaaacgcagtcgagcaggcttccgaggccgtgtacaaactggctgagagcggcagcagcctggggaagaaggtcgctggtgccctgcaaacaatcgagacttctctggctcaatacagtctcacacaactgtgtgttgggtttaacggaggcaaggactgcacagctctattacacctgttccacgccgcagtacagcggaagctgccagacgtccccaatcctctgcagattctctacattaggtctatttctccatttccagagctggaacagttccttcaggacacaatcaaacggtataacctacagatgctagaagcggaaggctccatgaaacaagcgctcggtgagctgcaggctagacatccccaattggaagctgtgctcatggggacgcgtcgaaccgatccatattcttgtagcctctgtcctttctctcctaccgaccccggctggccagctttcatgaggataaaccctctgctggattggacatacagggatatctgggacttcctgcgtcaattattcgtgccctattgtatactctacgatagaggatataccagtctggggagcagagaaaacactgtgagaaacccggcccttaaatgtctgagccctggcggacaccccacttatcgcccggcctatctgttggagaatgaggaagaggaaagaaatagccggacttag

SEQ ID NO: 187299 - DNA, 513 bp, synthetic construct
  misc_feature 1..513: note = Description of Artificial Sequence: Synthetic coding sequence
  source 1..513: mol_type = other DNA
atgaagggcctgttccagaaccccgccgtgcagttccacagcaaggaactctatgtggccgcagacgaagcatcgattgcgcctattctagcagaggcacaggcccattttgggaggcggctaggactgggcagctaccccgattggggttcaaattactaccaagttaaattaaccctggactccgaggaggagggtcccctggaggagtgtctggcctacctaacagcccgcctacctcaaggctctttagtgccatacatgccaaatgcggtcgaacaagccagcgaggcggtgtataaactcgcagaatcggggaattacctgatgtttcagacaccatctagaagctgcatcagtgccgcttctcctctcagcctttcctggaattccttctaccgcacgctgtctcgagagcaagccatcccggaaaaccaaattgccagccctccctctgaggccaagggcgccgaggagccatggatggggccttttccagggcagcagggttag

SEQ ID NO: 187300 - DNA, 1473 bp, synthetic construct
  misc_feature 1..1473: note = Description of Artificial Sequence: Synthetic coding sequence
  source 1..1473: mol_type = other DNA
atgaccagccgggccagcgagctgagccccggccggagcgtgaccgccgggatcattatcgtgggcgacgaaattctcaaaggtcacactcaggacacaaacacattttttctctgccgaactttgagatccttaggcgtgcaggtgtgcagagtttcggtggttcctgacgaagtggccaccatcgccgcagaggtaaccagcttttccaacaggttcactcacgtgctcacagccggtggtatcggccctacgcacgacgacgtgacattcgaagccgttgctcaggcatttggagatgaactcaaacctcatcccaagctggaggccgcaactaaggcgctcggcggcgagggttgggaaaaattaagcttagtacctagttctgcacgcctgcactacgggactgacccttgcacgggccagcccttcagattccccctcgtgtctgtgcggaacgtgtacttgttccccggtattcctgagctgctgagacgcgtgctggagggaatgaaagggctctttcaaaatccagccgtccagttccacagtaaggaactctatgtggctgccgacgaggctagcattgcaccgatactagctgaggcccaagcacactttggtcgtaggctcggactcggctcatatcctgattgggggtctaattattaccaagtcaagctcacgctcgacagtgaggaggaaggccctctggaggaatgcctcgcatacctgacggcgagactgcctcagggctcccttgtcccgtacatgccaaacgctgttgaacaagcctcagaagctgtgtacaagctcgccgaatctggatctagcttggggaagaaggtggccggggccctacaaactatcgaaacttctctggctcagtacagcctcactcagctctgcgtgggcttcaacggcggcaaagattgtactgccttactgcatctgtttcatgctgcggtgcaaagaaagctccctgacgtgccaaaccccttgcagattctgtatattaggtctatctctcccttccctgaattagagcaatttctgcaggatacgataaagaggtataatctgcaaatgttggaggcggagggctccatgaaacaggccctgggagagctccaggcacgacacccccagctggaggcagtgttgatgggaacaaggagaactgatccttattcatgctcactgtgcccattttcccctacagaccccggttggcccgcttttatgagaatcaacccactgctggattggacgtatcgcgatatctgggacttcctcagacagctcttcgtgccctattgcatcctttatgacagggggtatacctccttaggcagccgggaaaataccgtgcgcaaccccgccctaaaatgcctgtctcccggggggcaccctacatatcgccccgcgtatttgttagagaacgaggaagaagagaggaactctcgtacctag

SEQ ID NO: 187301 - DNA, 387 bp, synthetic construct
  misc_feature 1..387: note = Description of Artificial Sequence: Synthetic coding sequence
  source 1..387: mol_type = other DNA
atgctggaggccgagggcagcatgaagcaggccctgggcgagctgcaagctcggcatccccagctcgaggctgtccttatggggacccgacgaacagacccttattcttgttcactttgccctttttcgcctacagacccagggtggcccgcctttatgcggataaatcccttgttggattggacctatcgggacatttgggacttcttgagacagctttttgtgccttattgcatactatacgaccgcggctacacttctctgggttctcgagagaatactgtgagaaatcccgccctgaagtgcctctcccccggtggacatcccacatatcgtcctgcgtacttgcttgaaaacgaagaggaggaacggaactctcgcacctag

SEQ ID NO: 187302 - DNA, 885 bp, synthetic construct
  misc_feature 1..885: note = Description of Artificial Sequence: Synthetic coding sequence
  source 1..885: mol_type = other DNA
atgcagcccagcagcagcaccccccccctgcacccctacagcaccgatggattgatatttccctttaatcctcagggccacactcaggatactaacacgtttttcttatgtcgaacactccgttcactcggcgtgcaagtttgtcgcgttagcgtcgtccctgatgaagtcgctaccatcgccgccgaggtgacttctttctccaacaggttcactcacgtccttactgcagggggcataggtcccacacacgacgacgtgactttcgaggctgtggcccaggcattcggggacgagcttaagccgcatccaaaactggaggcggccaccaaagcattggggggggaaggctgggagaagctgtcgctggttcccagtagtgctcgcctgcactatggaacggatccttgtacagggcagcccttccggttcccccttgtctctgtcaggaacgtctacttgtttcctggaattcctgagctgctccgccgggtgttggagggcatgaagggactgtttcagaatccagcagtgcagttccacagcaaagagctgtatgtcgctgccgatgaggcgtctatagcccctatcctcgcagaagcacaagctcatttcggcaggaggttgggcctggggagctatcctgactgggggtccaactattatcaggtgaagcttactctggacagcgaggaggagggtcctctggaggagtgtctcgcttacctgaccgctaggctgccccaaggctctcttgtgccatatatgccaaacgccgtggaacaggcttcagaagcggtctacaagctggcagagagtggcagagacctgatggaggaggggcactacgcccagtcccactggtggcatcccaggtcacaatag

SEQ ID NO: 187303 - DNA, 1341 bp, synthetic construct
  misc_feature 1..1341: note = Description of Artificial Sequence: Synthetic coding sequence
  source 1..1341: mol_type = other DNA
atgaccagccgggccagcgagctgagccccggccggagcgtgaccgccggcatcatcattgttggggatgagattctaaaggggcacacccaggataccaacaccttttttctgtgtcgtacacttaggtctctcggcgtccaggtgtgcagagtctcagtggtgccagacgaagtcgctactatagctgcagaagtgacgagctttagtaacaggttcacccatgtgcttactgcgggcggcattggcccaacgcacgacgacgtaacgttcgaggcggtagctcaggcatttggggacgaactgaaacctcatccaaagttggaggcggccaccaaggccttgggcggagagggctgggaaaagctcagcctcgtcccaagttctgcaagactccattacgggacagatccttgtactggccagccattcaggtttcccctagtgtctgtccgtaatgtctatctattccccggaatccccgagctactgagaagagtcctcgagggcatgaagggcttgttccagaatcccgcagttcaatttcactcaaaagagctgtatgtggcagcggatgaggcgagtattgctcccattctggctgaagcccaagcgcactttggccggcgcctgggactcggcagctaccccgactggggaagcaattattaccaggtcaaactgactttagattctgaggaggaaggacctctggaagagtgccttgcgtatctaaccgcaagactgcctcagggctctctggtaccatatatgccaaatgctgtcgagcaggcttccgaagcggtgtataagctggcagaatccggttcttctctcggaaagaaagtcgctggggctctccagacaatcgaaacctctctggctcagtacagcctcacgcagctctgcgtaggctttaacgggggtaaagattgtactgccttacttcatctgtttcacgctgcagtccagagaaaactcccagatgtgcccaatcctttacagattctgtacatcagatctatttcccccttccctgaattggagcaatttctgcaggatactattaagcggtataatctgcagatgctggaggcagagggttctatgaaacaagcactaggcgagctccaagcccgacatccacagctcgaagcggtccttatggggactcgacgaactgatccatactcatgtagcctgtgtccattctcacctacagatcccggctggccagccttcatgagaattaacccactcttagactggacatatcgggacatatgggatttcttgcggcaactgttcgtgccttactgtatcctgtatgaccgaggctag

SEQ ID NO: 187304 - DNA, 1371 bp, synthetic construct
  misc_feature 1..1371: note = Description of Artificial Sequence: Synthetic coding sequence
  source 1..1371: mol_type = other DNA
atgggctgggacctgggcacccggctgttccagcggcaggagcagagaagcagactctcaagaatttggctggagaaaactcgagtgttcctggagggaagcacgaggacccccgccctgccccattgcctgttttggctcctgcaggtgccctcaacccaggaccccctcttccccgggtacggacctcagtgtcccgtcgaccttgctgggccaccttgtctgaggcctctatttgggggattgggggggtactggagagcgttacagcgtgggagagagggcagaactatgacgtcccgtgcatctgagctgtcacccggcagatctgtcaccgctggcattattatcgtcggagatgaaattctaaaaggccacactcaggacacaaataccttcttcctgtgccggacactgcgctcactgggggtgcaggtctgtagagtttccgtcgtgcccgacgaagttgccaccatcgctgctgaagtgacatctttctctaaccgcttcacacatgttctgacagccgggggaattgggcctacacatgacgacgtgacgtttgaagcagtggcccaggctttcggggatgagctgaagccccatcctaagctcgaggccgccactaaagccctgggaggggagggttgggaaaagttgtcccttgtcccatcttcggccagacttcactacggcaccgacccttgtactggccagccatttcgctttcccctggttagtgtgcggaacgtatacctattccccggcatccctgagctgctgcgcagagtgctggagggcatgaagggcctgtttcaaaaccccgccgtccagtttcactccaaggaactgtatgtggcagccgatgaggctagtatcgcccctatcctcgcggaagcacaagcacacttcggtcgacggctgggcttgggctcctatccagattggggcagcaattactaccaggtgaaactgacactggactctgaagaggaaggcccactggaggaatgcttggcctatcttaccgcccgtttgccccagggtagcctcgtcccatatatgcccaacgctgtggagcaagcctcagaagccgtttataagcttgcggagtccggttcctctctagggaaaaaggtggccggggcactgcagaccatcgagacttccttggcgcagtatagtctcacccaactctgcgtcgggttcaacgggggtaaggactgcactgccttgctgcatctcttccacgccgccgtgcaaagaaaactccccgatgttccaaaccctctgcaaatcctctatattcgtagtatctcccccttccccgaactggagcaattcctgcaggatacgatcaaacgctattag

SEQ ID NO: 187305 - DNA, 1017 bp, synthetic construct
  misc_feature 1..1017: note = Description of Artificial Sequence: Synthetic coding sequence
  source 1..1017: mol_type = other DNA
atgcagcccagcagcagcaccccccccctgcacccctacagcaccgacggactgatattccccttcaacccccagggtcacacccaagacaccaacacctttttcctatgtagaacgttgcggtccctgggcgtgcaggtgtgtcgagtgagtgtggtgcctgacgaagttgctactatagccgcagaggtaacgtctttctcgaatcggttcactcacgtgttgacagcaggtggcatcggccccacacacgatgatgtgacatttgaggccgttgcacaagcgttcggggacgaactgaagcctcatcccaaactcgaagcagctaccaaggcgctcgggggggaagggtgggagaagttatcattggtgccctccagcgcaaggttacattatggaactgacccttgcacgggccagcccttccgattcccacttgtgtctgttcggaatgtgtatctgttccccggcatccccgagctccttagacgggtcctcgagggaatgaagggtttgttccaaaatcctgctgttcagttccatagtaaggagctctacgtggccgctgacgaggcctcaattgctcctatcctggcagaagcccaggcccacttcgggaggcggctcggtctgggtagctacccagattgggggtccaattattatcaggtgaagctcactttagactccgaagaggagggcccactggaagaatgcctggcctacctgacggcccggttaccccaaggctctttagtgccctacatgcccaatgctgtcgaacaggccagcgaagcggtctataagctcgccgagtctggcaactatctgatgttccagacccccagcaggtcctgtatttccgccgcgagccccctaagtctgtcttggaattccttctataggacactgtccagggagcaggccatcccggagaatcaaattgcgtccccccccagcgaagctaagggggccgaggagccttggatggggcccttccccggccagcagggctag

SEQ ID NO: 187306 - DNA, 1461 bp, synthetic construct
  misc_feature 1..1461: note = Description of Artificial Sequence: Synthetic coding sequence
  source 1..1461: mol_type = other DNA
atgatccggcgggtgctgccccacggcatgggccggggcctgctgacacggcggcctggcacgaggcgggggggcttctctctggactgggatggcaaagtctccgagattaaaaagaagattaaaagcattctcccgggaaggtcttgcgacctgttgcaggataccagtcatctgcctcccgagcactctgatgttgtcatagttggcgggggagtcctcggactgtccgttgcttactggctgaagaaactcgagtcgcggcgtggcgccatcagggtgttggtggtagaaagagatcatacatactctcaggcttctactggcctgtcagtcggcggaatctgtcaacaattcagtctgcccgagaacatccagctgagcctgttctcagccagctttctgcgaaacatcaacgaatatctagccgtcgtggacgcccctcccctcgacctgcgatttaatcccagcgggtatctgctgctcgcatcagaaaaggatgcagcagctatggagagtaatgtgaaggtgcagaggcaggaaggggcaaaggtctcactgatgagccctgaccagcttcggaacaagttcccatggataaataccgagggagtggccctggcctcctacggtatggaggacgaggggtggtttgacccgtggtgtctactgcagggtctccggaggaaggtacagtcgcttggcgtgttattctgtcagggcgaagtaacacggtttgtgtcctccagccaacggatgctaacaacggacgataaagccgttgtcctgaagagaatccatgaagtacatgtgaagatggaccgatcacttgagtaccaacctgttgaatgtgctatcgtaatcaatgctgctggagcttggagcgcccagattgcagctctggcaggggttggagagggccctcctggtaccctacagggcaccaaattgccggtcgagcctcggaaaaggtacgtgtacgtttggcattgtccacaaggaccagggctcgagacaccgttggtcgccgataccagcggggcttatttcagacgagagggcttaggttcgaactacctgggcgggcgctctcctacggaacaggaggaacctgaccccgctaacctggaggtggatcacgatttcttccaggacaaagtgtggcctcacctggccctgcgggtccccgcgttcgaaaccctgaaagttcaatccgcctgggctggctactacgactacaataccttcgatcagaacggtgtggttgggccacatccactcgtagtgaacatgtattttgccactggcttcagtggacacgggctgcagcaggcccccggcattggcagggcggtcgctgaaatggtgctgaaaggaaggtttcaaaccatcgatctttcacccttcctgttcacacgattctatcttggcgagaagatccaagaaaataacataatatag

SEQ ID NO: 187307 - DNA, 951 bp, synthetic construct
  misc_feature 1..951: note = Description of Artificial Sequence: Synthetic coding sequence
  source 1..951: mol_type = other DNA
atggagagcaacgtgaaggtgcagcggcaggagggcgccaaggtgtctctgatgagccccgaccagctgcgtaataaatttccctggataaacacagagggggtggcccttgcctcctacggaatggaagatgaaggttggtttgacccgtggtgcctgctgcaggggcttagacggaaggtacagagtctgggagtactgttctgtcaaggtgaggtcaccaggtttgtgtctagctctcagcggatgcttaccaccgacgataaagccgtggttttaaagaggatacacgaagtccacgtcaaaatggataggagcttggagtaccagccagtggaatgcgccattgtgataaatgcggctggagcatggtccgcccagattgccgctctggcaggcgtgggagagggaccgccaggtaccctgcagggcactaagctgccagtcgagccgagaaaacggtacgtctatgtgtggcactgcccacagggcccaggccttgaaactccactggtcgccgatacttccggcgcatactttcgccgggaggggttgggtagcaattatctggggggacgctcccctacagagcaagaggaacccgatccagccaacctcgaggtggatcacgacttcttccaggacaaagtgtggccacaccttgctcttagagtgcccgcttttgaaaccctgaaagtgcagtcagcttgggcaggttactacgattacaacactttcgaccaaaatggggtcgttgggccacaccctctggtggttaacatgtatttcgccacaggcttcagcgggcatggtttgcagcaggctccaggtatcgggcgggccgtggctgagatggtcctcaagggccgcttccagaccatcgacctgtctccattcctgttcacgcggttctatctgggcgagaagatacaagagaataacataatttag

SEQ ID NO: 187308 - DNA, 1419 bp, synthetic construct
  misc_feature 1..1419: note = Description of Artificial Sequence: Synthetic coding sequence
  source 1..1419: mol_type = other DNA
atggcccacaccggccggaccgtgggccggctgggcgagggcgactgggacggaaaagtcagcgagattaagaagaagatcaagtccatcctgccaggacgaagttgcgatctgctacaagacacatcccatctgcccccagaacactctgatgtggttatagtgggcgggggcgtcctgggtctcagcgtcgcttactggctcaagaagctcgagtcccggagaggcgccatcagggtgctcgtggtcgagcgcgaccacacatattcgcaagccagtacagggttatcggtcgggggcatttgccagcagttttctctcccagaaaacatacaattgtctctcttctcagccagcttcctacggaatatcaatgagtacttggcagttgttgacgctccccctcttgacttacggtttaacccttccggataccttctgttagcctcagaaaaagatgctgctgccatggagagtaatgtgaaggttcagcggcaggagggggctaaggtgagccttatgtcccctgatcagctccgcaacaagtttccatggattaataccgagggcgtcgcactcgccagctacggaatggaggatgaaggctggtttgacccctggtgtctgctccaagggctgcgacgaaaggtgcagtctctgggcgtgctattttgccaaggggaagtgacgcgctttgtcagtagcagtcaaaggatgcttacgaccgatgacaaagctgtcgtcctgaaacgcatccatgaagttcacgtcaaaatggacaggagcctggagtatcaaccggtcgagtgtgctatcgtcataaacgccgccggcgcctggtctgcacagatcgcagccctggcaggagtgggggaaggaccacccggcactctgcagggcacaaagcttccagtggagcctagaaaacggtacgtgtacgtgtggcactgcccacaaggacccggcttggagacccctctggtggccgatacgagtggcgcatattttagacgggaaggcctgggctcaaattatctgggaggacgtagcccaactgagcaggaggagcctgatcctgcaaatctcgaggttgaccacgatttcttccaggacaaagtgtggccacatctggctctccgggtccccgcattcgaaactctaaaggtccagagcgcatgggcgggttattatgattacaacactttcgatcagaacggggtggtgggaccacatccgctggtcgtaaatatgtactttgcgacaggattcagcgggcacggattgcagcaggcccccgggatcggtcgtgcagtggcggagatggttttaaagggacggttccaaaccatcgatctgagcccatttctcttcacccgcttttaccttggcgagaagattcaggaaaataacatcatctag

SEQ ID NO: 187309 - DNA, 501 bp, synthetic construct
  misc_feature 1..501: note = Description of Artificial Sequence: Synthetic coding sequence
  source 1..501: mol_type = other DNA
atggcccagcggctgctgctgcggcggttcctggccagcgtgatcagccggaaaccttctcagggacagtggcctccactgaccagccgcgcattacagacaccacagtgtagccccggcggattgactgtgacaccaaatccagcccgtactatttacacaaccagaatcagcctgactacctttaacatccaagacggccccgactttcaggaccgcgtagtcaactcagaaacccctgtggttgtcgacttccacgcacagtggtgcggcccttgtaaaattctcggaccccgcctcgaaaagatggtcgctaagcagcatggaaaggttgtgatggccaaggttgatatcgacgaccatacagacctggctatcgaatatgaagtctcagccgtgcctacggtactggctatgaagaatggagatgtggtggacaaattcgtgggaatcaaggacgaagaccagcttgaagccttcctaaaaaagctgatcgggtag

SEQ ID NO: 187310 - DNA, 2055 bp, synthetic construct
  misc_feature 1..2055: note = Description of Artificial Sequence: Synthetic coding sequence
  source 1..2055: mol_type = other DNA
atgggcctgagcgccgccgcccccctgtggggcccccccggcctgttacttgcgattgccctgcacccggctctgtcagtcccacctcgcagggactactgtgtgctcggtgccggccctgccgggctgcagatggcttacttcctccagcgcgcgggtagagactatgcagtgttcgaaagagccccgagacctggctcattctttactcgctacccgagacataggaagctgataagcatcaacaaacgttacaccggtaaggccaacgccgagtttaacctgcggcacgattggaatagcctgctgagccatgaccccaggctgctgtttagacactacagtcgagcgtattttcctgatgcccgggacatggtgcggtacttgggcgattttgcagataccttgggactgagggtgcagtacaatacaaccattgcacacgtgactctggacaaggatcggcaagcttggaacggccactacttcatcttgacagatcagaaagggcaggtgcatcagtgcagcgtcctttttgtagctacaggactgagcgtgcctaatcaggttgacttccccggctcggagtacgcagagggatacgagtccgtatcagtggatcctgaagattttgtggggcagaacgtgttgattttaggccgtggcaactctgccttcgaaactgccgaaaacatcctgggggtgacgaacttcattcatatgctgagccggagccgcgtgagactatcttgggcgacacactacgtaggggatctgagagctatcaataatgggctgttggatacataccagctgaagagcttagatggcttgctcgagagcgatctgacagatctggcaattctgaaggactcaaaaggtaagttccatgtcacacctaaattctttctcgaagaagccaacaccaaccagagcgctgattctattaccttgcctcaggatgacaacgacaattttgcgatgagagtgccttacgatagggttattcgttgcctcggatggaatttcgatttttccatctttaacaaatccctgcgccttaacagtgggaacgcctttgggaagaaatatcccctcatccgggcaagctatgaatccaagggctcccgaggattgttcattctgggcaccgcctcccacagcgtcgattacaggaagtctgcgggaggttttattcatggctttcgttataccgttagagccgtgcacagattgctggagcataggcatcacagtgtaacttggcctgctacagagctgccaattacgcagttgaccagctccatcgtgcggagggttaatgaggcgtctggtctgtatcaaatgttcggggtgcttgccgacgtaatcctcctgaaggaaaacagcactgccttcgaatacctggaagagtttcctattcagatgctcgcacaactcgagacacttaccggccgaaaggccaaacatggtctttttgtcatcaatatggagtacggccgcaacttctccgggcctgataaagacgtgtttttcgacgaccggtccgttggtcatactgaagacgcctggcagagcaatttcctgcacccagtgatctactactataggtacttgcctaccgagcaggaagtccggtttcgccctgcgcattggccacttccgcggccaactgcaattcatcacatcgtggaggattttctaaccgactggactgccccaatagggcacatcctaccactaagacgcttcctggagaactgcctggacaccgacttgaggagcttctatgccgagtcatgtttcctattcgccttaacaaggcaaaaattgcctcctttctgccagcagggatacctgagaatgcagggtctggtctctaccgagagcctctggcaacaccgtgtggaaagtagactgctcagagattatgcccccaccggaaggcgcctggaagattccagtcagcagctgggcgaccaggagcctctgggttctcctctggcgcccggtccactggcccagagtgtggactcgaacaaggaggagctttag

SEQ ID NO: 187311 - DNA, 2055 bp, synthetic construct
  misc_feature 1..2055: note = Description of Artificial Sequence: Synthetic coding sequence
  source 1..2055: mol_type = other DNA
atgggcctgagcgccgccgcccccctgtggggcccccccggcctgctgctagcaatagcattacatcctgccctgtctgtcccgccacgtagagattactgcgtgctgggcgctgggcccgccgggctccagatggcgtacttcctgcagcgagctgggagggattacgcagtctttgagcgcgcccctaggccaggtagtttttttacccgatatcctaggcataggaagctgatctcaatcaataagagatatactggaaaggccaacgccgagttcaacctgcgccacgattggaactccctgctgtctcatgaccccaggctcctatttaggcattactccagagcttacttcccagacgcccgagacatggtccggtacctcggcgatttcgctgataccctgggccttcgggtccagtacaacaccaccattgcccacgtgacactggacaaagatcgccaagcatggaatgggcactatttcatcctaaccgatcagaaaggccaagtacaccagtgtagcgtactgttcgtcgccacagggctatccgtcccgaaccaggtagactttcccggaagcgagtacgctgagggctacgagagtgtctcagtcgatccggaagattttgtcggacagaatgttttaatcttggggaggggcaattccgccttcgagactgcggaaaatatcttgggtgtgacaaacttcatccacatgcttagtcgttccagggtccggctgagctgggccacacactacgtcggagaccttagagctataaataatgggcttctggatacttatcaactcaaaagtttggatgggcttttagagagtgatctgacagatctcgctattctaaaagatagcaagggaaaattccatgtgacacccaagttttttcttgaggaggccaacacaaatcagtcagctgactctatcacccttccacaggatgacaatgacaatttcgctatgagggttccatacgaccgggtgattagatgccttggctggaattttgatttttccattttcaataagtctctccgtctgaattccggcaatgcttttgggaagaaatacccactgatcagagcgagctatgagagcaaagggtctcgagggctgttcatcttagggactgccagccactccgtggactacaggaagagcgcaggtggcttcatccacggctttcggtataccgtgcgtgccgtgcatcgcttgctcgaacaccgccaccactccgtgacttggcctgccacggagctgcccatcacccagctaacctcatccatcgtgaggcgggtcaatgaagcaagtgggctgtaccagatgttcggggtgcttgccgacgtgatcctcctcaaagagaacagtacggcgtttgagtatctcgaagagttccctatccagatgctagcccagctggagacactgaccggccgcaaagctaagcatggactgttcgtcatcaacatggaatacgggcgcaatttctccggacctgataaggatgtcttctttgacgatcggtctgttgggcacactgaagacgcatggcagagtaatttcctgcaccccgtaatctactactaccgctatctgcccacagaacaggaggtgagatttaggcccgcacattggccattgcctcgaccaacggcaatccatcatatagttgaagatttcttgaccgactggactgctcctattgggcatatactgccactgagacggttcctggagaattgtttagacaccgaccttcgtagcttctacgccgagtcatgctttcttttcgccctcacccggcagaaacttcctcctttttgccagcaggggtatctgaggatgcagggactggtcagtacggagtccctctggcagcacagagtggagtctcggctgcttagggactatgcccccactggacggagactcgaggactcatcacagcagctgggcgaccaggaacctcttgggtcacccctggccccaggtcccctggcccagtctgtggattccaacaaggaagaactgtag

SEQ ID NO: 187312 - DNA, 261 bp, synthetic construct
  misc_feature 1..261: note = Description of Artificial Sequence: Synthetic coding sequence
  source 1..261: mol_type = other DNA
atgggcctgagcgccgccgcccccctgtggggcccccccggcctgctgcttgccattgcgttacaccccgccctttcagtccctccgcgcagagattactgcgtgctcggggctggccctgccggattacagatggcttatttccttcagcgcgccggcagagattacgcagttttcgaacgagccccccggcctggttcctttttcacacgttatccccgtcaccggaagcttattagcatcaacaagcgttatacctag

SEQ ID NO: 187313 - DNA, 729 bp, synthetic construct
  misc_feature 1..729: note = Description of Artificial Sequence: Synthetic coding sequence
  source 1..729: mol_type = other DNA
atgttcctgctgagcggcgacccctgcttcaagaccccccccagcacagccaagtctatttctattcccggtcaggactcatctctgcagctcacttgtaaaggaggcggaaccagcagcggcggaagctcaactaactcacttactggctcccggcctccaaaagccaggccaaccatacttagtagcggtctgcctgaggagcccgaccagaacctcagctcccccgaggaggtttttcactctgggcactctaggaattcaagttatgcgagccagcagagtaaaatcagtggatactcaaccgagcactctcgttcgtcaagtctgtccgatctgacccacagacgcaacacgtcaacttccagctcagcaagcggtggattagggatgactgttgagggacccgaaggctcggagagggagcatcgccccccagagaagccgccgagaccaccacggccgttacacctcagtgatcgctcctttcgccgcaagaaagacagcgttgagagccatcccacttgggtggatgataccaggattgatgctgacgccatagttgagaagattgttcagtcccaggacttcactgacggcagcaacacagaggactcaaacctgaggctcttcgtttctagagacgggtccgctaccttaagtggcatccagctggcgacccgtgtgagttccggggtctatgagcccgttgttatcgagtcacattag

SEQ ID NO: 187314 - DNA, 1155 bp, synthetic construct
  misc_feature 1..1155: note = Description of Artificial Sequence: Synthetic coding sequence
  source 1..1155: mol_type = other DNA
atggccttcctgatgaagaagaagaagttcaagttccagaccaccttcaccttagaggaactgaccgctgtgcccttcgttaacggagtactgttctgcaaggtgaggctactcgatggtggtgattttgtgagtctgagctcaagggaggaggtgcaagagaactgcgttagatggaggaagagattcacgttcgtttgtaaaatgtcagccaaccctgcgaccgggcttctggacccttgtgtattccgcgtatcagtgcgtaaggaactgaagggcgggaaggcgtactctaagctcggctttgcagacttgaatctggccgagtttgcgggttccgggtcgactgtgaggtgctgtctgctggagggatacgacactaagaatacacgccaggataatagcatcctcaaggtcacaattggaatgttccttctgagtggagatccctgttttaagacacctccatctaccgctaagtccatatcaattcctggccaggatagtagtctccagctgacctgtaagggcggcggaaccagtagtggaggtagttctacaaacagcttgactggttcacggccgcctaaggcaaggcctacaatactgtcctcagggctgcccgaggaacccgaccagaacctttcgtcccccgaagaggtcttccacagcggacacagtcggaacagctcctacgcctctcaacaaagcaagatttccggatattctacagagcattctagatcttcaagtctgagcgacctgacgcacagaaggaatacgagcacttcttccagtgccagtggaggcctggggatgaccgttgaaggccccgagggtagcgaaagggagcataggccacctgagaagcccccccgccctccacggccgcttcatctgtcagatagaagttttcgtcgaaaaaaagatagcgtggagagccaccccacttgggtcgacgacacccgcatagatgcagatgcaattgtcgaaaaaatcgtccagagccaggacttcaccgacgggtctaatactgaggactctaatctgagactgtttgtgtccagagacggctctgccaccctttctgggattcaactggctacacgggtctcctccggcgtgtatgagcccgtcgtcatcgagagccactag

SEQ ID NO: 187315 - DNA, 435 bp, synthetic construct
  misc_feature 1..435: note = Description of Artificial Sequence: Synthetic coding sequence
  source 1..435: mol_type = other DNA
atgtacagcgagatccagcgggagcgggccgacatcggcggcctgatggccaggccagagtacagagagtggaaccccgaacttattaagcctaagaagttattaaaccctgttaaggcgagcagatcacaccaggagttgcatcgggaattgctgatgaaccatcgcagaggcctcggagtggactcgaagccggagctgcaaagggtactggaacacaggcgccgaaatcagctgattaagaaaaaaaaggaggaactcgaggctaaacggctccagtgccctttcgaacaggagcttttacgtaggcagcagagactgaaccagttggagaagccccctgagaaggaggaggatcacgctccagaattcataaaggtcagagagaacctgcgtaggatagcaacactgacctctgaagaaagagagctgtag

SEQ ID NO: 187316 - DNA, 435 bp, synthetic construct
  misc_feature 1..435: note = Description of Artificial Sequence: Synthetic coding sequence
  source 1..435: mol_type = other DNA
atgtacagcgagatccagcgggagcgggccgacatcggcggcctgatggcccgaccagaatatagggaatggaacccggagctgatcaagccaaagaaactcttgaaccccgtgaaagccagccggtcacatcaagaactgcatagagaattattgatgaaccaccggagggggttaggcgtcgactccaagccagagttacaaagagtactcgaacatcggaggaggaatcagttaattaaaaagaaaaaggaagagcttgaagcaaagcgactacagtgccccttcgagcaagagttactaagacgccagcagagactcaaccagttggaaaaacctcccgaaaaggaggaggaccacgcccccgagttcattaaagtgcgcgagaatttgaggcggatcgcaacactgacatctgaggaaagagaactgtag

SEQ ID NO: 187317 - DNA, 519 bp, synthetic construct
  misc_feature 1..519: note = Description of Artificial Sequence: Synthetic coding sequence
  source 1..519: mol_type = other DNA
atggcccagcggctgggcgagtgggcccggggccccagcgacgccacagggctttacagagccgtgctcttacgatccgctgctatgtacagcgaaatccaaagagagagggctgatattggtggtctcatggcaaggcccgagtatcgggaatggaaccccgagctgataaagccaaagaagctgctgaacccagttaaggcgtctcgctctcatcaagagctgcatagagagctcctgatgaatcataggcgtggcctaggggtcgattcaaagccagagctgcagagagtcttggagcatcggagacgtaatcagctcatcaaaaagaaaaaagaggagctcgaagccaagcgcctccagtgtccctttgagcaagaattattaaggcggcagcagcgcctgaatcagcttgagaagccccccgagaaggaggaggaccacgcacctgaatttattaaagtgcgcgagaacttgcgaagaatcgcaaccttaacctccgaagagcgcgaactctag

SEQ ID NO: 187318 - DNA, 408 bp, synthetic construct
  misc_feature 1..408: note = Description of Artificial Sequence: Synthetic coding sequence
  source 1..408: mol_type = other DNA
atgtacagcgagatccagcgggagcgggccgacatcggcggcctgatggctcggcctgagtatcgcgaatggaatcccgagctgattaagcctaaaaagctgctcaacccagttaaggccagtcgaagccaccaggagctgcaccgagagctattaatgaaccatagacgcggactgggcgtagattctaagccagagctacaacgtgtgctggagcaccgccgacgcaatcagctcataaagaaaaaaaaggaggagctggaggctaagagactccagtgtccattcgagcaggagctgttgagacgacaacaaagacttaatcaggtgggtgatgggcatcctgcggggacaacacaccccccagggctatcgagccgggaagagctttgctgtggtcattcatag

SEQ ID NO: 187319 - DNA, 318 bp, synthetic construct
  misc_feature 1..318: note = Description of Artificial Sequence: Synthetic coding sequence
  source 1..318: mol_type = other DNA
atgtacagcgagatccagcgggagcgggccgacatcggcggcctgatggcacgacctgagtacagggaatggaatccagaattgatcaaaccgaagaagctgctcaatcctgtgaaggccagtaggagccatcaggaacttcacagggagctacttatgaaccatcgccgcggactcggcgtggactctaagcctgaactgcagcgggtgttggaacaccgaaggcggaatcagctgattaaaaagaaaaaggaggagctcgaggccaaacgactgcagtgtccatttgagcaggaactgctgaggagacagcagtag

SEQ ID NO: 187320 - DNA, 528 bp, synthetic construct
  misc_feature 1..528: note = Description of Artificial Sequence: Synthetic coding sequence
  source 1..528: mol_type = other DNA
atgggcgccgcccagggcaagaagaagacctacagcccccaggcccgttttcactcagagaatgaaaaacagcgcagaaatggaagcgccgcaatgtactccgagatccagagagagagagcggatatcgggggcctgatggcgcgcccagaatatcgagaatggaatcctgagctaattaaacccaaaaagctgttaaaccctgtgaaagcatctcgatctcaccaggagctccatcgcgaactccttatgaatcaccgcaggggactcggggttgatagcaaacctgaactccagagggtccttgaacaccggaggcgcaatcagctgataaagaaaaagaaagaggaactggaggccaaacgattgcagtgccccttcgaacaggagttgctgcggaggcagcagagacttaaccagctcgaaaaacctccagagaaggaagaggaccatgcacctgagttcattaaggtgcgtgagaatctaaggcggatcgcaactctcacctccgaggagagagaactgtag

SEQ ID NO: 187321 - DNA, 789 bp, synthetic construct
  misc_feature 1..789: note = Description of Artificial Sequence: Synthetic coding sequence
  source 1..789: mol_type = other DNA
atggcccccggcagcccccccggccccgccatcgccaccatgaagcttaacgaaagatccctagctttctatgcaacgtgtgatgcgcctgtagataatgcaggatttctgtacaaaaagggcggcaggcacgcagcatatcacagacgctggttcgttcttcgcgggaacatgttattctatttcgaggatgcagctagccgggaaccagtcggggtgattatcctggagggatgcaccgtggaactggtagaggctgccgaagagttcgccttcgcagtgaggttcgccggaactagagcacgcacctatgtgttggccgcagagtcccaggacgccatggagggatgggtgaaggctctgtctagggctagcttcgactatctgcggctggtcgtgcgagagctggaacagcagttagccgccgtaaggggcggcggagggatggctctgcctcagccccagccccagagtttgccgctcccaccctccctgcccagcgccttggcccctgtgccatcactgccgagtgcacctgcaccagtgccggcgttacctttacccaggcggcctagcgctctgccacccaaggagaacggttgcgccgtgtggtccacagaagccacatttcggccagggccggagccgccacctccaccccctcggaggcgggccagcgccccacatgggccattagacatggcccccttcgccagattgcacgaatgctacggccaggaaattagggcactgcgaggccagtggctgagctcgcgcgtccaaccttag

SEQ ID NO: 187322 - DNA, 750 bp, synthetic construct
  misc_feature 1..750: note = Description of Artificial Sequence: Synthetic coding sequence
  source 1..750: mol_type = other DNA
atgaagctgaacgagcggagcctggccttctacgccacctgcgacgctccagtggacaacgctggttttttgtacaagaaaggcggcagacacgcagcgtaccatcggcgttggttcgtcctaaggggaaacatgctcttctattttgaggatgcggctagccgagagccagtgggggtgataatcctggaaggatgtactgtcgagctggttgaggcagcagaggaattcgctttcgccgtgaggtttgctggtacacgggctcgtacgtacgtcctggccgccgaatcacaggacgccatggaagggtgggtaaaggcattatcaagagcatccttcgattatttacgcctagtcgtgagggaattagagcagcagctggctgcggtaagagggggcggtgggatggctctgccccagccacagccccagagcctgcctctgccaccgtctctgccatctgctttggcccccgtgccctcgctcccaagcgccccagcccctgtccccgctcttccccttcccaggcgaccatcagcccttcctcccaaggagaatggatgtgctgtgtggtcaaccgaagctacattcaggccaggtccagagcccccgccaccccccccccggcgtcgcgccagtgccccacacggccctttggatatggcaccctttgcccggcttcatgaatgctatgggcaggagattcgggcacttagaggccagtggctgtcctcaagggtccaaccttag

SEQ ID NO: 187323 - DNA, 267 bp, synthetic construct
  misc_feature 1..267: note = Description of Artificial Sequence: Synthetic coding sequence
  source 1..267: mol_type = other DNA
atgaagctgaacgagcggagcctggccttctacgccacctgcgacgctccggtcgataatgctggcttcctgtacaagaaaggaggtaggcacgccgcctaccatcgccggtggttcgtactccgcggcaatatgctgttttactttgaggacgcagctagccgtgaaccagtaggcgtgatcatcctggtggctgtggcactttggccacgggctctgtctgtttccccctggtggctcagccaaggttccccagacaccccttag

SEQ ID NO: 187324 - DNA, 849 bp, synthetic construct
  misc_feature 1..849: note = Description of Artificial Sequence: Synthetic coding sequence
  source 1..849: mol_type = other DNA
atgcaggccagctgcacccggcgggtgggcggcacccggcccaccaccggcgccggttcatgctgtgccggcacctgcagcagtacatctaggaccttgcctgcagtgagcccatgggcaagttctagttggagagccgcattgtggtcatggtggagaccccccagatcctctcccagcctctgcgcactcaggggccccggaagagcccctacctgctggcccttgagagttcgaatgccctggagggctggcagccggccttgccgagttccagccagcaccacgtgcggttggtggtgcgcttcatggtcttcgagctggaggctttatgtggcaggtgtcgcatggccgtgtccatctcctagcccgtcgccatgcccatgcccacgtccatgccctttgccgtggccacagagtcatccatgtctgcttccccagcctaggtcacagccatgtccttgccccgctgggcccgtaccctcacgccccagacgaatggcagccctgagcggagcacttaggcctccaagcggcttagatccctctcctctacatcatcgcctcgccgctgggccacgccaccccactgggccatggacatggccccccagtcctggctgcacctccgccatggccaggagatctggaccttgtgtggcctctggcagcgctgccgggtctagtcctgaagccaccagggctccagtgttgggcggccataagctgtacgcactgtgggaccggcccgggcccggggaaaccgggggggcggatccggagggaaaccacggacaggggtggccccccggacccgagtggcctgggtttggtggatgccgactatag

SEQ ID NO: 187325 - DNA, 354 bp, synthetic construct
  misc_feature 1..354: note = Description of Artificial Sequence: Synthetic coding sequence
  source 1..354: mol_type = other DNA
atgaagctgaacgagcggagcctggccttctacgccacctgcgacgctcccgtcgataatgccggtttcctgtacaagaaaggcggccggcatgcagcctaccatcggcgctggttcgtgctgcgcggaaacatgctcttttattttgaggatgcggcaagcagggaacctgtgggagtcatcattctagaaggctgcaccgtagagttagtggaagcagccgaagagttcgcattcgccgtaaggttcgcaggcacccgcgcacgaacttatgtcctggccgcagagtcacaagacgctatggagggttgggtgaaggctctgtctagagcatcttttgactacctgaggtag

SEQ ID NO: 187326 - DNA, 750 bp, synthetic construct
  misc_feature 1..750: note = Description of Artificial Sequence: Synthetic coding sequence
  source 1..750: mol_type = other DNA
atgaagctgaacgagcggagcctggccttctacgccacctgcgacgctccggttgataacgccggttttctgtacaagaaaggaggtagacacgccgcttaccatagaagatggtttgtgcttaggggaaatatgctgttctacttcgaggacgctgcctcccgggagcccgtaggggttatcatcctggaaggctgtacagtggagttagttgaggcagctgaggagttcgcattcgcggtgcgtttcgcagggacccgtgcccgcacttacgtgcttgctgccgagtctcaggacgctatggaagggtgggttaaagcactgtcccgagctagtttcgactacttgaggctggtagtgcgagagctggagcagcagctggccgcagtgcgcggcggcggcgggatggctttgcctcagccacagccccagtcgctgcccctgcccccgtctctgccatcagctctcgcaccggtgccaagcctgccctccgccccagcaccagtgcccgcccttcccctgcctcgtcgccccagcgcactgcccccaaaggagaacggatgtgcagtgtggtcaactgaagcgacttttaggccaggccccgagcctccaccaccaccaccccgcagaagggccagcgctccgcacggacctctcgatatggctccgttcgcccgcttgcacgaatgctacgggcaggagatccgtgccttgcgaggccaatggcttagcagcagggtgcagccttag

SEQ ID NO: 187327 - DNA, 750 bp, synthetic construct
  misc_feature 1..750: note = Description of Artificial Sequence: Synthetic coding sequence
  source 1..750: mol_type = other DNA
atgaagctgaacgagcggagcctggccttctacgccacctgcgacgcacctgtggataacgcaggcttcctgtataaaaaagggggtcgccatgcagcatatcatagacgttggttcgttctacgaggtaacatgctgttttacttcgaagacgccgcatctcgagaacctgttggcgtgattattcttgagggctgcaccgttgagttggtggaagccgcagaggagtttgccttcgcagtgagattcgctggcactcgcgcccgtacgtatgtgctagccgctgagtctcaggatgctatggaaggatgggtcaaggctctgagccgggcctctttcgattacctgcggcttgtggtcagggagctggagcagcagctggctgcagttaggggaggaggcggtatggcactgccccagccgcagccccagtcactgccacttcccccatccttgccaagcgcattagcacctgtcccctctttgcctagcgcccccgcgccggtccccgctctgcctctgccaagacggccctcagctctcccacctaaagaaaatggatgcgccgtgtggagtaccgaagctacatttcgtcccgggccagagccaccacctccaccacctaggcgccgggctagcgccccccacggacctctggacatggccccttttgcccgacttcatgaatgctacggacaggagattagagcgctgaggggccagtggcttagcagccgcgtgcaaccttag

SEQ ID NO: 187328 - DNA, 225 bp, synthetic construct
  misc_feature 1..225: note = Description of Artificial Sequence: Synthetic coding sequence
  source 1..225: mol_type = other DNA
atgaagctgaacgagcggagcctggccttctacgccacctgcgacgcccccgtggacaatgcgggattcttatacaagaagggcggcagacatgctgcctatcatcgccgctggttcgttctcagggggaatatgcttttttactttgaagatgcagcaagccgcgagcctgtgggagtcatcattctggaggggtgtacagtggagctggtggaagccgcctag

SEQ ID NO: 187329 - DNA, 243 bp, synthetic construct
  misc_feature 1..243: note = Description of Artificial Sequence: Synthetic coding sequence
  source 1..243: mol_type = other DNA
atgaagctgaacgagcggagcctggccttctacgccacctgcgacgctcctgtagacaatgctggttttttgtacaagaaaggaggccgccacgccgcctaccacaggcggtggttcgtcctgcgaggtaatatgttgttctacttcgaggacgccgcaagccgggaaccagtcggcgtcatcattctcgagggttgcactgtggagctagtggaagctgccgaagaattcgctttcgcttag

SEQ ID NO: 187330 - DNA, 780 bp, synthetic construct
  misc_feature 1..780: note = Description of Artificial Sequence: Synthetic coding sequence
  source 1..780: mol_type = other DNA
atgaagctgaacgagcggagcgtggcccactacgccctgagcgacagcccagccgatcacatggggttcctgagaacctggggcggccctggaaccccacctacaccctccggaactggaagacgatgttggttcgtcctgaaagggaatcttcttttcagcttcgagtcaagagaaggacgggctcctctgtcattagtggttctcgaaggatgtaccgtggagctggccgaggcaccggtccccgaggagttcgcctttgcaatttgctttgacgcacctggcgtgagacctcatctgttggctgctgaggggcccgctgcccaggaggcatgggtgaaggtgctttctcgggccagtttcgggtacatgaggcttgtcgttcgcgagctggaatcacagctgcaggacgctcgacagtcacttgccctccagcgccggtcaagctggaagtctgttgcatcacgctgcaaaccccaggccccgaatcaccgggcagccggcctggagaacggtcactgcctgagcaaggattcctcaccagtgggcctggttgaagaggccggatcccggtctgctggttggggcctggccgaatgggagctgcagggccccgcaagccttttgctaggcaagggtcagtccccagtctccccagagacatcatgtttctcaaccctgcatgactggtatggtcaggagatcgtcgaattacgacaatgttggcaaaagagggcacagggatctcactcaaagtgcgaggagcaggacaggccatag

SEQ ID NO: 187331 - DNA, 327 bp, synthetic construct
  misc_feature 1..327: note = Description of Artificial Sequence: Synthetic coding sequence
  source 1..327: mol_type = other DNA
atgaagctgaacgagcggagcgtggcccactacgccctgagcgacagccccgcggaccacatgggatttctgaggacctggggagggcctggtactcctcccactccctccggtacaggccgtagatgctggtttgtcttaaaagggaacctactatttagcttcgaatctcgcgagggtcgagcacccctgagcttggtggtcctagaaggctgcactgtggaactcgcagaagcccccgtgcctgaagaattcgccttcgccatttgcttcgacgcgccaggagtccggccccaccttctagccgcagaaggacccgctgcctag

SEQ ID NO: 187332 - DNA, 729 bp, synthetic construct
  misc_feature 1..729: note = Description of Artificial Sequence: Synthetic coding sequence
  source 1..729: mol_type = other DNA
atgaccatccccggcggcacccccagcctgaagatcctgtggctgaaccaggagcctgagattcaggttaggcggttagatacgctcttagcttgtttcaatctgtcttctagtcgggaagagctgcaggcagtcgagtcccccttccaagctctgtgctgcttgctcatttatctattcgtacaagtggacaccctgtgcctggaggacctgcacgccttcattgcccaggcgttgtgtttacaagggaaaagtacttcccagctcgttaatctgcagccagattacataaacccaagagccgttcaattaggtagtctactggtgaggggactcactaccttggtgcttgttaacagcgcttgtgggttcccgtggaagactagcgacttcatgccatggaacgtgttcgacggaaagttattccaccagaagtatctgcagtcagagaaagggtatgcagtcgaagtgttgctggagcagaacagaagtagactgacgaaatttcataatctgaaggccgtggtctgcaaggcttgtatgaaggagaaccggcggattacgggtagggctcattggggttctcatcacgctggacgatggggtaggcaaggctcctcctaccatcgaaccggatctggctattccagaagcagtcaggggcaaccctggcgcgatcagggccccggtagcaggcagtacgaacacgatcagtggcgcagatactag

SEQ ID NO: 187333 - DNA, 2733 bp, synthetic construct
  misc_feature 1..2733: note = Description of Artificial Sequence: Synthetic coding sequence
  source 1..2733: mol_type = other DNA
atgggcgtgcggggcctgcagggcttcgtgggcagcacctgcccccatatctgtaccgtggtcaactttaaggagctggctgaacatcaccgatcaaaatatcctgggtgcacgcccactatcgtcgtcgatgcgatgtgttgcctgcgatattggtacactcccgagtcttggatttgcggcggccagtggcgggagtacttcagcgcccttcgcgactttgtgaagaccttcaccgcagcaggaataaaactgatcttcttcttcgacggcatggtggagcaggacaagcgagatgagtgggtcaaacggaggttaaagaataaccgcgagatctcacgcatttttcattatataaaatctcataaagagcagccagggcgcaatatgtttttcattccatccggcctggccgtcttcactcgctttgctctcaaaactctcggccaagagaccctatgcagcctccaggaggctgactatgaggtggccagttatggcctgcagcacaactgcttaggcattcttggcgaagacacagactatctcatctacgacacgtgtccctacttttccatttcagagttgtgcctcgaaagcctagacactgtgatgttatgtcgggagaagctctgcgagtctctgggcctttgtgtggcagatcttccactgctcgcttgcctactcggtaatgacatcatcccggaggggatgttcgaaagcttcaggtacaaatgtttatcttcatacacctccgttaaagagaacttcgataagaaaggaaacatcatcctcgcagtctccgaccacatctccaaggttctgtacttatatcaaggtgagaagaaactggaagagatacttcctctgggacctaacaaggcactcttttataaaggcatggcctcctacttgctgcctggacaaaaaagcccctggtttttccagaagccaaaaggtgtgatcacactagacaagcaggtgatctcaacctcttctgacgctgaatcacgggaggaggtgcccatgtgcagtgatgccgagagcagacaggaagtgcccatgtgcacgggtcctgaatctcggagggaagtccccgtttacaccgactctgagccccggcaagaggtccctatgtgttcagatccagagccccgtcaagaggtgcctacctgtacggggccggaatccaggagggaggtgcctatgtgtagcgatcccgagccaagacaggaggtgcctatgtgtacaggccccgaagctcgccaggaagtgccaatgtatactgactccgagccgcgccaggaggtacctatgtacaccgacagcgaacctcggcaggaagtgcctatgtacaccgggagcgaaccccggcaagaagtgccgatgtatactggaccagagtcccgccaggaagtgccaatgtacaccggccctgagtcgaggcaggaggtgctaattcggacggatcctgaaagcagacaggaaatcatgtgcaccggccacgagtccaagcaggaggtgcctatctgtacagatccaatttctaagcaggaagattcaatgtgcacccatgcagagatcaaccagaaactaccagtggccactgacttcgagtttaagcttgaggcgctgatgtgcacgaatccggaaattaaacaagaggaccccacaaacgttggacccgaggtgaaacaacaagtgacaatggtctctgacaccgaaatccttaaagtggccagaacacaccacgtgcaggccgaatcgtatctggtctacaacatcatgtctagcggtgagatcgagtgttcaaacacgttggaagacgagctggaccaggccttgcccagtcaggcatttatctataggccaatcagacagagggtctacagcttgctgcttgaagattgccaggacgtcacctcgacatgtctggccgtcaaggaatggttcgtctatcccggaaatccattgcgccatccagacttggtccggcctctgcagatgacgattccgggggggacaccgagcctgaaaattctttggcttaatcaagaaccagagatacaggttcgcaggttagatactctgctggcatgtttcaatctgtcatcgtcacgcgaagaacttcaggctgttgagagtccgttccaggccctctgctgtcttctgatctatctcttcgtgcaagtggataccctatgcttggaagatctgcatgcatttattgcacaagctctctgtttgcagggcaagtcaacatctcagctggtaaatttgcaacctgattatattaaccccagagccgtgcagctcgggtcacttctggtgcgcgggctcacaaccctggtcctcgtcaactcggcatgtggcttcccctggaagactagtgattttatgccttggaacgtgttcgacggtaagttgttccaccaaaagtacctgcagtccgagaaagggtatgcagtggaggttttgcttgagcagaatcgaagccgactgaccaaatttcacaatctaaaggcagtggtttgcaaggcctgcatgaaggagaacagacggataaccgggagagctcactggggatcacaccatgcaggcagatggggacggcaaggatccagctaccatagaaccggttctgggtatagccgaagcagtcagggccagccctggcgcgaccagggccccggaagccgacagtacgaacatgatcagtggcgacgctattag

SEQ ID NO: 187334 - DNA, 2802 bp, synthetic construct
  misc_feature 1..2802: note = Description of Artificial Sequence: Synthetic coding sequence
  source 1..2802: mol_type = other DNA
atgttcggcccccggggcagcaccagcgccggcgccggccggaaggaaatcctgagccggtcaagcgtgatgggcgtccggggtttgcaaggatttgtgggatcaacctgcccccacatctgtacagtggtgaacttcaaggagcttgccgagcaccaccgaagtaagtacccgggctgcacgccaacaatagtcgtcgatgccatgtgctgcctccgatactggtacactcctgaatcatggatctgcggcggacagtggagggaatatttcagcgctctcagggacttcgtgaagacattcactgctgccgggatcaagctgatcttcttctttgacggtatggtggaacaggataagcgggacgagtgggtgaagagaaggcttaaaaataaccgggagatctcacggatcttccattatatcaaatcgcataaagagcagccaggcaggaacatgttttttatacccagtgggctcgccgtgttcacgagattcgcgctcaaaaccctgggccaagagacactgtgttcacttcaggaggccgactacgaggtagccagttacggattgcagcataactgcctggggatccttggagaagacacagactatctgatttacgatacgtgtccatacttttcaatcagcgaactatgtcttgagtctctggatacagttatgctctgtcgcgagaagctgtgcgagagtctgggactgtgcgttgccgacctccccctgctggcctgtctgcttgggaacgatatcattccagagggaatgttcgaatcattccgctacaagtgcctgtcctcctacacctctgtgaaggaaaacttcgacaaaaagggcaatataatactggcggtttcggaccacatcagtaaggtcttgtatctgtaccaaggtgaaaagaagcttgaggaaatcctcccccttggccccaacaaggctctgttctacaaaggaatggctagttatctgttaccaggtcagaaaagcccctggtttttccagaaaccaaaaggggtaatcacgctggataaacaggtgatctccacatcatctgatgctgagtctagagaggaggttcctatgtgttcagacgcagagtctcggcaagaagtgccaatgtgtacagggcctgaatcccggcgcgaagtgcccgtatacaccgactccgagccgcgacaggaggtgccaatgtgttccgacccggaacctcgccaggaggtgcctacttgtacgggacccgagagccggcgtgaggtgcctatgtgctcagaccccgaacctcgccaggaagtccccatgtgcacaggccctgaggcccggcaggaggtgcctatgtataccgactccgaacctcggcaagaagtgcccatgtacactgactcagagccacggcaggaggttccgatgtacaccggctccgagcctagacaggaagtgccaatgtacactgggccagagtcgcggcaagaggttcccatgtacaccggccctgagtcccgacaggaggtgctcatacgcacagatcctgagtcccggcaggagatcatgtgcactgggcacgagagtaagcaggaggttcctatttgcactgatcctatttccaaacaggaagacagtatgtgcacacacgctgaaattaaccagaagttaccagtggccaccgatttcgaatttaagctcgaggccttaatgtgcacaaatcccgaaattaaacaggaagatcccaccaatgtgggccccgaggtgaaacagcaggtgacaatggtaagtgataccgagatcctcaaagtagctaggacgcatcatgtgcaggcagagtcctacctggtttataatatcatgagctccggagaaatcgaatgttcgaacacactggaagacgaactcgaccaggcacttccctcacaggctttcatctacaggcccattagacaacgggtgtactcactgcttttggaggattgccaggacgtgacttctacttgcctcgcagtaaaggaatggttcgtgtatccaggaaatccgctgaggcaccccgatttggtgcggccattgcagatgactatacccggtggcacgccctcactgaagatcttatggctgaatcaggagcccgagatccaggtgaggcgactcgatactcttctggcctgtttcaatctctcatccagccgcgaggagctgcaggccgtggagtccccgttccaggctctctgttgtctacttatttatctgtttgtccaagtggatacactctgcctggaggatttacatgccttcatcgcacaggctctttgcctccaaggcaaaagcacatcccagctcgttaatctccagcctgactatatcaacccccgagcagttcagctcggaagcctcctcgtgagaggtttaacaacgctggttttggtcaattccgcatgcggcttcccctggaagacaagtgatttcatgccttggaacgttttcgacgggaagctctttcaccagaaatacctacaaagcgagaagggttacgcagtggaggttttactcgaacaaaaccgctctaggctcaccaagtttcacaatctgaaagcagtggtctgcaaggcttgcatgaaagagaatagacgcattacaggacgcgcgcactgggggtctcaccacgccggacgctggggaagacagggatcctcctaccacagaaccggctccgggtactctaggtcttcccagggacaaccatggagggatcagggacccggctccagacagtatgaacacgatcagtggcgcaggtactag

SEQ ID NO: 187335 - DNA, 2769 bp, synthetic construct
  misc_feature 1..2769: note = Description of Artificial Sequence: Synthetic coding sequence
  source 1..2769: mol_type = other DNA
atggaccggcagatgatcctgagccggagcagcgtgatgggcgtgcgaggattgcagggctttgtaggcagcacatgcccacatatatgtactgtagtgaactttaaggaactggctgagcatcacagatccaaataccctgggtgtacaccgaccatagtggtggatgctatgtgttgcctgagatattggtacactcctgaaagttggatctgcggtggccagtggagggagtactttagcgccctccgagacttcgtgaagacctttactgcagcaggaatcaagttgatcttttttttcgatggcatggtggagcaagacaaaagggatgagtgggtcaagcgccgattgaagaacaacagagaaatatcaaggattttccattacataaagagccataaagaacagccgggcagaaatatgttttttattccctctggattggcggtgttcactcgattcgctctcaagacccttggccaggaaaccctgtgttctctgcaggaggctgattacgaagtggcgtcttatggactgcagcacaattgtcttggcattttaggcgaagatacagattatctgatctacgatacgtgcccatatttttctataagtgagctctgcttagaatcactcgacaccgttatgttgtgcagggagaaactgtgcgagtccctaggcctgtgtgtagctgacctgccactactggcatgcctgctcggcaacgatattattccagaaggtatgttcgaaagctttcgctacaaatgtctctcatcatacacatccgttaaagaaaattttgacaaaaagggcaacatcattttggcggtctcggaccatatcagcaaggtcctctacctctatcaaggagagaaaaagctagaggaaatcctccccctaggacccaataaggcactgttctacaaggggatggcttcatacctgctgcctggtcagaagagcccatggttttttcagaaacctaagggagtgatcacactggacaagcaagttatctccacatcatcagacgctgagtcccgcgaggaggtgccaatgtgttctgatgccgaatccaggcaggaagttccaatgtgtaccggacctgagtctcgacgagaagtcccggtatacacagattccgagcccagacaagaagtgccaatgtgtagtgaccccgaaccacggcaagaggtacctacatgtaccggtcctgaatctcgccgggaagtgccaatgtgctcagacccggagccgcgacaagaagtccctatgtgcaccggtccagaggccaggcaggaagtgcccatgtacacggatagcgagccacgacaggaagttccaatgtatacagatagcgagccgagacaggaggttccaatgtatacagggagtgagccaagacaggaggtgccaatgtatacaggccccgaaagtaggcaagaagttcctatgtatactggccccgagtccagacaagaggtgctgattcgcactgacccggaatcacggcaagagatcatgtgtacgggccacgaatcaaaacaggaagtgccaatctgcacagatcctatttcgaaacaggaagattccatgtgtactcacgcggagatcaaccagaaactgccagtggcaaccgactttgagttcaaactcgaggcccttatgtgcactaatcctgagattaagcaagaggatccgacaaatgtaggcccagaggtgaagcaacaagtgacgatggtgagcgacactgagatcctgaaagtagcacgtactcaccacgtgcaggcggaatcttaccttgtctataatatcatgagtagcggcgagatagagtgttctaataccctggaggacgagcttgaccaagccttgccatctcaggcatttatttaccgaccaattagacagcgggtttacagtttattgttggaagattgccaggacgtcacgtcaacatgccttgctgtgaaagaatggttcgtctacccaggaaatccactcagacatccggatctggtgcggccattacagatgactatcccaggagggacaccttctctgaagatcctgtggctgaaccaggagcctgaaatccaggtccgaaggcttgatacccttcttgcatgtttcaacctcagttcctcacgcgaggagctccaggccgtggaatctccctttcaggcactgtgttgcctgcttatttacttgttcgttcaggttgataccttatgtctcgaagacctgcacgcctttattgctcaggctctctgcctgcagggcaagagtacttcccagttagtaaacctgcagccagactatattaatcctcgcgcagtgcagctcggatctctcttggtgagaggattaacaacgctcgtactagtcaacagcgcttgcgggttcccgtggaagaccagcgacttcatgccttggaatgtgttcgacgggaaactgtttcaccagaaatacctgcagtcagagaagggttatgctgtagaggtgctgctcgaacagaaccgttcaagactgacaaagttccacaaccttaaagccgtcgtttgcaaggcctgcatgaaagagaacaggcggataacaggaagggcacactggggcagccaccatgcgggccgttggggacgtcagggcagctcttaccaccggacgggatctggatattcccgatccagtcagggccagccttggagggaccagggccctggttccaggcagtacgaacatgaccagtggagaaggtactag

SEQ ID NO: 187336 - DNA, 3291 bp, synthetic construct
  misc_feature 1..3291: note = Description of Artificial Sequence: Synthetic coding sequence
  source 1..3291: mol_type = other DNA
atgggcgtgcagggcttccaggagttcctggagaagcggtgccccggggcggtggtgcctgttgacctgctgaaactcgcccgaacggtgtctcgccagcagcagcaacagcatctccataggcaactgccccctacagccgctctggctcctggagcacctcgggccgccaggggatccgtccctctgcagcctcctctgccccctgcagctctgggcgcatattcaggtggggccggacccattagacaccaccaccctgctcaccacttccaccatcacggacaggctcagcccggcctgcatcctccccttccaccacctccccccccgcagctgccgggtgcccgcgttctcgtggatgccggttcagccctcccccgcctctatggcggttatcagaccgattgggtatgcggaggtcaatggaatgcgatgctgggctacttgtctgccctctgtcaggcctgcgcttatcctggcggagatggcctggagctggtggtaatgttcccaggcggactcgggaaagatagattggctgagtggggaagaaggtgccaagcagagcgacagactgctcagctgattgttggacatgtcgggaataaagggacacctccgccacgcgcttggtttctgcctcccgcatgtttgagtcactgcgtcagattggcactaataaggttccgcgtgaaagtgttccagtccctggaggaccaccacctggaggtggtcgctttcttccgcgagaatggcttccatgggttgttggcccacgattctgagtacgccctgtacaacataccgtcatactattcatcgcacgcgctcaaactgtcctggaacggcaagaatttgacaaccaatcaattcctgatgcaagaagttgcaaagcaactgggcctgaaaagaatgaattttccgatttttgcagctctgctcgggaaccacattcttcccgatgaggatctggccgcctttcactggtctctgctgggacccgagcatccccttgcttccctgaaagtccgtgctcatcaactggttctccccccctgtgatgtggtgatcaaggccgtgagcgagtatgtgtccagtataaaggacccctctaatcttgacgtggtaggcaaggacgtgtttaaacagtctcagagcaggaccgaggataagatagagaggttcaagaaagctgtagaatattacagtgtcaccaccaagcttagctcacttccagtggggccttcttttcttggcttccgcaacaataggctcgggaatccacctttgccccgaaaccaggtgggaactatcagcgccggaaaacccatgttttctcatcaggtgccccagaaggtgaaatacccacccccttttcctgtggggccaaacagcagcctcctgttctcgtcccacgccctaggagagtctcatgccttctctgaagatcccatgctgcaaaatagccctttcgcgaattgggcggtgtcttatgactctagtgcctcccagttcccaaattacctgccaagcaaggccagccccccccttggccccgatagttcacactcctccagctctgacggagatgagccgaatggggcctcttccgaccacatcacagaagccttccaccaccagccagagtggggtaaccctaaccgcgacagaggttcatgggcccaacccgtcgacacgggcgtatctgaggctagcctcggtgatggagagccacacatccccagcctactaagcatgagtactcgtaatcatatggatattacaatccccccactgccgcctgtcgccccagaggtccttagagtggccgagcacagacatagacgggggctgatgtatccctatatttatcacgtgctcaccaagggggaaatcaaaatccccgtgtgtatagaagacgagtgcaacatggagttacccccggctgccttgctcttccgatccgcacgccagtacgtttacggggttttatttagcctggcagaaacccaacggaagatggaaaggctggcaatgcggagaagactaccagtggaagtgcccagcgtcattctgaaggaatggtccgcatacaagggcaagagtcctcagacacccgagctggtgtcagccctgacattccgagagtggacatgtcctaatctgaagaagctgtggctggggaaggccgtcgaggataagaatagacgaatgcgggcatttcttgcttgtatgaagtccgacacccccagcatgctcaaccccgcgaatgttccaactcatctgctactgatgtgctgtgtgttgcgatacatggtgcagtggccaggtggaaggatactgcaccgacatgagctggacactttcttagcgcaagcagtctcaacacagctgtatgagccagataggctgcaagaacttaagattgagaagctcgatgcacggggaattcagctggcagcactgtttatgtcaggagtcgatacagcactgttcgccaatgacgcctgcggtcaacccgtcccctgggaacattgctgtccttggatttattttgacggtaagctgtttcaaagcaaacttattaaagctgggcgcgaacgggtctctcttgtggagttatgtgacggacaggctgacctagccaccaaggttgagaagatgagacagtctatactggagggggtgaacatgaaccacccgcctcccagcgctctcctcccctcaccaacattcgttccgccaatggtacccagtttgtaccccgtgtccttatactctcgagccatgggcagcatgccacttccaccccaggggcggagtaggggcttcgctggactccatccaataccgccgcagggcggtaagttggaaatcgccggaatggtggtggggcaatgggccgggtcacgctcaagcagaggccggggcagctttggcatgcaggtagtgagcgtgggtggacccgggaaaggtcacgggaaagaacaaaccggccgcgggtctaagggacacaagaaggggaataagcagggctcctcagatggggtgagcaagagtttagaactccaccagggtcgatctagatctcaggtgaacggaaactcaggagcactaattaaggaagagaagtccgaccaccgactgcccgcgccaagccagtgtgctctgagtcgcgactcaaatgagtgtaacaacggaaatcggtacttacctatgaataatagagaaaagaatcaccttcaggagcagaagctcgaaacggttgctcagaggaaagaagattag

SEQ ID NO: 187337 - DNA, 717 bp, synthetic construct
  misc_feature 1..717: note = Description of Artificial Sequence: Synthetic coding sequence
  source 1..717: mol_type = other DNA
atgggcgtgcagggcttccaggagttcctggagaagcggtgccccggtgctgtggttccggtagatctgttaaagctcgcaaggacagtgagccgccagcagcagcagcagcacctgcacaggcagctgcctcctacagcggctctggcgcccggcgccccacgggccgcccgtggtagcgttccactgcagcctccattaccaccagctgctcttggagcttactcaggaggcgctggccctattaggcaccaccatcctgctcaccactttcaccaccacgggcaggcacaacccgggctgcaccccccgctgccacccccgcccccaccacagctaccaggggcacgggtcctggtcgatgccggatcagctttgcctagactctatggtgggtatcagaccgactgggtgtgtggggggcaatggaatgcgatgctcggctatttatccgcactctgtcaagcctgcgcctatcccggaggggacggtcttgagcttgtagtgatgtttccgggcggcctgggaaaagatcggctagccgaatggggacggaggtgtcaggcagagagacaaactgcccagctgattgtgggtcacgtcggcaacaagggcacaccgccaccccgtgcgtggtttttgcctcctgcctgcttaagccattgcgtaagactagccttgatcagattccgcgtcaaacaggccgccatgctttag

SEQ ID NO: 187338 - DNA, 3408 bp, synthetic construct
  misc_feature 1..3408: note = Description of Artificial Sequence: Synthetic coding sequence
  source 1..3408: mol_type = other DNA
atggagacccagaaggacgaggccgcccaggccaagggcgccgccgcaagcgggtcaactcgggaacaaacagcagagaagggcgccaaaaataaagcagccgaggccactgagggaccgaccagcgagccctcatcctctgggccagggcggctcaaaaaaactgccatgaagctctttggtggtaagaagggaatctgtactctgccctcatttttcgggggaggccgatcaaaaggttccgggaaaggaagctcaaagaagggcctaagtaagtccaagactcacgacggattatcggaggcagcgcacgggcctgaggacgtggtcagcgagggaacagggttttccctgcctttgcccgagcttccctgtcaattcccctcatcccagtctgcacacggggccttggagacagggtctcgttgtaagacatcagtggccggtgccacagaaaaagctgtggccgagaagtttccttccatgcctaaacccaaaaagggcctgaaaggcttttttagctctatacggcgccatcgaaaaagtaaagttacaggggccgagcagagcgagcctggggccaagggtccggagcgggtgcgcgctagaccacatgaacacgtgagtagcgcgccacaggttccttgcttcgaggagacttttcaagccccaagaaaggagaatgctaacccacaagatgcacctggccccaaggtgagccctacaccggagcctagccccccggcgacagaaaaaatggcatgtaaggaccctgagaaaccaatggaagcctgcgctagcgctcacgttcagccaaagccagccccagaagcgtcttcactggaggagcctcactcacctgaaaccggcgaaaaagtggtagctggcgaagtcaacccccctaatggccctgttggggatccactgagcctcctcttcggtgacgtcacctccctgaaaagcttcgactccctaacgggctgcggcgacatcatcgccgaacaggacatggactccatgactgatagcatggcctcagggggccagcgggcaaacagggatggaacgaagagaagctcttgtctggtcacctatcagggtgggggagaggaaatggcgttacctgacgatgatgacgaagaggaagaggaggaagaggaggtagagctggaggaggaggaggaagaagttaaggaggaggaagaagacgacgaccttgagtatctttgggagaccgctcagatgtatccgcgccccaacatgaatctgggctaccatcctactacctcgcctgggcatcacggatacatgctgctggatccagttaggtcctatcctggcttggccccaggcgagctgctcacgccacagtccgatcagcaagaatccgcccccaattcggatgagggctactatgactccaccacccccggctttgaggacgattctggggaggctctgggtctagtgcggcgggactgtctgcccagggattcctactcaggggatgccctgtatgagttctacgagccagacgacagcttggaaaactcaccacctggggacgattgcctgtacgatttacacggaagatcatcagagatgttcgacccgttcctcaattttgaaccttttctgtcatctagaccgcccggcgcgatggagacagaggaggaacgtctcgtcacaattcaaaaacagctcttatattgggaactgagaagggagcagctcgaggcacaggaagcaagggctcgagaagcacatgccagggaggcccacgcccgcgaagcctacactagagaggcttacggaagggaagcttatgcccgagaggctcatacttgggaagcgcacggtagggaggctcgaacgcgggaggctcaggctagagaggtgcgatgtcgggagactcaagtccgggagacccaggcccggcaggaaaagcccgttctggagtaccaaatgcgacctctgggtccgtccgtgatgggcctggcagccggcgtttctggcactagccagatctctcataggggaataacgtcagccttccccacaacggcttccagcgaaccagactggagggacttcagaccactcgaaaaaaggtacgagggaacctgttcaaagaaggatcagagtacctgccttatgcagctgttccagagcgacgcaatgttcgaaccagacatgcaggaagccaatttcggcggaagccccagacgcgcgtaccccacttactcacctccggaggacccagaggaagaggaggttgaaaaggagggcaacgccactgtatccttctcacaggcgctagtggaattcacttctaacgggaatctcttctcttcgatgtcatgttcttcggattcagacagctcctttacgcagaatctgcctgagctcccgccaatggtgacattcgatatcgccgacgtcgaacgcgatggcgagggcaagtgcgaggaaaaccccgagtttcataatgacgaagacctcgcagcctcactggaagcatttgagctcgggtattaccacaagcatgctttcaacaattaccatagccgattttaccagggcctgccatggggggtgtcatctcttccacgctacctgggcttgccaggattgcatccccgcccccctcctgcagcaatggcccttaaccgccgaagtagatccctggacacagctgaaaccctagagatggagttgtcaaattcccatttggtgcaggggtacctggaaagcgatgagctgcaggcccagcaggaggacagcgatgaagaggacgaagaggaagaagagggggaatggtcccgcgactcacctctgtctctgtataccgaaccccccggagcgtacgattggccggcgtgggcgccatgccctctcccagtggggccaggacccgcttggatctctccaaaccagttagacagaccatcttcccagtcgccctatcgccaggccacgtgttgcatccctccgatgactatgtcaatttcactgagtgtgccggaatccagggctccgggggagagtgggccgcagcttgcaagacctagtcatttgcatctgcccatggggccctgctataatttgcagccacaagccagccagtcaatgcgggctcggcctcgtgatgtgctgctgcctgttgacgagccttcctgcagtagttcctctgggggcttcagccctagcccgctccctcaggcgaaaccggtcggcatcacccacgggattccacaactgcccagggtgcgacccgaacacccccagcctcaaccaacgcattatggtccttcttccttggacctctccaaggagagggccgagcagggcgcgagtctcgccacatcttactctagtactgccatgaatggcaacctggctaagtag

SEQ ID NO: 187339 - DNA, 2415 bp, synthetic construct
  misc_feature 1..2415: note = Description of Artificial Sequence: Synthetic coding sequence
  source 1..2415: mol_type = other DNA
atggagacccagaaggacgaggccgcccaggccaagggcgccgccgcttctggcagtaccagagaacagaccgcagagaagggcgctaagaacaaagccgccgaggccacagagggacccacgagtgaacctagtagttccggccctggaagactgaagaaaaccgccatgaagctttttggtggcaaaaaaggaatctgtaccctgccatcattcttcggtggagggcgcagcaagggttcgggcaagggtagctctaagaaggggctctctaaatcaaaaacccatgacggtctgagcgaggctgcccacgggcctgaagatgtagtgtctgaaggtaccgggttttcgctcccacttcctgaactaccatgtcagtttccctcctcacagtcagcccacggtgccttggaaactggttcgagatgcaaaacatcagtggccggcgccactgaaaaggctgtggccgagaaatttcccagtatgccgaagccaaagaaaggcctgaaggggttcttctccagcattcgccgccaccgcaaaagcaaggtgaccggagccgagcagagcgagccaggtgccaaaggacctgagcgagtgagggcccggcctcacgagcatgtgagctctgcaccccaagtcccttgtttcgaggaaacctttcaggctcctcgtaaagagaacgccaatccccaggacgcaccaggacccaaagtgtcacctacgcccgagccatcgccccctgctacagaaaaaatggcctgcaaggatcctgagaaaccaatggaggcctgtgcctcagcgcacgtgcagcccaaacctgcccccgaggcctcatccctcgaggaacctcacagcccagagacgggcgagaaggtagtcgccggtgaagtgaatccccctaacggcccagtgggggatcccctgtctctactgttcggagatgtgacatctcttaagagttttgacagcctaacgggttgcggggatataatcgccgagcaggacatggacagcatgaccgacagcatggctagtggtggacagcgagctaatagggacggtactaagcgctcatcttgcctggtgacgtatcaaggcggcggcgaggaaatggctttgcctgatgatgatgatgaagaggaagaggaggaagaagaagtggagctagaagaggaggaggaggaggtcaaggaagaggaagaggatgatgatcttgagtacctgtgggagaccgcccagatgtaccccagaccaaatatgaacctgggctaccacccaacgacgtcaccaggtcatcacggatacatgctgctggaccccgtgaggtcatatcctgggctcgctcccggggagcttctcacaccccaatcagaccagcaggaatccgcccccaacagcgatgaagggtactacgattctaccacacctggattcgaggacgattcgggagaggcactaggcctggtgaggcgggactgcctccctagagatagttattccggcgacgctctatacgagttctacgagcctgatgattccctggagaactctcccccaggcgatgattgtctgtatgacctgcacgggcggtcctcagaaatgttcgaccccttcctgaactttgaaccattcttatcatctcggccacccggcgccatggaaacagaggaggaaaggctcgtgactattcagaaacagctcctgtattgggagctgaggagggagcagctagaagcccaagaagctcgagctcgggaggcccatgcccgcgaggcccatgctcgtgaagcatacacaagagaggcttacggtagagaggcatatgccagagaggcccacacctgggaggcacacggcagagaggctaggaccagagaggcccaggccagagaagtgcggtgcagggagacccaggtgcgtgaaactcaggctaggcaggaaaagcccgtcctggagtatcagatgaggccactgggaccatctgtaatggggttagctgccggcgtgtcgggtacgtcacagatcagtcacaggggcatcacctcagctttccccaccaccgcctcttctgagcctgattggagagatttccggccgctggagaagaggtacgaaggcacctgcagcaaaaaagaccaaagcacctgtctcatgcagctatttcagtccgacgctatgtttgagcctgacatgcaggaggccaactttgggggttctcctagaagggcataccccacctatagtccacctgaggaccccgaggaagaggaggtcgaaaaggaggggaatgccaccgtcagttttagccaggctttagttgaatttacaagtaacgggaatctgtttagtagcatccgttgtccggggactgaagacaagagacaggttactcaggcatgtggcacatggtag

SEQ ID NO: 187340 - DNA, 1566 bp, synthetic construct
  misc_feature 1..1566: note = Description of Artificial Sequence: Synthetic coding sequence
  source 1..1566: mol_type = other DNA
atgttcaccagcgagaagggcgtggtggaggagtggctgagcgagttcaagacccttcccgagacatccctccccaactacgccaccaatttgaaggataagagctcactagtttcatcactgtacaaagtcatccaagaaccccagagcgaactgctggagccagtctgccatcagctgttcgagttctatcggagcggcgaagagcagctgctgcagttcacgttgcagtttctacctgagctgatctggtgctatctggccgtctcggccagcagaaacgttcacagtagtgggtgcatagaggccctcctgctgggagtctacaacctcgaaattgtcgataagcaagggcacaccaaagtcttgagcttcactatcccttccttgagcaagcccagcgtataccacgagccctcaagcatcggatcaatggcactgacagaatcagctttgagtcagcacggcctcagcaaagtcgtatattcaggcccacacccacagagagaaatgctgacagcccaaaaccgttttgaagtgctgacttttcttttattatgctataatgctgctctaacctacatgccatcggtttccctccagagcctgtgtcagatctgctcgcgcatttgcgtgtgcggttacccgagacagcatgtcagaaagtataagggtattagtagcaggatccctgtgagcagtggattcatggtacagatgcttaccggtatctactttgccttctacaacggcgagtgggacttagcccagaaagctctggacgatattatctaccgtgcacagctggaactataccctgaacccctgctggtcgccaatgcaatcaaagccagcctaccccacggacccatgaaatcgaataaggagggcacaaggtgcatccaggtagagatcaccccgacgtcttcacggatctctcgaaacgccgtgacctcgatgagtattcgcggtcacagatggaagaggcatggaaatactgaattgacaggacaggaggagttgatggaaattagtgaagtggacgaggggttctatagcagagccgcctcttcaacctcacagtctgggttgagtaattcctcgcacaattgttccaataaacctagcatcggaaaaaatcatcgacggtcgggaggttcaaaaaccgggggcaaggagaaggagaccacaggcgagtcctgtaaagaccatttcgcccgtaagcagacgcagagagcccagtcagagaatctggaacttttgtccctgaaaaggctcacgctaacaacaagccagtcattgcctaaaccttcatctcatggattagctaagacagcggccaccgtcttctcgaaatcgttcgaacaggtatctggggttaccgtaccgcacaacccctccagcgcggtggggtgcggagcaggcaccgatgctaatcgcttttctgcctgcagtctccaggaggaaaaactgatatatgtgtcagagcgaactgaactgccgatgaaacatcaatccgggcagcaacggccccctagcatatccataaccttatcaactgactag

SEQ ID NO: 187341 - DNA, 342 bp, synthetic construct
  misc_feature 1..342: note = Description of Artificial Sequence: Synthetic coding sequence
  source 1..342: mol_type = other DNA
atggacggccgggtgcagctgatcaaggccctgctggccctgcccattagaccagcaacgcgtcggtggaggaacccgatccccttcccagagaccttcgatggcgataccgaccgcctccccgagtttatagtgcaaacaggaagctacatgtttgtggacgaaaatacctttagcagcgatgctttgaaagtgacttttctaattacccgccttactggccccgccctccaatgggttatcccttatatcaaaaaagagtctcctcttttgaatgactatcgtggttttctggccgagatgaaacgggtattcggatgggaagaggacgaagatttctag

SEQ ID NO: 187342 - DNA, 2241 bp, synthetic construct
  misc_feature 1..2241: note = Description of Artificial Sequence: Synthetic coding sequence
  source 1..2241: mol_type = other DNA
atgggcgacgtgctgagcacccacctggacgacgcccggcggcagcatatcgcggaaaaaacagggaaaatcttgaccgaatttctacagttctacgaggaccagtacggcgtcgctttattcaactccatgcggcatgaaattgaagggacagggctgccccaagctcagctcctctggaggaaggtaccactcgacgagcgcattgtctttagcgggaatctgttccagcaccaagaagattctaaaaaatggcggaaccgcttctcactcgtgcctcacaactatggtctggtgctatatgaaaataaggcggcatatgagcgccaggtgccgccgcgggctgtgatcaactctgccggttataaaatattaacttccgtcgatcagtacctggagctgattgggaacagtctgcctggcaccactgcaaagtccgggtctgcgccaatcctaaagtgtccaacacagtttccgcttatcctgtggcacccatatgcgaggcattattacttctgtatgatgactgaagccgaacaggataagtggcaagctgtgctccaggattgtattaggcactgcaacaatggaataccagaagatagcaaggttgaagggcccgccttcaccgacgctattcgtatgtatcgccagtcaaaagaactgtatggcacctgggaaatgctctgcggtaatgaggtgcagatcctttctaacctggtcatggaagaactaggcccagaactgaaagcagaactgggcccacgcctgaaaggaaaaccccaggagcgccagcgtcagtggattcagattagcgacgcggtctaccacatggtttacgaacaggccaaggcgcgcttcgaggaagtgttaagtaaggttcaacaggttcagcctgcaatgcaagccgtgataaggacggacatggatcagatcattacatccaaggaacatctggccagcaaaatcagggcgttcattctgccaaaggccgaagtttgcgtccgaaaccacgtgcagccctatatcccctcaatcctcgaggcactgatggtgcctacctctcagggcttcacagaggtaagggacgttttttttaaggaggtcactgatatgaacctgaacgttataaatgaaggggggatcgataagctaggtgaatatatggagaagctgagcagattagcctaccatcccctcaagatgcagagctgttatgaaaagatggaatccttaagactcgacggcctgcagcagaggtttgacgtgagttcgacttctgtgtttaagcagcgtgcacagatccacatgagagaacagatggacaacgccgtatacaccttcgagaccctgctccaccaagaactgggcaaggggcccaccaaggaggagctatgtaagagcatccagagggtacttgaaagggtgttaaagaaatacgactatgattccagtagcgtgcgtaaacgattttttcgggaggccctgcttcagatttccatcccattccttctgaaaaagctggctcctacctgtaagtcggaacttccccgatttcaggagctgatttttgaagactttgccagatttattcttgttgaaaatacctacgaagaggtggtgctccaaacggtgatgaaggacattctgcaggccgttaaggaggccgctgtacagcggaaacataacctctatcgcgacagcatggtgatgcataatagcgaccccaatctgcacctcctcgcggagggggctccaatcgattggggcgaggagtactcaaactctggagggggaggcagcccctcaccatccactccagaaagcgccacactgtctgagaaaaggcgccgtgctaagcaggtagttagtgtggtccaggacgaggaggttggacttccatttgaagcctcacccgagtctcccccgccggcatcacctgatggtgttactgagattcggggactacttgcacagggcctacgacctgagtctccgccacctgccggccccctcctgaacggcgcccccgcaggcgagagcccacagccaaaagcggctccagaagctagtagccctcctgccagtccattacaacacctacttcccgggaaggccgtggacctggggccacctaaaccttcagatcaggaaaccggcgagcaggttagctccccttctagccaccccgctttgcatactaccaccgaggatagtgctggcgtgcagactgagttttag

SEQ ID NO: 187343 - DNA, 2202 bp, synthetic construct
  misc_feature 1..2202: note = Description of Artificial Sequence: Synthetic coding sequence
  source 1..2202: mol_type = other DNA
atgggctggatgggcgagaagaccggcaagatcctgaccgagttccttcagttttacgaagaccaatacggcgtagccctatttaatagcatgcggcatgaaatagaggggacggggctgccacaggcccaactgctgtggaggaaagtgccgctggatgaacggatcgtgttctcagggaatctgtttcaacaccaagaggatagcaagaaatggcgcaaccgtttttctttagtaccccacaactacggcctggtactgtatgagaataaggccgcctatgaacgccaagtgccccccagggccgtgatcaacagcgctggttataaaatcctcacaagtgtcgaccagtatcttgaactgatcggtaacagcctgcctggtaccacggcgaagagcggctctgcccctatcctgaagtgccctactcagtttcctctgattctctggcacccatacgctagacattactatttctgtatgatgaccgaagcagaacaggataagtggcaagcagttctgcaagattgcatcagacactgcaataacggtatccctgaggattccaaagttgaaggccccgcctttacggatgccattcggatgtatcggcagtccaaagagctgtatggaacctgggagatgctatgcggtaacgaagttcaaatcctgtcgaatcttgtgatggaggaattggggccggaactgaaggcagagctcggcccacgattgaagggcaagccccaggagcgccagagacagtggattcagatttccgacgcagtataccatatggtgtatgagcaggccaaggcacgttttgaggaggtgctcagcaaagtacaacaagtccagccagctatgcaggccgtgatcaggactgatatggaccagatcattacctctaaggagcacctcgctagcaagatcagggctttcatcctacccaaggccgaggtctgtgtgaggaaccatgtgcaaccctatatcccgagcatcctggaagctttaatggtgccaacaagtcagggattcaccgaggtgcgggacgtgttctttaaggaagttaccgatatgaatctgaacgtgattaacgagggtggtattgacaagcttggggagtacatggaaaagttgagtcgcctcgcctaccatccattaaaaatgcaaagctgttacgagaagatggagtcactgcgcttagacgggctccagcagcggttcgacgtgtccagcacttccgtcttcaagcagcgcgcccagatccacatgcgggagcagatggacaatgcagtgtacacttttgaaacattattgcatcaagagctgggcaagggtccgacgaaagaggaactctgtaaatctatccaacgcgtactggaaagagtgcttaaaaagtatgactacgattccagctctgtgagaaagcgattcttccgcgaagctctgctacagattagcattccattcttgcttaaaaaactggcaccaacatgtaagagtgagttgccacggttccaggagctgatctttgaagacttcgctcgtttcatcctggtagaaaacacgtatgaggaagtggtgctccagaccgtgatgaaggacatccttcaggctgtgaaagaagcggctgtgcagagaaagcacaatctgtaccgggatagcatggtaatgcacaattcggatcctaatctgcaccttcttgccgaaggagcccccattgactggggagaggaatattccaatagcgggggaggtgggtctccgtctccaagtacaccggagtcagctaccctcagcgagaagcggcggcgggcgaagcaggtagtgtcagtcgtgcaggacgaagaggtgggcctgcccttcgaggcatcccccgagagtccacctcccgccagtccagacggtgtcacagagattcggggtctactagctcaggggctgagacctgagtcaccccccccggctggacctctcctgaatggagcgccggcgggggaaagccctcagccaaaggccgcccccgaagcttcgtccccacctgccagtcctctgcagcacttgctccctgggaaagccgtggacctcggtccccctaaacccagtgatcaggaaactggggaacaggtgtcctcgccctcatctcacccagcgctgcacacaaccacagaagattctgccggggtgcaaaccgagttctag

SEQ ID NO: 187344 - DNA, 1191 bp, synthetic construct
  misc_feature 1..1191: note = Description of Artificial Sequence: Synthetic coding sequence
  source 1..1191: mol_type = other DNA
atggtgcccaccagccagggcttcaccgaggtgcgggacgtgttcttcaaggaggtcacagatatgaacctcaatgtaattaatgagggcgggatcgacaaattgggggagtatatggagaaacttagtcgcctggcttaccacccgctcaagatgcagtcctgctacgaaaagatggagagcctgcggctcgatggtctccagcagagattcgacgtgagtagcacaagcgtttttaagcagcgtgcacagattcatatgagggaacagatggacaacgcagtctacacatttgagaccctgttacaccaggaactggggaaaggccctaccaaagaggaactttgcaagagcatccagagggtactcgagcgcgttctcaagaagtacgactacgactcctcgagtgtgagaaagcgattttttagagaggctttgctccagatatctatcccctttctgctgaagaaactcgcccctacatgtaagtcggaactccctaggttccaggagctcatttttgaggatttcgcccggttcatccttgtagagaatacgtatgaggaggtagtgctgcagaccgtcatgaaagacatcctgcaagctgtaaaggaagccgcggtgcagagaaaacataacctttatcgagatagtatggtgatgcacaactccgatcctaacttacacctgctcgccgagggagcgccaatcgactggggagaagagtattccaattcggggggggggggatctccttctccgtccacccctgagagtgctactttgtctgagaaacgcagaagggcaaaacaggtggttagtgttgtgcaggacgaggaagttggactcccatttgaagcttccccggaaagccccccgcccgcaagccctgacggtgttactgagataaggggactgttggctcagggactccgccctgagtctcccccacccgcgggacctctccttaacggcgcacccgccggtgaaagccctcagcctaaggcagccccagaggcctcaagtcctcctgcaagccccttgcagcatctgttgcccggaaaagcggttgatcttggccctccgaaaccgagcgatcaggagacgggagagcaggttagcagcccttctagtcaccccgcgctgcacacaaccacagaagattcagctggtgtgcagaccgagttctag

SEQ ID NO: 187345 - DNA, 3072 bp, synthetic construct
  misc_feature 1..3072: note = Description of Artificial Sequence: Synthetic coding sequence
  source 1..3072: mol_type = other DNA
atgggcgccggcgccctggccatctgccagagcaaggccgccgtgcgcctgaaagaagacatgaagaaaatcgttgccgtcccattaaacgaacagaaagacttcacctatcagaagttattcggcgtttctctgcaggaactagaacggcagggcctaactgagaacggtattccagctgtggtgtggaatatcgtggagtatttaacacaacatgggttaacacaggagggcttgtttcgcgtgaacggaaatgttaaggtggtggagcaactgcggttgaaatttgagtccggcgtgcccgtcgagctgggcaaagatggcgacgtgtgttcagccgcatctctcttgaagctgtttcttcgagaactgccagactctttgatcacttccgccctccagccaagatttatccagttatttcaagacgggcggaatgatgtgcaggagtcgagccttcgtgacctgatcaaagagttaccagatactcactactgtctgctgaagtatctgtgtcaatttctgacaaaggtggctaagcaccatgtgcagaatcgcatgaacgttcacaaccttgcaaccgtgtttgggcccaactgtttccacgtgccgccggggttggagggcatgaaggagcaagacctctgtaataagattatggccaagattcttgagaattataacaccctcttcgaggtcgaatatactgagaatgaccacctgaggtgtgagaaccttgcccgactcatcatcgttaaggaggtctactataaaaactccctgcctatcctgctgacacggggccttgagcgcgatatgcccaaaccacctcctaagaccaagatccccaagagcaggagcgagggatctatccaggcccatcgcgttctgcagcccgagctgtcggacggaatcccccaattgagtttgcgcctgtcatatcgcaaagcatgtctagaggacatgaactcggccgagggtgccatctctgccaaactggtcccatcctctcaggaggacgagcggccgctgagccctttctatctttcagcccatgtcccccaggtgagcaacgtctctgcaacaggagagctgctagagcggaccattcggtcagctgtggaacaacacctgtttgatgtgaacaacagcgggggacagtccagtgaggactccgaaagcggcactttgagcgcatccagtgccactagcgcacgacagcggcgtcgtcagagcaaggaacaggacgaagtgcggcatggccgcgacaagggactgataaataaggaaaacaccccttcaggatttaaccacttagacgactgtatcctcaacactcaggaggtagagaaggtccataaaaacacatttggatgtgccggggagaggagtaagcccaaaaggcagaaatcctcaaccaaattgtcagagctacacgacaaccaagacggtcttgtgaacatggagtcccttaactctacaaggtcccacgaacgaacaggccctgacgacttcgagtggatgagcgacgaaagaaaaggaaatgagaaggatggcggacacacgcaacatttcgaatcccctaccatgaagatccaggaacacccatcactcagcgacactaagcaacagcgaaatcaggacgcaggcgatcaggaggagagctttgtcagtgaggtgccccaaagcgacctcacggccttgtgcgatgaaaagaactgggaagagcctatccccgctttttcctcgtggcagcgagaaaattctgacagcgacgaggctcacctctctccacaggcagggcgactgattcgtcagttgctcgatgaggatagtgacccgatgctgagtccaaggttctacgcttacggccaatctcgacagtacctggacgatacggaggtgcctccttcaccccctaactcacacagcttcatgaggaggcggtcttcttccctggggtcatatgatgacgagcaggaggatctgactcccgcccaactgactaggaggattcagtcactcaagaagaagatcaggaagttcgaggaccgattcgaggaggaaaagaagtatcggccatcccattctgacaaggccgccaaccccgaggttcttaagtggactaacgatctggctaagttccgacgacaattgaaggagagcaaattgaagatatcggaggaggacctcactccacgcatgaggcagcgatccaataccttacccaaatctttcggcagtcagctcgagaaagaggacgagaaaaaacaagagcttgtggataaggccataaaaccctcagtagaggccactttggaatccatccagagaaaactccaggaaaaacgcgctgagtcaagtcgtccggaggacatcaaagacatgaccaaggaccaaattgccaatgaaaaggtggctctgcaaaaggcactattatactacgagtctatccatgggcggcccgtgacaaaaaacgagagacaggtgatgaaaccgctttatgataggtacagattggtgaagcaaatcctgtcacgcgctaacactatcccgatcatcggtagtccaagttcaaagcgccgttccccactcctgcagcctataatcgaaggggagaccgcttcgttcttcaaggaaattaaggaagaagaagagggcagcgaagacgattcgaacgtgaaacctgacttcatggtgaccctcaagaccgacttcagtgcccggtgcttcctcgaccagtttgaagatgacgctgatggcttcatcagtcctatggacgataaaatacctagcaaatgttctcaagacactgggctatcaaacctccacgcggcctccataccagaattactggagcacctgcaagaaatgagagaagagaagaaacgaatcagaaagaagctccgggacttcgaagacaatttctttagacagaatggcagaaatgttcagaaggaagacagaactccaatggccgaggagtactcagaatacaagcatatcaaagctaagctgagactgcttgaggtgctgatttcaaagcgtgatactgattctaaatccatgtag

SEQ ID NO: 187346 - DNA, 2010 bp, synthetic construct
  misc_feature 1..2010: note = Description of Artificial Sequence: Synthetic coding sequence
  source 1..2010: mol_type = other DNA
atggcctgcgagatcatgcccctgcagagcagccaggaggacgagcggccattgtcacctttttacctttctgcccatgtgccacaggtatctaacgtgagcgcaaccggcgaactccttgaacgtactattcgtagcgcagtcgaacagcacttgttcgacgtcaataattctgggggacagtctagcgaagatagcgaatccggtactctgtcagccagtagcgccacttcagcacggcagcggcgacgccagagtaaagagcaggatgaggtccggcatggccgcgacaaggggttgatcaataaagagaatacaccaagcgggttcaatcacctggatgactgcatcctgaatacccaggaagtcgagaaggtgcacaaaaacactttcggctgtgcaggcgaaaggagcaaacccaagcgccagaagagtagtaccaagctgtcagagctccatgacaatcaggacgggctggttaacatggagagtttgaattccacaagatcccatgaacggaccggcccagatgactttgagtggatgagcgacgaacggaaggggaatgaaaaagatgggggacacactcagcattttgagagtccaactatgaaaattcaggagcaccctagtttaagtgatactaagcaacagagaaatcaagacgccggcgaccaggaagaaagctttgtgtcagaagtgccccagagcgacttgacagctttgtgtgacgagaaaaactgggaagaacccattccagccttctcgagttggcagagggagaactcagactccgacgaggcccatttgtctccccaggccggccgtttaatcaggcagctattagacgaggactcggacccgatgctgagtccaaggttttacgcttacggccagagcaggcaatatctggacgatacggaagtacccccttctccacccaactcccacagctttatgaggcgtaggagctcttcactagggtcttacgacgacgaacaggaggatctgacaccagctcagttgaccaggcgtattcagtccctgaagaaaaaaatccgcaaatttgaggaccggttcgaggaagagaagaagtacagaccgagccatagtgataaagcggcgaatcccgaggtgctgaaatggaccaacgacctcgctaagttcaggcgccagttgaaggagtccaaacttaaaatctctgaagaggacctcacaccacgcatgaggcaaaggtcgaacacgctgcctaagtcttttggtagccagctcgagaaggaggatgagaagaaacaggagctggtcgacaaagcgattaaacccagtgtggaagcgaccctggaatccatccagagaaaactgcaagaaaagagggccgaaagctccagaccagaggacatcaaggacatgacaaaagatcagatcgccaacgaaaaagtcgcactacaaaaggccctcctgtactacgagtctatccatggtaggccagtgaccaaaaacgagcgccaagttatgaaacccctctatgaccggtaccggctcgtgaagcagatcttgagcagagctaataccatcccaattatagaggaggaagaagggtcagaggacgattccaatgtgaaacctgacttcatggtgaccctgaagacagacttctccgccaggtgtttcttagatcagtttgaagatgatgctgacggatttatctctccgatggatgataaaataccaagtaaatgctctcaggacaccggcctaagcaatctgcacgcggcatccatacctgaactgctggagcatttgcaggagatgcgagaggagaaaaaacggatcagaaaaaagcttcgggattttgaggacaattttttcaggcaaaatggccggaatgtacagaaagaggatcgcactcctatggctgaagagtactcagagtacaagcacattaaggctaaattgcggctgttagaagtactcatctcaaagcgggatactgactccaagtccatgtag

SEQ ID NO: 187347 - DNA, 2094 bp, synthetic construct
  misc_feature 1..2094: note = Description of Artificial Sequence: Synthetic coding sequence
  source 1..2094: mol_type = other DNA
atggcctgcgagatcatgcccctgcagagcagccaggaggacgagcggcccctttctcctttctatctcagtgcccacgttcctcaagtctccaacgttagtgccaccggggagctcttggagagaacaatccgaagcgcggtcgagcaacacttgttcgatgtaaacaacagtggcgggcaatctagcgaagactccgagtctgggacattatccgcttcatcagccacatcagcccgacagcggagacggcagagcaaggaacaggacgaagtgcgacacggccgggacaaaggcctgatcaataaggagaacacgcccagcggatttaaccacctagatgactgcattctgaatacacaggaggtagagaaagttcacaaaaacaccttcggatgtgccggagagcgaagcaagcctaaacgccaaaagtcatccacaaaattaagcgagcttcatgataatcaggacggtttagttaatatggaaagcttaaatagtacccgaagccatgagcggacagggcctgacgactttgagtggatgtccgacgagagaaaaggaaatgagaaagacggcggccacacccaacactttgaatctcccacaatgaagatacaagagcaccctagcttaagcgacaccaaacagcagagaaatcaggacgcgggtgaccaggaagaaagtttcgtctccgaggttccacagagtgaccttacagccctgtgcgacgaaaagaactgggaggagcccattcctgccttcagttcctggcagagggagaacagtgacagtgatgaggcacacttgagtccacaggccggtcggttgatccgccagttgctagatgaagactctgatcccatgttaagccccagattctatgcatacggtcagagtcggcagtacctggatgataccgaagtgccaccctccccaccaaattcccatagttttatgcgacggcgctcctccagtctcgggagctacgacgacgaacaggaagacctcacgcccgcccagctcacaagacgtatacaatctctgaaaaagaaaattagaaagttcgaggatcgcttcgaggaggaaaaaaagtaccgaccatctcacagcgacaaggccgctaatccggaggtgttgaagtggacaaatgatcttgcgaaattcagaaggcagctaaaggagtctaagctgaaaatttcagaggaagacctgaccccgcggatgaggcaacggagcaataccctcccgaaaagctttgggtcccagctggagaaggaagacgagaaaaagcaggagctcgttgacaaggccatcaaacccagcgttgaggccaccttggagtccatccagcgtaaattgcaggaaaaaagggccgagtcctcccgccctgaagacatcaaagacatgaccaaggaccaaatcgcaaacgaaaaggtcgcactgcagaaagcccttctgtactacgagagtatccatggcaggcccgtgaccaagaacgaaagacaagtgatgaaaccactctatgaccggtatcgtctggtgaaacaaattctgagccgcgctaacaccatccctattattggcagtccttccagtaaaagacggtcaccgctgctgcaacctatcatcgagggagagacagccagcttctttaaggagattaaggaagaagaggaagggagcgaggatgacagcaatgtcaagcccgatttcatggtaaccttaaaaacagatttctcagctcgttgtttcctggaccagtttgaggatgacgccgacgggttcattagtccgatggatgacaagataccgagtaagtgcagtcaggacactgggctgtcaaacctccacgctgcttccattcccgagttactcgaacacttacaagagatgagggaagaaaagaagcggatcagaaagaagttaagagatttcgaggacaactttttccgccagaacgggaggaatgtgcaaaaggaagatcggacacctatggcagaggagtattcggagtataagcacattaaggcgaaactccgactgctggaagtccttatttctaagcgcgatacagattccaaatctatgtag

SEQ ID NO: 187348 - DNA, 609 bp, synthetic construct
  misc_feature 1..609: note = Description of Artificial Sequence: Synthetic coding sequence
  source 1..609: mol_type = other DNA
atgggcgccggcgccctggccatctgccagagcaaggccgccgtgcgcctcaaggaggatatgaaaaaaattgttgccgtgcctctgaacgagcagaaggacttcacctatcagaaactgttcggagtgagcctccaggaactggaaaggcagggactgacagagaacggtattccagctgttgtctggaatattgtagagtacctgacgcagcacggcctcactcaggaaggccttttcagggttaatggcaacgtgaaggtcgtagagcaactgagactgaagtttgagtctggtgtgccagtcgaattaggcaaagacggagacgtctgttccgctgcatcgctgctgaagttgtttttaagagagttgccagattctctcattaccagcgctctgcagccgagatttatccagctttttcaggacgggcgaaacgacgtccaggaatcctctcttagggacttgataaaagaacttcccgacacacattactgtctcttgaagtatctatgtcaattcttaacaaaggtggcaaaacatcacgtacaaaatcgtatgaatgttcacaacctcgcaacagtgtttggaccaaactgcttccagtag

SEQ ID NO: 187349 - DNA, 1494 bp, synthetic construct
  misc_feature 1..1494: note = Description of Artificial Sequence: Synthetic coding sequence
  source 1..1494: mol_type = other DNA
atggccagccccgccccccccgagcacgccgaggagggctgccccgcacccgcagctgaggagcaggctcccccgagtcccccccccccccaggcctccccagcagagcgacaacagcaggaagaggaggcacaggaggctggcgctgctgagggcgctggacttcaggtagaagaagccgctggacgggcagccgccgcagtgacgtggctgctcggcgaacctgtgctctggctgggatgccgggctgatgaattactatcctggaagagaccgctacggtccctgctgggcttcgttgcagccaatctcctgttctggtttcttgccctcacgccctggcgggtctatcacctgattagcgtgatgattctggggcgcgtcataatgcagataatcaaggatatggtgctatccaggacacgcggagcccaactttggaggtccttgtccgaaagctgggaagtgattaactctaagcctgacgaacggcccaggctgagtcattgcatcgcggagagttggatgaattttagcatcttcctgcaggaaatgtccctgtttaaacagcagtcaccaggcaagttctgtttactcgtctgctctgtctgtactttctttacaatactaggatcttatatccctggggtgatcctttcctaccttctactgctctgtgcattcctttgtccactgtttaagtgcaacgacatcggccagaaaatctattctaaaataaagagtgtcctacttaagctggattttggaatcggtgaatacatcaaccagaagaagagagagcgatctgaagctgataaggaaaaatcccacaaggatgactccgagctggacttcagcgccctttgtccgaaaatatccttgactgtggcagccaaagagttgtccgtcagtgacaccgacgtttccgaagtgtcttggacagataatggaacctttaacttaagcgagggctacacccctcagacggatacatccgatgatcttgacaggcctagcgaggaagttttcagcagggacctgtcggactttccgtctctagaaaatggaatgggaacaaatgacgaggatgaactttccctgggcctgcccactgagctcaagcgaaagaaggaacagcttgactccgggcatcgcccatcgaaggaaactcagagcgccgcgggcctgacgctgccactgaattctgaccagacctttcatctaatgtctaaccttgccggcgacgtgatcaccgctgctgtgaccgccgccatcaaggaccagctggaaggcgttcagcaggccctgagccaggcagcacctatccccgaagaggacacagataccgaagagggggacgatttcgaactgcttgaccagtccgagctggatcagatcgagtcggaactgggcctgacccaggatcaagaggccgaagcacagcaaaataaaaaatcaagcggttttctatccaatctgctgggcggacattag

SEQ ID NO: 187350 - DNA, 1071 bp, synthetic construct
  misc_feature 1..1071: note = Description of Artificial Sequence: Synthetic coding sequence
  source 1..1071: mol_type = other DNA
atgcccgagggcgaggacttcggccccggcaagagctgggaggtgataaactccaaaccagatgagcgaccaagactctcacattgtattgctgagagctggatgaatttcagcatattcctgcaggaaatgtctctctttaagcaacagtcccctgggaagttttgtttactcgtatgtagcgtgtgcaccttctttactattttgggaagttacatcccgggtgttattctctcctacctgctgctcctttgcgccttcctgtgtccactttttaaatgcaacgatatcggacagaagatctattcaaaaataaagtccgtccttctaaagctggatttcggcatcggggagtatataaaccaaaagaagcgggagcgctccgaagcagacaaagaaaagtctcataaggatgatagtgagctggattttagtgctctctgccctaaaatttccctcaccgtggcggccaaagaactgagcgtctcagatacggacgttagcgaagtgtcatggacagacaacgggacattcaacctgagcgagggctatacaccccaaacggatacatcagacgatttagatcgccccagtgaagaagtctttagcagagacctgagcgattttccttcactggaaaatggaatggggacaaatgatgaagacgagctttccctgggcctcccaactgaactcaaacgtaaaaaggagcagcttgatagtggacaccggccatccaaagagacgcaatccgctgccgggctgactctccccctaaactcagaccagacattccatttgatgagcaacttggcaggcgacgtgatcacggctgctgtcacagcagccatcaaggaccagctggagggcgtgcagcaggccctaagtcaggctgcgccaattccagaggaggacaccgacaccgaggaaggcgatgacttcgaattactggaccagtcagagctggatcagatcgagtccgagctcgggctgacgcaggaccaggaagccgaggcccagcaaaataaaaagtccagcgggtttctctccaacctgcttggaggacattag

SEQ ID NO: 187351 - DNA, 2151 bp, synthetic construct
  misc_feature 1..2151: note = Description of Artificial Sequence: Synthetic coding sequence
  source 1..2151: mol_type = other DNA
atggccaccagccaccgggtggccaagctggtggccagcagcctgcaaactcccgtcaatccaataactggagcaagggtagcccagtatgagcgggaagatccccttaaagccttggccgcagctgaggcaatcctcgaagatgaagaagaggaaaaggtggctcagccggctggagcctccgcagatctgaacacttcattttccggagttgatgagcatgcgcccatttcttatgaggacttcgtgaattttccggatattcatcacagcaacgaggagtactttaagaaggttgaggagcttaaagctgcccacatcgaaacgatggccaaactcgaaaagatgtatcaggacaagctgcatctaaaagaggttcagcctgtcgttattcgggaagattctctctccgactcatcccggtccgtgagcgaaaagaacagttatcaccccgtgtctctgatgacctcattctcagagccggatttggggcagtcttcttccttgtacgtaagctcttctgaggaagaattaccgaacctcgagaaggaatacccccgtaagaatcggatgatgacatacgccaaggaattgatcaataatatgtggaccgacttttgtgtggaagactacatcaggtgtaaagatactggattccatgccgctgaaaagcgccgcaagaaaagaaaagagtgggtgccaacgataactgttcccgagcccttccagatgatgatcagagaacagaagaaaaaagaggaatcaatgaaatctaagtcggacatagaaatggttcataaggcactgaagaaacaagaggaggatcctgagtacaagaagaaattccgagcaaatcccgttccggcttcagtgttcctccccctctatcacgacctggtgaagcagaaggaggaacgcagacgttcactcaaagaaaagagtaaggaagcattgctggctagccaaaagccattcaagttcatagcgcgagaggagcaaaaacgcgcagcccgggaaaaacagttgagggacttcctgaaatacaaaaagaagaccaaccggtttaaagccagaccaatcccacgatcgacatatgggtcaaccacaaacgataagctgaaggaagaggagttgtaccgaaatttgcgaacccaactacgggcccaggaacatctccagaatagctcccctctgccttgccgctccgcttgcgggtgtagaaatccaagatgcccagagcaggccgtgaagctaaaatgcaagcacaaagttaggtgccccacgcccgatttcgaagatctacccgagcgctaccagaagcacctgagtgaacacaagtccccgaagctgctgacagtgtgtaagcccttcgatctgcacgcttcccctcacgcaagcattaagcgggagaagatcttagctgacatcgaagccgatgaggagaatcttaaagagacacgatggccttacctgagcccgcgtcgtaaaagtccggtgcgctgcgcgggtgtgaatccagttccatgcaactgcaaccctcccgttcctacggttagttcacgaggtagggagcaagccgtgagacgttcgctcgaggaaaagaagatgctggaggaagaacggaaccggattctgaccaagcagaaacagcgaatgaaggaactccaaaaactgctgactaccagggccaaggcctacgattcacaccagagcctcgcacagataagcaagagccgcgtgaagtgcctacgcaaatccgagaaggaacgcatgcgggagtaccagcgggaactggaggagagagaagaaaagttaaagaagaggccactgctgttcgagagagttgcacagaagaatgcccggatggctgccgaaaaacactattccaatactcttaaggctcttggaatctccgatgagttcgtctcaaagaagggccagtctggaaaggtgctggaatacttcaataaccaagagacaaaaagcgtgacagaggataaggaatccttcaatgaggaagaaaaaattgaggagagggaaaacggggaggagaattactttattgacactaactcgcaagactcatacaaagagaaagatgaggctaatgaggagtctgaagaagaaaaatcagttgaggagagccattag

SEQ ID NO: 187352 - DNA, 1983 bp, synthetic construct
  misc_feature 1..1983: note = Description of Artificial Sequence: Synthetic coding sequence
  source 1..1983: mol_type = other DNA
atggccaccagccaccgggtggccaagctggtggccagcagcctgcagactccagtcaatcctatcacgggagcacgcgtggcacagtatgagagggaggacccgttgaaagctctggccgcggctgaagcaatcctggaggatgaggaggaagagaaagtcgcacaaccagccggcgcatccgccgatctgaatacgagtttctctggggtggacgagcacgctcctatctcttatgaagattttgtgaattttccagacattcaccactccaatgaagagtactttaaaaaagtagaggagctcaaggctgctcacatcgaaacgatggctaagttggaaaaaatgtatcaagacaagctccatcttaaagaagtgcagccagtggtgatcagagaggatagcctgtctgactcctctaggtccgtgtccgagaagaactcttaccatccagtgtctctgatgacatcattctccgaaccggacctggggcagagcagctcgctctacgtttcatcaagtgaggaagagctgccgaacctcgaaaaagaatatcctcggaaaaaccggatgatgacatacgcgaaggaactcataaacaatatgtggaccgacttctgcgtggaagactatatacgctgcaaggataccgggttccacgccgccgagaaaagaagaaagaagaggaaggaatgggtgcccaccatcaccgtgccggagcccttccagatgatgataagagaacagaaaaaaaaggaggagagtatgaagtcaaaaagtgatatcgagatggtccataaagctctgaagaagcaagaggaagatcctgagtataagaagaaattccgggcaaatcccgtgcccgcatcagtgtttctgccattgtatcacgacctggtgaaacagaaggaggaacgtagacgaagcctcaaagaaaaatcaaaggaggcactgctcgcctcccagaagcccttcaagttcatagcaagagaggagcaaaaacgggccgcccgtgaaaaacaactgagggactttttgaagtataaaaagaagactaatcgcttcaaggctagacccattcctagatctacatatggtagcactaccaacgataagttgaaggaagaggaactgtaccggaatctcagaactcaacttcgagcccaggaacaccttcaaaactcctcaccactgccttgtcgctcagcttgcggttgccgcaacccccgatgcccggagcaagccgtcaagttaaagtgtaagcataaggtcaggtgccctacccccgacttcgaagacctaccggaaagatatcagaagcatctgtcagaacataaaagcccgaaactgctaactgtgtgcaaaccattcgatctgcacgcctctccccacgcctccattaagagagagaagattctggcggacatcgaggcagatgaagagaacctcaaagaaacaaggtggccttatctttctcctcgaaggaaatcccctgtccgatgcgctggcgtcaaccctgtcccttgcaactgcaacccaccggtacccactgtgagcagccgaggaagggagcaggccgtgagaaaatcagagaaggagagaatgagagaatatcaaagggaactcgaagagcgagaggaaaagctaaagaaacgccccttactgtttgagagggtagcacagaagaatgcccgcatggccgccgagaagcactactctaacacactgaaggcgttggggatatcagatgagtttgtcagcaagaaggggcagtcaggaaaggtcctggaatacttcaacaatcaggagactaaatccgtgacagaagataaggagtccttcaatgaggaggaaaagatcgaggaacgcgaaaacggcgaggagaattatttcattgatacaaattcacaagatagctacaaggaaaaagatgaggcaaacgaggagtccgaggaagagaagtccgtcgaagaaagtcattag

SEQ ID NO: 187353 - DNA, 645 bp, synthetic construct
  misc_feature 1..645: note = Description of Artificial Sequence: Synthetic coding sequence
  source 1..645: mol_type = other DNA
atgagcgtgccccagatccacgtggaggaggtgggcgccgaggagggggctggcgccgctgctcccccagacgaccacttgcgctccctgaaagctctaaccgagaagcttcggcttgaaaccaggcggccatcatacctggagtggcaagccaggcttgaagagcacacatggccattcccccgccccgccgcggagccacaggcttcactcgaagaaggcgaacgtggggggcaggagcccctgctaccacttcgggaagccggccagcatccacctagcgcaagaagcgcatcacagggcgcaagacctttgtctaccggcaagctcgaaggcttccagtctatcgacgaggccatcgcctggcttaggaaagagctgacagaaatgcggctgcaggatcagcagctggcccgacagttgatgcggcttcgcggcgacattaacaagctgaaaatcgagcatacctgccgcctccacaggaggatgcttaatgacgctacttacgagctggaagagcgggacgagctggccgatcttttctgtgacagcccactcgctagcagcttcagcctcagtacccccctcaagctgatcggtgtcacaaaaatgaatattaactctcggcggttctccctctgttag

SEQ ID NO: 187354 - DNA, 1248 bp, synthetic construct
  misc_feature 1..1248: note = Description of Artificial Sequence: Synthetic coding sequence
  source 1..1248: mol_type = other DNA
atggccgccagcatcagcggctacaccttcagcgccgtgtgcttccactctgcaaactctaatgctgatcacgaaggcttcctcttgggggaagtgcggcaggaggaaaccttctctatctctgactcacagatttctaataccgaatttctccaggtaattgaaatccacaaccatcaaccatgcagtaaacttttcagtttctacgattacgcatcaaaagtgaatgaagaatccttggatcggattctgaaagaccggagaaaaaaagtgatcggttggtatcgattcaggcgcaatacccagcaacagatgagctatcgtgagcaagtcctgcataagcagctcacaaggatcttaggtgtccctgacttagtcttccttctgtttagctttatttccactgccaataatagcacacacgcccttgaatatgttttgtttcgacccaaccgacgttacaaccagagaatatctctcgcaattcccaatcttggcaacacttcccagcaggaatataaagtcagtagcgtaccaaacacctcacagagttatgccaaggtcatcaaagagcatgggactgatttctttgacaaagacggagttatgaaggacatacgtgccatctatcaggtgtataacgctttgcaggaaaaggttcaggcggtttgcgccgacgtagagaaaagcgaacgagtagtcgagtcatgccaggccgaggtaaataagcttcggaggcaaatcactcagcgtaagaatgagaaggagcaagaaagaaggctgcagcaggccgtgctgtctaggcaaatgccttcggagtcactggaccctgcctttagtccgcgaatgccatcctcgggatttgctgccgagggccggagtaccctcggcgatgctgaagcctctgatcccccccccccatacagtgatttccacccaaataatcaggaaagtaccttatcacattcccggatggaacggtcagtcttcatgccccgcccccaagccgtgggctcatctaactacgcctcaacctcagccgggctaaagtaccccggttctggggctgacctccctccaccacagagagccgcgggtgatagcggcgaagattcagatgattctgattacgaaaatcttatcgaccctacagagcctagtaacagcgaatatagtcactctaaagactcacggccaatggctcatcccgatgaggaccctcgcaacacacaaacatctcagatctag

SEQ ID NO: 187355 - DNA, 3522 bp, synthetic construct
  misc_feature 1..3522: note = Description of Artificial Sequence: Synthetic coding sequence
  source 1..3522: mol_type = other DNA
atgacccggcggtgcatgcccgcccggcccggcttccccagcagccccgcacctggctctagtcccccgcgctgtcatctcagaccagggtccactgcccacgccgccgcaggaaagcgcaccgaatcaccaggcgaccggaaacaaagcataatcgattttttcaaacctgcctcgaaacaagataggcacatgctggatagtccacagaaatccaatataaaatacgggggaagccggctgagtattaccgggactgagcaatttgagcgcaagctgagtagccccaaggaatccaagccaaagcgcgtcccacctgagaagagcccaatcattgaagcattcatgaagggagttaaggagcaccacgaggatcacggcatacacgagtctcggagaccatgcctgagcttagcatctaaatacctggcaaaaggaaccaatatctatgtgccgagcagttaccaccttcccaaagaaatgaagagcctgaaaaagaagcacagatctcccgagcgacgtaagagtcttttcatccacgaaaacaatgagaagaatgacagagacagaggtaagactaatgcagatagcaaaaaacagactactgttgcagaagccgacatcttcaacaactcatctaggtctttgtctagtagaagctctctctcgagacatcatcccgaagagagccctctgggcgccaagtttcagctgtcactggcatcatattgcagggagagagaactaaaaagactcaggaaggagcagatggaacaacggatcaactctgaaaatagcttctccgaggcatcgtcgctctctctcaagagcagtatcgagcgcaaatacaagccacgccaagagcagcgcaaacagaatgatatcataccggggaaaaacaacctcagcaatgttgagaatgggcacttatctcggaagcggagctctagcgatagctgggagcccacaagtgccggttctaaacagaataagttcccagaaaagcgtaagcgaaactctgtcgattccgacctcaaatctacccgagaatccatgatccctaaggctcgcgaatcgtttctcgaaaagcggccagatgggccgcaccagaaagagaagtttataaagcacatcgcactcaaaacgcccggggacgtgctccgtttggaggatatcagcaaggagccctcggacgaaaccgatggttctagtgccggcctggcgccctcaaattccggcaattctggtcaccattccacccggaatagtgatcagatacaggtggcaggcacaaaggaaacaaagatgcaaaagccccatctccctctttcacaggagaaatcagccataaaaaaggcttccaacttgcagaagaacaaaaccgcatcctccaccaccaaggagaaagagaccaagttgcccctgctatcaagggtgccctcggcagggagcagcctcgtcccactgaacgcaaagaattgcgctctgcccgtctctaaaaaagacaaagaacgatcttcctcgaaggagtgctcaggacattccacagagagtaccaaacacaaggagcacaaagccaaaaccaacaaggctgactctaacgtttcatcaggcaagatctctggcggtcccctacggtctgaatatgggacccccactaagtctccaccagcagctctggaggttgtcccgtgcatcccctcacccgctgcccctagtgataaggccccctccgaaggcgagtctagcgggaatagtaacgcgggctctagcgccttaaagcgcaagttgcggggtgactttgacagcgacgaggagagtctgggctataacttagacagcgacgaggaagaggagacactgaagagtctggaggagatcatggctcttaatttcaaccagacccctgcggctaccggaaagccacccgctctttctaaaggactacgctcccagtcttcagattacacagggcacgtgcacccaggaacctacacaaataccttagagagactggttaaggagatggaagatacccagagattagatgaactgcagaaacaacttcaggaggacatcagacaaggaaggggaattaaatcaccaattcggatcggcgaagaggactctaccgatgacgaagacggtcttttggaggagcacaaggagttcctcaagaaattttcagtgacgatcgacgccattccggatcatcatccgggagaggagattttcaattttttaaatagtgggaaaatctttaatcagtacacactggatctgcgtgacagtgggttcatcggacagtcagcagtggaaaaactcatactaaagtccggcaagaccgatcagattttcctgaccacccagggattcctaaccagcgcgtaccactatgtccagtgtcctgtgcctgtgctcaagtggctgtttcgcatgatgtcagttcacaccgattgcattgtgtctgtacagattctgagtaccttaatggaaatcaccatccggaacgacacatttagcgactcccccgtttggccgtggatccccagtctgtctgatgtcgccgcagttttcttcaacatgggaatcgatttccgcagtctattccccttagagaacctccaacccgacttcaatgaagactatctcgtgtctgagacccaaaccacaagccgcgggaaggagagcgaagatagttcttataagcctatctttagcacacttcctgagaccaatatccttaatgtggttaagtttttggggctatgtacctccatccacccagaaggataccaggaccgggagatcatgctccttatcttaatgttattcaaaatgtctctcgaaaagcagctaaaacagattcccctcgtggacttccagtccctcctgatcaatttgatgaagaacatccgggactggaacaccaaggtgccagaactgtgcttggggatcaacgaattaagtagccatccccataatctgttgtggctggtgcagctcgtccctaattggacaagcaggggacgccagctgagacaatgccttagcctcgtgataatcagcaagctgctggatgagaagcacgaggacgtgccaaacgcgtctaacctgcaggtcagtgtgctccaccgatatctggtccagatgaaacccagcgatctgctaaaaaaaatggtgctaaagaaaaaggctgagcagccagatggaatcatcgacgactcacttcacctcgaactcgaaaagcaggcatactaccttacttatattctgcttcatctagttggcgaggttagctgttcccatagcttttcttccggacaaagaaagcactttgtccttctgtgcggcgcgttggaaaagcacgtaaaatgcgacatcagagaagacgctagattattttaccgcaccaaagtcaaagatctggttgcaagaatccatggcaagtggcaagagatcatccagaattgtaggccgactcagggtcaactgcatgacttctgggtgcccgacagctag

SEQ ID NO: 187356 - DNA, 3561 bp, synthetic construct
  misc_feature 1..3561: note = Description of Artificial Sequence: Synthetic coding sequence
  source 1..3561: mol_type = other DNA
atgacccggcggtgcatgcccgcccggcccggcttccccagcagcccagcccctgggtcttctcccccacgctgccatctcaggcccggaagcaccgctcacgcggcagccgggaagcggaccgagtctcccggagaccgcaagcagtctattatagattttttcaagcctgctagtaagcaggatagacacatgctcgacagccctcagaagtctaatattaagtatggagggagcaggctgtcaatcaccgggaccgaacaatttgagagaaagctgagtagcccgaaagagagcaaacccaagcgggtgccccccgagaaatcgccgataattgaggccttcatgaagggggtaaaagaacatcacgaagatcacggcatccacgaatcacgtcggccatgcctgtcccttgcatctaaatacctggccaaaggcacaaacatctatgtgccctcaagctaccatcttccaaaggagatgaaaagcttaaaaaaaaagcataggtcaccagagagaagaaaatcgctcttcatccacgaaaataacgaaaagaatgaccgggatagagggaagaccaacgctgatagtaaaaaacaaactaccgttgccgaggcggatattttcaacaattcttctagaagtttgtccagccgatcgagcttgtcccgccatcacccagaagaatcccctctgggagcaaagttccagctctccctcgccagctactgcagagagcgtgaactgaaacgtttaagaaaagagcagatggaacagcgaattaatagtgagaactcatttagcgaagcatcaagcctctccctgaaaagtagtattgaaagaaaatacaaacctcgtcaggagcaacgtaagcagaacgatataatccctggaaaaaataatctgtctaacgtggagaatggtcacttgtcgagaaagcggagcagctcggattcctgggagccaacctctgccgggtctaagcagaataagtttcctgagaagaggaaacgcaactctgttgattccgatctgaaaagtactagagagagcatgattcctaaggcccgcgaatcttttttggaaaagagacctgatgggccacaccagaaggaaaagttcattaagcatatagctcttaaaactccaggagacgtactgcgcctggaagacataagcaaagagcctagcgacgagactgatggcagctctgctggtctggcaccatccaatagtggtaactcgggacaccactccactaggaactcagaccagatacaagtggcaggcaccaaagagactaaaatgcaaaagccccacctgccattaagccaagagaaatcagcaattaagaaagcctcgaatcttcagaaaaacaaaaccgcctccagcacaaccaaagaaaaagaaactaagctgccacttctcagcagggttccatccgctggatccagtttggtaccattaaatgcaaaaaattgtgccctcccagtgtctaaaaaggataaggaacggtcatccagcaaggaatgctctgggcacagtactgagagcaccaagcataaggagcacaaagcgaagacgaataaagccgatagcaacgttagctctggcaaaatcagcggtggaccactacggagcgagtacggaactcccacaaagtcacccccagccgccctagaagtggtgccttgcattccctcaccagcagccccttccgataaagcaccgtcagagggggagagctcaggaaactctaacgccggaagtagtgcgctgaagcgaaagctgcgaggagacttcgacagtgacgaggagtccttgggctacaatcttgatagcgatgaagaggaggaaaccctgaagtcactcgaagaaattatggccctgaacttcaatcagacacccgcagcgacagggaaaccccccgccctttccaaggggttaagatctcaatcctcagactacactgggcatgtgcaccccggaacatatactaatactctcgagcgtcttgtgaaagagatggaggacacacagcgcctggacgaactgcagaaacaactacaagaagacatccgccagggccgcggcataaaatcaccaatcaggataggtgaagaagacagcacggacgacgaagacgggttgctggaggaacacaaggaatttctgaaaaaattttccgtaacgatcgacgccattcccgatcatcaccccggagaagagatctttaactttctgaactcgggcaagattttcaaccagtacacgctggacttgagggattctgggtttatcggccagtctgcagtggaaaaactgatccttaaaagcggcaaaacagatcagatcttcctgacgacccagggctttcttaccagcgcttaccactatgtgcaatgtccggtacccgttttaaagtggctgtttcgaatgatgtccgtccatacagactgtatcgtttccgtccaaatcctttccaccttgatggaaatcaccatccggaacgacacatttagcgatagccccgtgtggccgtggatcccttccctgagtgacgtagccgccgttttctttaatatgggcatcgatttcagatctctgtttcccttggagaatctccaaccggactttaatgaggattatcttgtgagcgaaacccagacaacatccagggggaaggaatctgaagatagctcctataaaccaatcttttccaccctgcctgagacaaatatcttgaacgtggtcaagttcctcggcttgtgtacctctattcacccggaaggctaccaggaccgtgagatcatgctgctcatcctaatgctgtttaagatgtcactggaaaaacagttgaagcaaattcctttggttgacttccagtcactattgatcaatctgatgaaaaatattagagactggaatactaaggtccctgagctgtgtctcggaatcaatgaactgagctcccacccccacaatctgctctggctggtgcagcttgtgccaaattggacttcacgcggacggcagctacggcaatgtctaagtctcgtaatcatttccaagttgctcgatgagaagcatgaggatgtgccaaatgccagcaacctgcaggtgtctgtgctgcatcgatacttggttcaaatgaaacccagtgacttgctaaaaaagatggtgttaaaaaaaaaggcagagcagcccgacggaatcatcgacgactcgctgcacctggagctggaaaaacaagcatactacttgacatatatcctgctgcacctggtcggtgaggtttcttgcagtcactcattcagctctggacaaaggaagcatttcgttctcctgtgtggggccctcgaaaaacatgttaagtgtgacatcagagaggacgcccgcctgttctataggactaaggtgaaagacctggtggcccggatccacggtaaatggcaggagataatccagaactgcaggcccactcaagtcagcttctgttatacgatctcatgcattttgaacagctttgccgagtggcactcctcatactgtctcaagtag

SEQ ID NO: 187357 - DNA, 2277 bp, synthetic construct
  misc_feature 1..2277: note = Description of Artificial Sequence: Synthetic coding sequence
  source 1..2277: mol_type = other DNA
atgacccggcggtgcatgcccgcccggcccggcttccccagcagccccgctccagggagcagtcctccgaggtgtcacctgcgccctgggagcacagctcacgcagctgctgggaagcggaccgaatcgcctggtgatagaaaacagtccataattgacttttttaagccagcctccaagcaggacagacacatgctggattctcctcagaaatctaatatcaaatacggcggcagtcggctgagtattacagggacggagcagtttgagcggaagctttctagccctaaggagtcgaaaccaaagagggtaccacccgagaaatcccctatcatcgaggcctttatgaagggagtcaaagaacatcacgaggaccacggaatacatgagtctcggcgaccgtgccttagcctcgcttcaaagtatctcgcaaagggaactaatatttatgtgccatcctcttaccacctgcccaaggagatgaagtctctgaagaagaagcatcggagcccagagaggaggaagagtctcttcatacatgaaaataatgaaaaaaacgatagagacaggggcaagactaatgcagatagcaagaagcagacaaccgtcgcagaggctgatatcttcaataattccagtcgatccctgtcttctaggtctagcctcagcaggcaccacccagaggaatctcctttgggcgccaaattccagctgtccctagctagctattgccgggaacgcgaactgaagaggcttaggaaagaacagatggagcaaagaatcaactctgaaaactcattttcagaagcgtccagcctgtctctgaaaagtagtatcgagagaaagtataaaccccgacaggagcagcgtaagcagaacgacataattcctggaaaaaacaacctttcaaatgtggaaaacgggcacctcagccggaagaggagctcatccgactcctgggaaccaacttccgctgggtcgaagcagaacaagtttcctgaaaaacggaaaaggaacagcgtcgactccgacttgaaatctacacgcgaatccatgatacccaaagcccgcgagtctttcctggaaaaaagacccgatggtcctcatcagaaggaaaagttcattaaacatattgctctcaaaaccccgggagacgtgctcaggcttgaagatatctcaaaagagccctccgatgagaccgacggatccagcgcaggactagctccatccaatagtggcaactctggccatcactcaacaaggaatagtgatcagattcaagtggccggaaccaaagagacgaaaatgcagaaaccgcacctaccgctgagtcaggagaaaagcgccatcaaaaaggccagcaacctgcaaaaaaataaaaccgcgtccagcaccacgaaagagaaggaaactaagctgccgctgctatctagggtgccatccgctggttcctctttagttcccctgaatgcaaaaaattgtgcacttcctgtttccaagaaggacaaggaacggtctagctctaaagagtgttcaggacacagtacagaaagcacaaagcacaaggaacacaaagcgaaaaccaacaaagcggactccaatgtgtcatctggtaaaatctccggggggcctttgagatccgaatacggaacacccaccaagtcaccgcccgccgcactcgaggtggtgccttgtatcccgtctcctgcggcaccatccgataaagccccctcggaaggagagtcatctggaaactccaatgcgggcagctccgcacttaaaagaaaactgagaggggatttcgactctgacgaagaaagtctgggttataacctggattcggacgaagaagaggagacgctcaaatcccttgaggaaattatggcgctgaactttaaccagactcccgccgcgaccggaaagccacccgctctgtccaagggactccgctcccagagctccgactatacagggcatgtccatcccgggacatacaccaacaccctagagagattggttaaagagatggaagacactcagaggttcgtttctatcaagattaacctgctgaacctgaccttttgcctttttgtctggttgacctttaacttgcctttcctcaaaaatcacgaaaagctggcatgtattctggatagcgtggtgaattgtgttaggatacgttacgtcggcaggacccaatggctgatgccagttatcacaactctgtgggaaacccaggccagactgctcgaacctaggagctcgaggctccgatag

SEQ ID NO: 187358 - DNA, 675 bp, synthetic construct
  misc_feature 1..675: note = Description of Artificial Sequence: Synthetic coding sequence
  source 1..675: mol_type = other DNA
atgacccggatcaccgagctgtggagcagcccccagtggaaggtgggggctgaagtttgcggacggcaaatgcgcgagcagcggactgcagagcaatcggaaacacaaaggacatggttgtccatggctgctaccttacaatttttggtgtgcctggtggttgcaatctgtcttctgagcggggttaccacaacccagcctcacgccggccagcccatggacagcacaagtgtgggaggaggactgcaggagccggaagcaccagaggtgatgtttgaattgctctgggctggcctagaactggacgtgatgggacagttacatattcaggatgaagaactggccagcacccatcccggtcggcggctccgtttattactgcagcaccacgtacccagcgacttagagggaaccgaacagtggttacaacagcttcaggacctccgcaaaggccctcccttgagtacgtgggactttgaacacctcctccttacaggtctgtcatgcgtctaccgcctgcatgcggcttcagaggctgaggagagaggtcgctgggcccaggtttttgcactgctcgcacaggagacgctatgggacctctgcaaagggttctgccctcaggatagaccgccttcccttggctcctgggcgtccatattggacccttttccctag

SEQ ID NO: 187359 - DNA, 606 bp, synthetic construct
  misc_feature 1..606: note = Description of Artificial Sequence: Synthetic coding sequence
  source 1..606: mol_type = other DNA
atgcgggagcagcggaccgccgagcagagcgagacccagcggacctggctgagcatggcagcgaccctccagtttctggtgtgcctagttgttgccatatgcttgctgtcaggcgtgacgacaacgcagccccatgccgggcagcctatggactctacctctgtagggggtggccttcaggagccagaggcccccgaagtgatgttcgaactgctctgggctgggctggaactggacgtgatgggccaactacacatccaagacgaagaactggcgagtacccatcccggccgtagactgcgtttgctcctccaacaccacgttccatctgatctggagggaactgagcagtggttgcaacaactgcaggacctccggaaagggcctcccctgtctacgtgggactttgaacaccttttactgacgggattgtcttgcgtgtacaggttgcacgctgcctcagaagcagaggaacgcggcagatgggcccaggttttcgccctgttggcacaggagaccctctgggatctgtgcaaggggttctgtccacaggatcgtcccccctcgcttggctcatgggcctcaattttggaccctttcccctag

SEQ ID NO: 187360 - DNA, 1626 bp, synthetic construct
  misc_feature 1..1626: note = Description of Artificial Sequence: Synthetic coding sequence
  source 1..1626: mol_type = other DNA
atgcccggcctgcggcgggaccggctgctgaccctgctgctgctgggggccttactgagcgctgatctgtatttccacctctggccccaggtgcagcgtcagctgcgaccccgggaaaggccccggggatgcccgtgcactggacgagcctcatctctggctagagactcagctgccgccgcttctgaccctggcacaattgttcataacttttcccgaacggagccacggactgaacccgcaggtggctcacactccgggtccagcagcaaactgcaggccctctttgctcatcctctgtataatgtgcccgaggaaccacccctgctgggagccgaagattcgctcctcgcttcgcaggaagccctccggtactacaggcgcaaagtcgcacgttggaatcggcgtcacaagatgtaccgcgaacagatgaacctcacctcactcgaccctccattgcagttacgcctcgaggcaagctgggttcagttccacttgggtatcaaccgtcatggattgtactccaggagtagtcccgtcgtttcaaagcttctgcaggacatgagacatttccccactatctccgccgattattcccaggatgaaaaggccttattgggcgcctgtgactgtactcaaatagtcaagccgtccggcgtacaccttaagctggtcctgagattctctgactttgggaaagccatgtttaaaccaatgaggcagcagcgggatgaagagacaccggtggatttcttttattttattgacttccagcggcacaacgcagaaatcgccgcattccatcttgacagaattttagattttcggcgcgttccgccgacggtggggcgcatcgtgaatgtcacaaaggaaattctggaggtcaccaaaaatgagatcttacagtccgtcttcttcgttagtcctgccagcaacgtgtgtttcttcgccaagtgtccctatatgtgcaagaccgagtacgcagtctgtgggaatccacatctactggagggttctctaagcgctttcttacccagcctaaatctggctcccagactatcagtgcctaatccatggatccggagctatacattagctggcaaagaggagtgggaggtaaatcctttgtattgtgacacagtaaaacagatatatccctataacaacagtcagcgcctgctgaatgtcatcgatatggctatttttgatttcctcatcggcaatatggatcgtcatcattacgagatgttcacgaagtttggggacgatggatttctaatccatctcgataatgcccggggatttgggcgccactctcacgatgaaatctccattctaagcccactgagccagtgctgcatgatcaagaagaagactctgttgcatcttcaactgttggctcaggccgattatcgactgtcggacgtgatgagggaatcattgttggaggatcagttgagtccggtccttacggagcctcacctcctggcactggaccggaggctgcagacaatcctccgcaccgtggagggatgcatcgtagcgcacggccaacagtctgtcattgtggacggcccagttgaacagctggcccccgactccggacaggcaaatctgacctcttag

SEQ ID NO: 187361 - DNA, 1023 bp, synthetic construct
  misc_feature 1..1023: note = Description of Artificial Sequence: Synthetic coding sequence
  source 1..1023: mol_type = other DNA
atgggccccccccacagcggccccggcggcgtgcgggtgggcgccctccttctcctgggagtactggggcttgtttctgggctgagcctggagccggtgtactggaactcagccaataagaggttccaggctgagggaggctacgtgttgtacccccagatcggcgaccggttagatcttctttgcccacgagctcggcctccaggacctcattcttcgcccaattacgagttctacaaattatacctcgtcggaggggcccagggcagacgatgcgaagccccccccgctcctaatttactcttaacatgtgaccggccggatctggacctgagattcacaattaaattccaggaatactcccccaacctgtggggtcacgaatttaggtcccaccacgactactacatcatcgccacttccgacggcactcgggaaggattggaaagcctccaaggtggcgtgtgtttgactcggggaatgaaggtgctcctgagggtcgggcaaagtcccagaggcggcgcagtacccaggaagccagtttctgagatgcccatggagcgtgatcgcggcgccgctcactcactggagcctggcaaggagaacctccctggagaccccacatccaacgccaccagtcgcggtgctgagggccccctcccgcccccaagcatgcccgctgttgctggggccgcaggcggcctggctttgcttctcctgggtgtggctggagctggcggcgccatgtgctggagaaggcgccgtgctaagccttctgagagccgacaccccggcccaggctctttcggacgaggaggctcacttggcctcggagggggggggggcatgggcccacgagaagctgagccgggcgagctgggaatagcgctcagagggggcggggccgccgaccccccattctgtccccactatgagaaagtgtccggcgactacggtcaccccgtgtacattgtgcaggacgggccaccccaaagccctccaaatatctactacaaagtttag

SEQ ID NO: 187362 - DNA, 438 bp, synthetic construct
  misc_feature 1..438: note = Description of Artificial Sequence: Synthetic coding sequence
  source 1..438: mol_type = other DNA
atgttcaccagccccagcgagggcaagcccggcaacatggaccggcaccattacgagatgttcaccaagttcggtgatgatgggtttctgatccatcttgacaacgcacggggcttcggccgacatagccatgacgagatctctatcctgtcccctctttcgcagtgctgtatgatcaaaaaaaagaccctcctgcacttgcaactcctcgctcaagccgactacagactctctgacgtaatgcgggagagtctgctagaggaccagctcagcccagtccttaccgaaccacacttactagcactggatcgtcggttacagaccattctgcggaccgtggagggttgcattgtcgcccacgggcaacagtcggtgatcgtagatggaccagtggaacaactcgcccccgactccggccaagctaaccttacaagctag

SEQ ID NO: 187363 - DNA, 1230 bp, synthetic construct
  misc_feature 1..1230: note = Description of Artificial Sequence: Synthetic coding sequence
  source 1..1230: mol_type = other DNA
atgaagctgaagcagcgggtggtgctgctggccatcctgctggtgattttcatctttacgaaggtgtttttgatcgacaacctagacacgtccgctgccaatcgagaggaccagcgggccttccatcggatgatgaccggtctgagagtggaactggcccccaagctcgatcacacactgcagtccccttgggagatcgccgctcaatgggtcgtgcctagggaagtgtaccccgaagagaccccagagctcggagccgtgatgcacgccatggccaccaagaagataattaaggctgacgtggggtataagggcactcagcttaaagcccttctcattttggaaggtggtcagaaggtagtcttcaaaccaaagagatatagtcgtgatcacgtggtcgagggtgagccgtatgcaggatacgatcggcacaacgccgaggtcgctgccttccatttagatcgcattctcggattccacagggcacctcttgtagtgggacggtttgtcaacctccggactgagatcaaaccagtagctactgagcagcttctgtccactttccttactgtggggaataatacgtgcttctacggcaaatgctactactgtagggagacggagcctgcctgtgcagatggcgatatcatggagggcagcgtgaccctctggctccccgatgtctggcccttgcagaagcaccgccatccatggggcaggacatatcgagagggcaaactcgccaggtgggagtacgatgagtcatattgcgatgctgtcaagaagacaagcccctacgactcaggcccccgtttgctggacatcatcgataccgccgtgttcgattacttgatcggaaatgccgatcggcatcactacgagtctttccaggacgacgaaggggcatctatgctgattttattggacaatgccaaatcatttggcaatccttccctggacgaacggagcatcttggccccactgtatcaatgctgcatcatacgagtgtctacatggaacaggcttaactaccttaaaaatggcgtactgaaatctgccctaaagtctgccatggcacatgatcctatttctccagtccttagcgaccctcacctggatgccgtagatcaaaggctgctgagcgtcctggctacagtcaaacagtgcaccgatcaatttgggatggataccgtgctggtcgaagatagaatgcccttgagccatctttag

SEQ ID NO: 187364 - DNA, 417 bp, synthetic construct
  misc_feature 1..417: note = Description of Artificial Sequence: Synthetic coding sequence
  source 1..417: mol_type = other DNA
atgaagctgaagcagcgggtggtgctgctggccatcctgctggtgattttcattttcacaaaagtattcttgatcgacaatctcgataccagcgcagccaaccgagaggaccagagagctttccaccgaatgatgactggactccgggtggagctcgcgccaaaactggatcatacattgcagagcccctgggaaatagcagcacagtgggtggtgcctagggaagtctatccagaggagaccccagaactgggtgccgtgatgcacgccatggccaccaagaaaatcattaaggccgatgtgggctacaaaggtacacagctgaaggccctcttgatcctggaaggcggtcagaaggtcgtctttaagcctaagaggtactcacgggatcatgtggtggagggcgagccctattag

SEQ ID NO: 187365 - DNA, 1755 bp, synthetic construct
  misc_feature 1..1755: note = Description of Artificial Sequence: Synthetic coding sequence
  source 1..1755: mol_type = other DNA
atgaagatgatgctggtgcggcggttccgggtgctgatcctgatggtgtttcttgtagcctgcgctttgcatattgccctcgacctgctgccgcggctggaaagacgaggagcccggccttccggtgagccgggctgcagttgtgcgcaaccagcagcggaggtagccgctccaggctgggctcaggtgagaggaaggcccggtgagccaccagctgcttccagcgccgccggcgacgccgggtggccgaacaaacatacactaaggattctccaggatttcagttctgatcccagctcgaacctgagctcccacagtcttgagaagctccctccagcagcagagccggctgaacgggcccttcggggcagagatcctggggccctgcgacctcatgaccctgctcaccggcctttactaagagatccgggaccgcgacgaagtgaaagcccgcccggtccaggtggcgatgccagtctactagctagactattcgaacatccactttatcgggtggccgttcccccactcacggaggaagatgtgctgtttaacgtgaattcagatactcggctgtcccccaaagctgcggagaacccggactggccgcatgcaggtgccgaaggtgcagagtttctcagccccggcgaggccgccgtcgacagctaccctaactggctgaagttccacattgggatcaaccggtatgaactgtatagtcgccataatccggcaatagaagcattgttacacgatctttctagccagaggattacatccgttgccatgaagagcgggggaacacagctaaagcttatcatgacattccaaaactatggacaggccctattcaagccgatgaagcaaaccagggagcaagaaacccctccagatttcttttatttttccgattatgagcgtcacaacgcagagatcgccgccttccacctcgatcgcatcctggattttagacgggtgcctccagtggctgggcgtatggttaacatgacaaaagaaataagagacgtcacacgagacaaaaaattgtggcgaactttttttattagccccgcaaataacatttgcttctacggggagtgctcctattactgctccacggaacatgccttatgcggtaagccagaccaaatcgaggggtcactcgcagccttcctccctgacctttccttggccaagaggaagacatggcggaatccttggcggcggagttatcacaagcggaagaaggccgagtgggaagttgaccctgactactgcgaagaggttaagcagacaccaccttacgattcctctcaccggattttggacgtgatggatatgaccattttcgattttctaatgggcaatatggaccgacatcattatgaaaccttcgaaaagtttggtaacgaaacatttatcatacacctcgacaatggcagagggtttggaaagtactctcatgatgagttatcgatcctcgtgccactgcagcagtgttgcaggattcgcaagtccacatatctgcgacttcagttgctagcaaaagaggaatacaaacttagcctgctgatggcggaatcccttcggggagatcaagtggcccctgtcctgtatcagccccacctagaagccttggatcgaaggctgcgtgtagtactgaaggccgtgcgggattgcgtggagaggaacggcctgcattccgtggtcgatgacgatcttgataccgaacaccgggccgcttcagcccggtag

SEQ ID NO: 187366 - DNA, 3957 bp, synthetic construct
  misc_feature 1..3957: note = Description of Artificial Sequence: Synthetic coding sequence
  source 1..3957: mol_type = other DNA
atgatgaaccggaccacccccgaccaggagctggtgcccgccagcgaaccagtgtgggagcgcccatggagcgtggaagaaatccggcgcagttcccagtcatggtccttggctgcagatgcaggcctcttacagtttctgcaggagttctcgcagcagacaattagtaggacgcacgaaattaagaaacaggtcgatggcttgatacgggaaacgaaggcaacagattgtaggctccataatgtgttcaacgatttcctcatgctgtcgaatacgcagtttatagagaatcgagtgtacgacgaggaggttgaggaacccgtactgaaggccgaggccgaaaagaccgaacaggagaagacccgtgagcaaaaggaggtcgacctcatcccaaaagtgcaggaagctgtgaattatggactgcaggtcctggattcagctttcgaacagctcgacattaaggctgggaactctgactctgaagaagatgacgccaatggccgcgtggaactaatactggagcccaaggacctgtatatcgacaggcctctcccctaccttattggttctaaactgttcatggagcaggaggatgtgggacttggagagctgtcatccgaggaaggatccgtcgggagtgacagaggctcaatagtcgacacagaagaagaaaaggaagaggaggaatccgacgaagatttcgcacatcacagcgacaatgaacaaaaccaacacactacccagatgagtgatgaggaagaggatgacgacggctgcgatctatttgctgattccgaaaaagaagaggaggatatcgaggatatcgaagagaacactcgtcctaagaggtctaggccaaccagcttcgcggatgaactggctgctcgcataaagggcgacgcaatgggaagggtggatgaggaacccacaacactgccgagtggagaggctaaacctagaaagactttaaaggagaaaaaagaaagacgtaccccatcggatgatgaagaggacaacctctttgcacctccgaagctaaccgacgaagatttcagtccatttggctcaggcggcgggttatttagcggaggcaaaggcctcttcgacgatgaggatgaagagtccgatctatttactgaagccagccaagacaggcaggctggcgccagtgtgaaggaagagagttcgtcctctaagcctgggaagaagatccccgccggagcggtctccgtgttcctgggtgatacagacgtgtttggcgctgcctcagtgccctccctgaaggaacctcagaagcccgaacaaccgacgccccgaaaatcaccttatggccctccgcccaccggcctgtttgacgatgatgatggtgatgacgatgatgactttttctccgccccccactcaaagccttcgaaaactcgcaaagtgcagtctactgctgacatcttcggtgacgaggagggcgacttattcaaagagaaagctgtggcaagccccgaggcgactgtaagtcagaccgatgaaaataaggcccgagcagagaaaaaggtcacactttcatacagcaagaacttgaagccctcttctgaaacgaaaacgcaaaagggccttttcagcgatgaggaggattccgaggacctcttctcttcccagtccgcgtctaatctgaagggggccagcctcctgccaggaaaacttcctactagcgttagcctcttcgatgacgaggatgaagaggacaacctctttggcggcactgccgccaaaaagcagactctcagcctacaggcgcaacgtgaggaaaaggcaaaggcaagtgagctgagcaagaaaaaagcgtccgcactactcttttcgtccgacgaggagtggaatatccctgcatcacagacccatctggcgtctgacagtcggtccaaaggcgaacctcgggattctggcacactgcaatctcaagaagctaaggcggttaagaaaacctcactgttcgaggaggataaagaagacgatctattcgccatcgctaaggattcccagaagaagactcagcgggtgtccctccttttcgaagatgatgttgacagcggcggaagtctgttcggttcacccccaacaagcgtgccccctgcaacaaaaaaaaaggagactgtctcggaggccccgcctctgttattttccgacgaggaggaaaaagaagcccagcttggtgtaaagtctgtcgacaaaaaggttgagagtgctaaggagtcactcaagttcggcaggaccgatgtggccgagtcagagaaggagggactgttaactcgatcagctcaggagaccgtgaagcattctgacctgttcagctcctcatccccttgggataagggaaccaaacctcggaccaagaccgtgctctcactgtttgacgaggaagaagataagatggaagatcagaatatcattcaggctccgcagaaggaggtgggcaaaggatgcgacccagacgcacacccaaaatcaaccggagtgtttcaggatgaagaactcctcttttctcataaactacagaaggataatgatcccgacgttgatctcttcgcaggcactaagaagaccaaacttttggagccatcagtaggaagtctcttcggcgatgacgaagacgatgatctttttagctccgcaaagagtcaaccgcttgtccaggagaaaaagcgggtggtgaaaaaagatcactccgtaaactccttcaagaatcagaaacatccagagtccatccagggaagcaaggagaagggcatctggaagcccgagacgccgcaagctaacctggccatcaaccctgcagctttgttgccaaccgccgcctctcagatttctgaagttaaaccagtgttgccagagctggcgtttccaagttcagaacacagaagatctcacgggctagaaagcgtgcccgttcttcccggatcaggtgaagccggggtttctttcgatctgcccgcccaggcggacaccctccattctgcaaacaagagccgggtgaaaatgcgaggcaaacgaagacctcaaacacgcgctgccagaagactggccgcccaggagtccagcgaagcagaggatatgtccgtgccaaggggcccgattgcccaatgggccgacggggccatttcgcccaacggccacaggccccagctcagggccgcgagcggcgaggactctaccgaagaggctttggcagcagcagctgccccttgggaagggggtccggtgcctggagtcgatacttcaccgtttgcaaaatccctgggacactcccggggggaagccgatttgtttgacagtggcgacattttttctaccggcacagggtcccagtcagtagaacgcactaagcctaaagctaaaatcgctgaaaatcccgccaatccgcccgtgggcggaaaggcgaaatctcccatgttcccagcactgggagaagctagctcagacgatgaccttttccagagtgccaaaccaaagcctgctaagaagaccaatccattccccttgctagaagatgaggatgatttgttcactgatcagaaggtaaaaaaaaatgagaccaaatcttcaagccagcaggacgtcatcctgacaactcaagatatctttgaagacgacatattcgcgactgaagcaatcaagcccagtcagaagacacgggagaaggagaagacccttgaaagcaacctcttcgatgataatatcgatatctttgcggacttgacagttaaaccgaaagagaaaagtaagaagaaagttgaagcgaagtccatctttgatgatgacatggacgatatcttttctactggcattcaggccaagacaacaaagccaaaaagccggtctgcgcaagctgcaccagaaccaagatttgagcacaaagtgtccaacattttcgacgatcctctgaatgctttcggtggccaatag

SEQ ID NO: 187367 - DNA, 3789 bp, synthetic construct
  misc_feature 1..3789: note = Description of Artificial Sequence: Synthetic coding sequence
  source 1..3789: mol_type = other DNA
atgaaccggaccacccccgaccaggagctggtgcccgccagcgagccagtatgggagcgcccttggagcgtagaagaaatccgacgatcctctcagtcatggagtctcgcagctgatgccggcagggtgtatgacgaagaagtcgaggagcctgtactgaaggctgaggccgagaaaacagagcaggagaaaaccagagagcagaaggaagtagacctcattcccaaggttcaggaggcagtgaactacggacttcaggtactcgactctgcttttgagcagctggatataaaagcaggaaattccgattccgaggaggatgacgctaacggcagagtcgaactgatcctggaacccaaagacctgtacatcgaccggcctttgccatatttgattggttccaaactgttcatggagcaggaagatgtcggcctgggtgagttgtcttctgaagagggttcagtgggttcagatagaggatctatagtggatacagaggaggaaaaggaagaggaggagtctgatgaggacttcgcacatcattcagacaacgagcagaaccagcacacaacccagatgtccgacgaggaggaggacgacgatggatgcgacctgttcgccgatagcgagaaggaagaggaggatatcgaagatattgaagagaacacacgaccaaagcggtccaggccgacctcttttgctgacgaactggcggccagaattaagggagatgcaatggggcgagttgatgaggagccaacgactttgccttcgggggaggccaagcccaggaagaccctcaaggaaaagaaagaaagaagaacgccttccgatgacgaggaggacaacctgtttgcaccccccaagttgaccgacgaggactttagcccatttggctcaggtggagggctcttttccggagggaagggactgtttgacgatgaagatgaggaaagcgatttgttcacggaggcaagtcaagatcggcaagcaggcgctagcgtgaaagaggaaagtagctcctcgaaacctggaaaaaagatccctgccggtgccgtctctgtcttccttggtgatactgacgtgtttggggccgctagcgttccctcactgaaagagccacagaaaccggagcaacccacacctcggaagtccccctatgggccaccacctactggcctctttgatgatgacgatggcgatgatgatgacgattttttttccgctccccacagtaagcctagtaaaactaggaaggtgcagagtaccgccgatattttcggtgatgaagagggcgatcttttcaaagaaaaagccgtcgctagtccagaggccacggtgagtcagaccgacgagaataaagctcgggctgaaaagaaggtgacattgtcttacagtaagaacctgaagccctcctctgagaccaaaacccaaaaagggctgttttcggatgaagaagattccgaggatttgttcagtagccaatccgcctctaatctgaaaggggcctctctgttgccggggaagctgcctacgagcgtgagtctcttcgatgacgaagacgaagaggataacctctttggcggaacagcagcaaagaagcaaaccttatcactgcaggctcaacgagaggagaaggccaaggcctcagagctcagcaaaaagaaggcttcagccctgctctttagctcagatgaggagtggaatatcccggctagtcagacacacctggcatccgactcccgcagcaaaggcgagccacgggacagcgggaccctgcagtcccaggaagccaaggccgttaagaagacatcccttttcgaggaagataaagaggatgatctgttcgccattgcgaaggattctcagaaaaaaacccagagggtcagtctgctgttcgaggacgacgttgatagcgggggctccttattcggcagcccacctacatccgtgccgcctgccacaaaaaaaaaagaaaccgtctcagaggctccaccactgctgttttcggacgaggaggagaaagaggcacaactcggagttaagtctgtggataagaaagttgagtctgcaaaagaatctttgaaattcggccgcactgacgtggccgaaagtgaaaaagagggcctgctgactaggagcgcccaagagaccgttaaacactcagatttgttctcatccagctccccatgggacaaaggtacgaagcccagaacgaaaacagttttgagcttattcgatgaggaagaagataaaatggaagaccagaatattatccaggccccgcagaaggaagttgggaagggatgcgacccggatgctcatcctaaatctactggcgtctttcaggacgaggagttactgttcagtcacaagcttcaaaaggacaacgaccctgacgttgatctctttgccggaactaaaaaaactaaactgctcgaaccatccgtggggtcactttttggtgacgatgaagacgatgacctgttcagcagcgctaagagccagcctttagttcaggagaaaaaaagggtcgtgaaaaaagaccactccgttaacagttttaaaaatcagaagcatcccgagtccatccaggggtctaaagagaaaggcatctggaaaccggaaaccccccaagctaacctggcaatcaaccccgccgcacttctgcccactgccgccagccagatttccgaggtgaaacccgtccttccagagttggcctttccaagcagcgaacatcgcagatcacacggcctcgagtccgtccctgttctccccggttctggagaggccggtgtgtctttcgacctgccggctcaggctgacacactgcactctgctaacaaatccagagtgaagatgagaggcaaaaggaggcctcagaccagagctgctaggcgcctggccgcacaggaaagctctgaagctgaagatatgtctgttcctagaggccccatcgcccagtgggcggacggagcaatctccccaaatggccataggccacagttgagggccgcgagcggcgaggattcgacagaggaggctctcgccgccgcggcagctccctgggagggcggcccagtccctggagtggatactagcccattcgctaagtccctgggacactctaggggggaggccgatctcttcgactccggcgatatctttagtactggaacaggctctcagtccgtggaaaggacaaaacctaaagccaagatcgccgagaatccagctaatccgcctgtgggtggcaaggccaagagtcctatgttcccagccttgggcgaggcctcgtctgatgacgatctgtttcagagtgcaaagcccaagcccgcgaagaagactaacccttttcccctcctagaggatgaagacgatctttttacggatcagaaagtcaaaaagaacgagaccaagagttcgtctcagcaggatgttatcctgaccacccaagatatctttgaggacgacatcttcgccactgaagcgattaaaccatctcagaagacacgggaaaaggagaaaacgctggaaagcaatttgttcgacgataatatagacatattcgcggatctgaccgtgaaacccaaagagaaaagcaagaagaaagtggaggcaaaatcaatcttcgatgatgatatggatgacattttttcaactggaatccaggccaagactactaaacccaaatcacgatctgctcaggcagcgcctgaacctaggttcgaacataaggtctccaatatcttcgatgatcccctgaacgcctttggcggccaatag

SEQ ID NO: 187368 - DNA, 399 bp, synthetic construct
  misc_feature 1..399: note = Description of Artificial Sequence: Synthetic coding sequence
  source 1..399: mol_type = other DNA
atggaggaccagaacatcatccaggccccccagaaggaggtgggcaaaggctgcgatcctgacgcccacccgaagtccacaggagtgttccaggatgaggaattgctgttcagccacaagcttcagaaagacaacgatcccgatgtcgacctgttcgccggaacaaagaagactaaactactggagcctagcgtgggctctctgttcggggacgatgaggatgatgacctgtttagttccgctaaaagtcagcctttggtgcaggagaaaaaacgggttgttaaaaaggaccactccgtgaacagctttaaaaatcagaaacatccggagagtatccagggctctaaggaaaaggggatttggaagcctgagactccccaagtgcggaatccactgtag

SEQ ID NO: 187369 - DNA, 3963 bp, synthetic construct
  misc_feature 1..3963: note = Description of Artificial Sequence: Synthetic coding sequence
  source 1..3963: mol_type = other DNA
atgatgaaccggaccacccccgaccaggagctggtgcccgccagcgaaccagtttgggaaagaccctggtctgttgaagaaattcggcgatcatcccagtcctggagtcttgcagcggatgccggtctgctgcagtttttacaggaattcagccagcagactatctctcggactcacgagattaagaaacaggtagatggactgatccgagagacgaaggcaaccgactgccgccttcataatgtttttaacgatttcctgatgctatccaatactcagtttatcgaaaatcgggtgtacgatgaagaggtggaggaacccgtattgaaggcagaggccgaaaagacggaacaggagaaaacaagagaacagaaagaggtggacctgatccctaaggtgcaagaggccgtgaactacggcctgcaggttctcgatagtgcttttgaacagctggatatcaaagccggtaactctgacagtgaagaggatgacgctaatggtcgcgtagaactgatcctagagcccaaggacctctatatagaccgcccccttccttacttgatcgggagcaagttatttatggagcaggaagacgttggacttggcgagctgtcgtccgaagaggggtcagtgggctcggatcgcggctctatagtagatacagaggaggagaaggaagaggaggagagtgatgaagatttcgcacaccattctgataatgaacagaatcagcacaccacccagatgagcgatgaggaagaagacgatgacggctgtgatctcttcgccgacagcgaaaaggaagaagaagacatagaggatattgaagaaaacacccgacccaagcgctcacgccctaccagctttgcggacgaactcgctgctcggatcaagggagacgcgatggggagagtcgatgaagaacctacgaccctgccatcaggggaggcgaagcctaggaagacactaaaagaaaagaaagaacggagaacccccagcgatgatgaagaggataatctgtttgcacctcctaagttaaccgatgaggatttcagcccctttggaagcgggggcggcctcttctctggaggcaagggattatttgatgatgaggacgaggagagcgacctgttcacggaagcctctcaggaccgccaagcaggcgcctccgtgaaggaggagtcgtcttcctcaaaaccgggtaaaaaaatcccggccggagcggtctcagtctttttgggtgacactgatgtgttcggcgcagccagtgtgccaagcctcaaggagccccagaagccagagcagccaacgccacggaaatccccgtacggccccccccccacaggtttgttcgatgacgacgacggagatgacgatgatgacttcttttctgccccacactcgaagccctctaagacacgcaaggtacaaagtactgctgacatattcggcgacgaggagggagatttattcaaggaaaaggccgtcgcttcaccagaggctacagtctcgcagactgatgagaacaaggctagggctgaaaagaaagtcactctgtcatactccaagaatctgaagcctagcagtgaaacgaaaacgcagaagggcctcttttcagacgaagaagatagcgaggatcttttctcaagccagtctgcgtccaacctcaagggggcttcattgctccccggtaagctcccaacatcggtatccctatttgacgacgaagacgaggaagataatctgttcggtgggacggcagcaaaaaagcagacactcagcctccaggcccagcgagaggagaaggcgaaagcgagtgagttgtctaagaaaaaagcttccgccttactcttctcaagtgatgaggaggatcaatggaacattcctgctagccagacccatctggctagcgattcccgcagtaaaggcgagcccagggattccggtacactacagagccaggaggccaaagcagtcaagaaaactagcttatttgaagaagacaaggaagacgatctgtttgctatcgcaaaggattctcagaaaaaaacgcagcgggtcagcctgcttttcgaggacgacgtggactctggggggtccctctttggatccccaccgacgtcagttccccccgccacaaagaaaaaagagactgtttcggaggctccacctttacttttttccgacgaagaggagaaggaagctcagctgggagtcaaatccgttgacaaaaaagtagaaagtgcaaaggaaagcctcaagtttgggcgcaccgacgttgccgaatcagaaaaggagggactattgactaggtcagcacaggaaacggtgaagcacagcgacttattttcatcctcctctccctgggacaaaggaaccaagccccgcacaaaaaccgtgctgtctctgttcgacgaagaggaggacaaaatggaagatcagaacattattcaggctcctcaaaaggaggtcggaaaaggctgtgatccagatgcacatcccaagtcaactggcgtattccaggatgaagaactgctgttttcccacaagttacagaaagataatgaccctgatgtagacctgtttgctggcaccaagaaaacaaaactcttagagccaagcgtgggcagtctgtttggggatgatgaagacgacgacctcttcagcagtgctaagtcccagcccctcgttcaagagaagaagcgggttgtcaagaaggaccattcagtgaacagctttaaaaaccagaaacatccagagagcatccaggggagcaaagagaagggaatatggaaaccggagactcctcaggcgaatcttgccatcaaccctgctgccctactccccaccgccgccagccaaatctccgaggtaaagccagtgttgcccgaattagccttcccttcctcggagcatagacgaagccacggcctcgagtcagtccccgtattacctgggtctggtgaagctggagtgtcttttgacttgcccgcacaggctgacaccctccacagcgccaataagagccgggtcaaaatgaggggaaagagacggccccaaactcgcgccgccagaaggctggctgctcaggaaagtagcgaggccgaggacatgtctgtgccccgaggtccaatcgctcagtgggccgatggtgctatctctcccaatggtcatagaccccagttacgggccgccagtggcgaagattctacagaggaagcactggccgctgcagctgcaccctgggaaggcggcccagtccccggcgtggacacgtctcctttcgccaagagcctcgggcactccaggggtgaggccgatctgtttgattccggcgatatttttagtacaggtactggttctcagagcgtcgaacggaccaaacccaaagctaaaatcgcagagaaccccgccaacccacccgtggggggaaaggccaagtcccctatgtttccagcgttgggtgaagcttctagcgatgatgacctattccaaagtgcaaagccaaaaccggccaagaaaaccaacccctttccgctgctcgaggacgaggatgacctcttcaccgatcaaaaggttaagaaaaatgagacgaaatcctccagtcagcaggacgttattctgaccacccaggacattttcgaagacgacatcttcgccacagaggccattaagcccagccaaaagacgcgcgaaaaggaaaaaacactggagtcgaacttgttcgatgataacatagacatttttgccgacctgacagtaaaacctaaggagaaaagcaaaaaaaaggtagaggctaagagcatttttgacgacgatatggacgatattttctcaacaggcatccaggctaagaccacaaagcccaaatcccggagtgcacaagccgcgccagagccgaggtttgagcataaggtctcaaacattttcgatgaccccctaaatgcgtttggaggccaatag

SEQ ID NO: 187370 - DNA, 4026 bp, synthetic construct
  misc_feature 1..4026: note = Description of Artificial Sequence: Synthetic coding sequence
  source 1..4026: mol_type = other DNA
atgatgaaccggaccacccccgaccaggagctggtgcccgccagcgaaccagtgtgggagaggccttggagcgtggaagagattaggagaagctcacaaagctggagcctcgccgcagacgctgggctgttgcagttcctgcaagagttcagtcagcagactatctccaggacgcatgaaatcaaaaagcaggtggacgggctgatccgtgagacgaaggctacggactgtcgactgcacaacgtttttaacgatttcttaatgctgagcaatacacaattcattgaaaatcgagtgtatgatgaagaggtggaagagccagtgctcaaggccgaggccgaaaaaacagagcaggaaaagaccagggagcagaaagaagtggatttgattcccaaagtccaagaagcagtaaattacgggctgcaagtcctggattccgcctttgagcaactggacattaaagccggcaatagcgactctgaagaagacgacgctaacggtcgagtcgagcttatcctagaaccaaaggatctttatatcgaccgcccactgccatacctgatcggtagcaagctgttcatggaacaggaggatgtgggcctgggggaacttagcagcgaggaaggtagtgtcggcagcgatcggggatctatcgtcgatacagaggaggagaaggaggaggaggagtcagatgaggattttgcccaccacagtgacaacgagcaaaaccagcacaccacccagatgagcgatgaggaagaagatgatgacggttgtgatctattcgctgactctgaaaaggaagaagaggatatcgaggatatagaagagaacactcgccccaaacgatcgagaccaacctccttcgcagacgagctggctgctcgaatcaagggtgacgcgatggggcgcgtggacgaggagccaacaaccctgccaagtggcgaggccaaaccgcgaaagactctgaaggaaaagaaagagagacgtacgcctagtgatgacgaggaggataacttgtttgcccccccaaagctgacagacgaagacttttctcctttcggatccggcggggggctcttttccggcggaaagggtttatttgatgacgaagatgaagagtctgatctctttactgaagccagccaggacagacaagccggcgcctctgtgaaagaagagagttcgtctagtaagccgggaaaaaaaatccctgctggagccgtttctgtgtttctgggggatactgacgttttcggtgcagcgtccgtgcccagtctaaaagagcctcagaagccagaacagcctaccccccggaagtctccgtacgggccaccccctacaggcctgttcgacgacgatgatggagacgacgacgacgactttttttcagcaccacactctaaacctagcaagacgggcaaggtccagtcaactgcagatatcttcggcgacgaggaaggtgatctgtttaaggaaaaagccgtggctagcccagaagccacagtcagccagaccgatgagaataaagcaagagctgagaagaaggtaacactgtcatacagcaagaatctgaaaccgtcctctgagactaaaacacagaaggggctgttctccgacgaggaggactctgaagatttgttctctagccagagcgcctctaacctgaaaggagccagcctcctgcccggcaagctaccaacctctgtgagtctattcgacgacgaggatgaggaggataacttgtttggtggaacagctgccaagaagcagacactatcgcttcaggcacagcgcgaagaaaaagccaaagcatccgaactaagcaagaagaaagcctcagccttgctgttctctagtgacgaggaagatcaatggaacatcccagccagccaaactcacttggcttcagactctagatccaagggagaaccgagggacagtggaacgctgcagtcgcaagaggcgaaagctgtcaaaaagacatccctgttcgaagaggacaaggaggatgacctgttcgctatagccaaggactcacaaaagaaaacacagagagtgagcctgctcttcgaggacgatgttgatagcggtgggtcactcttcggttctccgccaacctcggtacccccagcaactaaaaagaaggagactgtttcggaggccccccccctgctcttcagcgatgaagaagagaaggaggctcagctcggggtgaagagcgtagacaagaaagtggagagcgcgaaggagtccctcaagttcggccggaccgacgtggcggaatccgaaaaggagggcctgctgacccgctccgcccaggaaaccgtgaagcactctgatctcttctcctcgagttctccttgggacaaagggactaagcctcggactaagaccgttctaagtctcttcgatgaggaagaagacaaaatggaagatcaaaatataattcaggctcctcagaaagaagttggtaagggctgcgaccctgacgctcacccaaaatccacaggagtgttccaggatgaggaactgctcttcagccacaaactgcagaaagataacgatcctgatgtggacctgtttgccggtacaaagaagaccaagctactcgagccatccgtgggctcactctttggggatgacgaagacgacgatctgtttagcagcgctaagagccagccactcgttcaggagaaaaaaagagtggtgaagaaggatcactcagtaaattcattcaagaaccagaagcacccagagtcaattcagggttcaaaggaaaaaggaatttggaaaccagagacaccacaggattctagcgggctggctccatttaaaaccaaggagccaagtacccgcattgggaagatacaggccaatctcgcaatcaatcccgctgcccttctacccacagcagcttcacaaatcagcgaggttaaaccagttttgccggaactggcatttccgtcctctgagcatagacgctcccatggtctagagtcggtgcccgtgctaccaggctcaggagaggctggagttagttttgatctgccagcccaagctgacacactgcattctgccaataaaagccgagtcaagatgaggggtaagagacgtcctcagacgagggctgccaggcggctcgcagctcaggagtcttccgaagccgaagacatgtcggtccctcgcggccccatcgctcagtgggcagacggcgccatctcacccaatggtcatcgaccgcagctgcgggcagcgtctggcgaagactcaactgaggaagctctagcggccgccgccgcaccttgggaaggcggtcccgtgcccggggttgatacatcccccttcgccaaatctttgggacattcaaggggggaggcagatttgttcgattccggtgacatcttcagcaccggcacaggttctcagtcagtagagagaactaaaccaaaagcgaaaatagcggagaaccccgcaaacccccctgtgggcggcaaggcaaagtctcccatgttcccagcgttgggggaggcctctagtgacgatgacttgttccagagcgcaaaacccaagcctgctaagaagacgaatccgtttcctctgctggaagatgaagacgacttatttaccgaccagaaagtcaagaagaatgagaccaagagttctagccagcaggacgtgattctgacgactcaagatatttttgaggacgatatttttgctaccgaagccatcaaaccctctcaaaaaacacgggagaaagagaaaacgctggagtctaaccttttcgacgataatatcgacatctttgcagacctaaccgtgaagcctaaggagaagtccaagaagaaggttgaggctaaatcgatcttcgacgacgacatggacgacatctttagcactggcatccaagccaagacaaccaaaccgaagtctaggtccgctcaagccgccccagaaccaagattcgaacacaaagtttccaacattttcgatgaccccctgaacgcctttggcggacagtag

SEQ ID NO: 187371 - DNA, 840 bp, synthetic construct
  misc_feature 1..840: note = Description of Artificial Sequence: Synthetic coding sequence
  source 1..840: mol_type = other DNA
atgatgaaccggaccacccccgaccaggagctggtgcccgccagcgaacctgtctgggaacgaccctggtccgtggaggaaattagaaggagcagccagtcatggtcactagcagcagatgccggtcgggtgtacgacgaagaagtcgaggagccagtgctaaaagcagaagctgaaaagacagagcaggagaaaactagagagcaaaaggaggtcgacttgataccgaaagtccaggaggcggtgaactacgggctgcaggtattggactcagcctttgaacagctggatattaaagccgggaattcagatagtgaagaggacgatgccaacggcagagtcgagctgatactggagcctaaggatctgtacatcgaccgaccgctcccctacctaatcgggagcaagttgtttatggagcaggaagacgtaggcctgggagaactgtcaagcgaagaggggtccgttggctctgaccggggcagcatcgttgatacagaggaggaaaaggaagaggaagaatccgatgaagatttcgcgcatcacagtgataatgaacaaaatcagcacacgacacaaatgtctgacgaggaggaagatgacgacggatgcgatctgttcgcagattctgaaaaagaggaggaggatattgaggatattgaggagaacactcggccaaaaagatccaggcccacatccttcgcagacgagctcgctgcccgtattaaaggcgacgccatgggtagggttgatgaggagcctacaaccctgccatcaggtgaagctaaacctcgaaagaccctcaaagaaaagaaggagcgtagaacacctagcgattag

SEQ ID NO: 187372 - DNA, 3762 bp, synthetic construct
  misc_feature 1..3762: note = Description of Artificial Sequence: Synthetic coding sequence
  source 1..3762: mol_type = other DNA
atgccccggctgagcggcaagagcgtgcgggtgtacgacgaggaggtggaggagccggtcttaaaggctgaagccgagaaaacagagcaggagaaaacaagagaacagaaggaggtcgatctgatcccaaaagtgcaggaagccgttaattatggactgcaggtattggattcagctttcgaacagctggatattaaagccggaaactcagacagcgaagaagatgacgcaaatgggagagtggagctaatcctggaaccaaaggacttgtacatcgatcgacctttaccttatctgatcggttcaaaactgttcatggagcaagaagatgtaggactgggggagctgtcgtctgaagaagggtcagtcggctcagataggggctccatagtagacacagaagaagaaaaggaggaggaggaatcagacgaggatttcgcccaccactctgacaacgagcaaaaccagcacaccacacagatgagtgacgaagaggaagatgacgatggatgtgacttgttcgccgatagtgaaaaagaggaggaggatattgaggacattgaggaaaatacacgtccgaagcgcagtagaccgacatcattcgctgacgaacttgcagcccgtattaagggagacgccatggggagggtcgatgaggagccaacaacactgccgtcaggtgaggcgaaaccgcgaaaaacactcaaggaaaaaaaggagcgtagaacccctagtgacgatgaggaggacaacctctttgcacctcccaaactgacagacgaggacttttcaccgtttggatccggcggtgggctgttctctgggggtaagggtctgttcgatgatgaagatgaggagtctgacctgttcactgaagccagccaagaccggcaagccggggccagcgtaaaggaagagtccagctcgtcaaagccaggcaagaagatacctgccggcgctgtgagcgtgttcctaggagatactgacgtatttggagccgcttccgttccttctttgaaagaaccccagaaacccgagcagccaacacctaggaagagcccatatggcccaccccctacaggtctgtttgacgatgatgacggcgacgacgacgacgattttttctctgccccccattccaagcccagcaaaactgggaaggtccagagcaccgcggatatcttcggagatgaggaaggtgacctgtttaaagagaaagccgtggcaagccccgaagccacagtgagccagacggacgaaaataaggcccgagccgagaaaaaagtgacattgtcctacagcaaaaacctgaagcccagcagtgagaccaagacacagaaggggcttttttcagatgaggaggacagtgaagatttgttcagttcccagagcgcgagcaaccttaaaggagctagccttttgcctggcaagttgccaacttctgtttccctgttcgacgatgaggacgaagaggataatttattcggcggaaccgctgctaagaagcaaacactcagtctccaagcccagagagaagaaaaagcaaaggcaagtgagctctcaaagaaaaaggcaagtgctctcctgttcagctctgacgaagaagaccaatggaatattccagcgtcgcagacgcatttggcgagtgactctaggagcaaaggagaaccgagggattccgggacgctgcagtcacaggaagcgaaggccgttaagaagacttccctgttcgaggaggataaggaagatgacctgttcgcaatagccaaggattctcaaaaaaaaacacagcgggtgtcattgctgttcgaagatgacgtggactctggcggtagtctgttcggctctcctccgacctcagtacctcctgcgaccaagaagaaagaaacagtaagcgaggccccccccctgctgttctctgatgaggaagaaaaagaggcccagctaggtgtgaaaagtgtggacaaaaaggtggagtctgcaaaggagtcccttaagtttggacgaaccgacgtcgctgagtcagagaaggaagggctcctgacaaggtccgcccaggaaacagtgaagcacagtgacctgttctcgtcctccagtccatgggataaggggacaaaaccaagaactaagacagtgttgagtctgttcgatgaagaggaggataaaatggaggatcagaacatcattcaggccccccagaaggaagtaggcaagggctgcgacccagacgcgcaccctaagtctaccggagtttttcaggacgaggaactcctatttagccacaaactgcagaaagacaacgaccctgacgtggacctttttgccgggaccaagaagactaaactcctggaaccaagcgttgggtctctatttggtgatgacgaggatgacgatctgttttcttctgctaaaagccagccgctcgtacaggagaaaaaaagggtggtgaagaaggaccattcagtaaatagctttaaaaatcagaaacatccggaatccattcaaggttcaaaggagaaagggatctggaagcccgagacacctcaggatagctctggcctggctcccttcaagaccaaggagccttcgacacgaattggtaagatccaggccaatctggctattaacccggctgctcttttgcctaccgctgcaagccagataagcgaggtaaaacccgtgctgcctgaactggccttcccaagttctgagcaccggcgaagccacggactcgaatcggtccccgtccttccgggttccggcgaagctggggtctctttcgatctccctgcacaggctgacacactgcacagcgcgaacaagtcaagagtgaagatgcgtggtaaaagaagaccccagactagagccgcccggcgactcgccgcgcaggagagctctgaggccgaggacatgtctgtgccgcgagggcctatcgctcagtgggccgatggggccatttcaccaaacggacaccgcccacagctcagggcagcctcaggcgaagacagcaccgaagaggcgctggcggctgctgctgctccttgggagggtggacctgtcccaggtgtggatacgtccccatttgccaaatctttgggccattctaggggcgaagccgacctctttgacagcggagacatcttctcaacggggacgggaagccagtcagttgagagaactaaaccgaaagccaagatagccgaaaatcccgctaatcctcccgtgggcgggaaggccaaaagtcctatgtttccagcccttggtgaggccagttctgatgacgacctgttccagagcgccaaaccgaagcccgcaaagaagacgaaccccttccccttactggaagacgaagacgatctttttacagaccagaaggtgaagaaaaatgagacgaagagctctagccagcaggacgtcattttgacgacacaggatattttcgaagatgacatttttgctactgaggctattaagcctagccagaaaaccagggagaaggagaagaccttggagtctaatctgttcgacgacaacattgatattttcgctgacctgactgtgaaaccgaaagagaaatcaaagaaaaaagttgaggccaagtctatctttgatgacgacatggacgatatattcagcaccggtattcaggctaaaacaacaaaaccaaagagtagaagtgcccaagccgcgccagagccgagatttgagcacaaagtgagcaatatcttcgacgacccactcaatgcgttcggcggtcagtag

SEQ ID NO: 187373 - DNA, 3738 bp, synthetic construct
  misc_feature 1..3738: note = Description of Artificial Sequence: Synthetic coding sequence
  source 1..3738: mol_type = other DNA
atgatgaaccggaccacccccgaccaggagctggtgcccgccagcgagcccgtgtgggagcgtccctggtccgttgaagaaatccgacgatctagccagagttggtccttagccgcggatgctggcctgctgcaatttctgcaggagttctcccagcagaccattagccgcactcacgaaatcaaaaagcaggtagatgggcttatccgcgagacaaaggcaactgactgtaggctgcacaatgtattcaacgactttctcatgctaagtaacacccagttcattgagaatagggtctatgatgaggaggtggaggaaccggtattaaaggcggaggccgagaaaacagagcaagagaagactcgcgagcagaaggaggtcgatctgatccctaaggtccaggaggccgtcaattatggtctgcaggtgctggactctgccttcgagcagttggacattaaggccggaaactccgactcggaggaggacgacgctaatgggagagtggaactgattctagaacccaaagatctctatatcgacagaccactgccctatctgatcgggtcaaagttgttcatggagcaggaggatgtgggcctgggtgagctcagctctgaggagggtagcgtcggcagtgatcgcgggtctatcgttgatactgaagaggagaaggaggaggaggagtctgatgaggactttgcccatcactccgacaacgagcagaatcaacacacaacccaaatgtctgatgaagaggaggacgacgacggttgcgacctcttcgctgacagtgagaaagaggaggaagacatagaggacattgaagaaaatacccgtccaaagaggtcccgaccaacgtcttttgcagacgagctcgccgctcggataaagggcgacgctatgggcagggtagacgaggaacccaccaatgaggaggacaatctttttgctccaccaaagctgacagatgaagatttcagtcccttcggttccggcggggggctcttttcaggaggaaagggtttatttgatgacgaggacgaggaatccgatctcttcactgaggcgtctcaagaccgtcaagccggcgcaagcgtaaaagaagagtcgagctcctccaaaccaggaaagaagatcccagccggtgcagtcagtgtatttttgggagacaccgacgtatttggcgccgcttccgtgccgagcttgaaagagcctcagaagcccgagcagcctaccccacgaaagtccccatacggcccaccaccaaccggactcttcgacgacgatgatggcgatgacgatgatgacttcttttccgctccccatagcaaaccgtccaagactcggaaggttcaatcaactgccgacatattcggggatgaggaaggagacctgtttaaagagaaggccgtagccagtcctgaggctaccgtctcacagacggacgaaaataaggcacgggcggagaagaaggtgaccctgtcttactcaaagaatctcaagccttcttctgagaccaaaactcagaagggcctattctctgacgaggaagacagcgaggatctgtttagttctcagagcgccagcaatctcaagggcgccagccttctgcccgggaagttaccgacgagcgtatccctcttcgatgacgaggatgaagaggataacctctttggcgggacagccgctaagaaacagacactgtccctccaagctcagcgtgaggagaaggcaaaggcatctgaactcagtaaaaagaaggctagcgcactcctgttctcttcagatgaggaggatcagtggaatatacccgcatcccaaactcatctggcctcagattccaggtcaaagggcgagcctcgggacagcggtacattgcagtcacaggaggcgaaggcggtgaaaaaaacctcacttttcgaggaggacaaagaggatgacctttttgctatagccaaagactctcaaaaaaagactcaacgggtctcactgcttttcgaagacgatgttgactcgggtggctcattgttcggtagtccaccaacctcagtccctcctgccactaaggaaggccttcttacccgcagtgcccaggagaccgttaaacactctgaccttttcagctctagcagtccttgggataaaggcaccaagcctagaacgaaaacagtcctctcactcttcgatgaggaggaggacaagatggaggaccagaacattattcaggcaccgcagaaagaggtcgggaagggttgcgacccggatgcacatccaaagagcacaggggtgtttcaagacgaggaactgctgttctcacacaaactgcagaaggacaacgaccctgacgtcgacctgttcgccggcactaagaaaacgaaacttctggagccatcagtagggtctctttttggtgacgacgaagacgatgacctgttcagctctgccaaaagtcaacccctggtgcaggaaaaaaaacgagtcgtgaaaaaagatcacagcgtcaactcttttaagaatcagaaacatccagaatcaattcaaggttccaaagagaagggtatatggaagcctgagacaccccaggccaatttggctatcaatcccgcggctcttctaccaaccgccgccagccagatctccgaggtgaagcccgtactcccagaattagcctttccaagctccgagcaccgccgctcacacggcctggagtctgtgccagtcctgcccgggtctggagaggccggagtctctttcgatcttcccgcccaggctgacactctgcattcggcaaataagagcagagtgaaaatgagaggaaaaaggaggccccagacccgggctgcccggaggttggctgctcaagagtcctctgaggctgaagacatgtcggttccacgaggaccgattgcccagtgggcagacggcgccatcagcccgaacgggcatcggccccagctgagagccgcaagcggcgaagattccacggaggaagcccttgccgcagcagccgccccttgggagggcgggcccgtacctggcgtcgatacctccccctttgcaaagtccctgggtcactccagaggcgaagcagatctgttcgattctggtgacattttttccaccggaaccggcagtcaatccgtcgagaggaccaagccgaaagcaaaaattgcagaaaatcctgcaaatccgcctgtaggaggcaaggctaagtccccaatgttcccagccttaggagaggcctcttctgatgacgatctgttccaatccgccaaacccaagcctgccaagaagacaaacccttttccactgttggaagacgaggacgatttattcacagaccagaaggttaaaaaaaatgaaactaaaagctcaagccagcaggacgttatactcaccacacaggatattttcgaagacgacattttcgcaaccgaagccatcaagcctagccaaaaaacacgagagaaggagaaaaccctcgagtcaaatttgtttgatgacaatatagacatcttcgctgacttaacggtgaagcctaaagaaaagtccaaaaaaaaggtggaagctaaatctatttttgacgatgacatggacgacatttttagtacggggatccaggctaagacaaccaaacccaagtcccgatccgcccaggcagcccccgagcccaggtttgaacacaaggtgtccaacattttcgatgatccccttaatgcgtttggagggcagtag

SEQ ID NO: 187374 - DNA, 3840 bp, synthetic construct
  misc_feature 1..3840: note = Description of Artificial Sequence: Synthetic coding sequence
  source 1..3840: mol_type = other DNA
atgatgaaccggaccacccccgaccaggagctggtgcccgccagcgagccggtttgggaacgtccctggtccgtagaagaaatcaggcgtagcagccagtcttggtcactggcggccgatgcagggctcttacaattcctgcaggaattttctcagcagaccatctcgagaacccacgagataaagaagcaggtcgacggattgatccgagagaccaaagcaactgattgcagactacacaatgtgtttaacgacttcctgatgctgagtaacacacagttcattgagaatagagtgtacgacgaagaggttgaagaaccggtactgaaagctgaagcagaaaagaccgagcaggaaaagacaagggagcagaaggaagtggacctgattccaaaagttcaggaggccgttaattacggtcttcaagtactggattctgcttttgaacagctggacattaaggccggcaattctgatagcgaggaggatgacgcaaatggcagggtcgagctgattctagaaccaaaagacctctatattgacagaccactgccttacctcatcgggagcaaactctttatggagcaggaagatgttggcctcggagaactgtctagtgaggagggatctgtgggatcagatcgtggatccattgtggacacagaagaggagaaggaggaagaagagtcagacgaagactttgctcaccattcagacaacgaacagaaccagcatacaacccagatgtcggacgaggaggaggatgatgacgggtgtgatctctttgcagattccgagaaagaagaagaagatatcgaggacatcgaggaaaataccagacctaaaaggtctagacctacctctttcgccgacgagctcgccgcaagaataaaaggcgatgcaatgggaagagtcgacgaggaaccgacaaccctgcctagtggcgaagcaaagccaaggaaaactctgaaagaaaagaaggaaagaagaacccctagcgacgatgaggaagataatctgtttgctccccccaaattgactgatgaagacttctctccctttggcagcggaggaggcctctttagtggaggcaagggactgttcgacgacgaagacgaagagtctgacctgtttacagaggcaagccaagacagacaagctggggcatctgtcaaagaggagtccagctcgtctaaacccggcaagaagatccctgccggggcggtgagcgttttcctcggcgatacagacgtttttggcgctgcctcagttccatctctgaaagaaccacagaaacccgagcaacctacgccccgtaagtccccgtacggcccccctccaaccggactgtttgacgacgacgatggcgacgatgacgatgatttcttcagcgccccacacagtaagcctagtaagacaaggaaggtacagagcacggccgatatttttggggacgaggagggagatctttttaaggaaaaggcggtcgcatcccctgaggcgactgtgtctcagaccgacgaaaacaaggcgcgggcagaaaagaaggtgaccctgtcttattcaaagaacctcaagccttccagcgagacgaaaacccaaaaaggccttttctccgatgaagaagacagcgaggatcttttctcttcccagtccgcatcaaatctaaaaggtgcctccctcctccctggcaagttgcccacatcggtcagcctgttcgacgacgaggacgaagaagataatcttttcggaggtacggccgccaagaagcagactctgtcattacaagcacaacgcgaagagaaggccaaagctagcgaacttagcaaaaaaaaggcctccgcactgctgttttcgagcgacgaagaggaccagtggaacatccctgcgtcacagacccatttggcatctgactccagaagtaaaggtgagccgcgcgatagcggtaccctccaaagccaggaagccaaagctgttaaaaagaccagccttttcgaggaggataaggaggacgatctgtttgccatcgctaaggactctcaaaagaagactcaaagagtatcactcctgtttgaggatgacgtggactctggaggatccctgtttgggagtccgccaacatccgtgccacctgcaacaaaaaaaaaggagaccgtgtctgaagctcccccccttttattttccgacgaagaagaaaaggaagctcaactcggagttaagagtgtcgataagaaggtggaatccgccaaggagtctctgaagtttggcagaaccgacgtggctgagagcgaaaaggagggcctgctgacacggtctgcccaggagacagttaagcacagtgacctgttcagcagctcctcgccatgggacaagggtacaaagcctagaacaaagacagtcctgagcctcttcgacgaggaagaggacaaaatggaggaccaaaacattattcaggcaccacagaaagaggtggggaaagggtgcgaccccgatgctcacccgaaatccaccggcgttttccaggacgaggaattactgttctctcacaagttacaaaaggacaacgatcccgacgtggatctctttgccggcacgaaaaaaacaaaactgttggagccaagtgtcggctctttgtttggagatgatgaagacgacgatctgttctcctctgctaaaagccagcctttagccaatctggctattaaccctgccgcgttgcttccgaccgccgcctcacagatctcagaggtaaaacctgtcctacctgagctggcgttcccgagttcagaacatcgccggtctcacggcctcgagtctgtgcccgtattgcctggaagtggggaggccggggtctccttcgatctgcccgcacaagccgatacgttgcactctgccaataagagtcgcgtcaaaatgaggggtaagagacgcccccagacccgagccgctcgtaggttagcagcccaggagtcctcggaggctgaggacatgtccgtcccgaggggccctatcgcccaatgggccgacggcgctatcagcccaaacggtcatcgcccgcagctccgggcagcttctggggaggatagtacagaagaggctctggccgctgccgctgccccatgggaggggggacctgtgcccggcgtagacaccagccccttcgctaagagcctgggacatagccgcggcgaggccgacctattcgactccggcgatatcttcagcacgggcaccggctcacagtcggtcgagagaacaaagcccaaggcgaagatcgcagagaatcccgctaacccaccagttggtgggaaggccaagtctcctatgttcccagcattgggtgaggcgagctccgatgacgatctgttccagtcagccaagccaaagcccgccaaaaagaccaatccttttcccctgctggaagacgaggatgacctcttcaccgaccaaaaggtgaagaagaacgaaacaaaaagcagcagtcagcaggacgtcattcttacaacacaagatatcttcgaagacgatatattcgcaacggaggccatcaagcctagtcagaagactagagagaaggaaaagaccctggagtccaatctgtttgacgacaatatcgatatttttgcagatctaacggttaaaccgaaggagaaatccaagaagaaggtcgaagccaagagtatcttcgacgacgacatggacgacattttttctacgggcatccaagcaaaaacgacaaaacccaagtcaaggtctgcacaggcagctcccgaacctcggttcgagcacaaggtcagcaatatctttgatgaccccctgaacgccttcggcggtcagtag

SEQ ID NO: 187375 - DNA, 1329 bp, synthetic construct
  misc_feature 1..1329: note = Description of Artificial Sequence: Synthetic coding sequence
  source 1..1329: mol_type = other DNA
atggccgagggcgagggctacttcgccatgagcgaggacgagctggcctgctccccctatattccactcggtggtgactttggcggaggagacttcggcgggggtgatttcggtggaggggacttcggcggtggagggtcattcggaggtcactgcctggattattgtgagtcaccgacggcccactgtaacgtgcttaattgggaacaggtgcagcgactggatgggatcctgtcagagactatcccgattcatggtagaggtaattttccgacactagaactgcagccctctttaattgtgaaggtagtgcggcgaaggctcgccgagaagcgtataggtgtgcgggatgtgagactgaatggctccgcagcgagtcatgtcctgcaccaggattcagggcttgggtacaaggacctggacctgattttttgtgctgatctgcgtggcgaaggtgagttccagaccgtgaaggacgtggtgcttgactgtctcctggacttcttaccggagggagtgaataaggaaaagatcacaccgttaacactgaaagaggcctatgtccagaagatggtgaaagtgtgcaacgactcagatcgttggagtctgatctcccttagcaataattctggcaaaaacgtagagctgaaatttgtagactctctcagaagacagttcgagttctccgtcgattcctttcaaatcaagctcgattcattgctactcttttacgaatgctcagaaaatccgatgacggagacctttcaccccaccatcatcggggaatcagtgtacggtgatttccaagaagccttcgaccatctctgcaacaaaatcatcgctaccaggaaccccgaagagatcaggggcggggggctgctcaagtactgcaatctgctggtgagaggatttcgccccgcctccgatgaaattaaaaccctgcaacgctatatgtgcagccgctttttcatcgacttctctgatattggcgaacaacagaggaaacttgagagctaccttcagaatcattttgtgggattagaggaccgtaagtacgagtacctgatgacactccacggggttgtgaacgagtcaacggtctgtcttatgggacacgaaaggcgccagactctcaacctgataacaatgctggctattagagtcctggctgatcaaaatgtgattcctaacgtagccaacgtgacctgttattaccagcctgccccatacgtcgcagacgctaacttctcaaactattacatcgcccaggtgcagcccgtgttcacatgtcagcagcaaacgtacagcacatggctgccatgtaactag

SEQ ID NO: 187376 - DNA, 1176 bp, synthetic construct
  misc_feature 1..1176: note = Description of Artificial Sequence: Synthetic coding sequence
  source 1..1176: mol_type = other DNA
atggccgaggagagcagctgcacccgggactgcatgagcttcagcgtgctgaactgggaccaggtgtcaagattgcacgaggtgctgaccgaagtggtccccatccatggccggggcaattttccgacacttgagatcacactgaaggatattgtccagacagtgagaagcagattggaagaggccggaattaaagttcatgatgtccggctcaatggctccgcagcaggccacgtactcgtcaaagataacggtctgggctgtaaagatctggacctcatcttccatgtcgcccttcccaccgaagcggaattccagttggtgagggacgtcgtgctgtgtagtctcctgaattttctgcccgaaggcgtgaataaactcaagatctctcctgtgaccttgaaggaggcctatgtgcagaagctggtgaaggtctgcactgatacagaccgctggtctctcatctccctctccaataaaaacgggaaaaatgtcgagctaaaattcgtagatagcatccgtcgtcagtttgaattcagcgtggatagttttcaaatcatcctggacagcctgctattcttctatgattgttccaacaacccgatttccgagcattttcatccaaccgtcatcggagagtcaatgtatggcgatttcgaggaggcattcgaccacctgcagaaccgcttgattgccacaaagaacccagaggagattcgcgggggtggactcctgaagtacagtaatcttcttgtccgcgactttagacccaccgaccaagaagagatcaagacactcgaacgctatatgtgttctagattttttatcgacttccccgatatacttgagcaacagaggaagctcgagacgtacctccagaatcattttgccgaggaggagcgctctaagtatgattacctgatgatcctccgccgggtggtgaatgaatccaccgtgtgcttgatgggccatgagcgaagacagactcttaacttgatctccttactggcgctcagagtcctcgctgaacaaaacataattccctccgccaccaatgtaacttgttattaccagccggctccctatgtgagcgatggaaatttttctaattactacgtggcccacccgcccgtgacgtattcacaaccgtaccccacctggctgccatgcaactag

SEQ ID NO: 187377 - DNA, 2340 bp, synthetic construct
  misc_feature 1..2340: note = Description of Artificial Sequence: Synthetic coding sequence
  source 1..2340: mol_type = other DNA
atgcagcaggccctggagctggccctggaccgggccgagtacgtgattgagtctgcccggcagaggcctcccaaacgcaaatatctgtcatctgggaggaagtccgtttttcagaaattgtacgatctttatatagaggagtgtgaaaaggaaccggaggtgaagaagttaaggcgaaacgtcaatctcctggaaaaactggtaatgcaggagacattgtcttgtctcgtagtgaatctgtaccctggcaacgagggctattccctgatgttgcgtggcaagaatggaagtgattccgaaaccattaggctgccctacgaagaaggcgaattactagagtacctcgacgctgaagaacttcctcctatccttgtggacctcctcgagaaaagccaggtcaacatcttccattgtggttgtgttatcgccgaaattagagactacaggcagtccagcaatatgaagtctcccggctaccaatcccgtcacattctcctccggccaacaatgcagacactgatctgcgacgtgcacagtatcacctcagataatcataagtggacgcaggaggataagctccttttggaaagccagctgattttggccaccgcagaaccgttgtgcctggatccctctatagctgtgacctgtacagcaaataggctcttatacaacaagcagaagatgaacacacgccccatgaaacgctgtttcaaacggtacagcagaagttcactgaacaggcagcaggacctgtctcactgcccccccccgcctcaactccgtctcctggattttctacagaagcgtaaggaacggaaggctggacagcactatgatctcaagatctcaaaggctggtaattgtgtggacatgtggaaaagatcaccttgcaacttagccatcccctccgaggtcgacgtcgaaaagtacgcaaaggtggaaaaatcaatcaagtccgacgacagccagccaacagtctggccagcacatgatgtgaaagatgattacgtgtttgagtgcgaggccggcacacagtaccagaagaccaaactcacaatactgcagagcctgggagatcctctctattacgggaaaattcaaccttgtaaagccgatgaggaaagtgattctcagatgtcgccctcacattcaagcaccgatgatcattcaaactggtttataataggcagtaagacagacgctgaacgtgtggtgaaccagtatcaggagctggtgcagaatgaggccaagtgtcctgtgaaaatgtctcactcctcatccggaagtgcttctctgtcccaggtctcacccggtaaagaaactgaccagactgagactgtgtccgtgcagtcatccgttctcggcaagggcgttaaacatagaccacctcccataaagctaccatcatcttccggaaattccagcagcggcaattatttcactccacagcagaccagctccttcttgaaaagccctacacccccgccttctagtaagccttcctctatcccaagaaagtcctctgtcgatctgaaccaagtttccatgctcagtccagcggcccttagccccgctagcagttcacaaagaactaccgccacgcaggtgatggccaacagtgctggactgaatttcatcaacgttgttggcagtgtctgcggagcgcaggcccttatgagcggctccaatcctatgctgggctgtaacactggggcaatcacgcccgctggtattaacctgtccggcctactgccgtcgggcggactcctgcctaacgcgcttccttcggcaatgcaagcagcttcccaggctggcgtaccattcggcttaaagaatacctcctccctacgccctctgaacctgcttcaactcccgggaggcagccttattttcaacaccctccagcagcaacagcagcagcttagccagtttacaccacagcaacctcaacagccgactacctgctcccctcagcagcctggtgagcagggttcagaacaaggatcgactagccaggagcaggcgctttcggctcaacaggccgctgtaattaatctgacaggtgtcggaagtttcatgcagagccaagccgcagtactctcccagctcggcagcgctgagaacaggcccgagcagtcattgccgcagcagcggttccaattgagctccgcattccaacagcagcaacagcagatccagcagttacggtttctccagcatcaaatggccatggcagccgccgcggcccaaacagcacagttgcatcaccatcgacacaccggctctcagagcaaaagtaagatgaagagagggacaccaacaacacctaaattctag

SEQ ID NO: 187378 - DNA, 2202 bp, synthetic construct
  misc_feature 1..2202: note = Description of Artificial Sequence: Synthetic coding sequence
  source 1..2202: mol_type = other DNA
atgcagcaggccctggagctggccctggaccgggccgagtacgtgatcgaatcagctcgccagcgtcccccaaaaagaaaatatttatcgtcaggccgcaagagtgtgttccaaaaactgtacgacctgtacattgaagaatgcgaaaaggaacccgaggttaagcaaaaactccgcaggaatgtaaatcttttagagaagcttgtaatgcaagagacactcagctgtttggttgttaacttgtacccaggaaatgagggttattctcttatgttgcgaggaaagaacggctctgatagtgagacgatccgactcccatatgaagagggggagttactggagtacttggatgctgaagaattgccgcctatactggttgacctactggagaagtcccaggtgaatatatttcactgtgggtgcgtaattgctgaaatccgcgactaccggcagtcctcaaacatgaagagccctggctaccagtctaggcacatcctgctacgtcccaccatgcagaccctgatatgcgacgtgcacagcattacgagtgacaaccataaatggacacaggaggataaactgctcttggaatctcagctgattcttgcaacggccgaacctttatgccttgacccttccatcgcggttacctgtactgctaataggctgctctacaacaaacaaaagatgaacacccggccaatgaaaagatgttttaagcgctactctcgaagttctcttaataggcagcaagatctcagtcattgtcctccccccccccagctacgcttactagatttcctccagaagagaaaagagcggaaagcaggccagcattacgacctcaagatatctaaggccggcaactgcgtcgacatgtggaaacgctccccctgtaaccttgcaatcccctccgaggtggacgtggagaaatatgccaaagtggagaagtctataaaatctgacgattcccagcctaccgtgtggcctgcgcatgacgtgaaggatgattacgtgttcgagtgcgaggccggtacccagtatcagaaaacaaaactcaccatcctgcaatccctgggcgatcccctctattacggcaaaatccaaccctgtaaggctgatgaagagagcgactctcagatgtcaccatctcatagcagtactgacgaccacagcaactggttcataataggttccaaaactgacgcagaacgcgtggtgaaccagtatcaggagcttgtccaaaacgaggccaaatgccccgtgaaaatgagccacagtagcagcggctcagcttctctgtcccaggtcagtccaggcaaggaaactgaccagaccgagaccgtctccgtgcagagcagtgtactgggtaaaggagtcaaacaccgtccgcccccaatcaagctgccaagctcttcaggaaactctagcagcggcaattacttcactcctcagcagacatcatctttcctgaagagccccactccgccacctagttccaagccatcttcaattccacgcaagagctctgtcgatctgaatcaggtttctatgctgagtcctgctgcattgtccccggcatcctcatctcagaggacaaccgctacccaagtgatggctaattccgccggcctcaatttcatcaatgtagtgggatcggtgtgcggcgcccaggccctaatgtccggaagcaatcctatgctcggatgcaataccggcgcaattaccccagcagggatcaatctgagcgggctcctgccttcaggaggcctcttaccaaacgctctcccctcagctatgcaagctgctagtcaggcaggcgtgccatttggactgaagaacacttccagccttcggcccttgaacctcttgcagctgcctggaggcagtcttatcttcaacacactccagcagcagcagcagcagcttagccagttcacaccacaacagccgcagcagccgaccacctgtagtccacagcaaccgggggagcagggtagtgagcagggaagcacgtctcaggaacaggcactgtcagctcaacaggccgcagttatcaacttgaccggagtcgggtcctttatgcagtcgcaggctgccgccgttgccatcttagcggcgagcaatgggtatgggagcagctcttctactaattcctccgcaacctcatctagcgcttatagacaacccgtgaaaaagtag

SEQ ID NO: 187379 - DNA, 2202 bp, synthetic construct
  misc_feature 1..2202: note = Description of Artificial Sequence: Synthetic coding sequence
  source 1..2202: mol_type = other DNA
atgcagcaggccctggagctggccctggaccgggccgagtacgtgatcgagtcagcccgacagcggccacccaagcgcaagtacctcagctctggcagaaagtctgtctttcaaaagctgtatgacctgtatatcgaagaatgcgagaaggagcctgaagtgaagcaaaaacttcgtagaaacgtgaatctgctggaaaagctggtgatgcaggagacgctgtcttgcttggtggtgaatctttaccccgggaacgaaggctattccctgatgctgaggggaaagaacggcagcgatagcgagacgattcgcctcccgtatgaggagggagaactgctcgagtacctcgatgctgaagagctccctccgatcctagtggatctgctcgagaaatcacaggtgaatatttttcattgtggttgcgtaattgccgagattcgagactacagacagagctcgaacatgaaaagtccaggctaccagagccggcatatcctgctccgccctaccatgcaaactctcatttgcgatgtccactccattacatctgataaccacaagtggacacaggaggacaagctcttgctggaatctcagctgatcttggctacggctgagccgctgtgcttggacccctcaatcgctgtgacatgcactgcaaacaggttgctgtacaataaacagaaaatgaatacgcggcctatgaagaggtgtttcaaacggtacagccggagctctctcaataggcagcaggatctgtctcactgccctccacctcctcagctgagactgttggactttttgcagaaacggaaggagcgtaaagcgggacagcactatgatctcaagataagtaaggccggtaattgcgtcgacatgtggaagaggagcccctgtaatttggccatccccagtgaggttgacgtggaaaagtacgctaaagtggagaaatccattaagtctgacgactcgcagccaactgtttggcctgcccatgatgtgaaggacgattatgtctttgagtgtgaggcggggacgcagtaccagaagaccaaactgacaattcttcagtctcttggggatcccctgtactacggaaaaatacagccttgcaaggctgacgaagaatctgacagtcagatgagtccgagccactccagcactgatgaccatagcaattggtttatcataggatcaaaaaccgacgccgagcgggtggttaatcagtatcaagagctggttcagaatgaggccaaatgcccagtaaaaatgtcccactcctcttctggaagcgcctcattatctcaggtgtctccaggtaaagagaccgaccagacagagacagtcagtgtccaatcttctgttttgggaaagggagtcaaacacagaccccccccaattaaattgccgagcagctccggaaatagttcctccggcaactacttcacacctcagcaaacttcgagctttctgaagtctccaacaccccccccttccagcaaacccagctccattccacgcaaaagttccgtggacctgaaccaagtttctatgcttagtcctgctgccctatcaccagcaagctcaagccagcgcaccactgcaacccaggtcatggccaacagtgctgggttgaactttataaacgtggtgggatcggtgtgtggggcccaggctctcatgagcgggagtaatccaatgctgggctgtaataccggcgcgattacacccgcagggattaatctgtctggtctcctgcccagcggtggcctgctccctaacgcccttcccagcgcaatgcaggcagcctcacaggccggagtaccatttggcttgaagaatacttcttcattgcgccctttgaatctactccaattgccagggggatctctgatctttaatactctacaacaacaacagcaacaactgtcgcagtttacgccccaacaacctcagcagccaacaacatgctccccccagcaacccggtgaacagggcagcgagcagggatcgacaagccaggaacaagccctgtcagcacagcaggccgctgtgattaacttaacaggcgtgggtagctttatgcagtcccaggccgcagcggtggcaatcctggcagcttccaatggatacgggtcctccagctccaccaattccagtgcaacctcttcgtctgcatacaggcagcctgtcaaaaaatag

SEQ ID NO: 187380 - DNA, 2202 bp, synthetic construct
  misc_feature 1..2202: note = Description of Artificial Sequence: Synthetic coding sequence
  source 1..2202: mol_type = other DNA
atgcagcaggccctggagctggccctggaccgggccgagtacgtgattgagtctgctagacagcggcccccaaagagaaagtacctaagctccggaaggaaatcagtcttccaaaaactgtacgacctttacatagaggaatgcgagaaagaaccggaagtcaagcagaagcttaggcgcaatgtgaatctcctcgaaaaactggtgatgcaggaaacactgtcctgcctcgttgtgaatctgtaccccggcaatgaggggtattcactgatgctgcgcggcaagaacggcagcgattctgagaccatacgacttccctatgaggagggagagctgctagaatacctagacgcagaagaactgcctccaatcttagttgaccttctggaaaaaagccaggtgaacatcttccattgtggctgcgttatcgctgagatcagagactataggcagagcagcaacatgaaaagcccaggctatcagtctagacacatactgctgcgccctaccatgcagacactgatttgtgacgtgcacagtataacctcagataatcataaatggacacaggaggataagttactgctcgagagccagctcattcttgcgacggccgagccactatgcctagacccgagcattgccgtgacatgcaccgctaaccggctgttatataacaaacagaagatgaatacaaggccaatgaagcgttgctttaagcggtactcacgctctagcctgaatcgccagcaggacctcagccactgcccacctccccctcagctgcggctgttggactttttgcagaagcggaaagaaagaaaagctggccagcactatgatctcaagatttccaaagctggaaattgtgtcgatatgtggaaacgttctccctgcaacctggccatcccaagtgaggttgatgtggagaagtatgcaaaggtagagaagtccatcaaatctgacgactctcaacctactgtgtggcccgcccacgacgtcaaagacgactacgtgttcgaatgtgaggccgggactcagtaccagaaaacaaaactgacaattcttcagagtctcggggatcccttatattatggaaagattcagccctgtaaggccgacgaggagtctgatagccagatgtctccttcgcattcttctactgacgaccattcgaattggttcataattggctcaaaaacggacgcagaaagagtggtaaaccagtatcaagagctggttcagaatgaggccaagtgtcccgtgaaaatgtcacattcttcttccggcagcgcttccctctcacaagtgtcgcctggtaaggaaactgatcagactgagactgtgagcgtgcaatccagcgttttaggcaagggcgtgaagcaccggcctcctcctataaaactgcctagctcgtccggtaattcctctagcggcaattacttcactcctcaacagacatcctctttcttgaaatcccccaccccgcccccctcaagcaagcccagtagcatccccaggaagagctcagtggacttgaatcaagtgagcatgttgagccctgccgctctgtcacctgctagcagcagccaaagaacaactgcaacccaggtgatggctaattccgctggactgaatttcataaacgtggtgggatctgtatgcggagctcaggcattgatgagcgggagcaatcccatgttagggtgtaatacaggagctatcaccccagcggggattaacttatccggccttctgcctagcgggggcctgctgccaaacgccctcccttcagcgatgcaagctgcaagtcaagctggagtccctttcggcctgaagaatacatcttctctgcggcccttgaatctgttgcagctcccaggcgggagtcttatttttaatacccttcagcagcaacagcaacagctgtcccaatttacacctcaacaacctcagcaacccaccacgtgcagcccacagcagccgggagagcagggatcagagcaaggctccacatcacaggaacaggccttaagcgcccagcaagcagcggtgataaacctgactggcgtgggctcgttcatgcaatcccaggccgcagccgttgctattttagctgcgagtaacggctatggaagcagttcctccacaaactcaagtgcgacctctagtagcgcatatagacaacccgtcaagaaatag

SEQ ID NO: 187381 - DNA, 2217 bp, synthetic construct
  misc_feature 1..2217: note = Description of Artificial Sequence: Synthetic coding sequence
  source 1..2217: mol_type = other DNA
atgcagcaggccctggagctggccctggaccgggccgagtacgtgattgaaagtgctcgccagagaccacctaagcggaagtacctctcatcaggcaggaaaagcgtctttcaaaaactatacgacctgtacatagaagagtgcgaaaaggagcctgaagttaaaaaattaaggcgcaacgtgaacttgctggaaaaactggtgatgcaggaaacactatcatgtttggtggtcaacctgtatccagggaacgaaggctatagcttgatgcttaggggtaaaaacggttctgatagtgaaaccattcgcctcccttacgaggaaggcgagctactggagtacttggatgccgaggaattgcccccaattctggtcgacctcctcgagaaatcccaggtcaacatttttcactgcgggtgtgtgattgccgagatcagggattatagacagagcagcaatatgaagagccctggttaccaatcacggcatattctgttaaggccaaccatgcaaacccttatatgtgatgtacactcaatcacctctgataaccacaagtggacgcaggaagacaagctgctcttggaaagccagcttatccttgccacagcagagccactgtgtctggatccttccatcgctgttacctgtacagctaacaggctgctatataacaaacagaaaatgaataccaggccgatgaaaaggtgcttcaaaagatattctcgcagttccttgaaccgccagcaagatctgagtcactgcccaccgcccccccagctgaggttgctggactttttgcagaaaaggaaggagaggaaggcaggacagcactatgacctgaagatcagtaaggcgggcaattgcgtggacatgtggaaacgaagtccctgcaatctggcgatcccatcagaggtcgacgttgaaaaatacgctaaagtggaaaaaagcatcaagtccgacgacagtcaacctaccgtctggccggcccacgatgtaaaagacgattacgtcttcgagtgcgaggccggcacacaatatcaaaaaaccaaactgaccatactgcagtcactgggagaccccctctactatgggaagatccagccatgcaaggctgacgaggagtctgattctcagatgtctccctcccacagctccacagacgatcattccaattggttcattatcgggagtaaaaccgacgcggagagagtggtcaaccagtatcaggaactggtgcaaaacgaagcaaagtgtccagtgaagatgtcacacagctcgtctggatctgcttctctctctcaagtgagcccggggaaggaaacggaccagaccgaaacagtgtccgtccagtcatctgtacttggtaaaggcgtcaaacatcggcctccgccaatcaagctcccgtccagtagtgggaatagttctagcgggaattattttacacctcaacagacctctagcttcctgaaatctccgacgcctccccctagctctaaacctagctccatcccgcgtaaaagctcggttgatctgaatcaggtttcaatgttgagccccgcagcactgagccccgcatcatcgtcgcagaggaccaccgctacgcaagtaatggctaatagcgccggtctgaactttataaacgtagttggaagcgtctgtggcgcgcaggcgctaatgagcggttccaatcccatgcttggatgcaataccggtgccatcacacccgccggcattaacctctctggtctgctcccctccggcgggttactacctaacgccttgccgagcgccatgcaggctgcctcacaggccggggtccccttcggactaaagaatacttcttccctgaggcctctcaatctattacagctgccgggcgggagccttatattcaataccctgcagcagcaacagcaacagctgtctcagtttaccccccagcagccgcagcagcctaccacctgctctccccaacagccgggagagcagggcagcgaacaggggagcacgtcgcaggagcaggctctttccgcccagcaggccgccgtaattaatctgacaggagtggggtcgtttatgcaaagccaggccgctgccgtcgctatcctcgctgcctctaatggttacggatcatcatcctctacaaactcttctgcaacctccagctctgcgtacagacagccagacacgcgagctctgaatcagaagaactag

SEQ ID NO: 187382 - DNA, 1497 bp, synthetic construct
  misc_feature 1..1497: note = Description of Artificial Sequence: Synthetic coding sequence
  source 1..1497: mol_type = other DNA
atgtacgtgatcgagagcgcccggcagcggccccccaagcggaagtatctcagcagtggtcgcaaaagtgtgtttcagaaactatatgacctgtatatagaggagtgtgagaaggaacccgaggtgaagaagctgcggaggaacgtgaacctcctcgaaaagttagtgatgcaagagaccctgtcgtgtctagtggtgaatctctaccccggaaatgaggggtatagccttatgctgagaggcaaaaatggctctgacagtgaaaccatccgactgccatacgaagaaggagagctcctcgagtacttggatgccgaagagcttccacctatactggtcgacttattggagaaatctcaggtgaatatcttccattgcggctgcgtgatcgccgaaatccgcgattacaggcagtcctctaacatgaaatctcccggatatcagagccggcatatattactgagacctactatgcaaactctgatctgcgatgttcatagtattacatcggataaccataagtggacccaagaagataaattgctcctagaatcccaattaattcttgccacagccgagccgctatgtctggatccaagcatagcagttacgtgcacagcaaatagattattatataacaagcaaaaaatgaatactcgcccgatgaagcgctgctttaaaagatacagccgtagctccctgaatcgacagcaggatctgtcccactgtccacctccgcctcagcttcgcctcctggactttctgcagaaacgaaaggaacgaaaagccgggcagcactacgatctgaagatatctaaagctgggaattgtgtggacatgtggaagagatccccatgtaatctcgccattccaagcgaggttgatgacgtcaaggacgattatgtatttgaatgcgaagcaggaactcagtaccaaaagactaaactgaccattctgcagagtttaggggaccctttgtactatggaaaaatccagccttgtaaggctgacgaagagtccgactcgcaaatgtccccatcacacagcagtaccgacgaccattctaactggttcatcattggttcaaagaccgatgctgagagagtcgtcaaccaatatcaggagctagtccagaacgaggccaagtgccctgtgaaaatgagccatagctcatccggatctgcaagtttgtcacaagtaagccccggcaaggaaaccgaccagaccgaaacagtgagtgttcaaagctccgtgttgggtaagggagtgaagcaccggccccccccaattaaattgccatcctccagcggcaacagctcctcaggaaactactttactccacagcaaacctctagcttcctaaagtccccaaccccaccgccatcaagcaagccttcctccatccctcggaagtcttctgtggacctgaatcaggtctcaatgctgtcccctgctgctctgtcacccgcttcatcttctcagcggcacgagagctag

SEQ ID NO: 187383 - DNA, 678 bp, synthetic construct
  misc_feature 1..678: note = Description of Artificial Sequence: Synthetic coding sequence
  source 1..678: mol_type = other DNA
atgctgctgaccctggccggcggcgccctgttcttccccggcctgtttgccctgtgcacctgggccctacgcagaagtcagccagggtggtcgaggaccgattgcgtgatgatctcaacaaggttagtctcctcggtgcacgccgtgctcgctacaggatcaggcatcgttatcattaggtcttgcgatgacgttatcacgggacgacattggttggcccgagagtatgtgtggttcctgataccctacatgatttatgattcttacgccatgtatctctgcgagtggtgtcggactagagaccagaaccgcgccccctcactgactctacgcaactttctttctcgtaataggttgatgatcacacaccatgcagtgatcctgtttgtgcttgttcccgttgcccagcttaaacaacaacataccctcttatacaaagtcaacggcatccttacacttgctactttcttgtcatgtagaatactccttttcccttttatgtattggagctacgggcgccagcagggtctgagcctgttgcaagtgccattcagtatacctttttattgcaatgtggctaatgcttttcttgtcgccccacagatttattggttttgtctgctctgcaggaaagccgtgagactcttcgacaccccccaggctaagaaagacggttag

SEQ ID NO: 187384 - DNA, 774 bp, synthetic construct
  misc_feature 1..774: note = Description of Artificial Sequence: Synthetic coding sequence
  source 1..774: mol_type = other DNA
atgctgctgaccctggccggcggcgccctgttcttccccggcctgttcgcgctatgtacctgggccctacgtaggtcgcaaccagggtggtcaaggacagactgcgtgatgatttctactagacttgtgtccagcgttcacgccgtgctggcaacggggtccgggatagtcattattagaagttgcgacgatgtgattactggaaggcattggctcgccagagagtatgtctggtttttgattccttacatgatctacgactcatacgctatgtacttatgtgagtggtgtagaacccgagaccaaaaccgggcaccgtccctgaccttaaggaatttcttatcacgtaatagattgatgatcacacatcacgccgttattttgttcgtcttggtgccagtcgctcagcgactgagaggcgacctcggagacttcttcgttgggtgcatcttcacagctgaacttagcacccctttcgtcagcctggggcgagtactcatccagctcaagcaacaacacacactcctgtataaggtaaacggcatcctcactttagcgaccttccttagctgccgcatcctgttgttccccttcatgtactggagctatggtaggcagcagggcctgtctctgctgcaggtgccatttagcattccattctattgtaatgttgccaatgccttcctcgtggccccacagatatattggttctgtctgttgtgtcgcaaggctgtcaggctattcgatacgccacaggccaaaaaagatggctag

SEQ ID NO: 187385 - DNA, 993 bp, synthetic construct
  misc_feature 1..993: note = Description of Artificial Sequence: Synthetic coding sequence
  source 1..993: mol_type = other DNA
atgatcagcacccggtaccggcggcggcgggacgccccccggggccccggaaggtgccctccccatcctacacgcccccggggccctggacggaagcgcggagccgccggaagccccggagccgcgccttctgcctcccggcgcccagagttccccaagcccctacgcgttttgccttggcgagagcgggggcgtggcggtagggagtggccaatgagcctccggtctcccttgcccacatctgcctgtggttggggcgagtctggaaggcgccccgggagggcaccatgcggacccagaaccgggctgtctgctcgagcagtcctgtccgcaagggcccggctggtctcctctgtacacgccgtactggctaccggttctggcatcgtgattatccgatcttgcgatgatgtcattaccggacggcactggctggctagagaatacgtgtggtttctgattccctacatgatctacgactcttacgctatgtacctctgtgaatggtgtaggacccgggatcagaacagggccccttctttaaccctccgtaatttcctgtctcgtaaccgattaatgattacccaccatgctgtcattctctttgttctggtgccggtggcacagagattacggggggatctgggggattttttcgtgggttgcatctttacagctgagctgtccactccatttgtctcactgggacgagtcttgatccaattaaagcagcaacatacgctgctgtataaggtgaatggaatcctgaccctggccaccttcttgtcttgtcgaatactgttgttccccttcatgtactggtcctacggccggcagcaaggtctgtcactacttcaggtgcccttctctatcccattttactgtaacgtggctaatgcatttctggtggcaccacagatctactggttttgtcttttatgtagaaaagctgttagactgtttgataccccacaggccaaaaaagatggatag

SEQ ID NO: 187386 - DNA, 741 bp, synthetic construct
  misc_feature 1..741: note = Description of Artificial Sequence: Synthetic coding sequence
  source 1..741: mol_type = other DNA
atggaggcccccgaggccgccgagggcggcctgcagcggggcgcccggcgcgcagctggcgccagatcacaaggtgcgctcccttccggtgaggtacatcacgggggtgttaagctgggcatgaggtccattcccattgccaccgcatgtacaatctaccacaagttcttctgtgaaactaatctagatgcatatgacccttatctcattgcaatgagctccatctacctggccggaaaggtcgaggaacagcacctccggacacgcgatatcatcaatgtttcgaaccgctattttaacccctccggtgagccgttggaactggatagtcggttctgggaactaagagatagcatcgttcaatgcgaattgctgatgctgcgggtccttcgctttcaagttagcttccagcacccacacaaatacctgcttcattacctcgttagtctccagaattggctgaatagacacagttggcagaggacccctgtggcggtgactgcctgggccctcttacgagactcatatcacggcgccctgtgcctccggttccaggctcagcatattgcagttgctgtgttatacctcgctttacaagtatacggcgtcgaagtgccggctgaggtagaggcagaaaaaccctggtggcaggtgttcaatgacgatctgactaagccaatcatcgacaatattgtgtctgacttaattcagatctatacaatggacactgaaataccctag

SEQ ID NO: 187387 - DNA, 585 bp, synthetic construct
  misc_feature 1..585: note = Description of Artificial Sequence: Synthetic coding sequence
  source 1..585: mol_type = other DNA
atggaggccggcgtgaagctgggcatgcggagcatccccatcgccaccgcctgtacaatctatcataaattcttttgcgagacaaacctggatgcatatgacccatatctgattgccatgtccagtatttacctggcaggcaaggttgaagagcagcaccttcgtacacgcgacatcattaacgtgtctaatagatacttcaatccttcgggcgaacctctggaattggatagccgcttttgggagctgcgcgactccattgtgcagtgtgaactgctgatgctgagggtccttcggtttcaggtgtctttccagcacccacacaaatacctgctgcactatctcgtttcactgcaaaattggttaaataggcatagctggcagagaactcctgtggcggtgacagcttgggcgttgctcagggactcttatcacggtgcgctgtgcttaaggtttcaagctcagcacatcgccgtggcagtgctctacctggccttgcaggtgtatggcgtcgaagttcccgcagaagtcgaagccgaaaagccctggtggcagatctacacaatggataccgaaattccctag

SEQ ID NO: 187388 - DNA, 681 bp, synthetic construct
  misc_feature 1..681: note = Description of Artificial Sequence: Synthetic coding sequence
  source 1..681: mol_type = other DNA
atggaggcccccgaggccgccgagggcggcctgcagcggggcgccagaagggccgctggcgcgagaagtcagggggcattacctagcggcgaggtccaccatggaggcgtcaagctgggaatgcggagcattccaatagctactgcatgtaccatctatcacaagttcttttgtgaaaccaatctggacgcatacgacccctacttgattgctatgagttccatctatttagcaggaaaagtggaggagcagcatcttcggactagagacattatcaacgtctccaatcgatattttaatccctcaggtgagcccctggagctcgactcacgtttttgggagctccgcgacagcattgtgcagtgtgaactgcttatgctgagggttttgcgatttcaggtaagtttccagcatcctcataagtatcttctgcactatctagtttcgctgcagaattggctgaatcgtcattcatggcagcgaacccctgtggccgtcaccgcttgggccttgctgcgagactcctaccatggtgccctgtgcctgcgcttccaagcccagcacatcgctgtcgctgtcttgtatttagcattgcaggtctacggggtcgaggttcctgctgaagtggaggccgagaagccctggtggcaaatctacaccatggataccgagataccatag

SEQ ID NO: 187389 - DNA, 645 bp, synthetic construct
  misc_feature 1..645: note = Description of Artificial Sequence: Synthetic coding sequence
  source 1..645: mol_type = other DNA
atggaggccggcgtgaagctgggcatgcggagcatccccatcgccacagcctgtaccatctaccacaagtttttttgcgaaactaacctggacgcatacgacccatatctcattgccatgtcttccatttacctggccggaaaggtcgaagagcagcatttacgcacccgggacatcattaatgtgtctaaccggtatttcaatccgtctggggagcctctcgagctggattcgaggttttgggagctgagggattccatagtccagtgcgagcttctgatgctgcgcgttttgaggtttcaagtctctttccagcatccacacaagtatcttcttcactaccttgtgagcctccagaactggctgaacaggcattcatggcaaagaactccggtagcggtaaccgcatgggctttgctgcgcgattcataccacggcgcgctgtgtctgaggttccaggcacagcatatcgctgttgctgttctgtacctggccttacaggtgtacggggtcgaggttccggcagaggtggaggctgagaagccatggtggcaggtgtttaacgacgacctcacaaaaccaatcatcgacaatatcgtatctgatctgatccagatctacactatggataccgaaatcccttag

SEQ ID NO: 187390 - DNA, 741 bp, synthetic construct
  misc_feature 1..741: note = Description of Artificial Sequence: Synthetic coding sequence
  source 1..741: mol_type = other DNA
atggaggcccccgagggcggcggcggccccgccgcccggggccccgagggcccagcacccgaggcccgggtgcacttcagagtagcccggttcatcatggaggctggcgtcaagcttggaatgagaagcataccaatcgccaccgcctgtacgatttaccacaaatttttttgcgagacaaacttggacgcttatgatccttatctaatcgcaatgtcttccatctacctggcaggaaaggtcgaggagcagcacctgaggaccagggatattatcaatgtgagtaacaggtactttaatccatctggagagccgctggaacttgattctcgtttctgggaactgcgcgattccatcgtccaatgtgaactgcttatgctaagagtgttgagatttcaggtgtccttccaacaccctcacaaatacttactccactacttagtgtccctgcagaattggctaaatcgacatagctggcagagaaccccagttgccgtgaccgcctgggctttgctccgcgattcctaccacggggcgctgtgtctgcgcttccaggctcagcatattgcagtggccgttttgtacctagcattgcaggtgtatggagtggaggtcccagccgaggtggaggcggaaaagccttggtggcaggtatttaacgacgatctgactaaaccgattatcgacaacatcgtgtctgacttgatacaaatatacacaatggacacagagattccatag

SEQ ID NO: 187391 - DNA, 429 bp, synthetic construct
  misc_feature 1..429: note = Description of Artificial Sequence: Synthetic coding sequence
  source 1..429: mol_type = other DNA
atggaggccggcgtgaagctgggcatgcggagcatccccatcgccacagcatgcacgatctaccacaagttcttctgtgaaaccaatctcgacgcgtacgatccgtacttgatcgccatgagtagtatttatctcgcaggcaaagtagaagagcaacatctgcgtactcgcgacattatcaacgtgtcaaaccgatttatcccctggacacagagaagtcctaaggtgttggcacaagcatgtccaaaacggagtccagggtggtcagcggcttggggtcattgccatcacgtggccatgaccgccggccctcaccggacctcatgggaggattggctttgctgctggcgtagggcaggcgagggtaatggaatgctgcccctgtgccagtctttggaagtcgccgttcaagtgatggtgggggcatag

SEQ ID NO: 187392 - DNA, 285 bp, synthetic construct
  misc_feature 1..285: note = Description of Artificial Sequence: Synthetic coding sequence
  source 1..285: mol_type = other DNA
tgagccggcaaggtggaggagcagcacctgcggacccgggacatcattaatgtcagcaacaggtatttcaatccatctggtgagcccctggaacttgattctaggttctgggaactgcgtgatagcatagtacaatgcgaattgttgatgttgagagtattgagatttcaggtgtcttttcagcaccctcataaagttttcaatgatgatttgaccaagccaatcatcgacaacatcgtgagcgaccttatccagatctatactatggatacagagattccctag

SEQ ID NO: 187393 - DNA, 366 bp, synthetic construct
  misc_feature 1..366: note = Description of Artificial Sequence: Synthetic coding sequence
  source 1..366: mol_type = other DNA
tgacggtacttcaaccccagcggcgagcccctggagctggacagcaggttctgggaactgagggatagtatcgtacagtgcgagctcctaatgttgcgagtcctcagattccaagtttcattccagcatccacacaaaaattggctgaaccgtcactcatggcagagaacccccgtagctgtcaccgcctgggctctgctcagggatagttatcacggggcgctatgcctgagattccaagcacagcatatcgcggtggcggtcctgtatcttgccctgcaggtgtatggtgtggaggtcccagctgaagtggaggctgagaagccatggtggcaaatctatactatggatacggagataccgtag

SEQ ID NO: 187394 - DNA, 3207 bp, synthetic construct
  misc_feature 1..3207: note = Description of Artificial Sequence: Synthetic coding sequence
  source 1..3207: mol_type = other DNA
atgctggtgggcagccagagcttcagccccggcggccccaacggcataatacgttcccagtcgtttgcaggttttagtggtttacaggagagaaggagcaggtgtaactcttttattgaaaacagttccgccctgaaaaagcctcaggccaaactcaaaaagatgcataacttaggtcacaagaataacaatccacctaaggagcctcaacccaaacgtgtggaggaagtctacagggcccttaagaatggacttgatgaatatctagaggtgcaccagactgaacttgacaagctgacggcacagctgaaggatatgaaacgaaatagccgcttgggggtactatacgacttggacaagcagattaagacgatcgagcggtatatgaggaggttggaattccacatcagcaaggtggatgagctgtacgaagcgtactgtatacagcggaggctacaggatggagcatccaagatgaaacaggccttcgccacatcccctgctagcaaagccgcccgcgagtctctcacagagatcaatcgttccttcaaagagtacacagagaacatgtgcacaattgaagtggagcttgagaacttactgggagagttctccatcaagatgaaaggcctggccggatttgcaaggctgtgccctggagaccaatacgagatttttatgaaatatggccgccaacgttggaagctgaaggggaagatcgaagttaacggaaaacaaagttgggacggcgaagagactgtctttctgcccctcatcgtgggattcatctctatcaaggtgaccgaactgaagggattggctactcacatcctggtggggagcgttacctgcgagaccaaggaactctttgccgcccggccacaggtggtcgccgtggatattaatgacctcggtactattaaactgaatttagagatcacctggtacccgttcgacgtggaagatatgacagcttcttcaggggccgggaacaaggccgcagcacttcaaagaagaatgagcatgtactctcagggaacccctgagacgcccactttcaaagatcatagtttctttcggtggctccaccctagccccgacaaaccaaggaggctgtccgtgctatcagcgctgcaggacactttcttcgcaaagctacatagatcaaggtcattttccgacctgcccagcttacgtccaagtcccaaggccgttttagaactctactcaaaccttcctgacgacatttttgagaacggcaaggcagctgaagagaagatgccactaagtctatctttctcagatctacccaatggtgattgcgccctcacatcccattctaccggctctccttctaactcaactaaccccgagatcactatcactccagctgagttcaatttatcctccctggcgtcacagaatgaaggcatggacgatacatcatcagcgtctagcaggaactccctcggtgaaggacaagaacctaagtctcacttgaaggaggaagaccccgaagagccacgtaagcctgcatccgcccccagtgaggcttgccggcgacagtccagcggggcaggagctgagcatttgttcctcgagaacgatgtggcggaggcattgcttcaggaatctgaggaggcatccgaattaaagcccgtcgaactagacaccagcgaggggaacattacaaagcagctagtaaaaaggctgacaagcgctgaggtacctatggcaaccgatcgcttgctgagcgaaggctccgtgggcggggagtcagagggctgccgctcatttctcgacggaagtctggaagacgcattcaatggtcttctgcttgctctggaaccacacaaagaacaatataaagaattccaagatctgaatcaggaggtgatgaatctggatgatatcctcaagtgtaagcctgctgtcagccgcagccggtcttcgtcattgtcgttgaccgtggagtcagcgctggaatccttcgacttcctcaacacctccgacttcgatgaggaggaggacggtgacgaggtctgtaatgttggagggggagcggactctgtgttttcagacaccgagactgagaagcatagctaccgtagcgtccaccccgaggctcgcggccacctgagtgaagctctcaccgaagatacaggtgtcggaacttctgttgcaggcagccccctgcccctgaccaccgggaacgaatctcttgacattacaatcgtaaggcacttgcagtactgcactcagttagtccagcaaatcgtcttcagctcaaagacccccttcgttgcccgctctctgctcgagaaactttcccggcaaattcaggtcatggagaagctcgctgccgtctctgatgaaaatattgggaacattagctctgtcgtggaggcgatacccgagttccataagaagctgtcactgctctccttctggaccaaatgttgttcccccgtcggcgtctaccacagcccagccgaccgggtaatgaagcaactagaggcaagttttgctagaacggtaaacaaagagtaccccggactcgccgacccggtgtttaggacgctggtctcacagattctggatcgcgctgagcctctattgtcatcttcactgagcagtgaagtggtaactgtgtttcagtactatagttatttcaccagtcacggggtgtcagatttggagtcatatctcagtcagctcgccaggcaagtgtcaatggtccaaacactacagagcctcagagatgaaaagctgttacagactatgagtgacctcgcacctagtaacttgctagcccagcaagaagtgctcaggaccttggccctgctgctgactagagaggacaacgaggtgagcgaggcggtgacattatacctggcagccgcatccaagaaccaacattttagggaaaaggcgctcctgtactattgcgaggccctgacaaaaactaatttacagctccagaaagctgcttgccttgcgctgaagattctagaagctacggaatctatcaaaatgctagtcaccttgtgtcagtcagatacagaagaaatccggaacgttgcatccgaaactcttctgtctcttggagaagacggaaggctggcctacgagcagctggataagttccctcgtgattgtgtcaaagtgggaggccggcatggcaccgaggtagcaaccgcgttctag

SEQ ID NO: 187395 - DNA, 1776 bp, synthetic construct
  misc_feature 1..1776: note = Description of Artificial Sequence: Synthetic coding sequence
  source 1..1776: mol_type = other DNA
atgctggtgggcagccagagcttcagccccggcggccccaacggcatcattcggtcgcagagcttcgctggattcagcgggttacaagagagaagatcaaggtgtaactcgttcatagaaaactcttcagccctgaaaaagccgcaggcgaagcttaaaaagatgcataatctagggcacaagaataacaacccgccaaaagagccacagccgaagagagtggaggaggtataccgagcccttaagaatggcctagatgaatatcttgaagtgcaccaaaccgagctcgacaagctgactgctcagctcaaagatatgaaaagaaactccagattgggtgtcctgtacgacctggacaagcagataaaaactatcgaaaggtacatgcgcagactagagttccacatctcaaaggtggacgaattatatgaagcatactgtattcagaggcgcctgcaggacggtgccagcaagatgaaacaggcttttgccacatcacctgcaagcaaggcggccagggagagtttaaccgaaatcaatcgtagtttcaaggagtacacagaaaacatgtgcacaatcgaagttgaactggagaacctccttggtgaattttccatcaaaatgaagggcctcgccggcttcgcccggctttgccccggcgaccaatacgaaattttcatgaagtatggccgccaaagatggaaactcaaaggcaaaatcgaggtcaacggcaagcagtcatgggatggcgaagaaacagtgttcctgcctttgattgtcggcttcattagtatcaaagtgacagagttgaagggccttgccacacacattctcgtcgggtcagtgacgtgtgaaaccaaagaattatttgccgcaaggcctcaagtcgtggccgtggacattaacgatctcgggacaattaaactcaatctggaaattacctggtacccatttgatgtcgaggatatgacggcctccagtggagctggaaataaagccgccgccctgcagcggagaatgtcgatgtactcgcaaggcactcctgagacccctacctttaaagatcactctttcttttcaaatttgcccgatgacattttcgagaatggcaaagctgctgaagagaagatgcccttatcactgtcgttttccgatctcccaaatggggattgtgccctgacctcccattccacaggttctccctccaattctacgaaccctgagataacaataacgcctgcagagtttaatcttagcagcctggcatcacagaacgaagggatggatgataccagtagcgccagtagtagaaatagcctgggtgaaggccaagagccaaagtcccacctcaaagaagaagatcctgaggaacccagaaaacccgcctctgcccccagcgaggcttgtcgcaggcaatctagtggggccggggcagagcacttgtttcttgagaacgacgtagctgaggcactgctccaggagtctgaagaagcctctgagctcaaacctgtggaattggataccagtgaaggaaacatcactaagcagcttgttaagcgcctcacgagtgccgaagtgccgatggccactgacagactgttatctgaggggtcagttggtggagaaagtgaggggtgtcgctctttcctagatggaagcctcgaggacgctttcaatggcctcctgttggccctcgagcctcataaggagcagtacaaggaattccaggacctgaatcaggaagtgatgaatcttgacgatatcctgaaaaagtag

SEQ ID NO: 187396 - DNA, 1944 bp, synthetic construct
  misc_feature 1..1944: note = Description of Artificial Sequence: Synthetic coding sequence
  source 1..1944: mol_type = other DNA
atggtgctgcccagccggctgcactggatccggaaccggccctggagagacagaatcagaagaagacaactgaacaggctcccaacacggctgccggaaattatgctagttggatcccagtcgttctcacctggcggaccgaacggtattattaggtcccagagctttgcaggattcagcggactgcaagaacggcggagccgctgcaattccttcattgagaattctagtgctctcaagaagccgcaggctaagctgaagaagatgcataatcttggccacaaaaataacaaccctcctaaggagccacagccaaagcgagtcgaagaggtttaccgggccctcaaaaacgggcttgatgaatacctggaggtgcaccagacggaactggataaactaaccgcccagttgaaagacatgaaacgaaactccagattgggtgtactgtatgacttggacaaacagattaagacaatagaacgctacatgagacgcctggaatttcatatcagtaaggtggacgagctttatgaggcctactgcattcagagaaggctgcaggacggagcttccaagatgaagcaagcctttgcaacttcccccgcttccaaagccgcgcgcgaatccctgactgaaataaatcgatcattcaaggagtacacagagaatatgtgtaccatcgaggttgagctggagaatcttttgggcgaatttagcatcaagatgaagggcctggcaggctttgctagattgtgtccaggtgaccaatatgaaatcttcatgaaatacgggcggcagcgctggaaactgaagggcaagattgaagtgaatgggaaacaatcatgggacggagaggaaaccgtgttcctgccactcatcgtgggattcatcagcattaaagtgactgaattaaaggggttggcaacccacatcttggtcggttccgtgacatgcgaaaccaaggagttgttcgctgcccgaccacaggtggtggctgtagatataaacgacctgggcaccatcaaactgaacttggagattacctggtatcctttcgacgtggaagacatgacagcctcttccggcgcagggaataaggcagccgcactgcagcggagaatgtccatgtattcccaggggactccggaaacgcctacctttaaggatcacagtttcttcagcaacctgcccgacgacattttcgaaaatggtaaggcggccgaagagaaaatgcctttaagtttgtccttctctgacctgcctaacggcgactgtgccctgacctcacattctactggatcaccgtctaattcaactaacccagagattaccatcacccccgcggagttcaatctttccagccttgcctcgcagaacgaaggcatggacgatacctccagcgcatcttccagaaactccctaggcgaaggccaggaacctaagagtcacctgaaggaagaggaccctgaagagccccgcaaacctgcttcagctccatccgaggcctgccgacggcagtccagcggagcgggggctgagcacctattcttggaaaatgatgtcgcggaggccctgctgcaggaatctgaagaggctagcgaactgaaacccgttgagctcgatacaagtgagggaaacattactaaacagctggtgaagagactgacgagcgctgaggtccctatggctaccgaccgcctcctatcagaaggaagcgtaggaggcgagtccgaaggctgccgctcttttcttgacgggtcactggaggacgcctttaacggactgttgctggcgctggagccacacaaggaacagtacaaggagttccaagaccttaaccaggaggtgatgaacctggacgatatcctaaaggacgctaaacacctggacgatcagaaactgaacggcgctgcaagttggactgagattactgagggagaatag

SEQ ID NO: 187397 - DNA, 3144 bp, synthetic construct
  misc_feature 1..3144: note = Description of Artificial Sequence: Synthetic coding sequence
  source 1..3144: mol_type = other DNA
atgcagttcttcgacgccgaggagctgctggtggacgaggaggacgacgtgttcggggaaggacttccaacccgccttcccgagattatgcttgtcggttcccagtcctttagtcctggcgggcctaacggtattatacgtagccagtcgttcgcagggttctcaggcttacaagagcgcaggtccagatgtaatagttttattgagaactctagcgctcttaaaaagccccaggcaaagctcaaaaaaatgcataatctgggacataagaataataatccccctaaggaaccccagccaaaaagagtagaggaagtctatcgcgcactgaagaacgggttggacgaatacctcgaggttcatcagaccgaactcgataagttaacagcccagcttaaggacatgaaacgcaactccaggctgggagtgctttatgatttggacaaacagatcaaaaccattgaacgatatatgagacggctggaattccacatctccaaagtcgatgaactttatgaagcctactgcattcagcgtagattgcaggacggcgcttctaaaatgaaacaggcctttgcaacttcccctgcttccaaagcggctcgggagagtctaactgagatcaatcgatcatttaaggagtatacagaaaacatgtgcacaattgaggtggagttagagaacttattaggtgagttctccatcaaaatgaagggactggctggtttcgcaagactgtgccctggcgatcagtacgagatctttatgaaatacggaagacaaagatggaaattgaagggcaagatcgaggttaatgggaaacagagctgggatggagaggaaacagtattcctccctctgattgtcggattcatcagcattaaggtaaccgagcttaagggattggctacccacatcctggtggggtccgtaacatgtgagacaaaagaattattcgctgcccggccacaagtggtggccgtcgatattaatgatctgggtactatcaaactcaatcttgagatcacctggtatcctttcgacgtagaggatatgactgcatccagcggagctggcaataaagccgccgctctccagcgaaggatgtccatgtactcacagggaacccccgagacacccacattcaaagatcactctttcttttctaacttgccggatgacatcttcgaaaatgggaaggctgcagaagagaagatgcccctgtcattatcattctcagatcttccaaatggcgattgcgctcttaccagccactccaccggctccccttccaattcaactaatcccgaaatcaccatcacacccgccgaatttaatctttctagtctggcaagccagaacgaaggaatggacgacacctcttctgcatcttccaggaattctttgggcgagggacaagaacccaagagccacttgaaagaagaggacccagaggaaccacggaagcctgcgagtgcaccaagtgaggcttgtcgccggcaatcatcaggcgctggcgccgagcacctgttcctagagaacgacgtggccgaagcattactgcaagaaagtgaggaggcgagcgagctgaagcctgtggagctggacacctctgagggcaatatcacgaagcagctggttaagcggctgacctctgcagaagtcccgatggcgaccgaccggctactgtctgagggcagcgttggcggggaatcagaaggctgtagaagttttctcgacgggagcctagaggatgcatttaatggtctgttactcgcactggagccccataaagaacaatacaaggaattccaggatctcaaccaggaggtgatgaacctcgacgatatcctcaagtgcaagccagccgtgagtagatctaggagcagcagcctatcattaactgtggagtcagcgctcgagagttttgacttccttaatacgagcgacttcgatgaggaggaggatggggacgaggtgtgcaacgtgggtgggggggccgacagcgtgttctccgacaccgagaccgaaaagcattcttacagatctgtgcacccagaggcccgcggccacctgtctgaggcactcaccgaggataccggggtgggcacttcagttgccggcagcccactgcctcttactactggcaatgagtctttggacattacaattgtccggcacctccagtactgcacccagctggtacaacagatcgttttcagttctaagacccctttcgtggcgaggagcctcctggagaagctgtcccgccaaattcaggtcatggaaaaactggcagctgtgagcgacgaaaatattggcaacatcagcagtgtggtcgaagcaatcccggagtttcacaagaagttgtccctgctcagcttttggaccaagtgctgctcgcctgtgggcgtttaccactcccccgccgaccgagtgatgaaacaactggaggcctctttcgcacgcaccgtaaacaaagaataccctggattggcagacccagtcttccgaactttggtgagccagattctggatagggccgaacctttgctgagttcctccctctcatcagaagtcgttactgtgtttcagtactacagctattttacaagccatggtgtcagtgacttagaatcatacctgagccagctggcgcggcaggtcagtatggtgcagacactccagagtctcagagacgagaagctactgcagacaatgagtgacttggcaccctcaaatctgttggctcaacaggaagtgttgagaaccttagctctcctcctgacccgggaagataacgaggtaagcgaggccgtgaccctctacctcgcagctgcctccaaaaatcaacacttcagagaaaaagccctcctgtattactgcgaagctttaaccaaaaccaatctgcagctccagaaagcagcatgtcttgctctgaaaattctggaggccaccgagtccattaagatgctggtcactctctgccaatcagacacagaagagatacgcaatgtagcctccgagaccctcctaagtcttggggaggacggccgattggcctacgaacaactagataaattcccacgtgattgcgtaaaagttggaggtagacacggaaccgaggtggcgacggccttttag

SEQ ID NO: 187398 - DNA, 1842 bp, synthetic construct
  misc_feature 1..1842: note = Description of Artificial Sequence: Synthetic coding sequence
  source 1..1842: mol_type = other DNA
atgctggtgggcagccagagcttcagccccggcggccccaacggcattattcgctcgcaatcctttgcaggctttagcggtctgcaagaaagacggtcaaggtgtaatagcttcatcgagaacagctctgcactcaagaagcctcaggctaaactcaagaagatgcataacctgggacacaagaataacaacccccccaaagaaccacagccaaaacgtgtagaggaagtttacagggccctgaaaaacgggctagacgagtatctggaagtacatcagacagagctcgataagcttactgctcagttgaaggacatgaagagaaattcaaggctgggagtgctgtatgacttagacaagcaaatcaagaccatcgaaaggtatatgcgccgccttgagttccacattagcaaggtggacgagctctatgaagcctactgtatccagcgcaggctgcaagacggcgcaagtaagatgaagcaggcgtttgctactagtcccgcctccaaagccgcccgcgaaagtctaactgagatcaaccgatcttttaaggagtacaccgaaaacatgtgtacaatcgaagttgaattggaaaatcttctgggcgagttctccattaagatgaagggcctggccggctttgcacggctctgtccaggagatcagtatgagatttttatgaaatacggtcgccaacgttggaaactgaagggcaagatcgaggtcaatggcaagcagtcgtgggacggcgaggaaacagtgttcctaccactgatcgtcggttttatctccatcaaggttacagagctgaagggacttgcaactcacatcctcgtgggatcagtaacctgtgaaacaaaagaattgttcgccgcccggccacaggttgtggccgtggatatcaacgacctggggaccatcaaactaaacctcgagataacttggtacccattcgacgtagaagacatgacagcatcaagcggtgccggcaataaggccgctgcactccaacggcgcatgagtatgtactcacagggcacacctgagacgcctacgttcaaagaccactccttcttttcgaaccttcctgatgacatctttgagaatggaaaagctgcggaggagaagatgccactctccctttctttcagtgatttgccaaatggcgactgcgctctcacgtctcactcaactgggtccccttccaactccaccaaccctgaaataaccatcacaccagccgaatttaatctgtcaagtctggcgtcccaaaatgagggcatggatgataccagctcagcctcttcccgaaattcactgggggaaggtcaggaaccgaagtctcacctcaaagaagaggatcccgaagaaccaaggaagcccgcatccgcgccctcggaggcttgccgacgacaatcatcaggagccggggcggagcatctgttcctggaaaacgatgtggccgaggccctgctgcaggaaagcgaagaggctagtgagctgaaacccgttgagcttgacacatctgaggggaatatcacaaaacagctcgtcaaacggctgacctccgccgaggtaccaatggccaccgatcggctgctcagcgagggtagtgtcgggggcgagtccgaagggtgtaggagtttcttagacggctccctggaagacgcattcaatggacttcttctggcattagagccacataaggagcagtacaaagaatttcaggatctaaatcaggaagttatgaatttggatgacatactcaaggacgccaaacaccttgacgaccaaaagctgaacggtgccgccagttggaccgagatcactgagggggagtag

SEQ ID NO: 187399 - DNA, 2673 bp, synthetic construct
  misc_feature 1..2673: note = Description of Artificial Sequence: Synthetic coding sequence
  source 1..2673: mol_type = other DNA
atgagcgccaacaacagcccccccagcgcccagaagagcgtgctgcctacagctattcctgctgttttacctgcagccagcccttgcagctcccccaaaaccggactgtccgctcggctcagcaacggttcatttagtgcgccttcactcaccaattctcgcggaagcgtgcatactgtttcatttctgttacagattggcctcactcgcgagtccgttactatcgaggcacaggaactgtcactgagcgcggttaaagacttggtttgctctatcgtttaccagaagtttccggaatgcgggtttttcggcatgtacgacaaaatcctgctctttcggcatgatatgaattccgaaaatatcctgcagctgattacctccgcagatgagattcacgagggagatttagtggaagtagtcttgagcgcactggccacagtggaggacttccaaatccggccacacacattgtatgttcattcctataaagcacctacattttgcgactactgcggtgaaatgctgtggggattggtgagacaggggttgaaatgtgaggggtgcggccttaactatcacaaaagatgcgccttcaaaatcccgaacaactgctctggggtccgcaagcggcgtctctcaaacgtcagtctgcccggtcctggactgtcagtccctagacccctacagcccgagtacgttgcactgccttcagaagaaagtcacgtgcatcaggagccatcaaagagaattcctagttggtcgggtcggccaatctggatggaaaagatggtgatgtgcagggtaaaagtcccccacacttttgctgtccacagctacactcgccccacaatctgtcagtactgcaaacggctgttgaaagggcttttcaggcagggaatgcaatgtaaggattgcaaatttaattgtcacaaaagatgcgccagtaaggtgcctagagattgccttggggaggttactttcaatggcgagcctagctcccttgggacagatactgatatccccatggatatcgataacaatgacatcaatagtgattccagccgaggtctcgatgacactgaggaacccagccctcccgaggacaaaatgttctttttggatcccagtgatcttgacgtcgagcgggacgaggaggccgttaagacaattagtccaagtacatccaataatatcccacttatgagagttgtacaatctataaagcacactaaaagaaaatcgtcaacaatggtgaaggaggggtggatggtccactacacatctagagacaatctgcgtaaacgccactactggcgcttggattctaagtgtttaaccctgtttcagaatgagtccgggtctaaatattacaaggaaattccgctgagcgagatcctcagaatttctagtccacgggactttactaacatctctcaaggctcaaatccacactgtttcgaaatcatcaccgatactatggtctactttgtgggggagaacaatggagactcctcacacaacccagtgctcgccgcaacaggcgtcgggttggacgtcgctcagagctgggaaaaggcaatacgacaggccttgatgcccgtaactcctcaagcaagtgtgtgtacctctcccggccaaggtaaggatcacaaggatctgagcacctccatttctgtaagcaactgccagattcaggagaacgttgatatctccaccgtttaccagatttttgctgacgaagtcctggggtcaggccagttcgggatagtctacggcggtaaacaccgcaaaacaggccgggatgtggctataaaggtgattgacaagatgaggtttcccacaaaacaggagtcgcagcttagaaatgaagtcgccatactccagaacctacaccatcctggtattgtcaacttagagtgtatgtttgaaactcctgaacgagtgttcgtggtgatggaaaaactgcatggcgacatgttagaaatgatcctgtcttctgagaaatctagactccctgaaaggatcaccaaattcatggttacacagatcctggtggcactgcgtaatttgcacttcaaaaatatagttcattgcgacctgaagcctgaaaacgtgcttctagcttctgctgaacccttcccccaggtaaagctgtgtgactttggcttcgccaggattattggtgaaaagtcctttaggcggtccgtggtaggcaccccagcttacctggcccctgaggtgttacgttcaaagggctacaaccggagcctggacatgtggagtgtgggagtcattatttacgtttctctgagcgggacatttccttttaatgaggatgaagacattaatgaccaaattcagaatgcagcatttatgtatccccctaatccgtggcgggagatatcgggcgaagcaatcgatctgatcaacaatctgctacaggttaagatgcgtaagcgctatagtgtggataagagtctctcacacccgtggctgcaggactaccaaacatggctcgacctccgtgagttcgagaccagaatcggggaacgttacatcacccatgagagcgatgatgcaaggtgggagatacacgcttatacacataatttggtctatcccaaacacttcatcatggctcctaaccccgatgatatggaggaggacccctag

SEQ ID NO: 187400 - DNA, 1233 bp, synthetic construct
  misc_feature 1..1233: note = Description of Artificial Sequence: Synthetic coding sequence
  source 1..1233: mol_type = other DNA
atgccctacagcaccaacaaggagctgatcctgggcatcatggtggggaccgctgggataagtctcttgttgctgtggtaccacaaggtgcgcaaaccaggtattgccatgaagctgcctgaatttttatccctgggaaatacttttaactctatcactctgcaagacgagattcacgatgatcaaggcacaactgtcattttccaggagcgccagctccaaatattggagaagttaaatgagctactgaccaatatggaggaattgaaggaggaaataagattcctaaaggaggcaatccctaagctggaagagtatattcaagacgaacttggtgggaagatcacagtccataaaatcagccctcagcaccgtgcacggaaacgtagactaccaaccatccagtcctccgcaacctctaactccagtgaggaggctgagtctgagggagggtacatcacggcgaacacagacacggaggaacagtcattcccagtgccaaaggcgtttaatacaagggtcgaagagttaaaccttgatgtgctgttgcagaaagttgatcatctcagaatgagcgagtccggcaaaagcgagagcttcgaacttttaagggaccacaaggaaaaatttcgcgatgagattgaattcatgtggaggtttgcaagagcctatggagatatgtacgagctgtccaccaacacccaggagaagaagcactacgctaacatagggaagacgctgagtgagagagctataaacagagctcccatgaatgggcattgccacctgtggtacgccgtcctgtgtggatatgtgtctgagttcgaagggctacagaacaagattaactacggtcacttgttcaaggaacaccttgacatcgctataaagcttctacctgaagaacctttcttgtactacttgaaaggacggtactgctacaccgtgtccaaactgtcctggatcgagaagaagatggctgcaaccttgttcgggaaaattcctagttccacagttcaggaggctctccacaattttcttaaagccgaagagctgtgcccaggctactctaatcccaactacatgtacctcgccaaatgctacacagatctggaagagaatcagaacgccttaaaattctgcaatcttgccctactgctccctaccgtgaccaaagaggacaaagaggcccaaaaggagatgcagaagataatgacgagcctgaagcgctag

SEQ ID NO: 187401 - DNA, 1233 bp, synthetic construct
  misc_feature 1..1233: note = Description of Artificial Sequence: Synthetic coding sequence
  source 1..1233: mol_type = other DNA
atgccctacagcaccaacaaggagctgatcctgggcatcatggtggggactgcaggtatttcactgttgctgctttggtaccacaaggtgcggaagcccgggattgctatgaagctccctgagtttctgagcctgggaaataccttcaactctattacccttcaggatgaaattcacgacgaccaaggtactactgtgatttttcaggagagacagctccagatcctggagaagctcaacgagctgctaacgaacatggaagaactgaaggaggaaatccgattcctgaaagaggctatcccaaaactggaggaatacattcaagatgaattaggcggcaagatcacagtgcacaagatttccccccaacatagggcgcggaagcgccgcctccccactattcagagttctgccacttccaactcaagcgaagaggcagagtccgaggggggctacattaccgcgaacacagatacagaggagcagagcttccctgtacctaaggcgttcaatacccgagttgaggaactaaatctagatgtgctcttgcagaaggttgatcaccttcggatgtccgaatcaggtaagtccgagtcatttgaattgttaagagaccacaaagagaagttccgagacgaaattgagtttatgtggcgtttcgccagagcttatggcgacatgtatgagttaagcaccaacacccaggagaagaaacactacgcaaatatcggcaagacgctgtccgaaagagccataaaccgcgcccctatgaacggccactgtcatctgtggtacgctgttctctgcgggtacgtttccgaattcgagggtctgcaaaataagatcaactatggccacctcttcaaagagcatctggacatcgctatcaaactcctgccggaagaacctttcttatactacctgaagggacgatactgttacactgtcagcaaattatcttggattgaaaagaaaatggcagcaaccctgttcggcaaaatccccagttcaacagtgcaggaggcactgcataattttcttaaggccgaggaactgtgcccggggtatagcaatccaaattacatgtacctggcaaaatgctacactgacctggaagagaaccaaaacgcactgaaattctgtaatctcgcccttttgttgcccacagtgactaaggaggacaaggaggcgcagaaggaaatgcaaaaaatcatgactagtcttaagagatag

SEQ ID NO: 187402 - DNA, 528 bp, synthetic construct
  misc_feature 1..528: note = Description of Artificial Sequence: Synthetic coding sequence
  source 1..528: mol_type = other DNA
atgccctacagcaccaacaaggagctgatcctgggcatcatggtggggacggccggaatctctctcttacttctgtggtaccacaaggtacggaagccggggattgccatgaagcttcctgaattcctgagcctgggcaatacgttcaactctatcactctccaggacgagatacacgacgaccaaggcacgacagttatatttcaggagcgccaattgcagatcctggagaagctgaatgagcttttaactaatatggaggagctcaaggaggagatcagattcctgaaggaggcaatccccaagttagaagaatacatccaagacgagctgggcgggaagattaccgtgcacaagatttctccccaacatcgagcaagaaaaagacgccttcctactatacagtccagcgctaccagcaactccagcgaggaagctgagtcggaaggcggttacattactgcaaataccgacacagaggagcagagcttccctgtcccaaaggctttcaacacacgtgtggagtag

SEQ ID NO: 187403 - DNA, 798 bp, synthetic construct
  misc_feature 1..798: note = Description of Artificial Sequence: Synthetic coding sequence
  source 1..798: mol_type = other DNA
atgggcaagtgcctgcggtacatcaccgccaacaccgacaccgaggaacaatccttcccagtacctaaagcgtttaacacacgggtcgaagagctcaatctcgatgtcctgctccagaaagtagatcacctcaggatgagtgagtccggcaagtcagagtcctttgagcttctgcgggatcataaagagaagtttagggatgagatcgaattcatgtggcgcttcgccagggcctatggggatatgtatgaactcagtacgaacactcaagagaaaaaacattacgccaatatcggaaagaccctgagtgagcgggccattaaccgcgcacccatgaatggacactgccatctctggtatgccgtgttgtgtgggtacgtgtccgaatttgagggcttacaaaataagatcaactatggtcacctgttcaaggaacacttggatatagcaatcaagttgctgcccgaggaaccattcctatactacctcaagggtagatactgttacactgtgtcgaagctatcttggattgaaaagaagatggcagccaccctcttcgggaagatcccaagtagcacagtacaagaagccctgcataactttctaaaagccgaagaactgtgtcctggttattctaaccccaattacatgtatctggctaaatgttacacagacctggaggagaatcagaacgcactgaaattttgcaatctggcactgcttctcccgacagttaccaaggaagataaagaagcacagaaagaaatgcagaagattatgacctcgctgaaaaggtag

SEQ ID NO: 187404 - DNA, 453 bp, synthetic construct
  misc_feature 1..453: note = Description of Artificial Sequence: Synthetic coding sequence
  source 1..453: mol_type = other DNA
tgagtgctgtgcggctacgtgagcgagttcgagggcctgcagaacaaaatcaactacggacatctgttcaaagaacacttagacatagccattaaactgctgccagaagaaccattcctctattacttgaagggacgctattgttacaccgtcagcaaactctcatggatcgagaaaaagatggcggccactctgttcggtaaaataccgtccagcacggttcaggaagccctgcacaattttctcaaagctgaagaactctgtcctggttacagcaatccaaactacatgtacctcgctaaatgttacacagacctggaggaaaaccagaatgccctgaaattttgcaatctggctttactgctccccaccgtgacaaaagaggataaagaagcccagaaggaaatgcagaagataatgacaagcttgaaacgcctccggaagactaaatag

SEQ ID NO: 187405 - DNA, 717 bp, synthetic construct
  misc_feature 1..717: note = Description of Artificial Sequence: Synthetic coding sequence
  source 1..717: mol_type = other DNA
atgggcaagtgcctgcggtacatcaccgccaacaccgacaccgaggagcagagtttccctgtccccaaggcattcaacacccgggtagaagagctgaatctggacgtactcctgcagaaggtggaccatttaagaatgtcagaaagtggcaagtctgaatccttcgagctgctcagagatcataaggagaagttccgggacgagattgaatttatgtggagattcgctagggcctacggagatatgtatgagctgtccaccaatactcaggagaagaaacactatgcaaatatcggaaaaacactgagtgagagggctattaacagggctcctatgaacgggcattgccacctctggtacgccgtgctctgcgggtatgttagcgagttcgagggccttcaaaataagatcaattacgggcatttatttaaggagcaccttgatattgctataaagttacttcccgaagaacctttcctgtactacctcaagggaagatattgctatacagttagcaaactttcttggatcgaaaagaagatggccgcaacactgtttgggaaaattccctcgtcgacagtccaggaggcactgcacaacttcctaaaggccgaggagctgtgccctggttatagcaatcccaattatatgtatctcgccaagtgttataccgacctggaagaaaaccaaaacgcacttaagttctgcaacttatag

SEQ ID NO: 187406 - DNA, 1413 bp, synthetic construct
  misc_feature 1..1413: note = Description of Artificial Sequence: Synthetic coding sequence
  source 1..1413: mol_type = other DNA
atgagccggctgggcgccctgggcggcgcccgggccggcctgggcctgctgcttggaaccgctgcaggccttggattcctttgcctgttgtactcacaacggtggaagcggacccagaggcatggacgaagtcagtctctgccaaactcactggactatactcagaccagtgaccccggaaggcatgtgatgctgctccgagccgtccccggcggcgctggggatgcctctgtactgccaagccttccccgggaggggcaggaaaaagtcctggataggttggattttgtgcttactagtctggttgctctgaggcgagaggtggaggagttgcgctctagcctccgaggcctagcaggggagatcgttggagaagttcggtgtcacatggaagagaatcagcgcgttgcaagacggcgcaggtttcctttcgtgagggagcggtcagatagcacagggtcttcttcggtctatttcacggcttcaagtggagccacctttactgacgccgagagcgagggaggctataccactgcaaacgccgaaagcgacaacgaaagagattcagataaagagtccgaagatggagaggatgaagtatcatgtgaaactgtcaagatgggtcgaaaggattcactggatcttgaggaggaggctgcgagcggggcgagttcagctttagaggctggaggtagttccgggctggaagacgtgttgccacttctgcagcaggccgacgagcttcatcggggagacgagcaaggcaaacgggagggattccaactcctgctcaacaataaattggtctacgggagccgccaggacttcctatggagactggccagagcctactcagatatgtgcgagctgactgaagaagtgagcgagaaaaagtcctatgccctagacggaaaggaggaggccgaggctgccctggagaagggggacgagagcgctgattgccacctgtggtacgcggtgctttgcggtcagctggcagagcacgagtcaatacagaggcgtatccaatctggcttctcatttaaggagcacgtagataaagccatcgcacttcagcctgagaatccaatggcccatttcctactgggtcgatggtgctaccaggtctcccacctgagctggttggagaagaaaacagccactgccctgctggagagtcccctgtccgccactgtggaggacgccctccagtccttccttaaagcagaagaattacagccaggcttctccaaagctggtagggtgtatatatcaaaatgctatcgtgagctggggaaaaattctgaggccaggtggtggatgaaactggccctggagctgcctgacgtgactaaagaagacctcgccattcaaaaggatctggaagagctggaagttattctccgcgactag

SEQ ID NO: 187407 - DNA, 1413 bp, synthetic construct
  misc_feature 1..1413: note = Description of Artificial Sequence: Synthetic coding sequence
  source 1..1413: mol_type = other DNA
atgagccggctgggcgccctgggcggcgcccgggccggcctgggcttgctgcttgggacagccgcggggctaggtttcctttgccttctatatagccaacggtggaagcgcacacagcgccatggacgtagtcagtccctgcctaactctcttgactacacccagactagtgatcccggaaggcacgttatgctgctgagggccgtgccgggcggcgctggagatgccagtgtattgccctcgttaccccgggagggccaagagaaggtgctcgatcgtttggactttgtcctgaccagtctcgtggcactccgtcgggaggtggaagagctcaggagctccctgagaggcctggcaggcgagatcgtcggtgaggtgcggtgtcacatggaggagaaccagagggtggcacgcagacggagattcccattcgttagagagagatcagactcgactgggtctagtagcgtgtattttactgcttctagtggtgcgacattcaccgatgctgagtccgaaggtggatacacgacggctaacgccgagagtgataatgagagagatagtgacaaagaatccgaggatggagaggatgaggtaagctgcgagacagttaaaatgggacggaaagatagccttgacttggaagaggaggccgccagtggcgcatctagcgcgcttgaagccggagggtcttctgggcttgaggacgttctcccgctgcttcaacaggctgacgaattacaccgcggagatgagcagggaaaacgggaggggttccagctgcttttaaataacaagctggtgtacggcagccgacaggactttttgtggagactagctagggcttatagtgacatgtgcgagcttactgaggaagtgagcgagaagaagagctatgccctcgatggtaaggaggaagccgaagccgcccttgagaaaggcgatgaaagcgccgactgtcatctctggtacgcagtcctttgcggtcagctagcagagcatgagtcgatccaacgacggatccaatctggtttttcgttcaaagaacatgtggataaggccatcgccctccagccggaaaatccaatggcccacttcttattaggacggtggtgttatcaagtctcacacctgtcttggctggagaagaaaaccgcaacagcactgctggaatctcctctctcagcaactgtggaagatgctctgcagtcgttcctaaaagccgaagaattgcagcccggtttttctaaagccggccgggtgtacatatcgaaatgctatcgggaattgggcaaaaatagcgaagcacgatggtggatgaagttagcgctcgaactgcctgacgtgaccaaggaggacctggctatccagaaggaccttgaagaacttgaagtgattcttagggattag

SEQ ID NO: 187408 - DNA, 1224 bp, synthetic construct
  misc_feature 1..1224: note = Description of Artificial Sequence: Synthetic coding sequence
  source 1..1224: mol_type = other DNA
atgctgctgcgggccgtgcccggcggcgccggcgacgccagcgtgctcccttccctgcccagagaaggccaggaaaaagttctggaccggctggatttcgtgctgaccagtctggtggcccttaggcgtgaggtagaagaactccgtagtagtttgcgaggattggccggcgaaatagtcggagaagttcgatgccatatggaggagaaccaacgagtggcacgcagacgaagatttcccttcgtgcgagaaaggtctgattctaccggtagctcttctgtgtattttaccgcatcctcaggcgcaacatttacggacgcggaatccgaaggaggatacactacagccaatgccgagtcagacaatgaacgggactcagataaggagtctgaagacggcgaagatgaggtcagctgcgaaacggtaaaaatgggacgcaaagactcacttgacctggaagaagaagccgcgtcgggagcttcatccgctctcgaggctggcggttccagcgggttggaagacgtattgccgttactacagcaggccgatgaactgcaccggggagatgaacagggcaagcgagaggggtttcagctcctgctgaataacaagctcgtctacggatctcggcaagacttcttgtggcggctggccagggcttacagtgatatgtgcgaactgacagaggaagtctctgaaaagaaatcctatgcactcgacggtaaggaagaagctgaggctgctctagagaaaggtgacgagtctgccgactgccacctgtggtatgccgtgctctgcggccagctagccgagcatgaatccatacagcggcggatccagagcggcttttccttcaaggagcacgttgacaaagcgatagctcttcagcctgagaatccaatggcacatttcttgctaggcaggtggtgttaccaagtcagccatctatcctggctcgaaaagaaaactgcaaccgctctgttggaatctcctctgtcagcgacggtcgaagacgccttgcaatctttcttgaaggccgaagagttgcagccaggcttctcaaaagcaggacgagtgtacatttcaaagtgttatagggagctcggcaaaaattcagaagcccggtggtggatgaagctggctttggaactgccagacgtgacgaaggaggatctcgctatccagaaggacctggaagagctggaagtgattctccgcgattag

SEQ ID NO: 187409 - DNA, 864 bp, synthetic construct
  misc_feature 1..864: note = Description of Artificial Sequence: Synthetic coding sequence
  source 1..864: mol_type = other DNA
atgagccggctgggcgccctgggcggcgcccgggccggcctgggcctcctgttggggaccgcagcaggacttggatttctatgcctcttgtattcgcagcggtggaagagaacacagaggcacggaagaagtcagtccttacccaactctctagactatacccagacatccgaccccggaagacacgtgatgctgcttcgggcggtgccaggcggcgccggcgatgcctccgtccttccgagcctgccgcgcgaaggacaagaaaaggtgctggacagactggattttgtgctcacgtctctcgtggcattacgtcgagaagtagaggagctgaggtctagccttaggggactcgccggtgaaattgtgggcgaagttaggtgccacatggaggaaaatcagcgggtggcacgaagacggcgcttccccttcgtgagagagaggagtgatagcactggtagttcatccgtctactttacagcctctagtggagccacgtttacagacgcagagagcgaaggtggatacacaactgcaaacgcggagagcgacaacgaacgagattccgacaaagagtccgaagatggtgaagatgaagtgtcctgcgaaaccgtgaaaatgggacggaaagatagtcttgacctggaggaggaggccgcttctggcgcgagcagtgcactggaggcagggggctcaagtggtctggaagatgtgctaccacttctgcagcaggccgatgagttacacagaggtgatgaacaggggaagcgagagggatttcagttgctgctgaataataagctggtgtacgggtcccggcaggacttcctgtggcggctggcccgcgcatattcagatatgtag

SEQ ID NO: 187410 - DNA, 945 bp, synthetic construct
  misc_feature 1..945: note = Description of Artificial Sequence: Synthetic coding sequence
  source 1..945: mol_type = other DNA
atggccctggccgcccggctgtggcggctgctgcccttccggcggggcgccgcgcctggatcacgtctgccggctgggacaagtggtagccgggggcactgtgggccatgtcggtttaggggttttgaggtcatgggaaatccaggcaccttcaaacgcgggctgctgctgagtgctctgagctacctgggctttgagacatatcaggtgatctctcaggccgctgtggttcacgccactgctaaagtagaggagatcctggaacaagccgactatctgtatgaatcaggagaaacagagaaactatatcagcttctaacccaatacaaggaaagcgaggatgctgagctgctgtggcgtctggcccgggcatcccgcgacgtggcgcagctgtcacgaaccagtgaggaagaaaaaaagctgctcgtgtacgaggcactagaatatgcgaagagagcccttgaaaaaaacgaatcctcctttgcgtctcataaatggtatgctatctgtttgtctgatgtgggcgactacgagggcataaaagcaaaaattgccaatgcttacatcatcaaggaacacttcgagaaagctattgagcttaatcccaaagacgccacctccatccatctcatgggcatctggtgttatacattcgccgagatgccctggtaccagcgcagaatcgcaaaaatgctgtttgccaccccccctagctcaacatatgagaaagccctgggctactttcatagagccgaacaggtagaccccaatttctattccaaaaaccttctccttctaggtaagacctacttgaaactgcacaataaaaaactcgccgccttctggctcatgaaagcaaaagattatcctgcccacactgaggaagacaagcaaatccagaccgaagcagcacaactcctgacatcattttctgaaaagaattag

SEQ ID NO: 187411 - DNA, 855 bp, synthetic construct
  misc_feature 1..855: note = Description of Artificial Sequence: Synthetic coding sequence
  source 1..855: mol_type = other DNA
atggccctggccgcccggctgtggcggctgctgcccttccggcggggggcagcacccgggtcaagacttcctgcgggtacttccggctcacgaggccattgcggaccttgcagatttcgtggatttgaagtcatgggtaatcccggcaccttcaaacgcgggctattgctgtctgcattatcttaccttggcttcgagacttatcaagtcatctcccaggctgccgtggtgcacgcgactgctaaggttgaggagatcttggaacaagcagactatctatacgaaagcggagaaaccgaaaagctgtatcagctgctaacccagtataaagaatcagaagatgcggagctcctctggcggctggctcgcgcttcccgggatgtggcacagctgtcgcgcacctcggaggaagaaaaaaaactgctggtatatgaggcgctcgagtacgctaagagggctttagagaaaaatgaaagttcctttgccagccacaaaaaagccatcgaattgaaccccaaagacgccacaagcatccacctgatgggtatttggtgttatacctttgccgagatgccatggtatcaaaggaggatcgccaaaatgctgttcgccactcccccgagctcgacctacgaaaaagctctgggctactttcaccgcgctgaacaggtggacccaaatttttactccaagaacctcctgctgttggggaagacctatctgaaactgcacaataagaaactcgccgcgttctggctgatgaaggctaaggattatcccgcccacaccgaggaggataagcagatccagactgaggcagcccaattattaacatccttttcagaaaagaactag

SEQ ID NO: 187412 - DNA, 3540 bp, synthetic construct
  misc_feature 1..3540: note = Description of Artificial Sequence: Synthetic coding sequence
  source 1..3540: mol_type = other DNA
atggcccggcggagccagagcagcagccagggcgacaaccccctggcgcccggatacctgccaccccactataaggagtactatcggctggctgtggatgccctcgctgaaggcggttccgaggcgtacagccgctttctggctaccgagggggcccctgactttctgtgccctgaggagctggagcacgtgagccggcacctgaggccacctcaatacgtgactcgagagccacctgagggctcactgttggacgttgatatggacggttcatcgggtacttactggcctgtgaactctgatcaggccgtgcccgagttggacctgggctggcccttaaccttcggttttcagggcacagaggtgaccactcttgtccaaccccctcctcccgattccccatctatcaaagacgaggccagaaggatgattaggtcagcacaacaggtcgtcgctgtggtgatggacatgtttacagatgttgacttactttcagaagtgctggaagccgccgcaaggcgcgtccctgtgtacatattgctcgacgaaatgaacgcccagcatttcctggacatggccgataagtgtcgagtgaaccttcagcacgtggatttcctacgggttcgcaccgtggcgggccctacatattactgcagaacgggcaaaagtttcaaaggacatgtgaaggaaaagtttctgcttgtcgactgtgctgttgttatgagcgggtcttactccttcatgtggtccttcgaaaagatacaccgcagcttagcacatgtattccagggggagctggtgtcctctttcgatgaggaattccgaattctatttgcccaatcggagcccctggtgccatccgccgcagccctggcaaggatggacgcttacgccctagccccatacgccggcgcaggacccctcgtaggtgtccctggcgtgggggcccccacaccgtttagctttcctaaacgcgcccacctgttgttccctccaccaagagaggaagggctgggattcccttccttcctggatcctgaccggcactttctgtctgccttcaggagagaggaaccgccacgaatgccaggtggtgctctggagccacacgcgggactgcgacctttgtccagacgtttggaagccgaagctggacccgctggagagctggccggagctagaggctttttccaggcccgacacttagagatggacgctttcaagcgtcactccttcgcaaccgagggcgcaggtgccgttgaaaacttcgccgctgcccgccaagtttctaggcaaacatttctgtcacatggggatgacttccgcttccagacgtcccactttcaccgcgatcagctgtaccagcagcaatatcagtgggatccccagctgacccccgcgaggcctcagggcctctttgagaaactcagaggagggagggcaggattcgcagacccggatgacttcaccttgggggccgggccaagattccccgagctaggacctgacggtcaccaaagactcgactacgtgccaagttcagccagccgcgaggtgcggcatgggagtgatcccgcgttcgcgccagggcccagaggcttggaaccttctggtgccccacggcccaacctgacacaacgatttccttgccaggcagccgcaagacctggaccagatcccgcccctgaggcagagccagaaaggcgtgggggtccagaaggtcgtgccggtctgagaaggtggcggctggccagctatctgtctggatgtcacggagaggacggtggcgacgacggtctgcccgcccccatggaggctgaggcttatgaggacgacgttcttgccccggggggcagggctccagccggagatctcctgccatccgcgtttagagtccccgccgcctttcccacaaaagtccccgtgccgggtccagggtccggcgggaatggcccagagcgggaagggcccgaagaaccaggattagctaagcaagattctttccgatcacggctcaatccgctggtgcagcgcagcagcaggctgagatcctctctgatattctcaacctcacaggccgagggagccgccggggccgccgccgctacagaaaaagtgcagctgctgcataaagagcaaacagtgagcgaaacgttgggtccaggcggagaggcagtgcggtccgctgcatcaaccaaagtcgcagagctgttggaaaagtacaaagggcccgcccgggacccaggcgggggcgctggcgcaatcaccgtggcttcacacagtaaagccgtggtgtctcaggcctggcgagaagaggtcgctgctcctggtgcagtgggtggagaacggaggagcctggagagctgcctgctcgatctacgcgactcatttgcgcagcagttgcatcaagaggcagaacggcagccaggggcagcatcactcactgccgcacagctactggatacactgggaaggagtggcagcgatagactgcctagccggttcctgagcgcacagagtcacagcacctcaccccagggacttgactctccactacctctcgaaggcagcggggcacaccaggtgctccataacgagagtaagggctctcctacatctgcatatcctgaaagaaagggctcccccactccaggcttctccactcggagaggatcacctaccactggattcattgagcagaagggaagtccaacatcggcctaccctgaacgcagagggtccccagtgcctcctgtgccagaacgcaggagttcccctgtgcccccggtaccagaaaggagggggagtctgaccctcactatcagcggagagagcccgaaggctgggcctgctgaagaggggccctcgggcccaatggaagtgcttcgcaaagggagtctgagactgcgccagcttttatcccccaagggcgagcgcaggatggaagatgagggggggttccccgtcccgcaggagaacggccagccggaaagcccacgacgtctgtcattgggccagggcgattccacggaagcggccacggaggagaggggtccgcgtgccaggctatcctctgccacagccaatgcactctactcctcgaacctgcgtgacgacactaaggccatcttagagcagatttccgcgcatggccagaagcaccgggccgttcccgcgccctctcctggtcccacacataatagtccagagctcgggcggcctcccgctgccggcgttctggctcctgatatgtcggataaagacaagtgttcagcaatcttcaggtcagactccctcgggacacagggacgcctgtcacgcactctccccgcaagcgccgaggagcgggaccgattgctccggcgaatggagtccatgcgcaaggagaagcgagtttattccagatttgaagttttctgcaagaaggaggaggcaagctctccgggcgcaggggaggggcctgcagaggaaggcactagggattccaaggttggaaagttcgttccaaaaatcctcggcaccttcaagtcaaaaaaatag

SEQ ID NO: 187413 - DNA, 933 bp, synthetic construct
  misc_feature 1..933: note = Description of Artificial Sequence: Synthetic coding sequence
  source 1..933: mol_type = other DNA
atgggcaaccaggtggagaagctgacccacctgagctacaaggaggttccaactgcagatcctacaggggttgaccgagatgacgggccgcggattggggtatcttacattttcagcaacgatgacgaggatgtcgaaccccagcctcccccacagggacctgacggaggagggcttcctgacggcggcgacggaccgcccccaccccaaccccagccctacgaccctcggctgcacgaagtagagtgctctgtgttctaccgggatgagtgcatttaccagaagtcatttgctccagggtcagcggccctcagcacatacacaccggaaaatctcctgaacaaatgcaaacctggggacttggtagaattcgtatctcaagctcagtatccgcattgggccgtgtatgtgggtaatttccaagtggtgcacttgcatagattggaagtaatcaatagttttcttacagacgctagccaagggcggagaggcagggtggtaaacgatttataccggtacaagccacttagtagcagtgccgtggtccggaacgcactcgctcacgttggagccaaagagcgggaactttcatggcggaacagcgaatctttcgccgcatggtgtcgatatggcaagagggaattcaaaatcgggggcgaattgaggattggaaaacagccataccggctgcaaatccagctgagtgctcaacgttcgcacactttggaatttcagtctttggaggacctgattatggaaaagcgccgcaacgatcaaataggtcgcgctgccgtcttacaggagctggccacccacttgcaccccgctgaacccgaggagggagatagcaatgttgcccggactacaccgcctcctggacgccccccggccccaagttcggaggaggaagacggcgaggcagtggcccactag

SEQ ID NO: 187414 - DNA, 999 bp, synthetic construct
  misc_feature 1..999: note = Description of Artificial Sequence: Synthetic coding sequence
  source 1..999: mol_type = other DNA
atggagcccgtgggccggaagcggagccggaaggccgccaaggcccaactggaggctcaagtaacagccgcccagggcgccactaaagaggggtccgggatcgccagcaactttcccggtcagcccacaatggagcctgtgggacgcaaacgttccagaaaggcagctaaagcccaactcgaggctcaagtgagagcagcccctgctaaaaagcacaccgggaaagaccccgtgagggatgagtgtgaggagcgcaatccgtttacggagacgagagaagaagatgtgacagacgagcatggcgagcgcgagccttttgctgaaaaggacgagcacaccgggatccacaccatgaaactggagcacattgctgccgatataaaaaagggactcgcagcaaaacgtgaaatgatcaagatagataaagccgcctatagaaagacgaagaatactattgagagggccctgaagaaaaagcagcttaagcgccagaagagagattatagacacactaggaagttgctgaatgtgttaaaggagtacatagcagagaagcagaaggatgacgaggccgaggaagcggaagcggccgcagccgccgctgaagccgcagccgcggccgaggctgcagccgcagccgctgaggtgattgttgtggaggatgaggaggaggaagagaaagaggaggaagaggagaaggaggaggaggaggaagagggagaggaagaggggggtggcgaagaaggagaggagggcggcggcgggggtgagggcgaagaaactgaagaggaggaagaggaggaggaggaggaagaagaggaggagcagatcaaggcattccaagagaagcagaagaggtggcagcagcctaccggggtgagatcttggcggcttcgggaaatgaagcccctcctggagcaactgctcaaggcagcgaaagacaccaaggacaattactgcatcataagctcctctgaggaatccgagctagacaattag

SEQ ID NO: 187415 - DNA, 999 bp, synthetic construct
  misc_feature 1..999: note = Description of Artificial Sequence: Synthetic coding sequence
  source 1..999: mol_type = other DNA
atggagcccgtgggccggaagcggagccggaaggccgccaaggcccagcttgaggcccaggtcacagcagctcagggcgctactaaagaggggagcggtatcgcgtccaattttcccggacagccgaccatggagcccgtgggaaggaaaagatcccggaaggctgctaaggcacaattggaggctcaagtaagggcggcacccgctaaaaagcacaccggtaaagatcctgtccgggacgaatgtgaggagcggaacccattcactgaaacaagagaagaagacgttaccgatgagcatggagaacgtgagccttttgcggagaaggacgaacatacaggcattcatactatgaagttggaacatattgccgctgatatcaaaaaggggcttgccgccaagagagagatgattaagattgataaagccgcttaccggaagactaagaacacaatagagagggcactgaagaagaagcagctgaagagacagaaacgggattatagacatacaaggaaattgttgaacgtgctgaaggagtacatcgcggagaagcaaaaagatgacgaggccgaagaggcagaagccgctgctgcagctgcggaagctgccgccgccgctgaggcagcagccgctgccgcagaagttatagtcgttgaagatgaagaagaggaggagaaagaagaggaggaagaaaaggaggaggaagaggaagagggtgaggaggaaggagggggtgaggaaggggaagaaggggggggcggaggggagggtgaggaaaccgaagaggaggaagaggaagaggaagaggaagaggaagaagagcagatcaaggctttccaggaaaagcagaaaagatggcagcagcccacaggggtgaggtcttggagactcagggaaatgaagcctttgctggaacagttgcttaaggctgcgaaggacactaaagataactactgtatcatttcctctagtgaagagagcgaactcgataactag

SEQ ID NO: 187416 - DNA, 561 bp, synthetic construct
  misc_feature 1..561: note = Description of Artificial Sequence: Synthetic coding sequence
  source 1..561: mol_type = other DNA
atggccgcctggggcaagaagcacgccggcaaggaccccgtgcgggatgagtgtgaagagcggaacagattcaccgagaccagggaagaagacgtgaccgatgaacatggtgagcgcgaacctttcgctgaaaccgatgagcatactggcgccaacactaagaaacccgaggatacagcagaggacctcacagccaaaagaaagcgcatgaaaatggacaagacttgcagtaagactaaaaacaaatccaagcacgctctcagaaaaaagcaactgaagaggcagaagagagattatatccactccctgaaattgctgaatgtgcttgaagaatacattaccgacgagcagaaggaggaagaggaagaggaaggagaagaagaagaactgataagaatcttccaagaacagcagaagaagtggcagcagtatcgctcagtgaggcgcgaaagactgaaggagatgaaactcctcagagaccaatttgtcaaggccctggaagatttcgaagacctatgcgatagggtgttttccgatgaagattctgaattggataactag

SEQ ID NO: 187417 - DNA, 681 bp, synthetic construct
  misc_feature 1..681: note = Description of Artificial Sequence: Synthetic coding sequence
  source 1..681: mol_type = other DNA
atgcccggcttcctgagcttcctgagcgtgagcctgcggagccccgggtccggcatcgcatcatcatttccgggtcagccagccaccgatcctgttggtcggcgggccgctaaagctcagttagaggcccagttcatggccgcttggggtaagaagcacgccgggaaggatcccgtgcgtgacgaatgcgaggagcggaatcggttcacggaaacacgggaggaggatgtgacagacgagcatggtgaacgggagccatttgctgagacagatgagcacaccggcgcaaacacaaagaagccagaggacactgccgtgggtgccaataactttaaaaactacccggtacacatcggcgtgagttctgagcaacacattttattggattgctctctcagcagacagaagagagactacatccatagcttaaaactcctgaacgtcctggaggaatatataaccgacgagcagaaagaggaagaagaggaagagggagaagaggaggagctcattagaatattccaagagcagcagaagaagtggcaacagtaccgcagcgtgcggcgagaacggctaaaggagatgaagctgcttcgggaccagttcgtgaaggcccttgaggattttgaagacctgtgtgaccgggtcttcagtgacgaagacagcgaactggataactag

SEQ ID NO: 187418 - DNA, 561 bp, synthetic construct
  misc_feature 1..561: note = Description of Artificial Sequence: Synthetic coding sequence
  source 1..561: mol_type = other DNA
atggccgcctggggcaagaagcacgccggcaaggaccccgtgcgggatgagtgtgaagaaaggaacagatttaccgagacacgcgaggaagacgtgactgacgagcacggcgagcgggagcccttcgccgaaaccgatgagcacacgggcgcgaataccaagaaaccagaggacacagcagaagacctgactgccaagcgcaagcgcatgaaaatggacaaaacctgctccaaaactaagaacaaaagcaagcacgccctgcggaagaaacagctcaaacggcagaagcgtgattacatacactctttgaagctcttgaatgttttagaagagtatattaccgatgagcaaaaggaagaggaagaggaggagggggaggaagaggaactgattcgtatttttcaggaacaacagaaaaaatggcagcagtataggagcgtgagacgggaacggctaaaggaaatgaaactcctccgtgaccagtttgtgaaggctcttgaggattttgaggatctgtgcgatcgagtcttctcagacgaggactcagaacttgacaattag

SEQ ID NO: 187419 - DNA, 501 bp, synthetic construct
  misc_feature 1..501: note = Description of Artificial Sequence: Synthetic coding sequence
  source 1..501: mol_type = other DNA
atggccgccaaggaccagctggaggtgcaggtgatggccgcccaggaaatggagctcgcaggaaaagatcctgtcagtcacgagcatgaggaacgcaagccggtgacagagacgaaggaaggggatgtgaccgatgaacatggtgaaagaggttcattcgctgagactgacgagcacactggggtagacacaaaggaactcgaggacatcgccgcagatattaaggagcatctcgctgcaaaacgcaagcggattgaaaaaatcgcaaaagcctgtagtgagatcaagaacagaattaagaatgtactacgcactacccagctcaagcgacaaaaacgtgactataggatcagtctaaagctccccaatgtgttagaggaattcattaccgacgaacaaaaggacgaggagggcgatggcgaaaaggaagagcaaattaagattttccaggagcaacaaaagaggtggcaacaagacgggaaggggaccgaaagggactag

SEQ ID NO: 187420 - DNA, 501 bp, synthetic construct
  misc_feature 1..501: note = Description of Artificial Sequence: Synthetic coding sequence
  source 1..501: mol_type = other DNA
atggccgccaaggaccagctggaggtgcaggtgatggccgcccaggagatggagctcgcaggcaaagacccggttagtcacgaacacgaagagcggaagcctgtgactgagacgaaagagggcgacgttactgatgagcatggcgaaaggggatcttttgccgagacagacgaacacactggggtggatacaaaggagctggaggatatagctgccgacataaaggagcacttggccgccaagaggaagcggatagagaagattgctaaagcctgctctgaaattaagaacagaataaaaaatgtcctacgtactacccaactgaagcgccagaaacgcgattaccgcatctcacttaagcttcctaacgtattggaggagtttatcacagacgagcagaaggatgaggagggggacggcgaaaaggaggagcagattaagattttccaggagcagcagaagcgctggcagcaggacggcaagggcacagaacgggactag

SEQ ID NO: 187421 - DNA, 381 bp, synthetic construct
  misc_feature 1..381: note = Description of Artificial Sequence: Synthetic coding sequence
  source 1..381: mol_type = other DNA
tgagacgtgaccgacgagcacggcgagcggggcagcttcgccgagaccgacgagcacacaggggtcgacacaaaggagctggaagatatagccgccgatattaaggagcacctcgctgccaaacgaaagcggattgagaaaatcgccaaagcctgcagtgaaatcaaaaaccggatcaaaaatgttctgcgcacaacccaactcaaacggcagaaaagggactatcgaattagtctgaagctgccaaacgtcctggaagagtttattacagatgaacaaaaggatgaggaaggggacggggaaaaggaggagcaaataaagatttttcaggaacagcagaagaggtggcaacaggatggtaaaggcaccgagagggattag

SEQ ID NO: 187422 - DNA, 387 bp, synthetic construct
  misc_feature 1..387: note = Description of Artificial Sequence: Synthetic coding sequence
  source 1..387: mol_type = other DNA
atggccgccaaggaccagctggaggtgcaggtgatggccgcccaggagatggagctggctgggaaggatccagtatctcacgagcatgaggaacgtaagccagtcaccgaaacaaaggagggcgatgtgaccgatgaacacggcgaaagggggtcttttgccgagacagacgaacacacaggcgtggataccaaagagctggaggatatcgctgggatgttctacgagctgtttgtcgtgtatgaaaactgcttccagccatacaatccatattcacgcttgtacgagctggtggacgataagaccgtgctaaacgcttttttttcctatatcgccttcaatgtgatctgtttaatcatattcctgacttatttttttaactgctag

SEQ ID NO: 187423 - DNA, 1395 bp, synthetic construct
  misc_feature 1..1395: note = Description of Artificial Sequence: Synthetic coding sequence
  source 1..1395: mol_type = other DNA
atgatggcccggcgggaccccaagcccggcgccaagcggctggtgagggcacagactctgcagaagcaacgccgcgccccagtgggcccgcgtgcaccacctcccgacgaggaagatcctagattgaagtgcaagaactgtgaagccttcggtcacacagcacggtctacacgctgtccaatgaaatgttggaaagctgctcttgtgccgcccaacttcggcgagaaggagggcaaagagaatttgaagccctggaagccacaggtcgaagctaatcctggacccctcaacaaggataagggtgagaaggaggagaggcccaggccacaggatccacagagaaaagccctgcttcacattttctcgcgcaagccccctgagaagcccctgcccaatcagaagggcagtaccgagtcatccgattatctgagagtggcatccggacccatgcctgtgcacacaactagcaagcggccccgcgtcgaccccgttctgagtgatcgctcagccaccgagatgtcggatagaggaagcgtcctcgcaagcctgtcccctctgagaaaggcctccctgagttcctcctcctcactcgggccaaaggaacggcagaccggcgctgcggccgatataccccaaaccgctgtacgacatcaaggaccagaacctctgctagttgtgaagcccacccattccagccccgccggcggctgtagggaagtgccgcaggcagccagcaagactcatgggcttctacaagccgtgtcccctcaagcgcaggataagaggccagcagtaacatcacagccgtgccctcccgctgccactcactctttgggactgggctcaaacttgagcttcggcccaggtgcgaagcgcagcgccccagcacctatccaggcttgcttgaacttccccaagaagccaagactcggtcctttccagatacctgaatctgcgatccagggcggcgaactgggagccccggagaacttacagccccccccggcggccactgaactcggtccgaggacatctcctcaaacaggaacccggacaccagcgcaggtactcagcggtgatcggcagccccctcattctagaccgtgcctgcctacagctcaggcatgcacgatgtctcatcacccagccgcatcccatgatggtgcccagccgttgcgcgtgctctttcgccgtttggagaatggccgctggagttcgagcctgctgactgcaccatcttttcattccccggagaaacctggtgctttcttggcccagagtccgcacgtgagtgaaaaatcagagggtccttgtgtgagggtccccccctcagtgctgtacgaagatctgcaggtaccatcttcttccgaggattccgactcagatttggagtag

SEQ ID NO: 187424 - DNA, 45 bp, synthetic construct
  misc_feature 1..45: note = Description of Artificial Sequence: Synthetic coding sequence
  source 1..45: mol_type = other DNA
atgatggcccggcgggaccccaagcccggcgccaagcggctgtag

SEQ ID NO: 187425 - DNA, 1395 bp, synthetic construct
  misc_feature 1..1395: note = Description of Artificial Sequence: Synthetic coding sequence
  source 1..1395: mol_type = other DNA
atgatggcccggcgggaccccaagcccggcgccaagcggctggtgagagcccagactctgcaaaaacagcggagggccccagtcggccccagggccccacctcctgacgaggaggatccacgtctgaagtgtaaaaactgcgaggcctttggccacacagcccggtctacacgctgtccaatgaagtgttggaaggctgcattggtgccgccaaatttcggcgagaaagaggggaaggaaaatctcaagccctggaagccccaagtcgaggctaacccaggacccctcaataaggataagggggaaaaagaagaacggccacgcccccaggatccccagcgtaaagctctcctccacatctttagcaggaagccacctgaaaaacctctgccgaaccagaaaggtagtaccgaatccagcgattacttgagggtcgcttccgggccgatgcccgtgcatactacctctaaaagaccacgggtggaccctgtcctgagtgataggagcgccactgaaatgagtgacagagggtcagtgctggcctcattaagtcctctgaggaaggcctctctctcgtccagcagttctctgggccccaaggaaagacaaactggtgctgcagcggatattccgcaaacggccgtccgtcaccaggggccagagccactcctggtggtcaaaccaacgcattcttcacccgccggtggatgtcgcgaggtgccccaggcagcttctaagacacatggtctcttacaggccgtatcaccacaggcacaggataaacggcccgcagtcacatcccagccctgccctcccgcagcgacccatagtctcgggctggggtctaatctatccttcggccccggagccaaacgctccgctccagcacccattcaggcatgtctcaatttccctaaaaaaccacgcctggggccgttccagattcctgagtctgcaatccagggcggcgaactgggtgctccagaaaatctgcagcctccacctgctgccaccgaacttgggccccgcacaagtccacaaaccggcacccgcacccccgctcaggtactctcaggcgaccgacagccgccacattccaggccttgtttgcctaccgctcaggcatgtacaatgtcccaccatcccgccgccagccacgatggggcccaacccctcagagtcttatttagacgattggagaacggccgttggtcctcctctctacttacagcgcctagttttcacagtcccgaaaagccaggggcattcctggcacagtctccccatgtttctgagaaatccgaggggccgtgcgtccgagtcccccccagtgtgttgtacgaggacttgcaggtgccttcctcttctgaggacagcgattcggatctggaatag

SEQ ID NO: 187426 - DNA, 1143 bp, synthetic construct
  misc_feature 1..1143: note = Description of Artificial Sequence: Synthetic coding sequence
  source 1..1143: mol_type = other DNA
atggccgtgaccgaggccagcctgctgcggcagtgccccctgctgcttccccaaaaccgctccaaaactgtctatgaggggttcatatccgcgcaggggcgcgacttccacctgcggatcgtgcttcccgaggatctgcaactaaagaacgcccggctgctgtgttcttggcagctgagaacaattctttccggatatcatcggatagtccaacagagaatgcagcacagccccgacctaatgtcgttcatgatggaactaaagatgctactggaagttgccctcaagaataggcaagagctgtacgccctgcctccccctcctcagttctactcatcactgattgaggagattggcactctggggtgggataaactggtctatgccgatacgtgtttctcaaccatcaagcttaaggccgaggacgccagcgggcgggagcatctgattacgttaaagctgaaagcaaaatatcctgccgaatcacccgactacttcgtggactttcccgtgcccttttgtgcctcctggacccctcaagtcaacagcccacagtccagcctcatcagcatctattcacagttcctggccgccattgagtctctcaaagctttttgggatgtcatggacgaaattgatgaaaaaacttgggtgctcgagccagagaagccccctcggtccgctaccgcccggagaattgccctcgggaacaacgtgagcattaatattgaagtagaccctcgccacccaacaatgttacccgagtgcttttttctgggcgccgaccacgttgtcaaacctctcggcataaaactttctaggaacatccatctttgggaccccgaaaactccgttttgcagaatctgaaggacgttttagagatcgatttcccagcacgggcaatcctggagaagtccgacttcactatggattgtggaatctgctacgcatatcaactggatggcaccattcccgaccaggtgtgcgataatagccagtgtggtcagccattccaccagatctgtctatacgaatggttacggggcctgctgacctccaggcaaagttttaatatcatctttggagagtgcccgtactgttcgaagcccattactctcaaaatgagcgggaggaagcactag

SEQ ID NO: 187427 - DNA, 2580 bp, synthetic construct
  misc_feature 1..2580: note = Description of Artificial Sequence: Synthetic coding sequence
  source 1..2580: mol_type = other DNA
atgaccagcaagcaggccatgagcagcaacgagcaggagcggctgctctgctataacggcgaggtactggtgttccagctaagtaagggaaactttgccgacaaggagccgaccaagacacccatactgcacgtgcgccgcatggtgttcgataggggaacgaaggtcttcgtgcaaaagagtactgggttttttaccataaaggaggagaactcacaccttaagatcatgtgctgtaattgcgtttcagactttagaacgggcatcaatctcccatacatcgtcattgagaaaaataaaaaaaataatgtgttcgaatatttcctcctaattctgcattccactaataagtttgagatgaggctgagctttaagctcgggtatgagatgaaggatgggctccgtgtcttaaacggtccccttattctctggcgtcatgtgaaggcctttttctttattagcagtcaaaccggaaaggttgtatcagtgagtggcaatttttcttccattcagtgggccggcgaaatcgagaacctggggatggtccttcttgggctaaaagagtgctgtctgagtgaagaggaatgtacacaggagcccagcaaaagcgactacgccatctggaatacaaaattttgtgtgtacagcctggaatcacaagaagtattgagtgatatctacattattccccctgcctatagctctgtggttacatatgtgcatatctgcgccacagagatcatcaagaatcagcttcgcatcagccttattgcactcactcggaaaaaccagctgatctcattccagaacgggactccgaaaaacgtctgccagctgccatttggcgacccttgtgccgtgcaactgatggactccggcggtggaaacctgttctttgttgtgagctttatctctaacaatgcatgtgctgtgtggaaagagagtttccaagtggctgccaaatgggaaaagctatcattggtattaatcgacgacttcattggttcaggcaccgagcaggttctgctgcttttcaaggactctcttaattctgattgcctcacatccttcaagattacagatctaggaaaaatcaattactcatccgaaccctccgactgtaatgaagatgacctctttgaggataagcaggaaaatcggtacctcgtggttccacctctagaaactggtcttaaggtgtgtttctcatccttcagggaacttcggcagcatttgttgcttaaggagaagataatttcgaaaagctacaaggctctcattaacctggttcaaggaaaggacgataatacctcctccgccgaggaaaaggagtgccttgtgccactgtgcggcgaggaggaaaattcagttcacatcctagacgaaaaactgagtgacaacttccaggactctgagcagctcgtcgaaaaaatctggtatcgagtaatagatgactccctggtggtgggcgtcaaaacaacttctagcttaaaactgtcactgaacgatgtaactctgtccctcctaatggaccaagctcacgattcccgcttcagactcctgaagtgtcagaatcgggtgatcaagctgtccaccaacccttttcctgctccctatctgatgccctgtgagatcgggttggaggccaagcgagtgacattgaccccagatagcaaaaaagaagagagctttgtttgcgaacacccctccaaaaaagaatgtgtccagatcatcacagccgtgacctccctgtcacccctgctgaccttttctaagttctgttgtacagtgcttctccagattatggagcgcgaaagtggaaattgcccgaaagaccgttatgtggtgtgcggccgcgtgttcctgagcctggaggatctttcaacaggcaagtatctcctgacgtttccaaaaaagaaacccatcgaacacatggaagacctgttcgcgctgctggccgcctttcataagagctgtttccagattaccagccccggctatgcgctgaactccatgaaggtgtggctcttggagcatatgaagtgcgagatcataaaggagttcccagaggtctatttttgcgagcgacccggaagcttttacggtactctattcacttggaaacaacgcacacccttcgaggggatcttgattatctattctcgcaatcaaaccgtgatgtttcagtgtcttcacaatctgattaggatccttcccatcaattgctttctgaagaacctcaagtcgggatcggaaaacttcctgatcgataatatggcattcacgctagagaaagaattagttacactgtctagcctgagctccgccatagccaaacatgagagcaactttatgcagcggtgtgaagtgtcaaagggaaaaagctctgtggttgcggccgccctgtcagatcgaagggaaaacattcatccgtacagaaaagaactccagagggaaaagaagaaaatgctgcaaaccaatcttaaggtcagcggggctctataccgagagattacactgaaggtggccgaggtgcagctgaaatcagatttcgccgctcagaagctcagcaacctgtag

SEQ ID NO: 187428 - DNA, 2580 bp, synthetic construct
  misc_feature 1..2580: note = Description of Artificial Sequence: Synthetic coding sequence
  source 1..2580: mol_type = other DNA
atgaccagcaagcaggccatgagcagcaacgagcaggagcggctgctgtgctataatggcgaggtcctggtgtttcagctgagcaaagggaatttcgccgataaggagccgactaagactcctattttacacgttagacgaatggttttcgacaggggcaccaaagtgtttgtgcagaagagcactgggttctttacaatcaaagaggaaaattcccacctgaagataatgtgctgtaattgcgtaagcgacttccgaacagggataaatctcccttacatcgttattgagaaaaacaagaagaataacgtttttgagtactttcttctgatactgcattctacgaacaaatttgaaatgcgcctaagttttaaattgggatacgaaatgaaagacggcctaagggtgttgaacggtcctctgatcctgtggagacatgtcaaggcttttttctttatttcttcgcaaactgggaaggttgtgtcagtgagtggaaatttctcttccattcagtgggctggtgagatcgagaatctgggaatggtcctcctgggactcaaagagtgctgtctcagcgaagaagaatgtacacaagagccgtccaagtctgattatgccatctggaatacaaagttctgcgtgtacagcctcgaaagtcaagaagttcttagcgatatctacattataccccctgcctacagctccgttgtgacgtacgttcacatctgtgctaccgagatcataaaaaaccaattgaggattagcttgattgcattgactaggaaaaatcagctgattagttttcaaaatggaacacctaagaacgtatgtcagttaccctttggggacccatgcgcagtgcagctcatggatagcggcgggggcaatctgtttttcgtcgtttccttcattagcaacaatgcctgcgccgtctggaaagagtccttccaggtggcagcaaagtgggagaagcttagcttggttctgattgacgattttattggttccggcaccgagcaggtccttctgctgttcaaggatagcttgaatagcgattgccttacctccttcaagattactgatctcgggaagataaactactcatctgagccgagcgattgtaacgaagacgacctgttcgaggacaagcaggagaatcgatacctggtggtcccaccactggagaccgggctgaaagtctgcttttcatcctttcgggaacttcgtcaacatctgttgctgaaggaaaagatcatcagtaagtcttacaaggcgcttatcaatctcgtgcaaggtaaggacgataatacttcttctgcagaagaaaaagaatgccttgtgcctctgtgtggggaggaggaaaatagtgtccatattctggacgaaaagctctctgacaattttcaggatagcgagcaacttgtcgaaaagatatggtacagagttatagacgatagccttgtcgtgggggtgaaaacgacaagctctttgaagctcagcctcaacgatgttacactctctctgttaatggatcaggcccacgactcaaggttcagactcctgaagtgtcagaaccgggtaattaaactgagcactaatccatttccagccccttacctcatgccctgtgaaatcgggctggaggccaagcgggtcacattaacccctgattcgaagaaggaagaaagttttgtgtgtgagcacccttctaaaaaggaatgtgtacagatcatcaccgccgtgaccagtctgtctcctctcttgacttttagcaaattctgctgtaccgtactgctgcagatcatggagcgcgagagtggcaattgtccgaaggacaggtacgtcgtgtgcggtagggttttcctgtcacttgaagatctgtctactgggaagtatctgctaacctttccgaaaaagaagcccatagagcacatggaggatctctttgccctgctggcagcttttcacaagagttgtttccagatcacaagccctgggtacgctcttaattctatgaaggtctggctgcttgagcatatgaagtgcgaaataattaaggaatttcctgaggtgtatttctgcgaaaggcccggttcattctacggcactctttttacatggaaacagaggacccctttcgagggcatcctcattatctactccaggaaccagacggtgatgttccagtgtctgcataacctgatccggatcttgcctataaattgtttcctcaagaacctgaagagcggatcagagaacttcctgattgacaatatggcattcactctggaaaaagagcttgtcaccctgtctagtctcagctccgccattgccaaacatgagtccaattttatgcagagatgcgaagtgtcaaaaggtaagtcctcagtggtcgccgctgccctaagtgacaggcgggagaatatccacccataccggaaggaactacagcgagagaagaagaaaatgctgcagacaaatctgaaagtgtccggagccctatatcgggaaataaccttaaaagtggcagaagtccagcttaagtcggatttcgccgcccagaaactttctaatctgtag

SEQ ID NO: 187429 - DNA, 2457 bp, synthetic construct
  misc_feature 1..2457: note = Description of Artificial Sequence: Synthetic coding sequence
  source 1..2457: mol_type = other DNA
atgaccagcaagcaggccatgagcagcaacgagcaggagcggctgttgtgctataacggggaagtgctcgtttttcaactgtcgaaaggcaatttcgccgataaggaacccactaagactccgattctgcatgtgcgtcgtatggtatttgatagaggaacgaaagtgttcgtccaaaagtcaaccggctttttcaccataaaggaagagaacagccacctgaaaattatgtgctgtaattgcgtgtctgactttcgaactggcatcaatctgccttacatagtcatcgaaaagaacaagaaaaacaacgtcttcgagtatttcctgcttatccttcactccacaaacaaattcgaaatgcgtctatcctttaaactcggttatgagatgaaggacggactaagagtccttaatgggccgctgattctttggcgccatgtgaaagcattcttctttatctccagccaaaccggtaaagttgtatcggtctcagggaacttctcgtctatccagtgggcaggtgagattgagaatttaggcatggtattactgggtttaaaggagtgttgtttgtccgaagaggagtgcacccaagagccatctaaaagtgactacgcaatctggaacactaagttttgcgtctattccctcgagtcccaagaagttctgtccgatatttacatcattccacctgcctatagcagcgtagtgacatacgtgcacatctgcgcaacggagatcataaaaaaccagttgcggataagcctcatagctctcacacgcaagaaccaactgatttcgtttcagaacgggacacccaaaaacgtctgccagctgccttttggggatccctgcgcagtccaactgatggactcaggtggggggaaccttttctttgtggttagttttatctctaataatgcttgcgccgtgtggaaagaatccttccaggtcgccgcaaagtgggagaaactgtctttggtgctaattgatgactttattggcagcggtacagaacaggtactgctgctcttcaaagacagtctgaatagcgattgtctgacttcgttcaaaataaccgacctgggaaaaatcaattacagctcagagccttcagactgtaatgaggacgatctctttgaggacaagcaagagaaccgatacctcgtcgttccaccactcgaaaccggcttgaaagtatgtttctcgtcctttagggagctgagacagcacttactgctcaaagagaagattatatccaaatcatacaaagctctgatcaacctggtgcagggcaaggacgataacacctcttcagccgaggaaaaggaatgtctggtacctctgtgtggagaggaagagaacagtgtgcacattttggacgagaaattgtcagacaattttcaggactcagagcagctggtggaaaagatctggtacagagttattgatgactcactcgttgtgggtgtaaagacaacttcttctctgaagctgtctttgaacgacgtgacactcagcttgctaatggaccaggcccacgactcccgtttcaggctcttgaagtgccagaatagagtaattaaactttcaactaatccctttcctgccccctatctgatgccttgcgagatcggcctggaggccaaacgggtaaccctcacacccgattccaaaaaggaagagtcgtttgtttgtgagcatcccagcaaaaaggagtgcgtacaaataattacagcagtgacctccctgtctccactattgaccttctctaagttttgttgtactgtgctgctgcagatcatggaaagagagagcggcaactgtccaaaggacaggtatgtggtgtgtggcagagtgtttctgagcttagaggacctgtctaccggaaaatatctactcacttttcctaagaagaaacccatcgagcatatggaagatctgtttgctttactagccgcatttcacaaatcctgtttccagatcacaagcccgggctatgctctcaactcaatgaaagtgtggcttcttgaacacatgaagtgcgaaatcatcaaggagttcccggaggtctacttttgcgaacgtcctggatccttctacggaacgctgttcacctggaagcagcggacccccttcgaaggcattctcattatctatagccgcaatcaaaccgtgatgttccagtgcctgcacaatctgattaggattcttccaatcaattgcttcctgaagaaccttaaatctggaagcgagaattttctgattgataacatggcgtttactcttgagaaggagctcgtcacactctctagcctctcgtccgcaatcgctaagcacgagtcaaactttatgcagagatgcgaggtgagcaaagggaagtcctccgtggtggccgcggccctgtcggaccgccgcgaaaacatccatccgtaccgcaaagagctgcagaggtag

SEQ ID NO: 187430 - DNA, 1677 bp, synthetic construct
  misc_feature 1..1677: note = Description of Artificial Sequence: Synthetic coding sequence
  source 1..1677: mol_type = other DNA
atggcccaggacagcgtggacctgagctgcgactaccagttctggatgcagaagttaagcgtgtgggaccaggcttcaaccctggaaacgcagcaagatacgtgtcttcacgtcgctcaattccaggagtttcttcgaaagatgtacgaggctctgaaagagatggatagcaacaccgtgattgaaagatttcccacaatcggtcagttactcgctaaggcctgctggaacccatttattttggcctacgacgaaagccaaaagattttgatttggtgcctgtgctgcctcatcaacaaagagcctcagaacagtggccagagcaagcttaattcatggatccagggggtgctgtctcacattctgtcagcacttcgtttcgataaggaagtggcgctgttcacccaggggctggggtatgcccccatcgactactatcccggtcttctgaaaaatatggtgctttcactcgcctccgagcttagggagaatcatttgaacgggttcaacacacagaggaggatggcccctgagagagtggcctccctgagccgtgtgtgtgtgcccttaatcactctgacagatgtagatcctttggtcgaagcgcttctcatctgccatggccgcgaaccgcaggagatcttgcaacctgagttctttgaggctgttaacgaggctattctacttaaaaagattagcctgccaatgtcagccgtcgtatgtctgtggctgcggcatctgccatctctggaaaaggccatgctccacctcttcgagaagcttatctcttcggagcggaactgtcttcggcggatcgaatgctttatcaaagacagcagcctccctcaagctgcctgccacccggctatcttccgagtggtggacgaaatgttccggtgcgctttgctggagacggatggagctcttgaaataatagcaactatccaggtgtttactcagtgcttcgtcgaggctttggagaaagccagcaagcaactgcgctttgccctgaaaacttactttccctatacttctcccagcttagccatggttttgcttcaagacccccaggacataccacggggacattggttacagaccctcaagcatatatccgagctgctgcgtgaggccgtggaagatcagacacatggcagctgcggcggccctttcgagtcttggttcttattcatccattttggcgggtgggccgaaatggtggctgaacaattactgatgagtgccgctgagcctccaacggccctactttggctcttggcattctactacggcccgagagatggtcgtcagcaaagggcacaaacaatggtccaggtgaaggcagttttggggcacctgttggccatgagcagaagtagcagtctctccgcccaagacttgcagacagttgccgggcagggtacagatactgatcttcgggctcccgcccagcagctcatccgccacctgctgctcaatttcctcctttgggcccctggggggcacacaattgcttgggatgttataacgctgatggctcacacagccgagattacccatgaaattattggcttccttgaccagacactgtataggtggaatcggctcggtattgagtcccccagatccgagaaactggcacgggaattgctgaaagagctgcggacccaggtgtag

SEQ ID NO: 187431 - DNA, 1677 bp, synthetic construct
  misc_feature 1..1677: note = Description of Artificial Sequence: Synthetic coding sequence
  source 1..1677: mol_type = other DNA
atggcccaggacagcgtggacctgagctgcgactaccagttctggatgcagaagctctcagtgtgggaccaggcttctacactcgagacacaacaggacacatgtctgcatgtcgcccagttccaagagtttctgcggaagatgtatgaagccctgaaagaaatggacagtaacactgtgattgaaaggtttccgaccattggccagctccttgctaaggcgtgctggaatccttttatcctcgcctatgacgagtctcagaaaatactgatctggtgcctgtgctgtctaatcaataaggagcctcagaactctggacaaagcaagcttaatagctggattcagggcgtgctctcccacatcctttccgccctgcgatttgataaggaagtagccttgttcacccagggactgggctatgcccccatcgattattatcccggtttgctgaaaaatatggtgctctcattagcgagcgagctccgggaaaaccacctgaacgggttcaatacccagcgcagaatggcgcctgagcgagtagcctctctcagtagagtctgcgtccccctcatcacattaaccgatgtcgatccattggtcgaggcacttctgatctgccatgggcgggagccacaggaaattctgcagcctgagttttttgaggcggtgaacgaagctattctcctcaagaaaataagcctaccgatgtccgctgtcgtgtgcctgtggctgagacacctaccgtctctggagaaagctatgttacatctgttcgaaaaattgatcagcagtgagcgcaattgtcttcgacggatcgagtgtttcatcaaagattcgtctctgccccaagccgcctgtcaccccgccatcttccgggtggtggatgaaatgttccgatgtgccctcctcgaaactgacggcgctctggagataattgctactatccaggttttcacccagtgtttcgtggaggcccttgagaaggcttctaaacagctgcggttcgccctgaaaacctacttcccctatacttccccctcgctggccatggttctcctccaggatccccaggacatccctcgcggccactggcttcagaccctcaaacacattagcgaacttctcagagaggcagttgaagaccagacacacggcagctgtggtggaccatttgagtcttggttcctgttcattcatttcggaggctgggctgagatggtggctgagcagctcctaatgtccgctgcagagcctcccaccgcccttttatggctgctggcattttattatggcccccgggatggaagacagcagagagcccagactatggtgcaggtgaaggcggtgctggggcacctgctggcgatgtcccggagttcaagcctctctgctcaggacctgcagactgttgcgggccagggcaccgacaccgatcttcgcgcacctgctcagcagctgattaggcacctgctcttaaactttttgctgtgggcacctggcggccacacgatcgcttgggatgtcattacgctgatggctcatacagctgaaatcacacacgagattatcggctttttagaccagacactgtaccggtggaatcggctagggattgagagcccgagaagcgagaaactggctagagagcttttgaaagaattacgcactcaggtgtag

SEQ ID NO: 187432 - DNA, 453 bp, synthetic construct
  misc_feature 1..453: note = Description of Artificial Sequence: Synthetic coding sequence
  source 1..453: mol_type = other DNA
atggcccaggacagcgtggacctgagctgcgactaccagttctggatgcagaaattgtccgtgtgggaccaggcaagcaccttggagacacagcaggacacttgcctccacgtggctcagttccaggaatttttgagaaaaatgtacgaggcgctgaaggaaatggattcgaacacagtgatcgaacgatttcccaccatagggcagctgctagcaaaggcttgttggaacccttttattctggcttacgatgagtctcaaaaaatcctaatctggtgcttgtgttgcctcattaataaggaaccccagaattcaggacaaagtaagctcaattcttggattcagggcgtgttatctcatatattgagcgctctgcgattcgacaaggaggtggccctgtttacccagggattgggatacgctccaatcgactactaccctggcttattgtag

SEQ ID NO: 187433 - DNA, 4416 bp, synthetic construct
  misc_feature 1..4416: note = Description of Artificial Sequence: Synthetic coding sequence
  source 1..4416: mol_type = other DNA
atggtgagcaagcggcggctgagcaagagcgaggacaaggagagcctgaccgaggacgcttccaaaacacgaaaacaacctctcagtaagaaaacgaagaaatcgcatatagccaacgaagttgaggagaatgactccatcttcgttaaactcctcaaaatcagcgggatcatcttgaagacaggcgagagtcaaaatcagctagccgttgatcagatagcttttcagaagaaactttttcagacccttcgtaggcacccgagctatcctaagattattgaagaatttgtgtctggccttgagagctatattgaggatgaagactccttccgcaactgtctactgtcgtgtgagcggctgcaggatgaggaggcctccatgggcgctagctatagcaaatccctgataaaactcctgctgggtatagatatcctgcaacctgccataataaagacccttttcgaaaaactcccagagtattttttcgaaaataagaacagcgacgaaatcaacatcccccgacttatagtatcacagcttaaatggctggatcgcgtagtggacggtaaggatttaaccaccaaaatcatgcagctcatctctatcgcgcctgaaaacctgcagcatgacattattacttcgctccctgagatcttgggagactctcagcacgccgacgtaggaaaggagctatcagacttacttattgaaaacacttctctgacagttcctatcctcgatgtgttgagttccttacgactggaccctaatttcctcctgaaggtgagacagttggttatggacaagctcagctcgatacggttagaagatctgccggtgataattaagttcatcctgcactctgtgaccgccatggacactctggaggtcatatccgagttgagggaaaaattggacttgcagcactgtgtgttaccctcccggctccaagcctcacaggtgaagcttaaatctaaaggacgcgcctcctcctccggaaatcaggagagctccgggcagtcctgcatcatcctcctgttcgatgtgattaaaagcgcgattagatacgaaaagacaatctctgaagcctggattaaagcaatcgagaacactgcctccgtaagcgaacacaaagtgttcgatctggttatgttgtttattatctactcaaccaatactcagaccaaaaaatatattgatcgggtgttgaggaataaaataagatccgggtgcattcaggagcaactcttgcagtcaacctttagtgtccattacctggtgttgaaggatatgtgttcttccattctcagcctggcccagtccctgctacacagcctagatcaaagcattatcagtttcggcagcctgctctacaagtacgccttcaagttctttgatacctactgtcagcaggaggtggtgggtgccctggtgacccatatttgcagtgggaacgaggcagaagtggataccgcactggacgtactactcgagctcgtggtgctcaacccttccgcgatgatgatgaatgcagtctttgtaaagggtatcctagactatctcgataatatttctccacagcagattcgcaagttattctacgtcttgagtacactggcctttagtaagcagaacgaggcctcatctcatattcaggatgatatgcacttagtcatcagaaaacagctctcttccaccgtgttcaagtacaaactaattggcatcataggcgccgtcaccatggctggaataatggccgcagatcgttctgagagcccgtcactgacacaggagagagctaacttaagcgacgagcaatgtactcaggtcacctcactcctccagctggtgcactcatgttcggagcaaagcccgcaggcctcagccctatactacgacgagttcgcaaatctgatccagcatgagaagctggacccaaaagccctggaatgggtcggccatacgatatgtaacgacttccaggacgctttcgtggtggactcctgtgtggtgccggaaggcgacttccccttccccgttaaggccctgtacgggctggaggagtacgatactcaagacgggatcgccatcaacctgctgcctctgctgtttagtcaggattttgccaaggatggtggtccggttacatcgcaggaatccggacagaagttggtctcccctctttgtttagcaccttatttcaggctgctccggctctgtgtagagcgtcagcacaacggcaacctcgaggagatagatggtttgttagattgtccaatcttcctgaccgatttggaacccggcgagaagctggaatccatgagcgctaaggaacgttcctttatgtgctccctgatatttttgaccctgaattggtttcgggagatcgttaacgccttctgtcaagaaacctctccagagatgaagggcaaggtgctcactaggctgaagcacatagtggaactgcaaattatcctggagaaataccttgctgtaaccccggactatgtcccccccctgggcaacttcgacgtggaaacactcgacatcacaccacacactgtcacagccatcagcgctaagattagaaagaagggtaagattgagaggaagcagaaaactgacggatcaaaaacttcatccagtgacacactctcagaagagaagaactccgagtgcgatcctacacccagtcatcgtgggcagctcaacaaagagttcaccgggaaggaagagaaaacttcactgctcctgcacaatagccatgcctttttcagggagctggatattgaagtcttcagtattctccactgtgggctcgtcacgaagtttatcttagatacagaaatgcatactgaagcaaccgaagtggtgcagcttggcccccccgagctgttattcctgctggaagatctgagccagaagctcgagagcatgctgacgcctcctattgccagacgcgttcccttcctcaaaaacaagggttcacgtaacataggctttagccatctgcagcagaggagcgctcaggaaattgtgcactgtgtttttcagctcctgactccaatgtgcaatcatctcgagaacattcataattattttcaatgtctggccgcagagaatcacggggttgtggacgggccgggggttaaagtccaggaataccacattatgtcaagttgctatcagcgcctgcttcaaatattccacggcttgtttgcctggagtgggttcagccaacccgaaaaccagaatcttttatactctgcactgcatgttctgagcagtaggctgaaacaaggtgagcattctcagcccctagaagagctcctgtcacaatctgtccattacctgcaaaactttcatcagtcgattccctcattccagtgtgcactatacctcatacgtctgcttatggtcatactcgaaaagtccactgcaagtgcccagaacaaggagaaaattgcttcgcttgcgcgtcaatttctatgtcgagtttggccatcaggcgataaggagaaatccaacatatctaatgatcagttgcatgcactgctctgtatctacctggaacacactgagagcatcctgaaagctattgaggagatcgcaggtgtgggcgtgcctgagctgattaactcgccgaaggatgcgagctcctcaacctttcctactctgactcgacacacctttgtagttttcttcagggtgatgatggccgaactcgagaaaaccgtaaaaaaaattgagccgggaacagccgctgattctcaacagatacacgaggagaaattgctgtattggaatatggctgttcgtgatttctcaattttaatcaaccttatcaaggtattcgatagccaccccgttctgcacgtgtgtctgaagtacggcagactcttcgtggaagcctttctgaaacagtgcatgcctctgctcgatttctctttcagaaaacatcgtgaggatgtgctctcactgctggaaacattccagttagataccaggctgctgcatcacctgtgcggccattccaaaatccaccaggacactagactaacacaacatgtgccactgctcaaaaagaccctcgagcttctggtgtgcagagtgaaggcaatgctgacactaaacaattgtcgcgaggcattttggctcggtaacctgaaaaatcgggacctgcaaggtgaggaaatcaaatcacaaaattctcaggagtcaacagccgacgagtcagaagatgacatgtcatctcaagcctctaaaagtaaagccacagaggtgtccttacagaacccaccagagagcgggactgatgggtgtatcctgctgatcgtgttgtcatggtggtcccgcacactccccacctatgtgtattgccagatgctgctgtgtcctttcccgtttccaccttag

SEQ ID NO: 187434 - DNA, 3750 bp, synthetic construct
  misc_feature 1..3750: note = Description of Artificial Sequence: Synthetic coding sequence
  source 1..3750: mol_type = other DNA
atggtgagcaagcggcggctgagcaagagcgaggacaaggagagcctcacagaggatgccagcaagactcgcaaacagcctttaagtaagaagactaaaaagtctcatattgccaatgaggtcgaagagaacgacagcatctttgtcaaattgctgaagatatccggaattatccttaagacgggggagagtcaaaatcagctcgcagtcgaccagatcgcctttcagaagaaattgttccaaactctgaggcggcatccatcttaccctaagattatcgaagaatttgtgtccgggctggagtcctatatcgaagacgaggactcatttaggaactgcctgctgtcttgcgagcgtctgcaggatgaagaagcctcgatgggggcaagttacagtaaaagcctgatcaagctgctgctgggcatagacatcctccagcctgctattattaaaacactgttcgaaaaactgccagagtacttctttgagaataaaaacagtgacgaaattaatatacccagactgattgtaagtcagttaaagtggctggatagagtggtggatggcaaagaccttactacaaaaataatgcaactgatctccattgcccctgagaacttgcagcacgacataatcacatccttgcccgagatactcggcgactcgcaacatgccgacgtgggcaaggaattgtctgacctgctgatcgagaacacttccctcactgtgcctatcctcgacgtgctgtccagtctcagactcgatccaaattttcttcttaaggtccgccagctggtcatggacaagttgagcagcattcggctagaagaccttcctgtgatcatcaagtttattctccattccgtcacagcaatggacactttggaggtgatatccgagttgagagagaaacttgacctgcagcactgcgtcctgccatcccggctgcaggccagtcaggtcaagttgaagagtaagggtagggcgtcttctagcggtaaccaggagagctcaggccagagctgtatcatactcctgtttgacgtaattaagagcgctattagatatgagaagaccatctccgaagcgtggattaaggccattgagaatactgccagcgtttccgagcataaggtgttcgacttggtaatgttgttcataatctactccactaatactcaaactaagaaatacatagaccgtgtgttgcgcaataagatcagatccggttgcatccaggaacagctgttgcaaagcacatttagcgtgcattacttagtgctgaaggatatgtgctcaagcatcttgtcactcgcacagagtctgttacatagcctggatcagagcatcatttcttttggttctctactgtacaagtacgcattcaaattcttcgacacctattgccagcaggaggtggtgggcgccttggttacccatatctgtagtggcaatgaagcagaagtggatacagcccttgacgtgctcctggaattggtcgtccttaacccatctgccatgatgatgaacgccgtttttgtgaaagggattcttgactacctcgataacatctccccacagcagattagaaaactgttctatgttcttagcaccctggccttctcaaagcagaacgaggcctcctcccacatccaagatgacatgcacttagtgatacgtaaacaactatccagcacagttttcaaatacaagctaatcgggataatcggcgccgtgactatggccggcatcatggccgcggaccggagcgagtctccctccctgacccaagagagggctaatctgagcgatgagcaatgcactcaagttaccagtttgctgcagctggtgcactcttgctcagagcagtcaccccaggcatctgcattatattacgatgaattcgccaacctgatacagcacgagaaactggaccccaaagctcttgagtgggtcggacatacaatttgtaatgatttccaagatgcctttgttgtggacagctgcgtggtccccgaaggtgatttcccttttcccgtgaaggctctctacggacttgaggagtatgatacgcaggacggaatagcaattaacctgttgccgctgctgttttcccaggatttcgcaaaggatggtggcccagtaacaagtcaggagtccggtcagaagctggtctcccctctttgtctcgccccctactttcgacttttgaggttgtgcgtggaacggcagcataacgggaacttagaggagatcgacgggctcctggattgtccaatcttcctcaccgatctcgaacctggagagaagctggagtcaatgtccgcgaaggagaggagctttatgtgcagtctgattttcctgactctgaattggtttcgtgaaatcgtgaacgccttctgtcaggaaacatctccggagatgaagggtaaagtgttgacccgccttaagcatatagtggaactgcaaataatccttgagaagtacttagccgtgacacccgactacgtgcctcccttgggaaatttcgacgtcgagaccttggatattaccccacatactgtgaccgctatctcagcaaagattcggaaaaaggggaaaattgaaaggaagcagaaaacggatggcagcaaaacaagcagttctgatacactgtccgaagagaaaaactccgagtgtgaccctacaccaagtcaccgaggccaactgaacaaggagttcacggggaaggaagaaaaaacttccctacttctccacaactctcacgcgttttttagagaattggatatcgaggtattttccatactgcactgcggactcgtgacaaaattcatcttggatacagagatgcacaccgaggccaccgaagtggtccaactcgggccgcctgagttgctgttcttactcgaggaccttagtcagaagctcgagagcatgctaaccccccccatcgcccgaagggtccctttcctgaagaacaaaggctccagaaatatcggctttagtcacctgcagcagcgcagcgctcaagagatcgtgcattgcgtctttcaactcctcacaccaatgtgtaaccacctagaaaacattcacaactacttccaatgcttagcagctgaaaaccatggcgtggttgatggaccaggtgtcaaggttcaagagtatcacattatgagtagttgctaccagcggttgttacagatctttcacggcctattcgcctggtctgggttttcacaacctgagaaccaaaatctgctctactcagcattgcacgttttgtctagccgactcaaacaaggtgagcactcccaacctctggaggagctgcttagccagagtgtccattaccttcagaacttccatcaatccatcccaagcttccagtgcgctctgtacctgattcgattattaatggtcatcttggagaagagtaccgcatccgcacaaaataaggagaagatcgcatctctcgcccggcaatttctgtgtagggtctggcccagtggcgacaaggagaaatccaacatatctaacgatcagctacatgctttgctgtgcatttacctagagcacaccgagagcattctcaaggctattgaggaaattgccggggtgggcgtccccgaactgataaattcaccaaaggacgctagctccagcacattcccaaccctcaccaggtttatgaaacgcaatagctctaccggaacttggctgttcgaaactagcgtgtctagtagtacatag

SEQ ID NO: 187435 - DNA, 4356 bp, synthetic construct
  misc_feature 1..4356: note = Description of Artificial Sequence: Synthetic coding sequence
  source 1..4356: mol_type = other DNA
atggtgagcaagcggcggctgagcaagagcgaggacaaggagagccttaccgaagatgcgtcaaagacgaggaagcagccattatccaaaaaaaccaagaagtcccacatcgccaatgaggttgaggagaatgattccatatttgtcaaattacttaagatctccggaatcatactgaaaactggagaatcccagaaccaactggctgtggaccaaattgcatttcagaagaaactcttccagaccctgcggagacacccgtcttaccccaaaatcatagaggagtttgtgagcggcctggaatcttacatcgaggacgaggattcctttaggaattgtctactgtcatgtgaacggttgcaggacgaggaggcaagcatgggcgcatcgtacagcaaatccctgatcaaactcctgctcggcatcgatatcttgcagcccgctatcattaagacactgttcgagaagcttcccgaatactttttcgagaacaaaaactcggatgagatcaatattcctcgtcttatagtctctcagcttaaatggctggaccgcgtggtagacggcaaggacctgacaacaaagattatgcaactgatctctatcgcaccagagaaccttcagcacgatattatcacgagcctgccggagatcttgggtgactcccaacatgcagatgtgggtaaagagttaagtgatctcctgattgaaaataccagtctcacagtgcctattctggatgtactctcaagcctccggttggaccccaatttcctgttgaaggtccggcagctggtgatggacaaactgtctagcatcagactcgaagacctgccggtgatcatcaaattcatactccactcggtgacagctatggataccctggaggtcatcagcgaacttcgtgaaaagctggacctgcagcactgcgtgctgccatcacggttacaggcgtctcaggtaaagctcaaatctaaaggtagagcgtcatctagcggtaaccaagaatcatctggacagtcatgcataatactgctttttgacgtcatcaagagcgcgattcgttacgagaaaaccatttcagaagcctggataaaagccattgaaaacaccgcatctgtcagtgaacacaaggtattcgatctggtgatgttgttcatcatctactccacaaatacacagacaaagaagtacatcgatcgggtgctgaggaacaagattcgatcgggctgcatccaagagcagctgctgcaatcaaccttctctgtccattatctcgtcctgaaagatatgtgctctagcatccttagcctcgctcagagtttgctccatagtctcgaccagagtatcattagtttcggctcacttttgtacaaatatgccttcaaattctttgacacctattgccaacaagaggtcgtgggggcacttgttacacatatctgctccggaaatgaggctgaggttgacacagccctcgacgtcttgcttgaactggttgttttgaatccttccgccatgatgatgaacgccgtatttgtgaaagggatcctggattaccttgacaatatcagtccgcagcaaattcgcaagctcttctacgttctgagcaccctagccttctccaagcagaacgaggcttcatctcacattcaggatgatatgcatctcgtgattagaaagcagctcagctcaaccgtgtttaagtataaactgattggcataattggggcagtaaccatggccgggataatggcagccgaccgctccgaaagtccaagcttgacacaagagcgcgcaaacttatccgacgaacagtgcactcaggtgacatctctacttcagttggttcattcatgtagtgagcagtcccctcaagccagtgccctgtattatgacgagttcgcaaaccttattcagcatgaaaaattagatcccaaggcactcgagtgggtgggtcacacaatctgtaatgacttccaggacgccttcgtcgtcgactcttgtgtggtgccggagggagacttcccattccccgtgaaggctctgtacggactggaggagtatgatacccaggatgggatagcaattaacctgctgcccctactgttcagtcaggattttgctaaggatggaggacccgttactagtcaggaaagcggtcagaagctggtaagtcctctgtgcctggcaccgtattttagactcttgcgcttatgcgtggagcgtcagcataacggtaacttagaggaaattgatggcctcctagattgtccgatattcttaacggatttagagcctggggaaaagctcgaatctatgagtgctaaggaacgctctttcatgtgctccctgattttccttaccctcaactggtttcgcgagatcgtcaacgcattttgtcaggaaaccagccccgagatgaagggcaaggttttgacaagactcaagcatatagtcgagcttcaaatcatcctggaaaaatatctcgcagtcactccagattatgtgccaccccttgggaactttgatgtcgaaacactggatataaccccccatacggtcaccgccataagtgccaagatccggaaaaagggcaaaattgaaagaaaacagaagactgacggctccaagacttcctcatctgacactctctccgaagagaagaacagcgagtgcgacccaactccgtcccaccgcgggcagctgaacaaagagtttactgggaaggaagaaaagacctccctcctactccacaactcgcacgcttttttcagagagttagatatcgaagtcttctcaattcttcactgcggcctggtgacaaagttcatcctggacaccgagatgcacaccgaggctactgaggtggtgcaacttggtcctccagaactgctctttctcttggaggatttatctcagaaactcgaaagcatgctgaccccaccgatcgctaggagggtccccttcttaaagaataagggctctcgaaatattggtttcagccacttgcaacagcggtccgcacaggaaatcgtgcactgcgtattccagcttttgacacctatgtgcaatcaccttgagaatatccacaactatttccaatgcctggcggccgagaatcacggagtcgtggacgggcctggggtgaaagtccaggaataccacattatgagcagctgttaccagcggctcctgcagatattccatggcctttttgcttggtccggcttctcacaacccgagaaccagaacctgctgtattcagcccttcatgtgctctctagcaggctcaagcagggagagcactcacagccccttgaagagttactgtcccagtcagtgcactatctgcagaattttcaccagtccatcccgtctttccagtgtgctctctaccttataaggttgctcatggtaatactcgagaagagcaccgcctctgcacagaacaaagaaaagatagccagtctggcccgtcagtttctatgccgagtttggccctccggcgataaagagaaaagtaacatctctaatgatcagctccatgccctcctgtgcatatatctggaacatacagaaagtatcctgaaagctatagaagagatagcgggggtaggggtccccgagctaataaactcccccaaagatgcctcttcgagcacgttcccaacactgactcgccataccttcgtcgtcttctttagggtaatgatggccgaattagagaaaactgttaagaagattgagccggggactgctgccgactcacagcagattcatgaagagaaactgctgtactggaatatggccgtgcgcgatttttcaatactgatcaacctcatcaaagttttcgattctcacccggtgctgcacgtctgcctcaagtatggtaggttatttgtagaagcttttctgaagcaatgcatgccactgctcgacttctcctttcggaagcatcgagaggatgtcctgagcctgttggaaactttccagctggatactcgcttgctacatcacttatgcggccactcgaaaattcatcaagatactaggctgacccagcacgtgccactgctgaaaaaaaccctagagctcctcgtttgcagggtgaaggcgatgcttaccctgaataactgccgcgaagctttctggctgggaaacttgaagaatcgcgacctgcagggcgaggaaattaagtcacagaatagccaagagagtacagccgatgagtcagaggacgatatgagttctcaggccagcaagtccaaagccaccgaggacggtgaggaggatgaagtctctgccggagagaaggagcaagattccgacgaatcttacgatgactccgactag

SEQ ID NO: 187436 - DNA, 4356 bp, synthetic construct
  misc_feature 1..4356: note = Description of Artificial Sequence: Synthetic coding sequence
  source 1..4356: mol_type = other DNA
atggtgagcaagcggcggctgagcaagagcgaggacaaggagagccttaccgaggacgcctctaagacaaggaaacagccccttagcaagaagacgaagaaatcacacatagccaatgaggtcgaggagaatgactcgatcttcgtcaagctcttgaagatttccggaatcattctgaagactggagagtctcagaatcagctggcagtggaccagatcgcctttcaaaagaaactgttccaaactttacggcgccacccaagctatcccaagatcattgaggaatttgtttcgggcctcgagtcatacatcgaagatgaggatagtttccgcaactgtctcctatcctgtgagaggcttcaggacgaggaggcttcaatgggtgcctcctatagcaaatccttgatcaaactgctgctgggaattgatatccttcagcctgcaattattaagacgctgtttgagaagctaccagagtacttcttcgagaataaaaacagcgacgagataaatatccctagacttattgttagtcagttgaaatggcttgatcgggtggttgacggcaaggacctgacaactaaaataatgcagcttatcagcatcgcccccgagaatttgcaacacgacattataacgagcctccctgagatcctcggggactcccaacatgccgatgtaggtaaggaactcagtgatctgctgattgaaaatactagcctaaccgtgcccattctcgacgtcctttcgtcacttcggcttgatccgaactttctattaaaagtgcgccaactagtgatggacaaactgagtagcatcagactggaagatcttccagtcatcattaagttcattttgcacagcgtcaccgcaatggacacgctggaagtcatctccgaactccgcgaaaagttggacctacagcattgtgtgctgcctagtagacttcaggccagccaggtgaagctgaaatccaagggtcgagctagtagctctggcaaccaggaaagttctggacagtcttgtatcattctgctgtttgatgtcataaagtctgccatcagatatgagaagactatttccgaggcctggatcaaggcaatcgaaaacacagcttcggtatccgaacacaaagtattcgatctcgttatgctctttatcatctattctaccaacacccagacaaagaaatacatcgaccgggtgctgaggaacaaaatcaggtcaggctgcattcaagaacagctgctgcagtccaccttttccgtccactacctggtccttaaggacatgtgttcttccatcttgagcttagcccagagccttcttcactccctggaccagtctatcatttcctttggtagtctcttatacaagtatgcatttaagttctttgacacgtactgccagcaggaggttgtgggcgccttggtgacccacatctgctccggcaacgaagctgaggtggacactgccctggacgtgctcctagagctagttgttctgaaccccagtgcaatgatgatgaacgcagtttttgttaaaggcatccttgattacctggataacattagcccacagcaaatccggaagttgttctatgtgttatccacccttgctttttccaaacagaatgaggcctcaagccacatccaggatgacatgcacctggtgatacggaagcaattaagtagtactgtgtttaaatataagctgatcgggattatcggggctgttactatggccggtatcatggcagccgatagatccgagtctccctctctcacccaggaaagagcaaacctttcagacgagcagtgcactcaggtgacctcccttctgcagctggttcattcttgctctgagcagtcaccccaggccagtgctttgtactacgacgaatttgcaaacttaattcagcatgaaaagttggaccctaaggccctcgagtgggtgggccacaccatctgcaacgactttcaggacgcctttgtcgtcgactcatgtgtggttccagagggagactttccgttccctgtcaaagccttgtacgggctggaagagtatgacacacaggatggcattgccattaacctcctaccacttcttttttcccaagacttcgctaaagatggcgggccagtcacaagccaagaatccgggcaaaaactggtttctcctctctgtctggccccgtatttccgcctcctccgattgtgcgtggagaggcaacacaacggcaacctggaagaaatcgacgggcttctcgattgtcctatctttttaacagacctggagcctggtgagaagcttgagtcaatgtcagccaaggagcgaagcttcatgtgttcactgatattcctgaccctaaattggttcagagagattgtgaatgccttctgccaggagacaagtcccgaaatgaaggggaaagtcctgacacgacttaagcacattgtcgaacttcagataatattagaaaagtatctggccgtcactcccgactatgtgccccccttaggcaattttgatgtggaaacactcgacattaccccccatacggtaacagcgatctccgcaaagattcggaaaaaggggaagatcgagcgcaaacagaaaacagatggtagcaagaccagttcctcagataccctgtctgaagagaagaattccgagtgcgacccaaccccatcccacagagggcaactaaataaagagttcactggcaaagaggagaagacaagcctcctgctgcataacagtcacgcgttttttcgtgagcttgatattgaagtgttttccattctgcactgtgggctggtgacgaagttcattctcgacacagagatgcatacagaagctacagaggtcgtgcagctcgggcctcctgaattgctgttccttctggaagatctaagccagaaacttgagtctatgctgacacctccaatagctcgccgtgtcccatttctcaagaataaggggtcacgaaacattggattttcccatttgcagcagcggagtgctcaggagattgtgcactgtgtgttccaactgttaacacctatgtgtaatcatcttgaaaacattcacaactatttccagtgccttgccgctgagaaccacggcgtcgttgatggccctggagtaaaggttcaagaatatcatatcatgagcagctgctaccagaggctcctccagatattccacggtttattcgcctggtcaggattctctcagcccgagaatcagaatctcctgtactcagcattacacgtgctgtcgagtagattgaaacagggagagcactcgcaaccattggaggaactgctcagccaaagcgtgcactacctgcagaattttcatcagagcattccgtcctttcagtgcgcactctacttaatacgcttgctgatggttattctggagaagtccacagccagcgcgcagaataaagagaagattgctagtcttgctcgacagtttctgtgcagggtgtggccatcaggggacaaagagaaaagcaatatctcaaacgaccagctccacgccctcttgtgtatatatctcgaacataccgagagtatccttaaggcgatcgaagagatcgctggcgtaggggtaccagaactgattaatagcccaaaggacgcaagctcttccacttttcctaccctcactagacacacgtttgtggtgtttttccgtgtaatgatggcagaacttgagaagacagtcaagaagatcgaaccaggcaccgcagctgatagccaacagatccacgaagagaagctcctgtactggaacatggccgttcgagactttagcattctgataaacctgattaaggtatttgactcccacccagtgctccatgtttgtctaaagtacggtagactctttgtggaagctttcttgaagcagtgtatgcctctgcttgacttcagtttccgtaagcatcgggaagatgtcctctctctactcgagaccttccaacttgacacacgtctgctccatcatttgtgtggccacagcaaaattcaccaggacaccagactcacccagcacgtgcccctactgaagaagaccctggagcttttagtgtgcagggttaaagccatgctgaccctcaataactgccgggaggctttctggttgggcaatctgaagaacagagatctccagggggaggaaatcaagtcccagaacagccaggagtccacagccgacgaatccgaagacgatatgagcagtcaagcatcaaaatccaaagctaccgaagacggcgaagaagacgaggtgagcgccggcgagaaggagcaagactctgatgaaagctatgatgattccgactag

SEQ ID NO: 187437 - DNA, 1341 bp, synthetic construct
  misc_feature 1..1341: note = Description of Artificial Sequence: Synthetic coding sequence
  source 1..1341: mol_type = other DNA
atggacagcagcgccgcccccaccaacgccagcaactgcaccgacgccttagcatacagttcgtgctctcccgctcctagtccaggatcctgggtgaatctgtctcatctcgatggcaacctgagcgatccatgtggacccaaccgaaccgatctgggcggaagggactctttatgccccccaactggaagcccatcaatgattacagccattactatcatggccttgtactccattgtgtgcgtggtgggcctgtttgggaatttcctggtgatgtacgttattgtcaggtacactaagatgaaaacagcaaccaacatctatatctttaatctggctctggctgacgctcttgctacttcgaccctcccattccagtctgtgaactacctcatgggaacatggccattcgggaccatactctgcaagattgtgatatctatcgattactataacatgttcaccagcatcttcaccctgtgtaccatgtctgtcgacagatacatagcagtgtgtcatccagtgaaagcactggactttcgcactcccagaaatgccaagattatcaacgtgtgcaattggattctttcatctgcgattggtctccccgttatgttcatggctactaccaaataccgccagggttccatagattgtacacttactttcagccaccccacctggtactgggagaacctcctaaagatctgtgtgttcatttttgctttcattatgcctgtattaatcatcactgtctgctatggtctgatgattttgcggctgaaatcagtgcgcatgctgtcaggcagtaaagaaaaggataggaacctgagacggatcacccgcatggtcttggtggtggttgctgtgtttatcgtttgctggacccccatccatatctacgtgatcattaaggctctggtgaccattcctgagacaacctttcagactgttagctggcatttctgcattgcgctgggatatacgaacagctgcttaaatcccgttttatatgctttcttagacgagaacttcaaaaggtgtttccgcgagttttgcataccaacctctagcaacattgaacaacagaattctacacgaattagacagaacaccagggaccacccaagcacggcaaacaccgtggatcggaccaatcatcagtgtcttccgattccctcattgagttgctgggcactggagcaagggtgtctggttgtgtacccaggcccgcttcagggacctcttgtgcgatacgacctgcctgctattctgcactcctcatgtttgaggggcaataccgcccctagcccttcaggtggcgcatttctcctctcctag

SEQ ID NO: 187438 - DNA, 1125 bp, synthetic construct
  misc_feature 1..1125: note = Description of Artificial Sequence: Synthetic coding sequence
  source 1..1125: mol_type = other DNA
atggagagcctgctgcagcacctggaccggttcagcgagctgctggctgtttcgagcaccacatatgtttcaacttgggatccggcaactgtgcgccgggccctgcagtgggcgcggtacctgcggcatatccaccgaagatttgggaggcacggtcctattcggacagcactggaacgacgtctacacaaccagtggagacaggagggagggttcggccgtggaccagtgccgggcctggccaacttccaggccctgggacactgcgatgtcctgctatcactccgactgctggaaaacagagcactgggcgatgcggcccggtaccatctggtccagcaattattccccgggcccggagtgcgggacgccgatgaggagacattgcaagaatcccttgctcgacttgctcgccgtcggtcagccgtgcacatgttgagatttaacggctaccgggagaaccccaatctgcaggaagattcacttatgaagacacaagccgagctgcttctcgagcgcctgcaggaggtcggcaaggctgaggctgaaagacccgccaggttcttgagttccctatgggagaggctgccccagaataacttcctcaaggttatcgcggtggccctcttgcagcctcccctctcaagacgcccacaagaggaactggagccggggattcataaaagccccggcgaaggttctcaggtcctggtccattggctgctcgggaattcggaagttttcgccgctttctgcagggccctgccggcagggttgctcaccttggtcactagcagacaccctgccttgagcccagtctacctcggcctacttactgattgggggcagcggttacattacgacctgcaaaaagggatctgggtgggaaccgagtctcaagacgttccatgggaagagctccataatcgcttccagtccctgtgccaagcacctccccctctgaaggacaaggtgctaaccgccctggaaacttgcaaagcacaagacggcgactttgaggtgccgggcctctcaatttggacggatctccttctggcgctgagatccggcgccttccggaaaagacaagtcctgggattgagtgcaggcttaagcagcgtgtag

SEQ ID NO: 187439 - DNA, 3807 bp, synthetic construct
  misc_feature 1..3807: note = Description of Artificial Sequence: Synthetic coding sequence
  source 1..3807: mol_type = other DNA
atggaccagaagatcctgagcctggccgccgagaagaccgccgacaagttgcaagaattcctgcagactctgcgggaaggggaccttacaaaccttctgcagaatcaggctgttaagggaaaagtggccggggctctgctccgcgcaattttcaaaggcagtccttgtagcgaggaggctgggacccttcgcagaagaaaaatttacacatgctgtatacagctcgtagagtcaggcgatctccaaaaggagatcgcctcagagataatcggtttactcatgctggaagcccaccattttcccgggcccctgctggttgaactggcaaatgagttcatctcggctgtgagggagggatccctcgtcaacggcaaaagtttggagttgctcccaatcattcttactgctttagcaactaaaaaggagaatctggcctatgggaaaggcgttctgtcaggcgaggagtgtaaaaaacagctgatcaatacactgtgctccggtcggtgggaccagcagtacgtgattcaactcacatcgatgtttaaggatgttccacttactgccgaggaggtagaattcgtcgtggagaaggctctctctatgttcagcaaaatgaacctccaagaaatacctccactagtgtaccagctgctcgtgctatctagcaaaggatctaggaagtctgttcttgagggcattattgccttcttttctgccctggataaacagcacaatgaggaacaatctggagacgaacttttggatgtggtcaccgttcccagcggggaactgaggcacgtggagggaactattattctccacatagtgtttgctattaaattagattacgaactgggcagggaactggtgaagcaccttaaagtagggcagcagggcgacagcaacaacaacttgagcccgttttctatcgctctgctgcttagcgtgactagaatccagaggtttcaggaccaagttctggacctcctgaagacttctgtggtaaagagcttcaaggatctgcagctactccagggatcgaagttccttcagaatcttgtcccacatagatcgtacgtgagcacaatgatactcgaagtcgttaagaactctgtgcacagttgggatcacgtgactcaggggctcgtagaactgggcttcatccttatggactcatacggcccaaagaaagtgcttgacgggaagacaatcgagacatccccaagtctgtcaaggatgcccaatcagcacgcatgtaaacttggtgcgaacatactgctcgagacctttaaaattcatgaaatgatccgccaggagatcctcgaacaggtgctgaaccgcgtggtgacacgtgcctcctctcccatttcacattttctggatctgcttagtaacatagtcatgtacgcccccctcgtgctacaaagttgttcttctaaggtaactgaagctttcgactatctgtctttcctgcctttacagactgtgcagcggctgttgaaagctgtacagcctcttctgaaagtcagcatgtctatgagggactgtctgatacttgtgcttaggaaagcaatgtttgccaatcagctggacgctcgcaagagtgccgtcgccgggttcctactgctgctgaagaactttaaagtcctgggatcgttgtcgtcaagccagtgttctcagtctctgagtgttagtcaggttcatgtggatgttcattcccactacaattctgtggctaacgaaaccttttgtttagagatcatggactccctccgccgctgcctgtctcagcaagctgacgtacggctgatgttatacgaaggcttctacgacgtgctgcgacgaaattcccagctggcaaactccgtgatgcagaccctgctgtcacagctcaaacagttctatgaaccgaagccagacttgttgcccccacttaagctggaagcctgcattctcacacagggtgacaagatctccctacaagaacctctggattacttgctgtgttgcatccaacattgcctggcctggtataagaacaccgtgattcccctgcagcaaggtgaggaggaagaggaggaggaggaagctttctacgaagatctggacgacatactggaatcaattaccaatcggatgataaaaagtgagcttgaagactttgagctggataagtccgcagatttcagtcagtccacttctattgggatcaagaacaatatctgcgccttcctggtgatgggcgtgtgcgaagtcctgatcgagtacaacttctcgatcagcagctttagtaagaatcgcttcgaggacatcctgagcctgttcatgtgttacaagaagcttagcgacattctgaacgaaaaggccgggaaggccaaaactaagatggctaataaaacgagcgactctctgctgagtatgaagtttgtgtccagtttgctgaccgccctgttccgagtcctgctgtggcggtacacatccatccctacaagtgtggaagaaagcggaaagaaggaaaagggcaagtctatctcacttctgtgtctggagggccttcaaaaaattttctctgccgtgcagcaattctatcagccaaagatccagcagtttttgcgtgccctcgacgtcaccgataaggagggcgaggaaagggaggacgctgatgtttcagtaactcagagaacagcattccaaattcggcaatttcaaagatctctgctcaaccttctgtctagccaagaagaggactttaactcaaaagaagccttgctgttagtgacagtcctcaccagtctttcaaagttactggaaccctcatcaccccagttcgtgcaaatgctaagctggaccagcaagatctgcaaagaaaatagccgggaagacgccctgttttgcaaatcgctaatgaacctcctcttctcactgcatgtatcgtacaaatcacccgtaatcttgctgagagatttgtctcaagatattcatgggcatctgggagacatcgatcaagacgtggaagtagagaagacgaaccatttcgccattgtgaaccttagaaccgctgctccaaccgtttgcttgttagtgctgagccaggcagagaaagtgctggaagaggttgactggctgatcacaaaactgaagggacaggtgtcacaggaaactttatctgaggaggcgtcttcccaggcaactctgcccaaccagcctgtagaaaaggctataatcatgcaactgggtaccctcctgactttttttcacgagctggtccagacagccctgccttctggatcgtgtgtggataccttattaaaagacttgtgcaaaatgtatacaaccctgaccgcacttgtaaggtattacctccaggtatgccaatcctcgggtggcatccctaagaatatggaaaagttggtgaaactcagcggatcgcacttaaccccactgtgctactcttttatcagctatgtccaaaacaaaagtaagtcattaaactataccggagagaaaaaggaaaagcccgcggcggtcgcaacagcgatggcccgtgtcctccgggaaacgaagcccataccgaacttgatatttgctatcgagcagtatgaaaagtttttgatccatttaagcaagaagtcaaaagtgaatctgatgcagcatatgaaactgagcacttctagggatttcaagattaaagggaatattttagacatggtactgagagaggatggtgaggacgaaaatgaagaaggcacagcatctgagcacggcggtcagaataaggagcccgccaagaaaaagcgcaagaaatag

SEQ ID NO: 187440 - DNA, 3987 bp, synthetic construct
  misc_feature 1..3987: note = Description of Artificial Sequence: Synthetic coding sequence
  source 1..3987: mol_type = other DNA
atggaccagaagatcctgagcctggccgccgagaagaccgccgacaagttgcaggaatttcttcagactctccgggagggggatctgacaaacctccttcaaaatcaggccgttaagggaaaggtggccggcgccctgctgagagccatcttcaagggatccccctgctccgaggaggccggcacattaagaagacgtaaaatttatacatgctgtattcaactggttgaaagcggggatctccaaaaggagatcgcaagtgagattatcggcctgcttatgctagaagcccaccactttcctgggcctctacttgtcgagcttgctaatgagtttatctccgctgtgcgcgagggttctctcgtcaatgggaagtcactggaattgttacctatcatcctgactgctcttgccaccaagaaggaaaacctcgcgtacggaaaaggtgtattgagcggagaggagtgcaagaagcagcttattaatacgttgtgttccggtcgctgggatcaacagtacgtcattcaactgacttccatgttcaaggacgtcccccttactgcagaagaggtggagtttgtcgtagagaaagccttatccatgttcagcaaaatgaacctgcaggagattccgcctctcgtctaccagctgctggttctgtcgtccaagggcagtcgaaagagtgtactagaaggaatcatcgcattcttctctgcactcgataaacaacacaatgaagaacaaagtggagatgagctcctggatgtggtcacagtgccgtctggcgagctaaggcatgttgaagggactatcattttacacattgtctttgccataaagctggactacgagttaggacgtgaactggtgaagcacctaaaggtggggcaacagggggattccaacaacaatctgtcaccattctccatcgcactcttattgagcgtgacaaggatccagaggttccaggatcaggtgctagatctccttaaaacctctgttgtgaaaagctttaaagaccttcagctgttgcaggggtctaaattcctgcagaacttagtgccccatagaagctacgtctcaaccatgatcttggaggtcgtaaaaaactccgtccactcttgggatcatgtgacgcagggattggttgaactgggctttattctgatggattcctacgggcctaagaaagtcctggatggtaagactattgagacgagcccctctctgtcccggatgccaaatcagcacgcatgcaagctgggagctaacatactgctagaaacattcaaaattcatgaaatgatccggcaagagatactcgagcaggtcctcaaccgcgtggtgactcgggcgtcctctccaatcagccacttcttagacctcctgtccaacatcgtcatgtacgccccgctcgtattacagtcatgcagctcgaaagtcactgaggcttttgactatttatcatttctgcccttacaaaccgtgcagcgtctgttaaaagcggtgcagcccctgctaaaggtaagcatgtcgatgcgggattgcctcattctcgtgttacgcaaggccatgtttgcaaatcagttggatgcaaggaagagcgcagttgcgggctttttgctactgctgaaaaacttcaaggttttagggtccctctccagttcccagtgtagccaaagtctgtccgtgtcccaagtgcacgttgacgttcacagccactataattccgtggcaaacgagactttttgtcttgagattatggatagcctgagacggtgcctgtcgcaacaggctgatgtaaggctcatgctgtacgagggtttttacgatgtgctgcggagaaatagccaactcgcaaatagtgtgatgcaaacactgctgtcacagctcaagcaattctacgagcccaaacccgacctgctacctcctctcaagttagaagcctgcattctcacccagggggataagatatcacttcaggaacccctcgactatctgctctgctgtatccagcactgtctcgcatggtacaaaaataccgtgatcccattgcagcagggtgaggaggaagaggaagaagaggaggcattctatgaggatcttgatgatattctcgaatcaataaccaaccgcatgattaagagcgaattagaggattttgaattagataagtctgcagactttagtcagagtacatcaatcggcattaaaaataatatatgtgcctttctggtcatgggagtttgtgaggtgttaatcgaatataactttagcatttcttcgtttagtaagaatcggtttgaggatattctgtccttgtttatgtgttacaagaaactcagcgacattttgaacgagaaagccggcaaagctaaaacaaagatggctaacaagacatccgatagtctgctctctatgaagttcgtcagctccctcctcaccgccttgtttcgggatagtattcagagccaccaggaatccctatctgttcttagaagctctaatgaatttatgcgttacgccgtcaacgtggcgttacagaaagtgcagcagcttaaagagactggacacgtgtccggccccgacggccagaatcctgagaagatcttccaaaatctatgcgatattacccgggtgctcttgtggagatatactagcattcccacatccgttgaagagtcaggcaaaaaagagaaagggaaaagcatcagcttactctgtctggaagggctacagaagattttttcagctgtgcagcagttctaccagcccaaaattcagcaattcctcagggctttagacgtgaccgacaaggagggtgaggagcgggaggacgcggacgttagcgtaacccagcgaacggctttccagattcggcagtttcaacggtcgctgctgaatctgctgagcagccaggaggaggacttcaactctaaagaggctctgctgctagtaacagttctgacgagcttgtcaaaactgctcgagccctcctcaccacaatttgtgcagatgttatcgtggacatccaagatttgtaaggaaaacagtagggaagatgctttgttctgtaagagtcttatgaatctcctgttcagcctgcacgtcagttacaaaagccctgtcatcctcttaagagacctctctcaggacatacacgggcacttgggcgatatagaccaggacgtggaagttgagaagactaatcattttgccattgttaacttaaggacggccgcaccgacggtgtgtctgctggtcttgagtcaggccgagaaggtacttgaggaagtggactggctgattacaaaactgaaaggccaagtcagccaagaaactctgtccgaggaggctagctcccaagccactttgccaaaccagccggtggaaaaggctattatcatgcaactgggcacactactgactttcttccacgagctggtccaaaccgcgctgcccagtggctcgtgcgtggacaccctgctgaaagacctctgtaaaatgtatacgacccttacagctttagtacggtattatctgcaggtctgtcagtcatccggagggatcccaaaaaatatggagaagttggtgaaactctccgggtctcacttaacccccctgtgctactcattcattagctatgtccaaaacaagtcgaagtccctcaattatacgggggagaagaaagagaaacccgccgccgtcgccaccgctatggcaagggtgctcagagagaccaagccgatccccaatctgatctttgcaattgaacagtatgagaagtttctcatccacctaagcaaaaaatcaaaagtgaatctgatgcagcacatgaaactcagcactagtcgagattttaaaatcaagggcaatatcctggatatggtgctgcgagaggacggagaagatgagaacgaagaggggactgccagcgaacatggcggccaaaacaaggagcccgcaaaaaaaaagaggaagaagtag

SEQ ID NO: 187441 - DNA, 3288 bp, synthetic construct
  misc_feature 1..3288: note = Description of Artificial Sequence: Synthetic coding sequence
  source 1..3288: mol_type = other DNA
atggaccagaagatcctgagcctggccgccgagaagaccgccgacaagcttcaggaatttctccaaactctgagggaaggcgatttaactaacctactgcagaaccaggccgtgaaagggaaagttgccggcgctctgctccgggctatatttaaagggtcaccttgctccgaggaggctggtacactgaggcgacggaagatatatacctgttgtatccagctggtggagtctggggatcttcagaaggaaatagctagcgagatcataggtctgttgatgctggaggctcaccattttccagggccgctccttgtggagctggcgaatgaattcatctcggctgttagagagggatctctcgtgaacggcaagagcctagagctgctgcccattattttgaccgccctagcaaccaaaaaagagaacctagcatacgggaagggcgtcctcagtggagaagaatgtaagaaacaattaataaacacattgtgcagcgggagatgggatcagcagtatgtgattcagttgacatcgatgtttaaggatgtgccgctcacagcggaggaagttgaattcgttgttgaaaaggcacttagtatgttttccaaaatgaatcttcaggaaattcctccactggtgtatcagcttctcgtgctgtccagtaaaggaagcaggaaaagcgttctggaaggcatcatcgctttcttctctgccctggacaagcaacataacgaggagcagtctggcgatgagctgttagatgtggtcactgtgcccagcggagagctgagacacgtggaaggcactatcatcctgcacatcgtcttcgctattaagctggactacgagctgggaagggagctcgtgaagcatcttaaggtgggccagcaaggcgatagtaacaacaatctcagtcctttctcaatagcactcctcttgtcagtaacgcggatccagcggttccaagatcaggtcctcgacctcctcaagacatcagtggtgaagtcgttcaaagatctgcagctcctgcaaggatctaaattcctgcagaacctcgttcctcatcggagctatgtttctactatgattctggaagtagtcaagaattccgtgcatagttgggatcatgttacccagggactggtagagctgggctttatacttatggactcctacggccctaaaaaggtcctggatggtaaaacgattgaaactagtccttccttgagtaggatgccaaaccaacacgcctgcaagctgggcgctaatatcctgctggaaacgttcaagatccacgaaatgattcgccaagaaatcttagagcaggttttgaatcgagtcgtcacccgtgcttctagtcctatctctcacttcctagatctgctgtcaaacattgtgatgtacgccccactggtgttacagtcttgttccagcaaggtaaccgaagctttcgattacctctccttcctacctctacaaacggtgcagcgcctgctgaaggcagtgcaaccacttctgaaggtttctatgagtatgcgcgactgcctgatccttgttcttcgaaaagcaatgttcgccaaccagttggatgcaagaaagagtgccgtggcggggtttcttctgcttctcaaaaattttaaggtgctggggtcactgagctcaagtcaatgtagccagtctctctcggttagtcaggtgcacgtggacgtgcattctcattataactctgtcgccaatgagactttctgccttgaaatcatggattccctccggcgttgtttatctcagcaagccgatgttcggctgatgctttatgagggtttctatgatgttttgagaaggaactctcagttggcaaattccgttatgcagactctgttgtcccagcttaaacagttctacgaaccaaaaccagacctactgccgcctctcaagctggaggcctgcatcctaactcagggggataaaataagtttacaggaaccactcgactacctgctatgttgcatccagcactgtctggcttggtacaaaaatacagttattccccttcaacagggggaggaggaagaagaggaggaagaggcgttctatgaggacctagacgatatcctggagagtatcaccaacagaatgatcaagagtgagctcgaagattttgagctggataaatcggccgatttttcccagagtacatcaattggaatcaaaaataacatttgcgcgtttctggttatgggggtttgtgaagtcctgattgagtataacttttcaattagctcattttcaaaaaataggttcgaggacattctgagcctcttcatgtgctataaaaaactgtctgatattctcaacgaaaaagctgggaaagccaagacaaaaatggctaacaagacctcggacagcttgctgtcaatgaaattcgtctctagcttgctgaccgccttgtttcgtgtactgctctggagatatacaagcataccaacatccgtagaagaatcgggcaagaaagaaaaaggaaaatcgattagccttctctgtttggaaggacttcagaagattttcagtgcagtgcagcagttttatcagcctaaaatacagcagtttctgcgagcattggatgttactgacaaggaaggcgaggaaagagaagatgctgatgtgtctgttacccaacgcactgcttttcagataaggcagttccagagaagtttgttgaatctcctctcctctcaggaagaagactttaacagcaaagaggcccttctgctagtgactgtcttaacatctctgtcaaaactccttgagccgagcagcccacaattcgtgcagatgcttagttggacctcaaagatttgtaaagagaactcccgagaggatgcattgttctgcaagtctctgatgaacctgctgttcagccttcacgtttcgtacaaatctccagtgatcctgcttagagacctgagccaggatattcatggtcacctcggcgatattgaccaggatgtggaggttgagaaaaccaaccatttcgcgatagtgaaccttaggaccgccgcccctacagtttgtctgcttgtcctgagtcaggccgagaaagttctggaggaagtcgactggctcatcaccaagcttaagggacaggtgtcccaggagaccctcagcgtgtcgcccggtgtgtccgagctaagaagaaactcaaagaagtatggcaaggcaggagaggccgtatggtttagttctgacccgcccgttctattcttccactttcttcggacagagtag

SEQ ID NO: 187442 - DNA, 222 bp, synthetic construct
  misc_feature 1..222: note = Description of Artificial Sequence: Synthetic coding sequence
  source 1..222: mol_type = other DNA
atgttcaaggacgtgcccctgaccgccgaggaggtggagttcgtggtggaaaaagcgctcagtatgttctcaaagatgaaccttcaggaaatcccccccctggtgtatcagctgttggtcctgagctctaagggctcacgcaaatctgttctggagggcatcatcgcgtttttttcagccctcgataagcagcacaatgaagaacaatctggggatgagtag

SEQ ID NO: 187443 - DNA, 501 bp, synthetic construct
  misc_feature 1..501: note = Description of Artificial Sequence: Synthetic coding sequence
  source 1..501: mol_type = other DNA
atggcccagaccagcagctacttcatgctgatcagctgcctgatgtttctgagtcagtcccagggccaggaagcccaaactgagttgccacaggcacgaattagctgccctgaaggtactaatgcttatcggtcctactgctactattttaatgaagacagagagacctgggtggacgctgatttgtattgtcagaatatgaattccggcaatctggtctccgtactgacacaggcagaaggtgccttcgtggcctccctgattaaggagtcaggtacagacgactttaatgtatggatcgggctgcatgaccctaagaaaaatagacgatggcactggtcaagcggttccctggtcagctataagtcctggggcatcggggcccctagctccgtcaatcccggctattgtgtgtcattgaccagcagcactggcttccagaagtggaaagatgtgccctgcgaagataagttcagcttcgtgtgtaagttcaaaaactag

SEQ ID NO: 187444 - DNA, 384 bp, synthetic construct
  misc_feature 1..384: note = Description of Artificial Sequence: Synthetic coding sequence
  source 1..384: mol_type = other DNA
atggccgtgaccgaggccagcctgctgcggcagtgccccctgctgctgcctcagaaccggagcaaaaccgtttacgagggattcatctcagcccagggtcgcgatttccacctcagaatcgttctgcccgaggacctgcagctgaagaacgctaggttactgtgcagctggcagctgcgcaccattctgtccggctaccatcggatcgtgcagcagcgaatgcagcactcccccgatctcatgagttttatgatggaactcaagatgttgctggaagtcgccctcaagaatcgccaggagctgtacgcactaccaccacctccccaattctatagttccctgattgaagagatcggtacactgggatgggacaaagcaccttag

SEQ ID NO: 187445 - DNA, 6147 bp, synthetic construct
  misc_feature 1..6147: note = Description of Artificial Sequence: Synthetic coding sequence
  source 1..6147: mol_type = other DNA
atgagcggccggcagcggaccctgttccagacctggggcagcagcattagccggtctagcggcacccccggctgttcgagcgggacagagcgcccccagtctccaggaagttctaaagcccccctgcctgctgccgcggaagcccagctggagtccgatgatgacgtcctgttagtggccgcctatgaagccgaacgccagctctgccttgaaaacggcggcttttgtacttctgcaggcgcgttgtggatataccccaccaactgccccgttcgtgattaccaacttcatatcagccgtgctgcgttgttctgtaacaccctggtctgcctccccacaggcctgggcaaaacatttattgccgcagtcgtgatgtacaacttttaccgttggttcccttcaggcaaggtagtgttcatggcccccactaaaccactggtcacacaacagatcgaagcctgttatcaagtgatgggtataccacaaagccacatggctgagatgacggggagcactcaggctagtacacgaaaggaaatttggtgttccaagagggtcctgtttcttaccccacaggttatggtgaatgacctgtcccggggtgcctgccccgccgccgagattaaatgccttgttatcgatgaggctcacaaagcactcggcaactatgcatattgccaggtggtgagggagctagtaaaatacacaaatcatttccggatcctcgcattatccgcaaccccagggagcgacatcaaagcagtgcaacaggtcattacgaacctgctgattgggcagattgaacttcgaagcgaggactctccggatatccttacttactcacacgagcgtaaggttgagaaactgatcgtgcctctcggcgaggaactcgccgccattcaaaaaacctacattcagatcctggaaagcttcgcacgaagtctcatccagcggaacgtcttgatgagaagggatattcccaatctgacgaaatatcaaattatcctggcacgggaccaatttagaaagaatccgagtcccaacattgtcgggatccagcaggggatcatcgagggggaattcgccatctgcatcagtctttaccatgggtatgaactcttgcaacagatgggaatgaggagcctctacttcttcctctgtggcatcatggacggcacaaagggaatgacgcgctccaagaacgaactggggcgcaacgaagactttatgaagctctataatcacctcgaatgcatgttcgctagaactcggtccaccagcgctaatgggattagtgcaatccaacagggagataagaacaagaagttcgtctacagccatccaaaattaaagaaactcgaggaggttgtgatagagcactttaagagctggaacgcggagaatacaacagagaaaaagagggacgagacaagagtcatgatatttagttctttcagggattctgtccaggagatagcggagatgttatcacagcaccagccaattataagagtgatgactttcgtgggccatgcgtccggcaagagtacgaagggctttacccagaaagaacagctcgaggtggtcaaacagttcagagatggagggtacaacacactcgtgtcaacatgtgtgggggaagagggcctggatataggtgaggtagatctcattatctgcttcgacagccaaaaatcccctatccgattagtgcaacggatggggagaacaggccggaaacgacaggggaggatcgtgataattctctctgagggtcgcgaagaacggatctacaaccagtcacagagcaacaaacggagcatctataaagcgatcagctctaataggcaggtcctccatttctaccagagaagtccgcggatggtcccagacgggattaatcctaagttacataagatgtttattacacacggagtatatgagccagagaagccgtcgaggaacctccagagaaagagctctattttttcatatagagatggcatgcgccagagctcactcaaaaaagattggttcctatccgaagaagaattcaaactgtggaacaggctgtacagactgagagacagcgatgaaataaaggagattacgctcccacaggtacagttcagctcgctgcaaaatgaggagaacaaacccgcccaggaaagcaccaccgggatccaccagctgagtctaagcgagtggaggttgtggcaagaccacccactgcccacgcaccaagtagatcatagcgatagatgccgacatttcatcggcctgatgcagatgatagaaggcatgcgacatgaagagggggaatgttcgtacgaactagaggtagaatcttacctgcagatggaagatgtgacgtctacttttattgcccctcggaacgaatctaacaaccttgcctcggacacgtttattactcataaaaaatctagttttattaagaatatcaatcagggtagctcttccagcgtaatagagtccgacgaagagtgtgctgagattgttaaacagactcacatcaaacctaccaaaatcgtgagtctcaaaaaaaaggtgagcaaagagatcaaaaaggatcagctgaagaaggagaataaccacggcatcatcgattccgttgataacgaccgaaactccacggtggaaaacatttttcaagaggaccttcccaacgacaaacgcacttcagacacagacgagatcgccgctacctgtacaatcaacgagaacgtcataaaggagccgtgtgtactgctcactgaatgccagttcactaacaagtcaacctcgtctctggctgggaacgtgttggatagcggctacaatagtttcaatgatgagaaaagtgttagttcaaatttattcctgcctttcgaggaggagctctatattgtcaggaccgacgaccagttctataattgccactccttgactaaagaagttctggcaaatgttgagcggtttttatcatactctcccccacccctgtcaggtctctctgatctagagtacgaaattgctaaaggcacagctctcgagaatttattattccttccttgcgcagagcaccttagatctgataaatgtacttgtttgcttagccactccgccgtcaattcacaacaaaacctggagctcaattccctgaagtgtatcaactatcctagcgagaagtcatgtctgtacgacatacctaatgataatatcagcgatgaaccttccctttgcgactgcgatgtgcacaagcacaaccagaatgaaaatcttgtacctaataatagagttcagatacatcgcagcccagcacagaacttggtgggggaaaataaccatgatgtggacaacagcgatctgcccgtgctgagcacagatcaggatgagtctctgctgttattcgaagacgtcaacactgaatttgatgacgttagcctctccccactcaactcgaaaagtgagtccctgcccgtgtcagacaagacagcaatcagcgaaaccccactggtcagtcagtttcttatatctgacgagcttcttctggataataacagcgaactgcaggaccaaatcaccagggatgccaattcatttaaaagcagagaccagcgcggtgttcaagaagagaaggtgaagaaccacgaggatattttcgactgctctagagatctcttttcggtgacatttgatcttggcttctgtagtccagatagcgacgacgagatcctggaacacacttctgacagtaatcgtcctctcgatgatctgtacggaagatatctagaaatcaaagaaataagcgacgcgaactacgtcagcaatcaggccctcattccacgggaccactctaaaaattttacctcggggaccgtgattataccaagtaatgaggatatgcagaaccctaattatgtgcatctgccactgtctgcagctaagaatgaagaactgctctctccaggctatagtcaattcagcctgcccgtgcagaagaaggtgatgtcaacccctctgtctaagagcaatactctaaacagctttagcaaaatcagaaaagaaatcctgaaaaccccagatagtagcaaagagaaggtcaacttgcagaggttcaaagaggccttaaacagcaccttcgattattccgaattttccctggagaagtcaaaatcatccggccccatgtatctccacaaaagttgccacagtgtggaggacgggcagttgctgaccagtaatgagagtgaagacgacgaaatcttccggcgcaaggtgaaaagggctaaaggcaatgtcttgaatagtcctgaggatcagaagaatagcgaagtcgattctcccctccacgctgtgaagaaacggaggttcccaattaaccggtccgagctctctagtagcgacgagagtgagaatttccccaagccatgcagtcagcttgaggatttcaaagtttgcaacggtaatgcccggcggggtattaaagtgcccaagcgtcagtctcatctcaagcacgtcgctaggaagttcctggatgacgaggccgagctgtccgaggaagatgccgagtatgtgtcttccgatgaaaatgatgagagtgaaaatgagcaagactcatccctgctggattttttgaacgacgaaactcagttgtcacaggccattaatgattccgagatgcgggccatttacatgaaaagcttgcgctcaccgatgatgaacaacaaatacaaaatgattcacaagacacacaaaaacatcaacatcttctcacagatcccagagcaggacgaaacatacttagaggactcattttgtgtagatgaggaggagtcatgcaagggacaaagttcggaagaggaagtttgcgtggacttcaatctaattactgatgattgtttcgccaattctaagaaatataaaaccaggcgcgccgtgatgcttaaagagatgatggagcagaattgcgctcatagtaagaaaaagctctctcgtattattctccccgacgacagttcagaagaggaaaataacgtgaatgataagcgggaaagcaatatagctgttaatccaagcacagttaagaaaaacaagcagcaggatcactgcctgaacagcgtaccttctggctcaagcgcacagagcaaggttcgaagcactccccgggtcaatcctctcgcgaaacagagcaaacagacgtcgctcaatctgaaggatacaattagcgaggtctctgacttcaagcctcagaatcataacgaggtccaaagtaccaccccaccattcaccacagtggattcgcagaaagactgtagaaaattccccgtcccccaaaaggacggttctgccctggaggactcatccacctccggggcaagttgctctaaaagtcgcccccacctcgcaggcactcacacatccctacgcctgccccaggaaggcaaaggcacctgtattttggtgggcggccacgagattacttcagggttggaagtaattagcagcctccgagcaatacacggccttcaggtagaagtctgccccttgaacggttgcgactacattgtgagtaaccgtatggtagttgaacggcggtctcagagtgaaatgctgaactccgtgaataagaacaaattcatcgagcagattcaacacctgcagtccatgtttgagaggatttgcgtaatcgtggagaaggatcgcgaaaagacaggagacacttctagaatgttccggcgcaccaagtcatatgattcccttcttactactctaataggcgccggtattcgcattctcttcagttcctgccaggaagagacagcggacttgttgaaagagttatccctggttgagcagcgcaagaatgtggggatccacgtgcccaccgtggttaattctaataaaagtgaggctctgcagttctatctttccataccgaatatctcgtacatcaccgcattgaacatgtgtcatcagttctcatcagtgaaaagaatggcaaatagctctttacaagaaatcagcatgtatgcccaggttacccatcagaaggctgaagaaatctatagatacattcattacgtttttgacatccagatgttgcccaacgacctaaatcaggacaggctgaagtccgacatttag

SEQ ID NO: 187446 - DNA, 2010 bp, synthetic construct
  misc_feature 1..2010: note = Description of Artificial Sequence: Synthetic coding sequence
  source 1..2010: mol_type = other DNA
atgagcggccggcagcggaccctgttccagacctggggcagcagcatctctcgctcttcaggcacacccggctgcagctctggcaccgagcgcccccagagtccaggcagctctaaagcacccctgcccgctgctgcggaagcccagcttgaaagcgatgatgatgtgctcctggtggcggcatacgaagccgagcggcagctgtgcctggagaatggagggttttgcacatctgctggggctctgtggatctatcccacaaactgccctgtcagggattatcagctccacatttctcgcgctgccctgttttgtaatacattagtctgcttgccaaccggcctcggcaaaaccttcattgcggctgtcgtgatgtataacttttaccggtggtttccttccggcaaagtggtttttatggcccctacaaagccactcgtgacccaacagatcgaggcgtgttaccaggtcatgggtatccctcaaagtcatatggctgaaatgacaggtagcacacaggcatccacaagaaaggagatttggtgtagcaaaagggtgctgttcctcacaccacaggtaatggtcaacgatctgtcacggggcgcttgtcccgccgcagaaattaaatgtttagtgattgacgaagctcataaagcactggggaactacgcctattgtcaggtggtacgcgaactcgtgaaatacaccaatcatttcaggatcctggctctgtccgccacccccggctctgacataaaagccgtgcagcaggttatcaccaatctgcttattggtcagattgagttgcgcagcgaggacagccctgacattcttacatactctcacgaaagaaaagtcgaaaagctgatcgtgcctctgggtgaggagcttgccgctatccagaagacgtatatccagatccttgaatccttcgctagatccctgattcagaggaacgtcttaatgaggagggacatccctaatctgactaagtatcagatcattctggcccgggatcagtttcgaaaaaatccatcccccaacattgtgggcatacaacagggaataattgaaggtgagtttgccatctgcatttccctctaccacggatacgaactgctccagcagatgggtatgagatcgctctatttttttttgtgcggaattatggatgggaccaaagggatgacgaggtccaaaaacgaactgggaaggaatgaggatttcatgaaactctacaaccacctggagtgtatgtttgccaggactcggagcaccagcgcgaacggcattagtgctatacagcagggcgataaaaataaaaagtttgtgtattctcacccaaaactcaaaaagctagaagaagtagtaattgagcattttaaatcgtggaacgccgagaataccacagaaaaaaagagggacgagacacgtgtaatgatattctcctcattcagagactctgtgcaggagatcgctgagatgctgtcccagcaccagccaatcattcgagttatgactttcgtcggccacgcctccgggaaatcaacgaagggctttacacaaaaagaacagctcgaagtggtaaagcagtttagagatgggggctataataccctggtgagcacctgtgtgggagaggagggcctcgatatcggcgaagtggatctcattatctgcttcgatagtcagaaatcacccattcgactcgtgcaaagaatgggacggaccggccgcaaacgacaaggaaggatcgttattatcctgagtgaagggcgggaagaacgcatatacaaccagtcccagtccaataaacggtctatctataaagcaataagcagcaatcggcaggtcctacacttttaccagagaagtccaagaatggtgccagacggcattaaccctaaactgcacaaaatgttcattacacatggtgtgtatgagcccgaaaaacccagtaggaacttacagcggaaaagcagtatcttctcatatcgagatggcaaatag

SEQ ID NO: 187447 - DNA, 1968 bp, synthetic construct
  misc_feature 1..1968: note = Description of Artificial Sequence: Synthetic coding sequence
  source 1..1968: mol_type = other DNA
atggccgactacagcaccgtgcccccccccagcagcggcagcgccgggggcggaggggggggtggtgggggagggggtgtgaatgatgccttcaaggatgctctgcagcgggcaagacaaatagccgcaaaaattggaggcgacgctggaacgtccttaaatagtaacgattacggatacggagggcagaaaagacccctggaggacggggatcaaccagatgccaaaaaggtggcgccacagaatgactcattcggcacccagctgccccctatgcaccagcagcagagtaggtccgttatgacagaggaatacaaagttccagatggcatggtaggctttatcattggccgaggcggcgaacagatttcaagaattcagcaggaatctggctgtaagatccagattgcacccgattcaggtggtctgcctgaacggagctgtatgctcactggtacacctgaaagcgttcaaagtgctaaaaggctgttggatcagattgttgagaaaggacgacctgcccctgggttccaccacggtgacgggccaggaaacgccgttcaggagatcatgattcccgccagcaaggcaggccttgtgatcggcaaagggggggaaactatcaagcagcttcaggagcgagctggggtgaagatggttatgattcaggacggaccccagaacacaggtgcagataaacccctcagaattacgggggacccttacaaggttcagcaagctaaggaaatggtgctggagctcattcgcgatcagggaggtttccgggaggtcagaaatgagtacggctccagaattggtggcaacgagggcattgatgtgcccattcccaggttcgctgttggaatcgttatcgggagaaacggggaaatgatcaagaagattcaaaacgatgccggagtgaggatacaattcaaaccagatgacggaaccacccctgaacgcattgctcagatcactggaccgccagatcggtgccaacatgccgctgaaataatcaccgatcttctaaggtccgtccaggcaggaaacccgggaggccctgggcccggagggcgaggtcgaggccgcggccaggggaactggaatatgggaccaccggggggcttgcaagaatttaattttatcgttccaacaggaaagacagggctgatcattgggaagggcggcgaaaccataaagtcaattagccaacagagtggtgcgcggattgagcttcagagaaatccaccccctaacgccgatcctaacatgaagctttttactattaggggaacgcctcagcaaattgactacgccagacagctaatcgaggagaagatcggcggccccgtgaatcccttaggccctcctgttccacacggtccacatggtgtgcctggcccccatggtcctccaggtccaccaggccctggtacaccgatgggcccctacaatccagcgccgtataatcccggcccccctgggcctgccccacacgggccaccggctccatacgctccccaggggtggggcaatgcctatccacactggcaacagcaggcacctccagaccccgcaaaagccggaactgatcctaacagtgcagcatgggccgcgtattacgcacattattatcagcagcaggcacagcctcctcccgcggcaccagctggagcccctactacaacccagaccaatgggcagggtgatcagcagaatccagctcccgctggacaggtcgattacacaaaagcctgggaggagtattataagaagatggggcaggctgtccctgcccctaccggagctccaccagggggtcagccagactattctgctgcttgggctgaatattaccgacagcaggccgcctattatgcacagacatcacctcagggcatgccccaacacccacccgcaccccagggcttcgctaatcatgccagatcacaccatcacctgtactag

SEQ ID NO: 187448 - DNA, 1935 bp, synthetic construct
  misc_feature 1..1935: note = Description of Artificial Sequence: Synthetic coding sequence
  source 1..1935: mol_type = other DNA
atggccgactacagcaccgtgcccccccccagcagcggcagcgccggcggcgggggcggaggaggaggaggtggcggtgtcaatgatgcgttcaaagatgcattacagcgcgcgaggcagatcgctgccaaaataggcggtgatgccggaacatcactgaactctaacgattatgggtatgggggtcaaaaacgacccctagaagacggggatcagcccgatgccaagaaggtggctcctcaaaatgattccttcggcactcagctgcctccgatgcaccaacagcaaagccgctcagtaatgactgaggaatacaaggtgcccgacggcatggtgggattcattatcgggagaggcggcgaacagatttcccggattcagcaagagtctggctgcaaaatacagatcgcgcccgattccggtggcctgccagagaggagttgcatgttgaccggaacgccagaatccgtgcaatccgctaagcgcctgctggatcaaatagtggaaaagggaaggccagcccccggattccatcacggagatggccctggcaacgccgtacaggagattatgattcctgcttctaaagccgggctggtaatcgggaagggaggcgagacgatcaaacaattgcaggaaagagccggcgtgaaaatggttatgatccaagatggcccgcagaatacaggagcagataagcccctgagaatcactggagatccctataaagtccagcaggcgaaagaaatggtgctggaactgatcagagaccaagggggattcagggaggttcgaaacgaatacgggtctagaataggaggcaacgaagggatagacgtgcccattccacggtttgcagttggcatcgttattggaagaaacggggagatgatcaagaagatccaaaacgacgcaggggtgagaatccagttcaagcctgatgacgggactactccggagaggattgcccaaatcactgggccccctgaccggtgtcagcacgccgccgagatcatcacagacctgttacggtcagtgcaggccggtaatccaggcgggccaggccccggtgggcgcggcagaggacggggacagggaaactggaacatgggacctccaggcgggcttcaggagtttaactttatcgtgccaacaggcaaaacagggctgattataggcaaaggaggcgaaacaatcaaatcgatctcccaacagtctggtgcgcggattgagttgcagaggaaccccccccctaacgccgatccaaacatgaaattatttacgattagaggtacaccacagcagatcgattatgcaagacagcttatcgaagagaaaattggtggccccgtgaatccactaggtccacccgtcccccacggaccccacggggtgccaggcccacatggtccacctggccccccagggccaggaactccaatgggcccctacaaccctgccccgtacaacccaggacctcccgggccagcaccgcacggtccgcctgctccatatgcccctcaggggtggggtaacgcttacccacattggcagcaacaagctccaccagaccccgccaaggcgggaactgatcccaattctgccgcctgggccgcttattacgcacattactaccagcaacaagcacagcctccccccgcagccccagccggcgctcctaccaccacccaaaccaacggccaaggggatcagcaaaaccccgccccagccggtcaggtcgattacacaaaagcttgggaggaatattacaagaagatgggccaggcggtgcccgcccccaccggcgctccacctggaggtcaacccgactattccgccgcttgggccgaatattataggcagcaggcagcttattatgcgcagacaagtccccaggggatgccgcaacacccacctgccccccaaggacaatag

SEQ ID NO: 187449 - DNA, 1965 bp, synthetic construct
  misc_feature 1..1965: note = Description of Artificial Sequence: Synthetic coding sequence
  source 1..1965: mol_type = other DNA
atggccgactacagcaccgtgcccccccccagcagcggcagcgccggcggaggagggggagggggcggagggggcggggtgaacgacgcattcaaggatgccctgcaacgggcccgtcaaattgccgccaagatcggcggggacgccggcacttctctgaactctaacgactacggatatgggggccagaagcgtccactggaagacggggaccagccggatgccaagaaggtggccccacagaacgattcttttggaacacagctccctcccatgcaccaacagcagagaagcgtcatgactgaggaatacaaagttcctgacgggatggttgggtttataattgggcgggggggggaacagatcagcaggatacagcaggagtccggttgcaagatacagattgcacccgattctggtggcctgccagaacgctcatgcatgctgacgggaactcccgagagtgtgcagagcgctaagcgtctgttagaccagatcgtcgagaaaggtcgtcccgctcccggcttccatcatggcgacgggccaggcaatgctgttcaggagatcatgatccccgcatctaaagccggactggtcatcgggaagggtggcgagaccatcaaacaacttcaggaacgggccggagttaagatggtcatgatccaggatggaccccagaacacaggggccgataagcccctgcgcatcacgggagatccatataaggtgcaacaggcaaaggaaatggtactggagcttatcagggaccagggcgggtttcgcgaagttcggaatgaatatggttcccgcattggcggaaatgagggcattgatgtacctattccccgttttgccgtaggaatcgtgatcgggaggaacggagaaatgatcaaaaagattcagaacgacgcgggcgtgcgtattcagttcaaacccgacgacggtactactccggagaggattgcacagattacaggcccacctgaccgctgccaacatgccgctgaaatcatcacagatctcctccggtcagtacaggccgggaatcccggaggcccaggacctggaggaaggggcagagggagaggtcagggcaactggaatatgggcccccctggagggctgcaagagttcaacttcatcgtgcccaccgggaaaacagggctcataatcggtaagggcggagagaccatcaagtctatttcccagcagagtggggcacgaatcgagctgcagcggaacccccctcctaatgcagacccaaatatgaaattgtttactatccggggcaccccgcaacagatagactatgccagacagctaatcgaggaaaaaatcggcggtccggtgaatccgctaggtccccccgtcccccacgggccacatggggtgcctggtccacacgggcctcccgggccgccaggtccgggaacccctatgggaccttacaatccggcaccctacaaccccggaccacccgggccagcacctcatggaccgcctgccccctatgcgccccaggggtggggaaatgcatatccccattggcaacagcaagccccccctgacccagctaaggccggcacagacccaaactccgcagcttgggctgcttactacgctcattattaccagcagcaagcccaaccaccacctgctgcccccgccggcgcgcctacgacaacccagacaaatggacaggagggggaccaacaaaatccagctcctgccggccaggtggactacaccaaggcctgggaggaatactacaagaaaatgggccaggctgtccccgccccaacaggagctcccccagggggacagcccgactacagtgccgcttgggcagagtactacagacagcaggctgcttactacgcgcagacatccccccagggtatgccacagcaccctcccgctcctcaatgtcggtttgaccccgcatccattgaactggcgttgtag

SEQ ID NO: 187450 - DNA, 1890 bp, synthetic construct
  misc_feature 1..1890: note = Description of Artificial Sequence: Synthetic coding sequence
  source 1..1890: mol_type = other DNA
atggccgactacagcaccgtgcccccccccagcagcggcagcgccggcggaggaggaggcggcgggggcggtggcggcgtgaacgacgcctttaaagacgccttgcagagggcaaggcaaatcgccgccaagatcggtggcgatgctggaacaagcctgaactcgaatgactacggatatggggggcaaaagcggcccctggaagacggtgatcagccagacgcgaagaaggtcgctccccaaaacgactccttcgggactcaattacccccaatgcaccagcagcagcggagtgtcatgacagaagagtacaaagttccagatggtatggtcggcttcatcatcggacgcggaggtgagcagatcagtcggattcagcaggagagcgggtgtaaaatccaaatagctccagacagcggtgggctacccgaaagatcctgcatgctgaccggcactccagagagcgtccaatcggccaagaggctgctggaccagattgtcgagaagggccgcccggcccccgggtttcaccacggcgacggaccagggaatgcggttcaggagattatgattcccgcctcgaaggccggcctagtcattggaaagggtggggaaactataaagcagcttcaagagcgggcaggagtgaagatggtcatgattcaggatggcccccagaatacgggcgctgacaagcctctcaggatcactggagacccctataaggtgcaacaggcgaaagaaatggtgctggagctgattcgggatcagggcggattccgcgaagtccgcaacgagtacggcagcagaatcgggggtaacgaggggattgatgtgccaattcccagatttgctgttgggatagtgattggaagaaatggcgagatgatcaagaagattcaaaacgacgccggggtgcgcattcagtttaaacccgatgatgggaccacccccgaacgaatcgcacagataacgggcccccccgacaggtgtcaacatgcagccgaaatcatcacggacctgttgaggtccgtccaggcaggcaacccaggcggacccggaccaggaggcaggggacggggtagaggccagggcaactggaatatggggcctcctgggggcttacaggaattcaactttatcgtgcccaccggcaagactggactaatcatcggcaagggaggcgagacgataaaaagcattagtcaacaaagcggggcacgaattgagctgcagcgtaatcccccccctaacgctgatcccaacatgaagctgttcaccatcagagggacaccacagcagattgattatgccagacagctgattgaggaaaaaattgggggccccgtaaacccactcggcccaccggtgccccatggaccgccagggactcctatgggaccttacaaccctgccccatacaatccaggacctccaggaccagcaccccatggacctcccgccccctacgctccccagggttggggtaatgcgtatccccattggcagcagcaggctccgccagaccctgccaaagctggaactgatccaaattcagcagcatgggcggcgtactatgcccattattaccaacagcaggcccagccgcctcccgctgcgcctgccggtgcgcctaccactacccagaccaacggccagggcgaccaacagaatcctgctccagctgggcaggttgattatacaaaggcctgggaggaatattataaaaaaatggggcaggctgtgccagcccctactggagcaccccccggcgggcagccggattacagtgccgcttgggcagaatactatcgccaacaggcggcctactacgctcaaacgagcccccaggggatgcctcagcacccgcctgctcctcagggacaatag

SEQ ID NO: 187451 - DNA, 699 bp, synthetic construct
  misc_feature 1..699: note = Description of Artificial Sequence: Synthetic coding sequence
  source 1..699: mol_type = other DNA
atggccgactacagcaccgtgcccccccccagcagcggcagcgccgggggaggggggggcgggggaggtggcggcggtgtgaatgatgccttcaaggacgctctacagagggccagacagatcgccgctaagatcggaggggacgcaggtacctctctgaacagtaatgactacggatacgggggccagaagagacccctagaagacggggatgggtcttggactagtccaagcagcacaactcattgggagggcatgccaagtcctttcaaggatcaaccggatgccaaaaaggttgctccccagaatgatagtttcggaacacaactgcctccaatgcatcaacagcagaggtctgtgatgaccgaagaatataaggtgcctgacggcatggttggatttatcataggccggggaggcgagcaaatctctagaatacagcaggaaagcgggtgtaaaattcagatcgcgcctgatagcggaggcttacccgagcggtcctgtatgctgactggaacaccggaatccgtgcagagtgccaagaggctgctggatcaaatagtcgagaagggtaggcccgctccagggttccatcatggggacggccctggcaatgctgtgcaggaaatcatgatccctgcaagcaaggcagggttggtgattggcaaaggaggagagacaatcaagcaactgcagtag

SEQ ID NO: 187452 - DNA, 1998 bp, synthetic construct
  misc_feature 1..1998: note = Description of Artificial Sequence: Synthetic coding sequence
  source 1..1998: mol_type = other DNA
atggccgactacagcaccgtgcccccccccagcagcggcagcgccggcggaggcggcggtggcggcggtgggggcggcgtcaacgacgcgtttaaggacgcactgcagagggcccggcaaattgctgcaaaaatcgggggcgacgcagggacttctctcaactccaatgactacggttatgggggacagaagcgacccttggaggatggcgatggcagctggacttccccaagttccacaactcactgggaagggatgccttccccctttaaggatcagcctgatgcgaagaaagtggccccacagaatgactcgttcgggactcagctgcctcctatgcatcagcagcaaagcagatctgttatgaccgaagagtataaggtgcctgacggcatggtcggcttcatcattggtcggggcggagaacagatatccaggattcagcaggagagtggatgcaagatccagatagccccagactcaggcgggctcccagagaggagctgtatgctaacgggcaccccggagtcagtgcagtctgccaaaagactgctcgatcaaatagtggagaagggccggcccgctcctggatttcaccacggggacggaccagggaacgctgttcaggagatcatgatcccagcttctaaagcaggtctggtgattggtaagggcggcgaaacaatcaaacagctccaagagagagcaggcgtaaagatggtcatgatacaggatgggccacagaatactggggccgacaagcccctaaggatcactggcgacccctataaggtgcagcaggccaaagagatggtgctggaacttattcgagaccagggcggttttcgagaggtaagaaacgagtatggttcacggattgggggcaacgagggcatcgacgtccctattccacggttcgccgtcggaatcgtgataggtcgcaatggggaaatgatcaaaaaaattcagaacgacgctggagtacggatccaatttaagccggacgatggaactaccccagagcggattgcccagatcaccggtcctccggaccgatgccaacatgcggcagagattatcacagatctgttgaggtcagtgcaagctggcaaccctggtggtccaggtcccggcggccgagggcgtgggcggggacagggtaactggaacatggggccacccggcggcctccaagaatttaacttcatagtgccgacagggaaaactggactgatcatcggaaaaggcggagagaccattaagtcaatcagccagcagagtggagcacgcatcgagctgcagaggaacccacctccgaatgcagacccaaacatgaagttattcaccataagagggaccccacagcagattgattacgcacgtcagttaattgaagagaagatagggggcccagttaatccgctggggcctccggttccacacgggcctcacggcgtgcctgggccgcacggaccaccgggaccccccggacctgggacccctatgggcccatacaatcctgccccctataaccccggtcccccaggcccagcccctcacggacctccggccccttacgccccccaggggtgggggaatgcatacccacactggcaacaacaagcaccccccgatcctgctaaggccgggacggaccctaattctgccgcctgggcagcgtattatgctcattactaccagcagcaggcgcagccgccccctgcagcacccgccggggcccccactactacacagaccaacgggcagggcgaccagcaaaaccccgccccagctgggcaagtcgactacacgaaggcttgggaggagtattacaaaaagatgggacaggccgtgccagccccaactggggcccctcccggcgggcagcctgattactctgccgcatgggccgaatactaccgccagcaggctgcttattatgcgcaaaccagtccacagggcatgcctcagcatcctccagcacctcaaggccaatag

SEQ ID NO: 187453 - DNA, 1260 bp, synthetic construct
  misc_feature 1..1260: note = Description of Artificial Sequence: Synthetic coding sequence
  source 1..1260: mol_type = other DNA
atgcccctgagccggtggctgcggagcgtgggcgtgttcctgctgcctgccccctactgggccccaagggaacgttggttggggtctttacggagaccaagccttgtgcacggctatcccgtcttggcctggcactctgccaggtgttggtgccaagcctggaccgaggagccacgtgcactgtgctctagcctccgtatgaatggcgatcagaattccgatgtatacgctcaggagaagcaggattttgtgcaacacttcagccagattgtgcgggtcctgactgaggatgagatgggccaccctgaaataggagatgctatcgccagattaaaggaggtcctggagtacaatgccatcggggggaagtacaacagggggctcaccgttgtggtggcctttcgggagctggtggagccacgtaaacaggacgccgactccctacagcgtgcatggactgtgggctggtgtgttgagcttctccaggccttcttcttggtggcagatgacatcatggatagctcactgactaggcgcggacaaatctgctggtaccaaaagcccggagtgggtctggacgcaattaatgatgcaaatcttctcgaggcctgcatctataggcttctcaaactctactgccgcgaacagccctattacctgaatttgatcgagctctttctacagtcaagctaccaaacggagatagggcagacgctagacttgctaaccgccccccagggcaacgttgatttggtgcgtttcaccgaaaaacgatataaaagtattgtgaaatataaaaccgccttttactccttttacctgcctattgctgccgctatgtacatggccgggattgatggggagaaggagcatgccaatgctaagaagattttgctcgagatgggtgagttcttccagatccaagacgactacctggatctttttggtgatccatctgtgacaggcaaaatcggtaccgatattcaggacaataaatgttcatggctcgtggtgcagtgtctgcagagggcaacgcctgagcagtatcagatcctcaaggagaattatggacagaaggaggccgaaaaagtggctcgggttaaggccctctatgaagagctcgatctccctgctgtgttcttacaatacgaagaagatagctacagccatatcatggcactcatcgaacaatatgccgcccctctgcctcctgctgtattcctcgggctggcccgcaagatttataaacgccgaaagtag

SEQ ID NO: 187454 - DNA, 1260 bp, synthetic construct
  misc_feature 1..1260: note = Description of Artificial Sequence: Synthetic coding sequence
  source 1..1260: mol_type = other DNA
atgcccctgagccggtggctgcggagcgtgggcgtgttcctgctgccagcaccatattgggcacctcgcgaacgatggctaggctctctcagaaggccgtcgcttgtgcacggctacccagtgttagcgtggcacagtgccaggtgctggtgtcaggcctggactgaagagcccagagctttgtgcagtagcctccgaatgaatggggatcagaactccgatgtctatgctcaggaaaagcaggatttcgtgcaacacttctctcagatagtcagagttttaacggaagatgaaatgggccatcccgagatcggtgatgctatcgcacgtttaaaagaggtcctcgagtacaacgccatcggggggaaatacaaccgcggcctgactgtagtagtcgcatttagagaattggttgaacccagaaagcaggatgcggattcattgcagagggcttggacagttggctggtgtgtcgaactcctgcaggcattctttttggttgccgatgatatcatggactcgagcttgacaagacgcgggcagatctgctggtaccagaaacccggagttggcctggacgctatcaacgacgctaatctgttagaagcgtgcatctacaggctcctgaaactctactgccgtgagcagccgtactatctgaacttgattgagctgttcctacagtcttcgtatcagactgaaatcggccagactctggaccttctgacggctccgcaggggaatgttgatctggtgcgctttaccgagaagcgctataaaagtatcgtcaaatataaaactgctttttactccttctatctaccaatcgccgccgccatgtatatggcgggcattgacggagaaaaggaacatgccaatgccaaaaaaattctcctagagatgggagagttcttccaaattcaagacgattacctcgacctcttcggggaccccagcgttaccggaaaaataggaactgatattcaggataataagtgctcgtggctggtggtgcagtgtctgcaacgcgcgacaccagagcagtaccagatcttgaaagaaaattacggccaaaaggaagcagagaaggtggccagagtgaaggcgctgtatgaagaactggatcttcccgctgtcttccttcagtacgaagaggattcttattcccacataatggccctgattgagcagtatgcagctccacttccgcctgctgtattcctgggcctagcacggaagatctataaacgcagaaagtag

SEQ ID NO: 187455 - DNA, 1062 bp, synthetic construct
  misc_feature 1..1062: note = Description of Artificial Sequence: Synthetic coding sequence
  source 1..1062: mol_type = other DNA
atgaacggcgaccagaacagcgacgtgtacgcccaggagaagcaggacttcgttcagcacttctctcagatagtgagagtcctcacagaagacgagatggggcaccccgaaatcggggacgccatcgcaaggctgaaggaagtgctcgagtataacgcaataggaggcaaatacaatcgcgggctgacagtagtagtagccttcagggagctggtggagccaaggaagcaggatgcagactccctgcagcgggcttggactgtcggctggtgtgtcgaactccttcaggcctttttcctggttgctgacgatataatggatagcagcctcaccagacgaggccagatttgctggtatcagaagcctggggtgggcctagatgccataaatgacgccaacttactggaagcgtgcatttaccggctgcttaagctctactgcagagaacagccctattatttaaacttaattgagctgttcctccagtcatcctatcagactgagatcggtcagacattggatcttttgacagcgccacagggaaatgtggatctggtgagatttacagagaaacgctacaaaagtatcgtgaagtacaaaacggcattctattcattttacctgcccatcgctgccgccatgtacatggctgggatcgatggggaaaaggaacatgcaaatgccaaaaagattcttttggagatgggggaattcttccaaatccaggatgactatctcgacctgttcggggacccttctgtaacaggcaaaatcggcacggacatacaggacaataaatgctcctggctggtggtgcaatgcctgcagcgggccacccccgagcagtaccaaattctgaaagagaactacggacaaaaagaggctgaaaaggtggctagagtaaaggctttgtacgaagagctggatctcccggccgtgtttttgcagtacgaagaagacagctactcccacatcatggccctcatcgagcagtacgccgcgcctctgcccccggctgtgttcttggggcttgcccgcaaaatctacaaaaggcggaagtag

SEQ ID NO: 187456 - DNA, 2760 bp, synthetic construct
  misc_feature 1..2760: note = Description of Artificial Sequence: Synthetic coding sequence
  source 1..2760: mol_type = other DNA
atgaccggctacaccatgctgcggaacggcggcgccggcaacggcgggcagacctgcatgctgcggtggtcgaataggatccggttaacctggctgagtttcacactctttgtaatcctcgtgttttttcctcttatagcacattactacttaacgacactggatgaggcagatgaggcgggaaagcggatatttggcccccgtgtgggtaacgagctctgtgaagtgaaacatgtccttgatctgtgtcggattcgagaaagtgtgagtgaagagttgcttcagctggaggccaaacgtcaggaacttaattcagaaatcgctaaactgaacctaaagatcgaggcgtgcaagaagagcattgaaaacgcaaaacaagacctgctacagctgaagaacgtgataagccagaccgaacactcctataaagagctcatggcccagaaccagccaaagttgagtcttcccattcgattgctgccggagaaggacgatgcggggctgccgccccccaaagccacacgtggctgtagactacacaactgttttgattattcccggtgccctcttaccagcggcttccctgtctatgtgtatgattcagatcagtttgtctttgggagctatctggaccctctggtgaaacaagccttccaggcaacagccagggccaacgtgtatgtgactgaaaatgcggatatagcctgcttgtacgtaattctcgttggggaaatgcaagaaccagtcgtgcttaggcctgcggagctggaaaagcagctttatagccttccacactggcggactgatggccacaaccatgtgatcatcaacttgtctagaaaatctgacacgcagaacttgctgtataatgtgagtacaggacgggccatggttgcccagagcacgttttatactgtccagtatcggcctggttttgacctcgtggtgtcgccgctagtccacgcaatgagcgagcctaactttatggaaatccctccccaggttcccgtgaaacgcaagtacctctttacattccagggcgagaagattgagtctcttcgatcctctttgcaggaagccaggtcgttcgaggaagaaatggagggagatccaccggctgattatgatgatcgcattattgctaccttgaaagcggttcaggatagcaagctggatcaagtcttagtagagtttacatgtaagaatcagcccaagccaagcctgcctacagagtgggcactttgcggcgagagagaggaccgcttggaattgttgaaacttagcacatttgcactaattattacccccggcgatcctcggctggtaatatcttctggttgcgccacccggcttttcgaggctcttgaggtcggagctgtgcctgtggtcttgggtgaacaggtccagctcccttaccaggatatgttacagtggaacgaggccgccctcgtcgtccccaaacccagagtaaccgaagtgcacttcctcttgaggagtctctctgacagcgatcttctcgctatgcgcagacagggacgttttctgtgggagacctacttctcaacagcggattcaatctttaatacagtgctcgccatgatccgcacaaggatccagatccctgcagcaccaattagggaagaggccgcggccgagattccccaccgctcaggtaaagcagccggaacagatcctaacatggctgataatggggatctcgacctgggtccggtcgagaccgagccgccgtatgctagccctcggtacctgagaaattttactcttacagttacagatttttatcgatcttggaattgcgcacctggaccattccacctatttccacacacacctttcgacccagtgcttccgagcgaggcaaagttcctgggaagcggtacgggtttccgacctatcggcggaggcgctggtggctcagggaaagagtttcaagccgctttaggaggcaacgtgccaagggagcagttcactgtcgtaatgctgacctatgagcgtgaggaggtactgatgaacagtctcgagcgtctaaacggtttaccttaccttaacaaagtggtggtcgtttggaattcgcccaagttgccttctgaagatcttttatggcctgacatcggtgtgccgatcatggtcgtgcggaccgagaaaaactccctgaataacagatttctcccatggaatgaaattgagactgaggccatcttgtctattgacgatgatgcacatctccggcacgacgaaataatgtttggatttagggtgtggcgcgaggcccgcgacagaattgtgggcttcccaggtcggtaccacgcctgggatataccgcaccagtcctggctctataactccaattattcctgcgagctctccatggtgctgacgggcgctgcctttttccacaaatactatgcgtacctgtatagttacgtgatgccccaggctatccgagatatggtggatgaatacataaattgtgaggatattgccatgaatttcctcgtgagccacatcacgagaaaacctccaataaaagtcacttctcgctggacctttcgctgcccgggttgtccccaggccctttcccatgatgactcacatttccacgaacggcacaagtgtattaatttcttcgtaaaagtgtacggttacatgccactgctctacacccagtttcgagtcgacagcgtgctgttcaaaactaggctgccgcacgataaaacgaaatgttttaaatttatttag

SEQ ID NO: 187457 - DNA, 1125 bp, synthetic construct
  misc_feature 1..1125: note = Description of Artificial Sequence: Synthetic coding sequence
  source 1..1125: mol_type = other DNA
atggagttcgtgaagtgcctgggccaccccgaggagttctacaacctggtcaggtttaggattggaggcaaacgaaaggtaatgcccaaaatggaccaagacagcctgtctagcagtctcaagacttgttacaagtatctgaaccagacaagtaggtccttcgccgccgtgattcaggccctcgatggcgagatgcgaaacgccgtttgcatcttttatctggttcttagggcgctagacactctagaggatgacatgacgattagcgtggaaaagaaggtgccactcctccataactttcacagcttcctttaccagcctgattggagatttatggaatccaaagaaaaggaccggcaggtgctggaggacttccccacatactgccattatgttgccggactggtaggaattggcctgtcccgcctgttctccgcaagtgaatttgaggaccctcttgtcggtgaggacactgaaagagccaattctatgggcctgttcttacagaaaacaaacatcattcgagattatctcgaggatcaacagggtggtcgtgaattttggccacaagaggtctggagtagatatgtcaagaagctgggcgatttcgccaaacccgagaatatcgatctcgccgtgcagtgtctgaatgagcttattactaatgctcttcatcatattccagacgtcataacctatttaagtcgcttgcgcaaccagagtgttttcaacttttgtgccatccctcaggttatggccatcgccactctcgctgcatgttataataatcagcaggtctttaagggagccgtgaagatcagaaagggccaggcagtgaccctcatgatggatgctaccaacatgccggctgtgaaagctattatctatcagtatatggaagaaatctatcatcgcattcctgactcagatccctctagctcaaagactaggcagatcattagtactatcaggactcagaacttgcctaactgccagcttatctctcgatctcactattcccccatctatttgtcatttgtcatgctgcttgctgcattaagttggcaatatctcactacactttcacaggtcacagaggattatgtccaaacgggcgaacattag

SEQ ID NO: 187458 - DNA, 999 bp, synthetic construct
  misc_feature 1..999: note = Description of Artificial Sequence: Synthetic coding sequence
  source 1..999: mol_type = other DNA
atgaccatcagcgtggagaagaaggtgcccctgctgcacaacttccactctttcctgtaccagccagactggaggtttatggaaagcaaggaaaaagaccggcaggtgctggaagactttcccactatatccctcgagtttaggaacctagccgaaaaataccagaccgttatagctgacatttgccggcggatggggatcgggatggcagaatttctcgataagcacgtcacgtcagaacaggagtgggacaaatactgtcactatgtggccggtttagttggaataggcctcagccggctcttttccgcatccgagtttgaagaccctcttgtgggagaagatacagagcgggccaattccatgggattatttctccagaagacaaacattattcgggattacttggaagatcagcaggggggcagagagttctggccgcaggaggtctggtcacgctacgtaaaaaaactgggggattttgccaaacctgaaaacatagacctcgccgttcagtgtttgaacgaactcatcactaacgcgctccaccacattcccgacgtaattacttacctttctcggctccgcaaccaaagcgtgtttaacttctgtgccattcctcaggtgatggcaatcgccactctggctgcatgctacaacaaccagcaggttttcaagggagccgtgaagatcaggaagggccaagccgtgacactcatgatggatgccactaatatgccagccgtgaaggctattatctatcagtacatggaggagatctaccaccgaatcccagatagcgaccccagtagcagcaagacccggcaaataatcagcaccatacggacgcagaatctgccaaactgccagctaatctcgaggtctcactatagcccaatttacctgtcattcgttatgttattagccgccctctcctggcagtacctcacaactctgtctcaggtcacagaggactatgtgcagaccggtgaacactag

SEQ ID NO: 187459 - DNA, 1233 bp, synthetic construct
  misc_feature 1..1233: note = Description of Artificial Sequence: Synthetic coding sequence
  source 1..1233: mol_type = other DNA
atggagttcgtgaagtgcctgggccaccccgaggagttctacaacctagttagattccggatcggcgggaagagaaaggattcgctcagtagttccttaaagacatgctataagtatctgaaccagacatcgaggagcttcgcggccgttattcaggccctcgatggggaaatgaggaatgccgtgtgtattttctacctggtactgagagcgctagataccttagaggatgatatgacaatcagcgtcgagaaaaaagttccccttctgcataatttccatagcttcctttaccagcccgattggcgatttatggaatccaaagaaaaagatcggcaggtactcgaagacttcccgactatttcgctcgagtttcggaacttggctgagaagtaccaaactgtgatcgccgacatctgtcgccggatgggaatcggcatggccgagttcctggacaaacacgttacaagcgaacaggaatgggacaagtactgccactacgtcgccggcctggtggggataggcctcagtcggttattctcggccagcgagttcgaagatcctctagttggtgaggacactgaaagagctaattctatgggtctttttctgcagaagacaaacataattcgggattacctggaggaccagcaggggggtcgggaattttggccacaggaagtgtggtctcgatatgttaaaaaactgggcgatttcgctaaaccagaaaacattgacctggccgtgcagtgccttaacgagctgattaccaatgccttgcaccatattcctgacgtgatcacgtatctcagcagactgagaaatcagagcgtcttcaatttctgcgccataccgcaagtaatggccatcgcaaccctcgccgcatgctacaataaccagcaggtcttcaaaggcgccgtcaaaatccgcaaaggacaggcagtgacactcatgatggatgcgactaacatgccggccgtcaaggctatcatctaccagtatatggaggagatttaccaccggattcccgatagtgacccatctagtagcaaaactcgacaaataatttccacgatccggacgcagaatcttccgaattgtcagctgatttctcgcagtcactactctcctatttatctgagtttcgtgatgttgctcgctgctttgtcgtggcaatacctcaccacattgagccaggtgaccgaggattacgtacagacgggtgaacattag

SEQ ID NO: 187460 - DNA, 999 bp, synthetic construct
  misc_feature 1..999: note = Description of Artificial Sequence: Synthetic coding sequence
  source 1..999: mol_type = other DNA
atgaccatcagcgtggagaagaaggtgcccctgctgcacaacttccactcctttctgtaccagcccgactggcggttcatggagtccaaggagaaggaccgacaggtgttggaggactttcctaccattagcttggagtttcggaaccttgccgagaaatatcagacggtaatagcagatatttgccggcggatgggaattggcatggccgagttcttggacaaacacgttacctccgagcaggaatgggataagtattgtcactatgtcgccggactggtcgggatcggtctgtcccgcctcttttcagcttccgagtttgaggatcctttggtcggggaggacaccgagcgagcgaacagtatgggactgtttctgcagaagactaatatcatcagggactacctggaggatcagcaggggggcagggaattctggcctcaagaagtttggtcaagatatgtaaagaagctgggtgactttgcgaagcccgagaacatagacttggcagtacagtgcctgaacgagctcatcacaaatgcactccatcacatacctgacgtgataacctacctgtcacggctgcggaaccagagcgtgttcaatttctgcgccattccccaggtgatggctatagccacacttgctgcttgttataataaccagcaagtattcaagggggcagttaaaataagaaagggccaagccgtcacactcatgatggacgcgacaaatatgcccgccgtcaaagccataatctaccaatatatggaagagatttaccaccgaattccagactcggacccttccagctccaaaactaggcagatcatcagcacgatccggacgcagaacttacccaactgccagttgatttccaggagtcactactcacctatctacttgagttttgtcatgctgctggcagctctctcttggcagtacctcaccacgctgtctcaagtgaccgaagactacgtgcagacaggggagcattag

SEQ ID NO: 187461 - DNA, 1062 bp, synthetic construct
  misc_feature 1..1062: note = Description of Artificial Sequence: Synthetic coding sequence
  source 1..1062: mol_type = other DNA
atgcggaacgccgtgtgcatcttctacctggtgctgcgggccctggacacattggaagacgacatgactattagtgtggagaaaaaggttccactcctgcacaatttccacagcttcttataccagcctgattggaggttcatggagtccaaagaaaaagataggcaggtcctagaagattttcccaccatttctctcgagtttcggaatctggcggagaaataccaaaccgtcatcgccgacatctgtaggcggatggggattgggatggcagaattcctggacaaacacgtcaccagtgaacaagagtgggacaaatactgccactacgtagcaggcctggtcggtattggcctgagtcggctcttctcagcatcggagttcgaggacccactggtcggggaggatactgaacgagccaacagcatgggcctgtttctgcaaaagacaaatattatcagagattacctcgaggatcagcaaggcgggcgggagttctggccccaagaagtatggagtaggtatgttaagaaactcggcgatttcgcgaagcccgagaatatagacctcgcagtacagtgcctaaatgaattgattaccaacgctctgcatcatattccagacgttatcacctacctgagtaggcttaggaatcagtcagtttttaacttttgtgccatcccccaagtcatggctatagccactctcgctgcttgctacaataaccagcaagtgtttaagggtgctgtaaaaatacgcaaaggacaagctgtgacgttgatgatggatgctacaaacatgcctgccgtgaaggctatcatctaccagtacatggaggaaatctatcaccggataccagacagtgacccgtcctcctcaaagacacgacagataatatccaccattcgcacccagaatctccctaattgtcagctcatctctcggtcccactacagtcctatttatctaagtttcgtgatgttgctggcagctcttagctggcagtacctcaccacattgagtcaggtgaccgaagactacgttcagaccggggagcattag

SEQ ID NO: 187462 - DNA, 1062 bp, synthetic construct
  misc_feature 1..1062: note = Description of Artificial Sequence: Synthetic coding sequence
  source 1..1062: mol_type = other DNA
atgcggaacgccgtgtgcatcttctacctggtgctgcgggccctggacactttggaggacgacatgaccatctccgtggagaagaaagtacccctgctgcataactttcacagcttcctgtatcaacccgactggaggtttatggaaagtaaggagaaagatcggcaggtcctggaggactttcccactatttccctggaatttcgaaatctcgcagagaaataccagaccgtgattgctgacatttgcaggcggatgggtattggaatggctgagttcttagataaacatgttacctcagaacaggagtgggataaatactgtcattacgttgctggcttggtaggcatcggcttgtcccgcctgttcagcgcctctgagtttgaagatccacttgtcggcgaggacaccgaacgggccaatagcatgggcctgttccttcagaagacaaacatcatacgcgactatctggaggaccagcagggcggccgagaattctggccccaggaggtatggagcaggtatgtgaaaaaacttggcgactttgccaaacccgagaacatcgacctagcggtacagtgcctcaacgaattaatcaccaacgcccttcatcatattccggatgtgattacctatctgtcacggctacgaaatcagtctgtttttaacttttgtgcaatcccacaggtcatggccatcgcaacactcgcagcatgctacaacaatcagcaggtctttaaaggggcggttaagatcaggaagggccaggcggttacgcttatgatggacgcaacaaacatgccagccgtaaaggcaatcatctaccagtatatggaggaaatctaccaccgtattcccgactccgatccgagctcaagtaagacaagacagataatctcaactatcagaacccagaatctcccaaattgccaacttatttccaggagtcactactcccccatttatctcagcttcgttatgctcctagccgccctgtcctggcaatatctgactaccctgtcacaggtgacagaagactatgtgcaaacgggtgagcactag

SEQ ID NO: 187463 - DNA, 921 bp, synthetic construct
  misc_feature 1..921: note = Description of Artificial Sequence: Synthetic coding sequence
  source 1..921: mol_type = other DNA
atggagagcaaggagaaggaccggcaggtgctggaggacttccccactatctcattggagttccgcaacttggctgagaaatatcagactgtcattgcagatatctgtcgtagaatggggattgggatggctgagttcctcgacaaacacgtgacatcagagcaggagtgggataagtattgccactacgtggcagggttggtaggaatcggactgagtaggctcttttccgcatcagagtttgaagacccgctggtgggagaggatactgaacgggccaactcaatgggactctttctgcagaagactaacattattcgtgattatctagaggaccagcagggtgggagggaattctggccacaggaagtgtggagccgatatgttaaaaagcttggcgacttcgccaagcccgagaacatcgatctggcagtgcagtgtctgaatgaactaatcactaatgcccttcaccatataccagacgtaatcacatatctatccaggctgcgcaaccagagcgtcttcaatttctgtgccattccccaggtcatggccatagcgacacttgctgcttgctataacaatcagcaggtgtttaaaggcgctgtgaaaattcggaaaggacaggccgtaactctaatgatggacgctaccaacatgcccgccgtcaaagccatcatctaccagtatatggaggagatctaccacagaatcccggatagtgacccatcctcgagtaagacccggcaaatcatctccaccattcggactcagaacctacccaactgccagctcattagtcggagccactatagtcccatttacttgagttttgtgatgctgctagcggctctgagttggcaatacctgacaaccctgtcacaggtcacagaggattacgtgcagacaggggagcactag

SEQ ID NO: 187464 - DNA, 1140 bp, synthetic construct
  misc_feature 1..1140: note = Description of Artificial Sequence: Synthetic coding sequence
  source 1..1140: mol_type = other DNA
atggccgccaccgagggcgtgggcgaggccgcccagggcggcgagcctggacagcccgctcagccccctcctcagcctcatccacctcctccacagcagcagcataaagaagaaatggccgcagaggccggtgaggccgtggcctctcccatggacgacggctttgtgagtctggactctccaagctatgtactgtaccgcgaccgggctgagtgggccgacatcgatccggtgccgcagaacgacgggcccaatcctgtggtgcagattatctacagtgataagtttcgtgacgtttacgattattttagggctgtgctgcagagagatgagaggagtgagagggcctttaaacttacaagagacgcaattgagctaaacgctgcaaactatacagtgtggcacttccggcgtgttctgttaaaatctctgcagaaggacctccatgaagaaatgaactatataaccgcaattattgaagagcaacccaagaattatcaagtttggcatcaccggagagtcctcgtggagtggctgagagatcccagccaggaactggaatttattgcagatatcttaaatcaggacgctaaaaactaccacgcctggcagcaccgtcagtgggtgattcaggagtttaaattatgggacaatgagcttcagtacgtggaccagttgctcaaggaggacgtgcgcaataactctgtgtggaatcagaggtacttcgtcatttcaaacaccactggatacaatgacagggcggtccttgagagggaggtgcagtatactcttgagatgattaaactcgtgccccacaatgaatctgcctggaactacctgaaaggaattctgcaggatcggggtctctccaagtatccgaatctcctgaatcaactgttggatttgcagccatctcacagcagcccctacctaatcgctttcctggtcgatatctatgaggacatgcttgagaaccagtgtgacaacaaagaagacattctgaacaaggctctcgagctatgtgaaattttggctaaagagaaggacaccataaggaaagagtattggcgatacattggccgctctcttcagagtaaacacagcacggaaaatgatagtcccacgaatgttcagcagtag

SEQ ID NO: 187465 - DNA, 939 bp, synthetic construct
  misc_feature 1..939: note = Description of Artificial Sequence: Synthetic coding sequence
  source 1..939: mol_type = other DNA
atggccgccaccgagggcgtgggcgaggccgcccagggcggcgagccaggtcagcccgcacaacctccacctcagcctcacccgcccccgccgcagcagcagcacaaagaggaaatggcagctgaggcaggcgaggcagtggcctcaccaatggacgatggattcgtctcgctggactccccctcctatgtcctctatcgccattttagaagagtgttgcttaaatcgctacagaaagacctccatgaagaaatgaactacatcacagccatcattgaggagcagccaaagaactaccaagtttggcaccaccggagggttctagtagagtggcttagagatccctctcaagaactggaattcatcgcagacatcctgaatcaagatgcaaagaactatcacgcatggcagcaccgccagtgggtcattcaggaattcaagctgtgggacaacgaactgcagtatgtcgaccagctgcttaaggaggatgtgagaaacaattctgtgtggaatcagcgctattttgtcatttccaacaccacaggctataacgaccgcgctgtactagaacgcgaggttcagtatacacttgaaatgatcaagctcgtcccacataatgagtccgcgtggaattaccttaaagggatcctgcaagacaggggcctgtctaaataccccaatttacttaaccagttgcttgacctacagccttcccattccagcccatacctcatagctttcttagtagatatctatgaggatatgttggaaaatcagtgcgacaataaagaagacattttgaataaggctctggaactgtgtgagatactggctaaagagaaagacactatcaggaaggaatattggcgatacataggaagaagtctccagtctaagcactccacagagaacgatagtccaacgaatgtgcagcagtag

SEQ ID NO: 187466 - DNA, 1314 bp, synthetic construct
  misc_feature 1..1314: note = Description of Artificial Sequence: Synthetic coding sequence
  source 1..1314: mol_type = other DNA
atggccagccccagcagcttcacctactactgcccccccagcagctccccagtgtggtctgaaccactgtattctctgaggcccgaacatgcccgtgaacgcttacaagacgactccgtcgaaactgtaacttccattgagcaggcgaaggtggaggaaaaaatccaggaagtcttctccagctacaaattcaatcacctggttcctcgcctcgtcctccaaagagaaaagcacttccactatctcaaaagaggtctcagacaactcactgatgcttatgagtgcctcgacgcatctcgaccatggctctgttactggattctgcacagtctggaacttctggacgaacctatccctcagatagtcgctacagacgtgtgccagtttctggagctgtgtcagtcccccgagggtggattcggtggagggcccggccaatacccacatttagcccccacgtatgctgctgtcaatgctttgtgcattatcggcactgaagaggcatatgacatcattaacagggagaagctcttgcagtacctgtactctttgaagcaaccagatggttctttcctaatgcatgtgggcggcgaagtagatgttagatcagcgtactgcgccgccagcgtcgcatccctgaccaatattattacccccgacctgtttgaagggacagcggaatggattgccaggtgccagaattgggaggggggtatagggggtgtgccagggatggaggcccacggaggctacaccttctgcggcctagcagctctagtcatcctgaaaagggagagaagccttaatctcaagagcctgctacagtgggttacctctcgacaaatgcgatttgaaggcggcttccaggggcgctgtaataaactggtggacggctgttattcgttctggcaggccggattgctgccactcctgcatcgcgctctgcacgctcagggcgacccagcccttagcatgtcccattggatgtttcatcagcaggcactccaggagtacattctcatgtgctgtcagtgccctgccggtgggttactggacaaaccaggaaagtctagggatttctaccacacctgttattgcctgtccggtctgtcaatagcccagcactttggttcaggcgcaatgttgcacgatgttgtgctcggggtaccagagaatgccttgcaaccgacacatcctgtctataatatcggaccggacaaggtgattcaggctactacctactttctgcagaaacctgtacctgggttcgaggaactgaaagacgagactagcgctgaaccggcaaccgactag

SEQ ID NO: 187467 - DNA, 1953 bp, synthetic construct
  misc_feature 1..1953: note = Description of Artificial Sequence: Synthetic coding sequence
  source 1..1953: mol_type = other DNA
atggccagcaacatggaccgggagatgatcctggccgacttccaggcctgcacagggatcgaaaacatcgacgaggctattacactgctggagcagaacaattgggacctcgttgcagctatcaacggcgtgattccccaggagaacggcatcctccaaagcgaatacggaggcgaaactatccccggaccagctttcaacccagcgagccatcccgccagcgctcccacatcttctagctcatctgcattccgacctgtgatgcccagccgacagattgtcgagcgtcagcctcgcatgctcgatttcagggtggagtatagggatcgcaacgttgatgtggtgttggaggatacttgtaccgttggggagatcaaacagatactcgaaaacgaactccagattcctgtgagtaagatgttgctgaaaggatggaaaactggtgatgtggaggactcaaccgtgctgaaatctctccacctgccgaagaacaactctctttatgttttgacgccggatttacccccccccagctcctcctctcacgcgggagcgctccaggaaagcctgaatcaaaacttcatgctgattatcacgcaccgtgaggtccaacgagagtataaccttaacttctctggaagctctacaattcaagaggtaaaaagaaatgtttacgaccttacctctattcccgtgcgccatcaactatgggaggggtggccaacaagtgccactgatgactctatgtgcctggcggagagcggcctgagctacccatgtcatagactgacagtgggccgtcggtcttccccagcgcagaccagagaacagtctgaggaacagatcaccgacgtgcacatggtgtccgacagtgacggcgatgatttcgaagatgccacagaattcggggtggatgacggcgaggtcttcggtatggcgagcagcgctttaaggaaatctccaatgatgcctgaaaacgctgaaaatgagggggacgccctgctacagtttacagctgaattttcctctcggtatggagactgtcaccctgtattcttcatcgggtctctcgaggctgcttttcaagaagccttctatgtgaaagctcgggatcgaaaactcttggcaatttacttacaccatgatgagagcgtgttgactaatgtgttttgttcgcaaatgctgtgtgcggagtctatagtatcttacctcagccaaaatttcataacctgggcttgggatctgaccaaggatagcaaccgcgcacggtttttgaccatgtgtaatagacactttggcagtgtggtggcccagactattcgaacacagaagaccgatcaatttcctctgttcttaatcattatgggtaaacgtagttccaatgaagttttgaacgttattcaaggtaacacaactgttgacgagctcatgatgagattgatggcggcaatggagatcttcacagctcaacagcaggaggatataaaagacgaagacgagcgcgaggcccgcgagaacgtgaaacgcgagcaagacgaagcttaccgactatctttagaagccgatcgcgccaaacgtgaagcccatgagcgtgagatggcagagcagttcaggcttgagcagattaggaaggaacaggaggaggaaagggaagcgatccgcctgagtctggagcaggcacttcccccagagccaaaagaggaaaacgccgagcccgtcagcaaactccgcattcgtacaccttctggcgagtttttagagcgccgctttctcgcttcgaataaactccaaatcgtcttcgacttcgtcgcaagcaaggggttcccgtgggatgagtacaagctgctgtctactttcccacggagagacgtaacccagctcgatcccaataagtctttgctggaggtgaaactttttcctcaggagactctgtttctggaagccaaagagtag

SEQ ID NO: 187468 - DNA, 1473 bp, synthetic construct
  misc_feature 1..1473: note = Description of Artificial Sequence: Synthetic coding sequence
  source 1..1473: mol_type = other DNA
atgatcctggccgacttccaggcctgcaccggcatcgagaacatcgacgaggctatcactttgctggagcagaataactgggatctggtggccgcaattaacggggtcatccctcaggagaatgggattctccaaagtgagtacggtggtgagactattcccggcccagcgtttaatccggcctcgcaccccgctagtgcacccaccagcagttcaagctcagccttccgacccgttatgccttctaggcaaatcgtggaacggcagcccaggatgctggacttccgcgtcgaataccgggatagaaacgttgacgtcgttcttgaggatacctgcacggtaggagagatcaaacagattctcgagaatgaattacaaataccagtatccaaaatgctactgaaaggctggaagacaggagatgtagaggactccacagtgctgaagtcgctgcacttacccaaaaacaactcattgtacgttctgactcccgacctccccccccctagttcctccagccacgctggggccctccaggaattcagtagtcggtacggagactgccatccagtctttttcattgggtcactcgaggccgcctttcaggaagctttctatgttaaggcgcgcgatcgtaagctactcgcgatctatctgcatcacgacgagtccgtcctgacgaatgtcttctgttctcagatgttatgcgcagaatccatcgtctcatatttgtcccagaactttatcacttgggcatgggacttgacaaaagatagtaaccgagctcggttccttacaatgtgcaacaggcattttggatccgtggttgctcagaccattcggacgcaaaagactgaccagttcccgctgtttctcatcataatgggaaagcgctcttccaatgaggtgcttaatgtaattcagggaaacactactgtagacgagcttatgatgagattgatggctgctatggaaattttcacagcccagcagcaggaggacatcaaggatgaggacgagcgggaagcccgagaaaacgtgaaacgtgagcaggacgaggcttatcgactctctcttgaggctgaccgggctaagcgtgaggcgcacgaaagagagatggctgagcagtttcgcctcgagcagatcaggaaagaacaagaagaggagagggaggcaatccggctttctctggaacaggcattgcccccagagcccaaagaggaaaatgcagaacccgtgagcaagctccgcattcgaacaccttccggagaattccttgaaagacggtttctcgcttccaacaaactgcaaattgtcttcgattttgtcgctagcaagggcttcccttgggacgagtacaagcttttgtcaacattccctcggcgcgacgttacccagcttgatccaaataaatccctactcgaagtcaagctgttcccccaggaaaccctgttcctggaagccaaagagtag

SEQ ID NO: 187469 - DNA, 1953 bp, synthetic construct
  misc_feature 1..1953: note = Description of Artificial Sequence: Synthetic coding sequence
  source 1..1953: mol_type = other DNA
atggccagcaacatggaccgggagatgatcctggccgacttccaggcatgcacgggaattgagaacattgatgaggccataaccctgctggaacaaaataactgggacctagtggctgccattaacggcgtcattcctcaagaaaacggcattctgcagtccgagtacggcggcgaaacaatccccggcccagccttcaaccccgcgtcccaccccgccagcgcgcctactagcagttcttcatccgcttttcggcctgtgatgccaagtaggcaaatcgtcgagcgtcaaccacggatgcttgattttagggtcgaatatcgggataggaatgtcgatgtcgtactcgaagatacctgtactgtgggagaaattaaacagattctcgagaacgagctgcagattcccgtttcaaaaatgctgcttaaagggtggaaaactggcgatgtagaagatagcactgttctgaagtccctgcatctcccgaaaaataactccctctacgtgctgactcccgatcttcctcccccaagttctagctctcacgcgggagccctgcaagaaagcctcaatcagaatttcatgctgatcattacccaccgggaggtgcagagggagtataacctcaacttttccggttcgagtacgatccaggaggtcaaaaggaacgtgtatgatctgacgtccattcccgtgcgacaccagctctgggaagggtggccaacgagtgctacagacgattcaatgtgcctggccgagtcagggttgtcttatccatgtcaccgtctgacagttggccgcaggagttccccagcgcagacacgggaacaatctgaagaacagattactgacgttcacatggtcagtgacagcgacggagacgattttgaggacgccaccgagtttggcgttgacgacggtgaggtttttggtatggcctccagtgctctccgaaagtcaccaatgatgcctgaaaacgcggagaatgaaggggatgccctgttgcagttcactgccgagttcagtagtcggtacggcgattgccatccagtctttttcattggatccctggaggctgcattccaagaggcgttctacgtcaaagcccgggaccggaagctgctcgccatctacctgcaccacgatgaatccgtgctgaccaacgtgttttgtagccaaatgctgtgcgccgaatctattgtttcttacctctcccaaaatttcatcacatgggcatgggatctgactaaagactccaatagggctcggttcttgactatgtgtaatcgtcactttggctcagtcgtggctcagacgatacgaacccaaaagactgatcagttccctctgttcttgattattatgggcaagcggagctccaatgaggtcctcaacgtaattcaggggaatacaacggttgatgagttgatgatgagactcatggccgctatggagatctttaccgcacagcaacaggaggatattaaggacgaggacgagcgagaggccagggagaacgtcaagcgcgagcaggatgaggcctacaggctcagtctggaagccgacagagccaagcgggaggctcacgaacgggagatggccgagcagtttagactggaacagatccgaaaggagcaagaggaggagcgggaggcgatcagactaagtcttgaacaggctcttccccccgagcctaaggaagaaaacgccgaaccggtgtccaaattacggatcagaacaccatccggtgagttcctcgagaggagattcctggcctccaataagcttcagatcgtcttcgatttcgtggcaagcaagggttttccttgggacgaatataagttgctgtccacgttcccccgccgagacgttacacagcttgatcctaacaagtcactgttggaggtgaaactgtttccccaggagacattattcctggaagccaaagagtag

SEQ ID NO: 187470 - DNA, 1497 bp, synthetic construct
  misc_feature 1..1497: note = Description of Artificial Sequence: Synthetic coding sequence
  source 1..1497: mol_type = other DNA
atggccagcaacatggaccgggagatgatcctggccgacttccaggcctgcacaggcatagaaaacattgatgaggctataactctgctggagcagaacaattgggatctcgttgctgccattaatggggtcatcccccaggagaatgggatcctccagagtgagtacggcggcgaaactatccccggacccgccttcaaccctgcttcgcacccagcttcggctcccacctccagctcttcttctgcttttaggcccgtaatgccttcaagacagattgtcgaacggcaaccaagaatgttggacttcagagtggagtatagggaccggaatgtcgatgtggtgcttgaagacacatgcaccgtgggagagatcaaacagatactggaaaacgaacttcagattcccgtgtcaaaaatgctcctaaaaggatggaaaacaggagatgtggaggactccaccgtgctaaagagccttcacttgcccaagaacaatagcctgtatgtgctaacaccagatcttccaccgccttcttctagcagccatgcaggcactctgcaacaattttcttaccgctacggggattgtcatcccgtgtttttcatcggctccctagaggccgccttccaagaggctttctacgtcaaagcccgggatcgcaaactactagccatctatctgcaccacgatgaatctgtcctgaccaacgtgttctgttcccagatgctgtgtgccgaatctattgtaagctatctgagccagaacttcatcacctgggcctgggacctgaccaaggatagtaacagagcgcgctttttgacgatgtgtaatcgacatttcggctcggtggtagctcagaccatcaggacccagaaaactgatcagttccctctattcttaattataatgggcaagcggagttccaacgaagtgttgaacgttattcagggcaatacgaccgtcgacgaattgatgatgcgtctgatggcagctatggaaatattcaccgcccagcaacaagaggacataaaggacgaagatgagagggaggctcgagagaacgtgaagagggaacaggacgaggcttaccgtctgagcttggaggcggaccgagcaaagcgtgaagctcatgaacgagagatggctgaacagttcaggctcgaacaaattcggaaggagcaggaggaggagagagaagctattcgcctctcactggaacaggctttaccgcccgaacccaaggaggaaaacgctgagcccgtgagtaaattgagaatacgcaccccaagtggggaattcctggaacgcagatttctggccagtaacaagttgcagattgtgttcgactttgtggcaagcaagggcttcccttgggatgagtacaaactgctgagcacatttccacgtcgtgacgttacccagctggaccctaacaagtcgctgctggaagtgaagctgttccctcaggagaccctgtttctggaggccaaagaatag

SEQ ID NO: 187471 - DNA, 1227 bp, synthetic construct
  misc_feature 1..1227: note = Description of Artificial Sequence: Synthetic coding sequence
  source 1..1227: mol_type = other DNA
atgcggaacctgctggagatgtgcctggccgagagcggcctgagctatccttgccatcgccttacagtcggcaggcggagcagccccgctcaaactcgagagcaatccgaagaacagatcacagacgtccatatggtttcagactcggacggggatgatttcgaggatgccaccgagttcggggtagatgatggagaagtgtttggaatggcatcgagcgcactacgtaaaagccctatgatgcctgagaatgccgagaatgaaggcgatgccctgcttcagttcacagctgagtttagctcaagatatggcgattgccaccccgtgttctttattgggagcctggaagctgcatttcaggaagccttttacgtaaaggccagagatcgaaagctgctggccatttacctgcaccatgacgagagcgtcctgaccaacgtattttgctcacaaatgctgtgcgcagaatccatcgtaagttacctgagccagaactttatcacttgggcatgggacctgactaaggattccaatagggccaggtttctaacaatgtgtaacagacactttggcagtgtcgtagctcagaccatccgcactcagaaaaccgaccaattccctttgttcctaatcataatggggaaaagatcctcgaacgaggtcttaaatgtcatccagggcaatactaccgtggacgaactgatgatgagattaatggcagcaatggaaatttttactgcccagcagcaagaagatatcaaggacgaagatgagcgcgaagcgcgcgaaaacgtcaagagggagcaggacgaggcatatagactgagcctggaggccgatagggccaaacgtgaggcccatgaaagggagatggccgaacagtttcggctggagcaaatccgcaaggagcaagaagaggagagagaagctatcaggctgtcactggagcaggctctccctccggagccaaaagaagaaaacgccgagcctgtgtcgaaactgcggattcgcacccctagtggagaattcctggaacggaggtttctcgccagcaataaactccagatagtctttgactttgtggctagcaagggctttccctgggatgaatacaagctgctgagcacatttcctcgccgggatgtgacgcaactcgacccaaacaagtcccttcttgaggtgaagctcttcccccaggagactctatttctggaagctaaagaatag

SEQ ID NO: 187472 - DNA, 951 bp, synthetic construct
  misc_feature 1..951: note = Description of Artificial Sequence: Synthetic coding sequence
  source 1..951: mol_type = other DNA
atgacccagggcaagctgagcgtggccaacaaggcccccggcaccgaagggcagcagcaggtccacggagagaagaaggaggcgccagcagtgccttccgctcctccatcttatgaggaggcaacatcaggggaggggatgaaggctggcgccttccctcccgcccccactgcggtgccgctgcaccccagctgggcgtatgtggacccatctagctcaagttcttacgacaatgggtttccaacaggcgaccatgagctcttcactaccttcagttgggacgatcagaaggtgcgacgagtattcgtgaggaaggtttacactatcctgctgattcaactcttggtgacccttgcggttgtggccctttttacattttgtgatcctgtgaaggactatgttcaggctaatcccgggtggtattgggcaagttatgccgttttctttgccacatacctgacactcgcatgttgtagcggaccgcgccgacacttcccatggaatctaattctgcttacagtgttcactttgtcaatggcctacctcaccggcatgttatcatcatattacaacaccactagtgtcttattatgtctgggaatcaccgcactcgtctgcttgtccgtaactgtgttcagctttcagactaagttcgactttactagctgtcagggcgtgctctttgttcttctgatgacactttttttcagtggactaatactggccatcctgctccccttccagtacgtgccctggctgcatgctgtctacgcagcgctgggggcaggggtctttacccttttcctcgcgcttgatactcagttgcttatggggaatcgccgacatagtctgagtcctgaggaatacatcttcggtgccctgaatatctacctcgatattatatatatttttacgttttttctgcaattgtttggaactaacagggaatag

SEQ ID NO: 187473 - DNA, 951 bp, synthetic construct
  misc_feature 1..951: note = Description of Artificial Sequence: Synthetic coding sequence
  source 1..951: mol_type = other DNA
atgacccagggcaagctgagcgtggccaacaaggcccccggcaccgagggacagcaacaggttcatggagaaaaaaaggaagcccctgccgtgccctctgcccccccgagctatgaggaggccacttccggcgaaggaatgaaagctggcgcttttccacctgcacccaccgctgtacccctccacccctcgtgggcctatgtggacccatcttcctctagctcttatgacaatggctttcctaccggcgatcacgagctgtttacaacattttcctgggatgatcaaaaagtgaggcgagtgtttgtgcgcaaggtctatactattctcctgatccagttgctcgtcaccctggccgtggtcgctctgtttaccttctgcgaccccgttaaggactatgtccaagccaaccccgggtggtattgggcgagctatgctgtgttttttgccacctacctgacactcgcttgctgctccgggccgcggcgacacttcccgtggaacctgatccttctcacagtcttcacactcagtatggcgtacctgaccggtatgctcagcagttattataacactacatcagttttgctttgtctcggcattaccgctttggtctgcctcagcgttaccgtgtttagcttccaaacaaaatttgacttcacctcctgtcaaggcgtgctgttcgttctgcttatgacccttttcttctctgggttaattcttgctattctgcttcctttccagtatgtgccctggttgcatgctgtctatgcagcattgggggccggcgtgtttacccttttcctcgctctggacacccagcttctgatgggaaaccggagacattcactgagccccgaggaatatatctttggcgctttaaatatatacttggatattatttatattttcactttcttcctccaactcttcggcaccaaccgcgaatag

SEQ ID NO: 187474 - DNA, 813 bp, synthetic construct
  misc_feature 1..813: note = Description of Artificial Sequence: Synthetic coding sequence
  source 1..813: mol_type = other DNA
atgaaggccggcgccttcccccccgcccccaccgccgtgcccctgcatccatcctgggcctacgtagacccttcttcctcaagttcatacgacaatggcttccccaccggggaccacgaactctttacaacatttagctgggatgaccagaaggttcgccgcgtgttcgtgcgaaaagtgtacacaatccttcttattcagcttctggtcactcttgccgtcgtggccctgtttacattctgcgaccctgttaaagactatgtacaggcaaatcccggatggtattgggcgtcctatgccgtgttcttcgcaacatatcttactttagcatgctgttccggtcccagacggcactttccttggaatctcattctgctcaccgttttcaccctatccatggcatacctaaccggtatgttgagctcttattacaacacaacctccgtgctgctgtgtctggggatcacggctctcgtttgcctgtcggtgaccgtattctcttttcagaccaaatttgattttacttcatgccaaggcgtgcttttcgtgttgctgatgactctgtttttctccggcttaatcctggctatcctcttgccgtttcaatatgtgccttggctccatgccgtctacgccgcactaggggcaggcgttttcacactgttcctcgccctcgatacacagctgctcatgggcaatcgaaggcattctctgtcacccgaggaatatatcttcggcgccttgaatatttacctggacattatttacatttttacattcttcttgcagcttttcgggaccaaccgcgaatag

SEQ ID NO: 187475 - DNA, 1173 bp, synthetic construct
  misc_feature 1..1173: note = Description of Artificial Sequence: Synthetic coding sequence
  source 1..1173: mol_type = other DNA
atggacttctggctgtggcccctgtacttcctgcccgtgagcggcgctttaagaattctgcctgaggtaaaggtggagggggagctgggaggtagcgtcacgataaagtgcccactcccagagatgcatgtccgtatctatctgtgcagagagatggctggatcagggacctgcggtaccgtggtgagcaccacaaacttcataaaagctgagtacaaaggtcgcgtgaccttgaagcagtaccctaggaaaaatctcttcctcgtggaagtgactcagctgacggaaagcgacagcggcgtatatgcctgtggcgccggtatgaacacagatagggggaagacacagaaagtcaccctcaacgtgcattcagaatatgaacccagctgggaggagcagcccatgccagagacgcctaagtggttccacctaccctacctctttcagatgccagcgtatgcctcttcttcaaagtttgtgacacgtgtgactacgcctgcacagagggggaaagtgcctcctgtgcaccactcttctcctacgacccagatcacgcaccggccaagagtgagcagagcttcctccgtggctggagacaaacctagaacctttttacctagtaccactgcctcaaaaatttccgctctcgagggcctgctaaagcctcagacacccagctataatcaccatacacgcctacacagacaacgggccctggattacgggtctcaatccggccgcgagggccagggtttccacatactgattccgaccatactaggtcttttcctcctcgccctgctggggttggtggtaaaacgagccgttgagcggcggaaagccctctccagaagagctcggcgactcgcagttagaatgcgggccctcgaaagttcccagaggccaagggggagcccacggccgaggtcccagaataacatttattctgcctgtccccgaagggcgagaggagccgatgccgccggcaccggggaggcaccggtacctggccccggcgctccccttccgcctgcccccctgcaggtgagcgagtcaccttggcttcacgccccctccctcaaaacctcgtgtgaatacgtgtctctgtaccaccagcctgccgccatgatggaagacagtgacagtgatgactacattaatgtgcccgcatag

SEQ ID NO: 187476 - DNA, 921 bp, synthetic construct
  misc_feature 1..921: note = Description of Artificial Sequence: Synthetic coding sequence
  source 1..921: mol_type = other DNA
atggacttctggctgtggcccctgtacttcctgcccgtgagcggcgcgctgagaattctgcctgaggtgaaggtcgagggtgagcttggaggtagcgttactatcaagtgtcctctgccagaaatgcatgtgcgcatctatttgtgtagggaaatggccggcagcggtacttgtgggacagtcgtgagcaccacaaactttattaaagcggagtacaagggccgggtaaccctgaaacagtaccctagaaagaacctcttcctggttgaggtcacccaactgacagaatccgactccggagtctatgcctgcggcgccggcatgaatactgatcgcggaaagacccagaaggttaccttaaacgtgcactccgaatatgagcccagctgggaagagcagcccatgccggagacaccaaaatggttccacctgccctacctgtttcagatgccagcctacgcgtcttccagcaagttcgtaactagagttacaacccccgcccagaggggcaaggtgccgccagtgcatcactccagcccaaccacccagataacgcatcgcccacgggtgagcagagcgtcaagcgttgctggagacaagcctagaacctttctgccaagcactaccgcctccaagattagcgccctggaaggtctgcttaagcctcagacaccctcctataaccatcacaccaggttgcatcggcagagtcctctccaggctggacctcccactggccgcgaggacgcacgccccggcgaacttcccgaggccccccgcgtggcagctaccgcccttcccaaacagcatttacagcggctaccggccgctcggagctggtcaggaaggtgccgccaccgggggggccccagaagtcgaccaaggagcgccgttgcaccacgcccggccgcaggcgtgtag

SEQ ID NO: 187477 - DNA, 837 bp, synthetic construct
  misc_feature 1..837: note = Description of Artificial Sequence: Synthetic coding sequence
  source 1..837: mol_type = other DNA
atggacttctggctgtggcccctgtacttcctgcccgagtacgagccatcatgggaggagcagcctatgcccgagactcctaaatggttccatcttccctatttatttcagatgcccgcctacgcgtccagctccaagtttgttacccgcgtgaccactccagctcagaggggcaaggtccctcccgtgcaccatagttccccgaccacacagataacccataggccgcgggtgagcagggcaagctcagtggcgggcgataagccccggaccttcctccccagtactacggcttccaagatctcagcccttgaagggctcctcaagcctcaaactccttcatataaccatcatactaggctgcaccgtcagcgcgccttagactatggaagtcagtcaggtagagagggacagggctttcacatccttattcctaccatccttggactgttcttactggcccttctggggttggtggttaaacgggcagtagaacgcaggaaggctttaagtagacgggctagaaggttggcagtgaggatgagggcacttgagtcctcccagcggccaagaggtagtccaagaccgagatcacaaaataatatttattcagcatgcccacggagggctcgcggagcagacgcagccggaaccggcgaggcacccgtgcccggccctggcgctcctctaccacctgctccacttcaagtgtctgagtctccttggctacatgctcccagcctcaaaactagctgtgagtatgtcagtctgtaccatcagcctgccgccatgatggaagattcagattcagacgattacatcaacgttcctgcctag

SEQ ID NO: 187478 - DNA, 456 bp, synthetic construct
  misc_feature 1..456: note = Description of Artificial Sequence: Synthetic coding sequence
  source 1..456: mol_type = other DNA
atggacttctggctgtggcccctgtacttcctgcccgtgagcggcgctttgaggattttgccagaggtaaaggtggaaggggagttaggcggctctgtcactatcaagtgccctctgccggagatgcacgttaggatttatctttgtagagaaatggcgggctctgggacctgcggtactgtggtgagcacgaccaattttatcaaagccgagtataaaggtcgggttaccctgaagcaatatcctagaaaaaatctctttctggtggaagtcactcagctgactgagtcggattccggcgtatatgcttgcggagctggaatgaacactgacagagggaaaactcagaaggtgacgctaaatgtgcattctgagtacgaacccagctgggaagaacagccaatgcctgaaacccctaagtggttccatcttccatacctgtttcagatgccttag

SEQ ID NO: 187479 - DNA, 444 bp, synthetic construct
  misc_feature 1..444: note = Description of Artificial Sequence: Synthetic coding sequence
  source 1..444: mol_type = other DNA
atggacttctggctgtggcccctgtacttcctgcccgtgagcggcgcactgcgcatactgcctgaggtgaaagtcgaaggtgagctgggggggagcgtgacaatcaaatgtccccttcctgaaatgcatgttaggatatatctgtgtcgggagatggccggtagcggcacttgcggaaccgtcgtaagtacaaccaactttattaaagccgagtacaaaggaagagtgacccttaagcagtatccaagaaaaaatctgttcctagtggaagtgactcagcttacagagagtgattctggagtttatgcttgcggcgctgggatgaataccgacaggggcaagacccagaaggtcacactaaatgtgcactccgaatatgagcccagttgggaagagcagcctatgcctgagaccccaaaatggtttcatctgccgtatctttag

SEQ ID NO: 187480 - DNA, 426 bp, synthetic construct
  misc_feature 1..426: note = Description of Artificial Sequence: Synthetic coding sequence
  source 1..426: mol_type = other DNA
atggacttctggctgtggcccctgtacttcctgcccgagatggagagctgttgtgtcgcgcaggacgggctcgaactggtggcactgagcgaccccccagggtcggcttctcagagcgccggaatcacagtgtctggtgccctgaggatcttgccagaagtaaaagtggaaggggaattaggaggatccgtgactattaaatgtcccctgcctgagatgcacgtgcggatatacctctgccgtgagatggcgggcagcgggacctgcggtaccgtcgtgagcaccaccaacttcatcaaagccgagtataaggggcgcgtgacgctgaagcagtatccacggaagaaccttttcctagtggaagtgacgcagctcactgagagcgacagcggagtatacgcatgtggcgcaggaatgaatacttag

SEQ ID NO: 187481 - DNA, 1398 bp, synthetic construct
  misc_feature 1..1398: note = Description of Artificial Sequence: Synthetic coding sequence
  source 1..1398: mol_type = other DNA
atgcggcggccccggggcgagcccggcccccgggccccccggcccactgagggtgccacgtgtgctggtccgggtgagtcttggtctccatccccgaattctatgttacgcgtgcttttaagcgcccagacttcgccagcacggctgtccggactgctgttgattcctccagtacagccatgctgcctgggcccctcaaagtggggcgatcggccggtagggggcggtccttccgcaggccctgtgcaaggcctccaaagattgctagagcaggcgaagtcccctggagagttactgaggtggctgggccagaacccatctaaggtccgagctcatcactatagcgtggccttgcggagattggggcagctactggggagtcggccaaggccaccccctgtagagcaggtcacactgcaggatctgtcgcagctgattatcagaaactgcccaagtttcgatattcatacaattcatgtgtgtttgcacttggcagttctgctcggattcccaagcgatggccctctggtgtgcgcattggagcaggaaagaagactcagacttccccctaaacccccacctcctctccagcctcttcttcgcggtggacaaggactggaggcagctttaagctgtccacggttcctgcgctaccctaggcagcaccttataagttcgctcgctgaggctcggcccgaggagctcacacctcatgtcatggtgctgcttgctcagcacttggctcgacaccgactccgggaacctcagttgctcgaagctatagctcatttcttagtagtacaggaaacccaactctcatctaaggtcgtacagaagctagttcttccatttggacggttaaactacctcccgctggaacagcagtttatgccctgcctggagaggatcctcgcccgagaagcaggagtggcacctttggcaaccgtgaatatactgatgtctctttgtcagctccgttgtcttccgttccgggctcttcactttgtctttagcccgggctttataaactacatcagcggtactccccacgccctcattgtacggagatatttatccctcttagacacagccgtggagctggagctccctgggtaccggggcccaaggctccctcggagacagcaggttccgatattcccacagccactgatcaccgatcgtgccagatgcaagtactcgcacaaggatatcgtagcagagggcctgcgacaacttctgggtgaagagaagtataggcaggatctcactgtaccaccaggttattgtactgatttcctgctttgcgcgagttctagtggcgctgtgttgccggtgcgcactcaggatccttttctgccctaccctcccagggcctgcccttccagccgggctacgtag

SEQ ID NO: 187482 - DNA, 1650 bp, synthetic construct
  misc_feature 1..1650: note = Description of Artificial Sequence: Synthetic coding sequence
  source 1..1650: mol_type = other DNA
atgcggcggccccggggcgagcccggcccccgggccccccggcccaccgaaggcgctacatgcgctggtccaggggagtcatggtctccatctccaaacagcatgcttagagtgctgctatccgcacagacaagccctgcccgtctgtccggactgctacttattccccccgtgcagccctgttgtctgggaccgagcaagtggggcgatagaccagtggggggagggccctcagcaggtcctgtgcagggtctccagagactactggaacaggccaaaagcccgggggagctactccgctggctgggtcagaacccatctaaggtaagggcacaccactactccgtggcgctacgccgactcggacaactgctaggcagcaggcctcgcccaccccccgtagaacaggtaaccctgcaggacctcagtcagctgattatccggaactgtccatcctttgatatccacacaattcatgtttgtctgcacctcgctgtgctgctgggtttcccatccgacggacctctcgtttgtgcactggagcaggaaaggcgcttgagactccccccaaagcctccaccccccttacagccacttcttcgggggggtcagggactcgaggccgccctcagttgccctcggtttctgcgctatcctcgccagcacctgatttcctccttggccgaggctcggccggaagaactgacaccacacgttatggtgctcttagcccagcaccttgcccggcatagactgcgagagcctcagctgctcgaggccattgcgcatttcctggtggttcaggagactcagctgtccagcaaggtggtgcaaaagctggtgctgccttttggaagactgaactacctgcctcttgagcagcaattcatgccatgtctggagcgcatcttagccagagaggccggcgtcgcacccctcgccaccgtgaatatactaatgtccctttgccaattgcggtgcctgccctttcgggctcttcactttgtgtttagccccggcttcatcaattacattagcggaactccccatgctcttatcgtacgccggtatttaagcctcctggatacggctgtggagctggagcttcctggataccgaggtccccgtctcccacggagacagcaagtcccgatcttccctcagcccttgatcacggaccgcgcacgctgtaagtacagccataaggatattgtggctgaaggtctgaggcaactcctgggcgaagagaagtatcgacaggatctgacagtccctccaggatactgtactgattttctactgtgcgcttcctctagcggcgctgtgctgccagtcaggacgcaggaccctttcttaccctacccaccccgaagttgtccacaagggcaggccgcgagtagcgcaaccactcgggatcccgctcagagagttgttctggtcttgcgggagcgctggcacttctgccgcgatggacgtgtcttgctcggctcgagggcactgagggagagacaccttggactgatgggttaccagctcttacctttgccgttcgaagaacttgaatcccagagagggcttccccaacttaaaagctaccttcggcagaagctgcaggcactgggccttcggtggggacccgaagggggttag

SEQ ID NO: 187483 - DNA, 1227 bp, synthetic construct
  misc_feature 1..1227: note = Description of Artificial Sequence: Synthetic coding sequence
  source 1..1227: mol_type = other DNA
atgcggcggccccggggcgagcccggcccccgggccccccggcccaccgaaggtgccacgtgcgccggcccaggagagtcctgctttccaagtgatggcccattggtttgtgctctagagcaggagcgtcgcctgcgacttcctcccaagcccccgccaccactacagcctctgctacggggtggacaggggctggaggccgcactgagttgccctaggtttttacgctatccccggcagcatcttatcagctcccttgcggaagctaggcctgaagagctaacgccgcacgtcatggtgcttttggcacagcacctcgcgagacataggctccgcgaaccgcaactcctagaagccatcgctcatttcctcgtggtgcaggagacacagctctcatcaaaggtcgtgcagaaattggtactacccttcggcagacttaattatcttcctcttgagcagcaatttatgccttgtctagaacgtatcctagcgcgcgaagcgggcgtcgccccgctggcgacagtgaacattttaatgtcgctgtgccagttaaggtgtctgcccttccgagcattacattttgttttttcaccaggttttattaactatatctccgggaccccccacgcgctgatagtgagacgatatctctctctcctcgacaccgcagtggagctggaactcccaggatacaggggacctcggctgccaaggagacaacaggtgcccatcttcccacagcctctgatcacggaccgggctagatgcaaatattcacataaggacattgtggccgagggcctgcgacaacttttgggcgaagaaaaatacagacaggacttgacagttccccctggttactgtactgacttcttgctttgcgcttccagttccggcgccgtgcttcctgtgcgtacacaggacccttttctgccgtacccacccaggtcctgccctcaaggccaggccgcgtctagcgcgaccaccagagaccctgcccagagggtcgtgctggtgctcagagaacgatggcatttctgccgcgacggaagggtactgctgggatctagggcgttgagagagcgacacttgggcttaatgggctatcagctgcttcccctgccctttgaggagttggagtcccagcgcggcctccctcagttaaagagctatctccgacaaaaactgcaggccctcggcctgcggtgggggccggagggagggtag

SEQ ID NO: 187484 - DNA, 480 bp, synthetic construct
  misc_feature 1..480: note = Description of Artificial Sequence: Synthetic coding sequence
  source 1..480: mol_type = other DNA
atgctgcgggtgctgctgagcgcccagaccagccccgcccggctgtctggcctgctgctaatcccacctgtacagccttgctgcctcgggccgtccaaatggggtgacagaccagtcgggggggggcctagcgcaggccccgtgcaaggccttcagcgcctgctggagcaggctaaatctcctggcgaattgttgcgctggctcggacagaacccaagtaaggtgagagcccaccactattctgtagctctgcggaggctagggcaacttctgggctcgcgaccccggccccctcctgtggaacaagtaactctccaggatctgtcccaattaattatccgcaactgtccgtccttcgatatccacacaatacacgtatgtctccacctggccgtcttactcggaggcacggaagtcggccccgctctgtgggccactgaacttcccgctcctggaacagccgtttatgctctcccctag

SEQ ID NO: 187485 - DNA, 1569 bp, synthetic construct
  misc_feature 1..1569: note = Description of Artificial Sequence: Synthetic coding sequence
  source 1..1569: mol_type = other DNA
atgcggcggccccggggcgagcccggcccccgggccccccggcccacagagggagctacttgcgctggacctggcgagtcgtggtcaccctccccaaacagcatgttaagagttctgctgtccgcccagacaagtccggctcgtctatctggactcctgctgatcccacccgtacaaccatgctgcctcggcccttccaaatggggggataggccagtgggtggcggacctagcgctggacccgtgcagggacttcagcggctccttgagcaggccaaatctcccggggaactcttgcggtggctggggcagaacccatccaaggtaagagcccatcactactcagttgcgctgcgccggctggggcagcttctcggcagccgacctaggcccccaccagtggagcaagtcactctgcaggacctgtcacagctgattatcagaaattgtccaagtttcgacatccataccattcatgtctgtcttcatctcgccgttctgctgggctttccttcggacggccccttggtatgcgcgctcgagcaagaacgcaggttacgactcccaccaaagcccccacccccactccagcccctgctgcgggaagcccgcccggaggagctcaccccccacgtcatggtgcttctggctcagcatctcgctcggcatagactgagagaaccccagctgctggaagctattgcccactttctggtggtgcaggagacccaactcagctcaaaggtcgtgcagaaactggtgctaccgttcggccgtctcaactatctcccattggaacagcagtttatgccctgcttggagcggatcttggctcgcgaggctggcgtcgctccccttgcgaccgttaacatattaatgagtctctgccagctgaggtgtctaccgttcagagcactgcactttgtgttctcacctggcttcatcaattacatcagcggcacaccgcacgccctcattgtgagaagatacctctctctactggatactgcggtggaacttgaattgccaggatatcgggggccccggcttcccaggaggcagcaagttcccatcttccctcaaccactgattaccgacagggcccggtgcaagtacagccacaaagacatcgtcgctgaggggctgcgccagctgctaggagaagagaagtaccggcaggatttgaccgtacccccagggtattgcacagacttccttctgtgcgcatcgtcctcaggcgctgtgctccctgtgagaacacaggaccctttcctgccctaccctcctcggagttgtccacagggacaggccgcgtcctctgctactactcgggatccagctcaacgcgtggtgctcgtcctgagagagcgctggcatttctgccgtgacgggagagtgttgttgggctctcgcgcattgcgggagcgccatctgggcctgatgggttaccaactgctgccgctgccgttcgaggagctggagtcgcagagaggtttaccccaactcaaatcatacctgcgccagaaattacaggcgttgggtctccggtggggtccagaaggagggtag

SEQ ID NO: 187486 - DNA, 1179 bp, synthetic construct
  misc_feature 1..1179: note = Description of Artificial Sequence: Synthetic coding sequence
  source 1..1179: mol_type = other DNA
atggaggcccccctggtgagcctggacgaggagttcgaggacctgcggccaagctgctccgaagatcctgaggaaaaaccacagtgtttttatggcagcagcccccaccaccttgaggatccttctcttagcgagctcgagaattttagctccgaaatcatttctttcaagtctatggaggacctagtcaacgaattcgacgagaaattgaacgtatgcttccgcaactacaacgctaagacggagaacctagcacccgttaaaaaccagctgcagatacaggaggaggaggagactttgcaggacgaggaagtgtgggacgcgttgacagataattacattccgtccctcagcgaagattggcgagacccgaatattgaagccctgaatggaaattgtagcgatactgagattcatgaaaaggaggaagaggaattcaacgaaaaaagtgaaaatgactctggcatcaatgaggagccgcttcttaccgccgatcaggtcattgaggagattgaggaaatgatgcagaattcacctgacccagaagaggaggaggaggtgctggaggaggaggacggcggcgagaccagctcccaggctgactccgtcctcctgcaggagatgcaggccctaacacagacatttaataacaactggagttatgaggggctgcgacacatgtcaggatctgagttgaccgaattgctcgaccaagtggagggggccatcagggacttttctgaagaactggttcagcagctcgccagacgcgacgaattggaattcgaaaaggaggtgaaaaacagtttcattacagttttgattgaggtgcaaaacaagcaaaaagagcagcgggaactgatgaaaaagcgtaggaaagaaaagggactgagcttacagtccagccggatcgaaaagggcaatcagatgcctctgaagcggttttccatggaggggataagtaacatcctccagagtggtattcggcaaaccttcggctcttctggcaccgataagcaatacctgaacactgtaatcccctatgaaaaaaaggcatcgcccccatcagtggaggatttacagatgctgaccaacatcctcttcgctatgaaagaggataacgagaaggtaccaaccttgctaacggactacattcttaaagtgctttgcccaacctag

SEQ ID NO: 187487 - DNA, 315 bp, synthetic construct
  misc_feature 1..315: note = Description of Artificial Sequence: Synthetic coding sequence
  source 1..315: mol_type = other DNA
atggaggcccccctggtgagcctggacgaggagttcgaggacctgaggccatcctgctccgaagatccagaggaaaagccacagtgcttttacggctctagtccccatcatctggaggatccgtcgctgagtgaactagaaaatttctcaagcgaaattatcagtttcaagtctatggaggacctggtgaacgagtttgacgagaagctcaatgtatgttttcgcaactacaatgcaaagactgagaacctggcacctgttaagaaccagttgcagatccaggaggaggaggaaacgctccaggacgaggagtag

SEQ ID NO: 187488 - DNA, 315 bp, synthetic construct
  misc_feature 1..315: note = Description of Artificial Sequence: Synthetic coding sequence
  source 1..315: mol_type = other DNA
atggaggcccccctggtgagcctggacgaggagttcgaggacctgcgcccctcttgctctgaagatccagaggagaagccgcaatgcttctacggatcctctccccaccacctcgaggacccaagcctgagtgaactggaaaactttagttctgaaattatttctttcaaaagtatggaggatctggtcaacgagttcgatgaaaagctcaacgtatgcttcaggaactacaacgctaaaacagagaacctagctcccgtaaagaatcagctgcagattcaagaggaagaggagaccctgcaggacgaggaatag

SEQ ID NO: 187489 - DNA, 1419 bp, synthetic construct
  misc_feature 1..1419: note = Description of Artificial Sequence: Synthetic coding sequence
  source 1..1419: mol_type = other DNA
atgaccgccaacggcaccgccgaggccgtgcagatccagttcggccttataaattgtgggaacaaatacctgacagccgaagcattcggtttcaaagtgaacgcctccgcctcctctttgaaaaagaatcatctgggcaggtacctggccgccgacaaagacggcaacgtcacttgcgagcgcgaggttccgggccctgactgccgatttctcatcgtagctcatgacgatggcagatggtctcttcagagcgaagctcaccgaaggtacttcggagggacagaggatcgccttagttgtttcgcacagacagtgtctccagccgaaaaatggtccgtgcacatagcgatgcatccgcaggtgaatatctacagcgtcactcggaaaaggtatgcacacctttcagcccggcctgctgacgagatcgctgtggaccgggacgtgccctggggggttgacagtttgattacccttgccttccaggatcaacgctattccgtgcagacggcagatcatcgcttcctgcggcatgacgggcggctcgttgcccgccctgagcctgccactggctacactctcgaattcaggagcgggaaagtggcctttcgggactgcgagggccggtatttagctccaagcgggcctagcggaactctgaaagctggaaaagcaacaaaagtcggaaaagacgagctattcgcgctcgagcagagctgtgctcaagtggtcctccaggccgccaacgagcgcaacgtctcaaccaggcaggggatggacctctctgccaaccaggacgaagaaaccgatcaggagacattccaacttgagatcgacagagatacaaaaaagtgcgcgttcaggactcataccggcaagtattggactctcaccgcaacaggcggggtgcagtcaacggctagcagcaaaaatgcatcatgctacttcgatattgagtggcgcgacagacggattacccttagagcttccaacggtaagttcgtcacctcaaagaagaacggacagcttgccgcttctgttgagaccgctggcgactcagagctgttcttaatgaagcttattaaccgtcccatcattgtctttcgcggcgaacatggatttatagggtgtcggaaggttaccggcacactggacgccaaccgttcctcctacgatgtttttcagctggaattcaacgacggagcctacaatatcaaggacagcaccggcaaatactggactgttggatcagattctgctgtcacaagctccggcgatacccccgtggatttcttttttgaattctgcgactataacaaggtcgccattaaggtcggtggcagatatcttaagggggatcatgctggagttctcaaagcctccgccgaaacagttgaccctgcgagcctgtgggagtattag

SEQ ID NO: 187490 - DNA, 1482 bp, synthetic construct
  misc_feature 1..1482: note = Description of Artificial Sequence: Synthetic coding sequence
  source 1..1482: mol_type = other DNA
atgaccgccaacggcaccgccgaggccgtgcagatccagttcggcctgataaattgcgggaacaaatatttgactgcagaggcgttcggattcaaggttaacgcttccgcctcgtcgctgaaaaagaaacagatctggactctcgagcagccgccagacgaagccggttccgccgcagtttgtctgcggtctcacctgggtagatacctggccgccgataaggatggaaatgtgacgtgcgaaagagaggtgccaggaccggactgccgtttcctaatagtggctcacgatgacgggcgatggtctctccagagcgaggcccataggcggtactttggagggaccgaggaccggctgtcttgctttgcacagacagtttctcccgctgaaaagtggtcagtgcatatcgccatgcacccccaggtgaacatctactccgtgacacgaaagaggtacgcacatctaagcgctagacccgctgatgagatagccgtcgaccgagatgtcccgtggggagtggactctctgattactctcgcatttcaggatcagcgctactccgtgcagactgccgatcatcggtttctgcgacacgacggccggcttgtggcaagaccagagccagcaactggctatacgctcgaattccgctccggaaaggtggcgttcagggactgtgaaggcagatatttggcccctagcggtccctcgggtacactcaaggcaggaaaggcaacaaaggtcggtaaggatgaactattcgccctggaacagtcctgtgctcaggttgtgctccaggcggctaatgagcgcaatgtctccacgcgacaaggcatggatttaagcgccaatcaggacgaagagaccgaccaggaaaccttccagcttgaaatagaccgtgacactaaaaagtgtgcctttaggacccacactggcaagtactggacactgaccgctacaggtggagttcagagcaccgcaagctctaagaacgcatcttgctacttcgacatcgaatggagagaccggcggatcactctgagggccagcaatggtaaatttgttacatctaagaagaacggacagctcgccgcgagcgtggagacggccggcgactcggagctctttcttatgaaactgataaaccggcctatcatcgtctttaggggagaacacgggttcatcggatgtcggaaagtgaccggaaccctggatgctaaccgttcgtcttacgacgtgtttcagctggaatttaacgacggcgcctataacatcaaagactctaccggcaaatactggaccgtagggtcagactccgcagtcactagctctggtgatacgccagtggatttcttctttgagttctgcgattacaacaaggtggcaattaaggtgggcgggcgatatctgaaaggtgatcacgccggcgtgctgaaggcctccgccgaaaccgtggacccagcctccttgtgggagtactag

SEQ ID NO: 187491 - DNA, 648 bp, synthetic construct
  misc_feature 1..648: note = Description of Artificial Sequence: Synthetic coding sequence
  source 1..648: mol_type = other DNA
atggacctgagcgccaaccaggacgaggagaccgaccaggagaccttccagctggagatcgatcgggacaccaagaagtgtgccttccggacacacaccggcaaatactggaccctcacagccacagggggcgtccagagtaccgccagtagcaaaaacgcatcctgctattttgatattgagtggcgggatcggcggatcacattgcgggcctcaaatgggaaattcgtgaccagtaagaaaaacggacaactggcagccagtgtcgagactgccggggattcggaattgtttttaatgaaactcatcaatagaccgattatagtctttcgaggcgaacatggcttcatcggctgtcggaaggtgaccggaacgttggatgctaacagatccagttatgatgtgttccagctggaattcaatgacggagcatataacataaaggatagtaccggaaaatattggacagtgggaagtgactcagcagtgacctcctcaggagacactcccgtggacttcttcttcgagttctgcgactataacaaagtcgccatcaaagtgggcggccggtatttgaaaggggatcacgccggagttctgaaggcctccgccgagaccgtggatccagcaagcttgtgggagtactag

SEQ ID NO: 187492 - DNA, 1551 bp, synthetic construct
  misc_feature 1..1551: note = Description of Artificial Sequence: Synthetic coding sequence
  source 1..1551: mol_type = other DNA
atgcccaccaacggcctgcaccaggtgctgaagatccagttcggcctggtgaacgacaccgacagatatctcacagccgagagctttggatttaaggtaaatgctagtgccccttcactgaagcggaaacagacctgggtcctggaaccggaccccggccaagggactgcagtgcttctccgaagtagccatctggggcgttacttgtcggccgaagaagacgggagggtggcttgtgaggcagaacaacccggccgggattgtcggttccttgtgctgccccagcctgacggccgctgggtgctccggtctgagcctcatggccggttcttcggtggaacagaggaccagctgtcatgcttcgctacggctgtgtctcctgccgagctttggactgtgcatctcgccatccatcctcaagcccatctgctgagtgtgagccgcaggcggtatgtgcacctgtgcccaagagaggatgagatggctgccgatggagataaaccctggggcgtggacgcacttctgacactcatcttcaggtcacggcgatattgtcttaaaagctgtgactcccggtacttgagatccgacggaagactggtctgggagcccgagccgagagcgtgctacaccctggagtttaaggcaggtaagttagcatttaaggattgtgacggacattatctggcgcccgttgggcccgcaggtacgcttaaagccggccgcaacacgcggcctggaaaggacgaacttttcgacctggaagagtcccatcctcaggttgtgctcgtggctgccaatcatagatatgtgagtgtgcggcagggggtgaacgtatccgcaaaccaagacgatgaacttgatcacgaaactttcctgatgcaaattgatcaggagaccaagaagtgcactttttattcgtcgaccggcggttactggacccttgttactcacggcgggattcatgcaacagcgactcaagtgtccgccaataccatgttcgaaatggaatggcgagggcgtcgcgtcgccctgaaagcgtctaatgggcgttatgtgtgcatgaagaagaatggtcagttggctgctatttccgattttgtgggtcccccaccccggcccgcttggaccggcaaagtcgccggaggtgccgcccagcaaaccttgagtcctccaggcaaagacgaagagttcactctcaaactcataaaccgtcccatactggtattgcgcgggctggatgggtttgtatgccatcaccgagggagcaaccagctagacactaatagatcggtgtacgacgtctttcacttatctttttctgatggggcctaccggatacgtggcagagacggggggttctggtatacggggtcacacggatcagtgtgtagcgacggggagcgagcggaggacttcgtgttcgagttcagggagcgggggaggctcgcaatccgggccaggtccggcaaatatctgagaggcggagcttccggcctactgcgtgccgacgctgacgcgcccgccggcactgctctctgggaatattag

SEQ ID NO: 187493 - DNA, 1479 bp, synthetic construct
  misc_feature 1..1479: note = Description of Artificial Sequence: Synthetic coding sequence
  source 1..1479: mol_type = other DNA
atgcccaccaacggcctgcaccaggtgctgaagatccagttcggcctggtcaacgacactgatagataccttaccgccgagtctttcggctttaaggtgaacgcatctgcgccatcccttaaaagaaaacagacctgggtgctagagcctgatcctggacaggggacagcagtgttgttgcggtcttctcatctcgggcgctaccttagcgcggaggaggacgggagagtggcttgtgaggccgaacagcccgggagggactgccgcttcttggtactgcctcagccggacgggcgttgggtgctaagatccgaaccccacgggcggttttttggtgggactgaagaccaactttcttgctttgccaccgccgtctccccggcagagctgtggactgtccatctcgcaatacacccacaggctcatcttctaagcgtatcccggagaaggtacgtccacctttgtccccgggaggatgagatggcggccgatggtgataagccatggggtgtcgacgccctgctcacattaatatttagatcccggaggtattgtctgaaaagttgtgattcgcgttacctgagaagcgacgggcgtttggtgtgggagcctgagcctcgggcgtgctacactttagaatttaaggctggcaagctggcgttcaaagactgcgatggacactacttagctccagttggtcccgcaggcactctaaaggccgggcggaacactaggcctgggaaagatgagctcttcgacctcgaggagtcgcatccccaggtggttttggtggcagccaatcacagatatgtgtcagtaagacagggggttaacgtatcggccaaccaagatgacgagctggaccatgaaacctttctgatgcagatcgaccaggagaccaaaaaatgtacgttttactcctccactgggggatattggactctcgttactcacggcggcattcatgctacggccacacaggtaagtgctaacaccatgttcgagatggaatggcgtggccgcagggtcgctctgaaggcttccaatggaagatatgtgtgcatgaagaagaacggacagttggctgcgatatctgacttcgtgggcaaggacgaagaatttacccttaaattgattaaccggcctatcctggtcctgagaggtctcgatgggtttgtgtgccatcatagaggaagtaaccagctggatacaaatcggtctgtctacgatgtttttcatctgtcctttagcgacggtgcgtaccggatacgcggccgcgacggcggcttctggtatacagggagccacgggtctgtttgctcagacggagaaagggcagaagatttcgtatttgagtttagggaaagaggacgattggcaatccgggctagaagtggcaagtacctgcgcggtggagcttctggccttcttcgggctgacgcggacgctcctgctggcaccgctttatgggagtattag

SEQ ID NO: 187494 - DNA, 2133 bp, synthetic construct
  misc_feature 1..2133: note = Description of Artificial Sequence: Synthetic coding sequence
  source 1..2133: mol_type = other DNA
atgctgaccaccctgaagcccttcggcagcgtgagcgtggagagcaaaatgaacaataaagccggtagtttcttctggaacctgcggcaattctcaactctcgtaagcaccagcaggactatgagactgtgttgcctgggtctgtgtaaaccgaagattgttcactccaattggaacatcttaaacaacttccataaccggatgcagtccaccgacatcattcgctacctgtttcaggatgcttttatctttaaatctgacgtggggttccagactaagggtatttctacgttgactgccctccggattgagaggctgctgtacgcaaaaagattatttttcgacagcaagcagagcctggtgcccgtagacaagagcgacgacgagctgaaaaaagttaatttgaatcatgaagtgtctaatgaagacgtcctgacaaaggaaacaaagccaaaccggatctcatcccggaagttatcagaagaatgtaacagccttagcgatgtcctggacgcattctctaaagcacctacattcccatcgtctaactactttactgctatgtggacgatagcaaagcgactttcggacgaccagaagaggttcgagaaacggttgatgttttctcacccggcctttaaccagttatgtgagcacatgatgcgggaggccaaaattatgcagtataaataccttctgttcagcctccacgctatagtaaaactggggattccccaaaatacaatactggtgcagactctcctgagggttactcaggagcgtataaatgagtgcgacgagatctgtctgagcgtcctgtccactgtgctggaggctatggagccatgcaaaaatgtgcacgtgctgcggacgggctttcgcatcctggtcgatcaacaggtatggaagatagaggatgtgtttactctgcaggttgtgatgaaatgtattggcaaggacgcgcctatcgcccttaaaaggaaactggaaatgaaggcgctgcgcgagctggatagatttagtgtactgaattctcagcacatgtttgaagtcctagcggcgatgaaccatcgttcacttattctgctggacgagtgtagcaaggtcgtgctcgataatatacatggatgccctctacggatcatgatcaatattctacaatcttgtaaggatctacagtaccataacttggacctctttaagggattagcggattatgtggcagcaacattcgacatctggaagtttcgaaaggtgctcttcattttaattttgttcgagaatctcggttttaggcccgtgggcctgatggacctgttcatgaagaggatcgtggaagaccccgagagcctcaacatgaaaaatatcctgagcatacttcacacctactctagtctcaatcacgtatataaatgtcagaataaagaacagttcgtagaggttatggccagtgcattaacgggctacctccacacaatttccagtgagaacctccttgatgcagtgtattccttttgcctcatgaactactttcccctcgctccattcaaccagttactgcagaaggatattatctccgagctgctgacctccgatgacatgaaaaacgcatataagttgcatacacttgacacctgtcttaagttggatgatacagtttacttgcgcgacattgccctttctctcccgcagctccctcgcgagctcccctcgagtcatacaaacgcgaaagtggccgaggtgctctcaagcttattgggtggggaaggacacttctcgaaggacgtgcatcttccccacaactaccacattgattttgagatacggatggacacaaatcgaaaccaggtcctgcccttatcagacgtggatacaacatccgccaccgatatccaaagagtggccgtgttgtgtgtctctcgttctgcgtattgcctcggcagttcccacccacggggcttccttgccatgaagatgagacatctgaacgctatgggatttcacgtgattctggttaataattgggagatggataagcttgagatggaggacgcggtgacattccttaaaactaagatttattccgtggaggctctgccagttgccgccgtcaatgttcaaagtacccagtag

SEQ ID NO: 187495 - DNA, 2133 bp, synthetic construct
  misc_feature 1..2133: note = Description of Artificial Sequence: Synthetic coding sequence
  source 1..2133: mol_type = other DNA
atgctgaccaccctgaagcccttcggcagcgtgagcgtggagagcaagatgaataacaaagctggtagttttttctggaatctccggcagtttagtacactggtcagcacttctcgtacaatgcgcctctgctgtcttggcctatgcaagcctaaaatcgtgcactcaaactggaatatcctgaacaattttcacaacagaatgcagtccaccgacataatcagatacctgttccaagacgcctttatatttaagagcgacgtcgggttccagaccaaaggcatctctaccctcaccgccctgcggatcgaacgactactttacgcgaaacgtctgtttttcgacagtaagcagtccctagttccagtggataagtcagacgacgagttgaagaaagttaacctgaatcacgaagtctccaatgaagacgtgctcacaaaggaaactaagccgaaccgcatctcgtccagaaaattatccgaggaatgtaactctctgtcggatgtgctggacgcgttctcaaaagcgcctacatttccttcaagtaattactttacagccatgtggaccatagctaaacggttatcagatgaccaaaagcggtttgagaaacgcctaatgttctcccaccctgccttcaaccagctgtgcgaacacatgatgcgcgaagccaagatcatgcagtataagtatctgctgttcagcctgcacgccatcgtgaaactcggcatcccgcaaaacaccatccttgttcaaacactgttgcgagtgacacaagaaagaataaatgagtgtgacgaaatctgcctcagcgttttgtctacggtactcgaagccatggaaccgtgcaaaaatgttcacgtgctcagaactggatttcgaatcctggtagaccaacaagtttggaagatcgaagacgtctttacactccaggtggtcatgaaatgtatcggaaaggatgcacctatcgcgctgaaaagaaaactggaaatgaaggctcttcgcgagctcgacaggttttctgtgttgaattcacagcatatgttcgaagtacttgccgctatgaaccacaggagcctaatactactcgatgagtgttccaaggtggtcttagacaatattcacgggtgcccgctccgaatcatgataaatattctccagagttgtaaggaccttcagtatcataatctggatctctttaaggggctcgcagattacgtcgccgctacctttgacatttggaagttcaggaaggtcctctttatactcatcctttttgaaaaccttgggttcagaccagtcggccttatggacttgttcatgaagagaattgttgaagatcccgagagccttaacatgaagaatatcctctccatcctccacacttattcatctcttaaccacgtgtacaagtgtcaaaataaagagcagttcgtggaagttatggccagcgccttgaccgggtacctgcacaccatcagcagcgagaacctgctggatgctgtgtattccttttgtttgatgaactacttccccctggcaccatttaatcagcttctgcagaaagacattatctccgagctgttaaccagcgacgacatgaaaaatgcgtacaaattgcatactttggatacctgtttgaaattagacgacacagtgtacctcagggacattgccctgtctctcccccagctgcctcgggagcttccatctagtcacacgaacgccaaggttgccgaagtcttgtcctccctcctcggaggggagggccatttcagcaaagatgtgcatttaccacataactatcacatcgacttcgaaatccgcatggacaccaaccggaatcaggtgcttccgctgagtgacgtcgataccacatcagccacagacattcagagagtggctgtgctgtgtgtgagcaggtcagcttattgtctgggcagctcacaccccagaggcttccttgcgatgaagatgcgccatctcaacgctatggggttccatgttatccttgttaataactgggaaatggacaaactcgaaatggaggatgctgtcacgttcctaaagaccaaaatctactctgttgaggcgctgcctgtggccgctgtcaacgtccaatctacccaatag

SEQ ID NO: 187496 - DNA, 2133 bp, synthetic construct
  misc_feature 1..2133: note = Description of Artificial Sequence: Synthetic coding sequence
  source 1..2133: mol_type = other DNA
atgctgaccaccctgaagcccttcggcagcgtgagcgtggagagcaagatgaacaacaaagctggctcttttttctggaatttgagacagttttcaacactggtcagtactagcaggaccatgaggctgtgttgcctcggcctttgtaaacccaagatcgtgcacagcaattggaatattctgaataatttccacaatcgtatgcagagcactgacattatccgctatctctttcaagacgcctttatctttaaatcagacgtggggtttcagacaaagggaatctccaccctaactgccttgaggatcgagagactgttgtatgctaaaagactgttttttgattctaagcaaagcctggtgcccgttgacaagagtgatgacgagctgaaaaaggttaacctgaatcacgaggtgagcaacgaagacgtacttacgaaagagacaaaacccaatcgcatctcttctagaaagctttctgaggagtgtaattctctctctgacgtgctggatgccttctccaaagcgcccacttttccctcatccaactactttacagcgatgtggacaatcgccaaacgcctgagcgacgatcagaaacgcttcgagaagcgattaatgttcagccatcccgcgttcaatcagctatgcgaacatatgatgcgcgaagcgaaaatcatgcagtataaatatctgctcttctccctgcacgctattgttaaactgggaattcctcagaacacaatcctcgtccaaacgctcctacgagttacacaagaacgcatcaatgagtgtgacgaaatctgcctgtcagtgctctccaccgtcctcgaggcgatggaaccatgtaagaacgtccacgtgcttcgtactggcttcaggatcctagtggatcagcaagtctggaagatcgaagacgttttcacactacaggtggtcatgaaatgtataggtaaagacgcccctattgcattaaagcgcaaactggaaatgaaagcactgagagaattggataggttttcagtgctgaatagccagcatatgtttgaggtactggcagccatgaatcacagatccctgatcctgctggatgagtgctccaaagtcgtcctggataatatccatgggtgtcccctcaggatcatgatcaatatattacagtcctgcaaagacttgcaataccacaatctagatctgttcaagggattggccgattacgttgctgctacatttgacatctggaagttccgaaaggtgttgttcatactaatcctgttcgagaacctggggttccgacctgttgggctaatggatctgttcatgaagcgtatcgttgaggacccagaatctctaaatatgaaaaatatactctctatcctacacacatatagcagcctgaatcatgtttacaagtgtcaaaataaagaacagtttgtggaagtgatggccagcgccctcactggctatttgcacaccatcagctccgagaacctgcttgacgccgtgtactcgttctgcctcatgaactactttcccctggcccctttcaatcagctactgcagaaagatattatttccgaactcctgacctcagacgacatgaaaaatgcctacaaactccatacattagacacttgtctcaaactagacgatacagtctacctccgggatattgccctttctctgccgcaattaccacgcgaactcccatccagccatacaaacgcgaaagttgccgaggttctaagctcactgttgggcggcgagggacacttttctaaagacgtgcacctgccacacaactatcacattgattttgagatccgtatggacacaaatcggaatcaggttctaccattgtcggacgttgacacaaccagtgccactgacatccagagggttgctgtactttgcgtgtcccggtctgcgtattgccttggttcttctcaccctcgaggttttcttgcaatgaaaatgaggcacctgaatgctatgggcttccatgtaatactggttaataactgggaaatggataaacttgaaatggaggacgctgtgacgttcctgaagaccaaaatttatagcgtcgaagctctccccgtcgccgccgtgaacgtccagagtacccagtag

SEQ ID NO: 187497 - DNA, 375 bp, synthetic construct
  misc_feature 1..375: note = Description of Artificial Sequence: Synthetic coding sequence
  source 1..375: mol_type = other DNA
atgctgaccaccctgaagcccttcggcagcgtgagcgtggagagcaagatgaacaataaagcgggtagtttcttttggaatttgaggcagttttctaccctggtgtccaccagtcgaacgatgcggctatgttgtctgggactgtgtaagcctaagatcgtgcactccaattggaacatactgaataactttcataataggatgcaatcaaccgatataatccgctacctgtttcaggacgcattcatattcaaatctgatgtgggattccagacaaagggcatttcaactctgacagctctaagaatcgaacgccttctgtacgctaaaagactattttttgactccaagcagtccctcgtgcccgtcgactag

SEQ ID NO: 187498 - DNA, 2295 bp, synthetic construct
  misc_feature 1..2295: note = Description of Artificial Sequence: Synthetic coding sequence
  source 1..2295: mol_type = other DNA
atggccgccaccctgaagagcctgaagctggtgcggtaccgggccttctgtagtccttctgctttcggagcggtgcggtcggtcagctactggaatgtaagtagtactcagcatgggggacaagacccgcctgaacatatctctctctgccacagtgcgaaaaaggttaagaacatttgttcaactttctcctccaggagaatcctgaccacgtcaagtgcccaccccggtttggaattttctaaaaccagctcttcaaaggcctctacactgcagttgggcagtcctcgagcaacaggtgtggacgaagaagatgtcgaagtattcgattcttttgagaatatgagggtcttcctgcagttgcgccctgagtaccgagttcacagctataacgcgagcgagacaagtcaactgttgagtgtaagtgaaggtgagctaatactccacaaggtgcgcgtcaaccagaataatctgcaggcgcaggtgattgtcgactacctatgcaaattgagctcactaccagccgaacagcatcctgttttgctgggcagcaccagctttgctctactgtgccaactgtcagtgaaaaagatccagctgttcgatacacaggacttgattaatgttctgaaggcattcgtcatcttgggaatccctcactcccacagcatgctcgatgtatatgagacaaagtgctgtcaccaagtgtgggaaatgaatatggaccagttactgctggtcgccgacctctggcggtacctgggtaggaaagtgccccgtttcctgaatattttttccagctacctcaaccttcactggaaagacctttctctgagccagttggtccacctgatatacgtgatcggtgaaaacagacaggtgtcccaggacctgatgcagaagctggagagcttaatcctcaagtatatcgatctgattaaccttgaagaggtggggactatttgcttgggtttctttaagtccagtaccaatctgtctgaatttgtgatgcgaaaaataggcgatttggcctgcgcaaatatccagcacctgagcagcagatccctggtcaacattgtgaagatgttcaggttcacacacgtggatcacattaacttcatgaaacagatcggcgagatcgccccacagaggattccttcactcggagtacagggcgttatgcatctcacactgtattgttcagccctccgctttcttaacgaaggggtaatgaatgctgtggctgctagtctgccccctagagtggcccactgccgcagtaaggatgttgctaagattctctggtccttcggcacgctgaactacaaaccgccaaatgctgaggagttctactcatctttgattagtgagatccatcggaaaatgcctgagttcaaccagtaccccgagcatctcccaacctgccttctcggcctggcctttcttgagtattttccagttgagcttatagactttgccctctcacccggattcgtaaggctggcccaggagaggactaaatttgacctcctgaaagagctctatacattggacggcactgtcggcatagagtgccctgactatagaggtaatagattgtctactcacttgcagcaggaagggtcggaactgctgtggtatcttgccgagaaagatatgaactcaaagcctgagttcctggagaccgtgtttttactggagacaatgttgggtggacctcagtacgtgaaacaccacatgatcctgcctcataccaggagctcagatcttgaggtgcagctggatgtgaatttaaagcccttgccttttaatcgtgaagccactccggccgaaaacgtggccaagctacggctcgaacacgtaggggtgagtttgacggacgatctgatgaacaaattactgaagggtaaggccagaggacacttccaaggaaaaaccgagtcagaaccggggcagcaacccatggagcttgaaaacaaagcagcagtcccgctgggagggtttctttgcaatgtcgcagataaatccggagccatggaaatggcagggctctgcccagcagcttgtatgcagactccccgcatgaagctggccgttcagttcaccaaccgcaaccaatactgttacggcagccgggacttactgggccttcacaacatgaaacgacgccaactggctcgcctggggtaccgcgtcgtggagttgtcttattgggaatggttgcccctgctgaagcgcacaagactagagaagttggcctttctgcatgaaaaagtgttcacttccgctctctag

SEQ ID NO: 187499 - DNA, 183 bp, synthetic construct
  misc_feature 1..183: note = Description of Artificial Sequence: Synthetic coding sequence
  source 1..183: mol_type = other DNA
atggcctgccagggccgggaggagtgctggtgccagagccggatcgcacgcacattgcctgctgatcaaaagcctgaatgccggccctattgggaaaaggacgacgcttctatgccactccctttcgatttgacagacattgtcagtgaattgagagggcaactgctggaggccaaaccttag

SEQ ID NO: 187500 - DNA, 630 bp, synthetic construct
  misc_feature 1..630: note = Description of Artificial Sequence: Synthetic coding sequence
  source 1..630: mol_type = other DNA
atgctggacgacctgaacgccacccaccagcactgcgtgctggccggctctcagcctcgattctcaagcacccaccgcgtcgcagaatgttccaccggcaccctggactacatcctgcagaggtgtcaactggccctccagaacgtgtgtgacgatgtcgataacgatgacgtaagcctgaagtcttttgagcccgccgtgctgaagcagggcgaagaaatccacaatgaagttgaatttgagtggctgaggcagttctggtttcagggcaaccggtaccgaaagtgtaccgactggtggtgccagcctatggcccagctcgaggccctttggaagaagatggagggggttaccaacgcggtgttgcatgaagtcaagagggagggcttgccggttgaacaaaggaatgagattttgaccgcaatactggcctcccttacggcccggcagaaccttcggagagaatggcacgcaaggtgccagtcccgaattgcaaggacactgccagctgaccagaagccagaatgcaggccgtattgggagaaagacgatgcctcaatgccgttgcctttcgatctgaccgacatcgtgagcgaattacgggggcaactgctcgaggcaaagccttag

SEQ ID NO: 187501 - DNA, 321 bp, synthetic construct
  misc_feature 1..321: note = Description of Artificial Sequence: Synthetic coding sequence
  source 1..321: mol_type = other DNA
atggcccagctggaggccctgtggaagaagatggagggcgtgaccaatgctgtcctgcatgaggttaaaagggaaggcttaccagtggaacagcgtaacgagattctaaccgccatcctggcttcccttaccgctcggcagaatctgagacgcgagtggcatgctaggtgccagtcaaggattgctcgtacgctgccagctgatcagaagcctgaatgccgcccatattgggaaaaggacgacgccagcatgcccctcccttttgatctgacagatattgtatctgagcttagaggtcagctgctggaagccaagccttag

SEQ ID NO: 187502 - DNA, 321 bp, synthetic construct
  misc_feature 1..321: note = Description of Artificial Sequence: Synthetic coding sequence
  source 1..321: mol_type = other DNA
atggcccagctggaggccctgtggaagaagatggagggcgtgaccaacgcagtcctccacgaagtaaagagagaaggattacctgtcgagcaacgaaatgagattttgaccgcgattctcgcctctctgaccgcacgccagaacctccggcgagaatggcatgcccgatgtcaatcaagaatcgctcggacacttcctgccgaccagaagcccgagtgccgcccttattgggagaaggatgatgctagtatgcctctgccctttgacctaacggacatcgtatctgaactgcggggtcagctgttagaggcaaagccttag

SEQ ID NO: 187503 - DNA, 384 bp, synthetic construct
  misc_feature 1..384: note = Description of Artificial Sequence: Synthetic coding sequence
  source 1..384: mol_type = other DNA
atggagtggcggaaggtgagcgagtgcaacagcgtggagccctgccgtgaggttaaaaagtggccttaccgatgtatccatcatggcaagaacttcagtagaatgactaacgcggtgttgcatgaagtcaagcgcgaaggattgcccgtggagcagaggaacgaaattctgaccgctatacttgcttcccttacagctcgccagaatctacgtcgggagtggcacgcaaggtgccaatcccggattgcacgcacccttcctgcagaccagaaacctgagtgccggccatactgggagaaagatgacgccagtatgccactgccttttgaccttacagatattgtgagcgaattgcgaggacagttgctagaagccaagccttag

SEQ ID NO: 187504 - DNA, 1518 bp, synthetic construct
  misc_feature 1..1518: note = Description of Artificial Sequence: Synthetic coding sequence
  source 1..1518: mol_type = other DNA
atgaagcggacccccaccgccgaggagcgggagcgggaggccaagaagttgagactcctggaggaactagaagatacatggctgccctatcttacacccaaagatgacgagttttatcagcagtggcagctcaagtaccccaagcttattttgcgcgaggcatcatccgtgtcagaggagctgcacaaggaggtgcaggaggcctttctgaccctgcacaagcacgggtgtttgtttagagatctagtccgaatccaagggaaagatctgctgactccagtgtccagaattctcattggcaatcccggctgtacctacaagtatctaaatacaaggttgttcaccgtgccatggcctgtaaaggggagcaacattaagcatacggaagctgagattgcggcggcttgcgaaacattcctaaagctgaatgactacctgcagatagagaccatccaggctttggaggaattggctgccaaagagaaggctaacgaagatgccgttcccctgtgtatgtctgcagattttcccagagtggggatgggatcttcctacaacgggcaagacgaagttgacattaaaagtcgagcagcttacaatgtaaccctgctcaactttatggatccgcagaagatgccctatctgaaagaagagccttactttggcatgggcaaaatggcagtgtcatggcatcacgacgaaaacctcgtcgataggagcgctgtggctgtgtattcctactcctgcgaaggcccggaggaggaaagtgaagacgactcccacctagaaggtagggacccagatatttggcacgttggcttcaagataagttgggacattgagacaccagggctcgccatacccctgcaccagggggactgctactttatgctagacgatctgaatgccactcaccaacactgtgtcctcgccggctcccaacctcgattttcatctacccacagggtcgccgaatgttctacaggaactctggactatattctgcaacgatgtcaattggccctccagaacgtatgtgatgatgtggataacgacgacgtgtcactgaagtccttcgaacccgcagtgcttaagcaaggtgaagaaattcataacgaggtggagttcgagtggctgcgacaattctggttccaaggaaatcggtacaggaaatgtaccgattggtggtgtcaaccgatggcccaactcgaggcgctctggaaaaagatggaaggcgtcacaaatgcggtgctgcacgaagtgaaaagagaggggctccccgttgaacagcggaatgagattttgacagccattcttgcttccctgactgctcgccagaatttgcggagggaatggcatgcaaggtgccagtccagaatagcacggacacttcctgccgaccagaagcctgaatgccgaccgtattgggagaaggacgacgcctccatgccattgccattcgaccttaccgacattgtgagcgaattgagaggccagcttttggaagcaaagccctag

SEQ ID NO: 187505 - DNA, 321 bp, synthetic construct
  misc_feature 1..321: note = Description of Artificial Sequence: Synthetic coding sequence
  source 1..321: mol_type = other DNA
atggcccagctggaggccctgtggaagaagatggagggcgtgaccaatgccgtactccacgaagtgaagagagagggcctacctgtcgagcagcgtaatgagattctgactgccatattagcttcccttaccgctcgacagaacctgagaagggagtggcatgcaagatgccaaagccgtattgcccggacgttgccggccgaccagaaacctgagtgtcgcccctactgggaaaaggacgatgctagtatgccgcttccctttgatctcacggatatcgtttcggaacttcgcgggcaattactagaggcgaaaccttag

SEQ ID NO: 187506 - DNA, 13050 bp, synthetic construct
  misc_feature 1..13050: note = Description of Artificial Sequence: Synthetic coding sequence
  source 1..13050: mol_type = other DNA
atgaccatcgccctgctgggcttcgccatcttcctgctgcactgcgccacctgcgagaaaccacttgagggaatcctgagctctagcgcctggcacttcactcactcacactacaatgcaactatttacgaaaattcgtcgcctaagacctatgtggagtccttcgaaaagatgggtatatacctggctgagccgcagtgggccgttcgctacaggatcatatcaggcgatgtcgccaacgtctttaaaaccgaggagtatgttgttggaaacttctgttttcttcggattcgaacaaaaagcagcaacaccgcccttttgaatagggaagtgagagacagttatactctaattatacaggctactgagaagaccttggaattggaagcactcacccgagtcgtggtacatatcttggaccagaatgatcttaagccactcttttctccgccatcttacagggtaaccatcagcgaggacatgccactgaagtcccccatttgtaaggttacagccactgatgcggacctgggtcagaacgccgagttttattatgcctttaacacccgctccgagatgtttgctatacaccccacttctggagttgtcaccgtagccggtaaactgaacgtgacctggaggggtaagcacgaacttcaggtgctggcagtggataggatgagaaaaatctccgaagggaatggattcggcagtctggccgcactcgttgttcacgtagaacctgcactccggaaacccccagctatcgcgtctgtagtagtcacgcctcccgactcaaacgacggcacgacttatgccacggtgctggttgatgccaattcatcgggggccgaagtcgagagcgtcgaggttgtaggcggagatccaggcaagcattttaaggccattaagagctacgctcgtagcaatgaattttctcttgtgagcgtcaaggacattaattggatggagtatctgcacgggttcaacctctctctgcaggctcgcagcgggagtggcccttacttctatagccagattcggggtttccatctcccacccagtaagttaagctctctaaagttcgagaaggccgtgtaccgggtccagctgtccgaattttctccacccggatcccgggtcgtgatggtgcgcgtgaccccagccttcccaaacttgcagtacgtcctgaaaccttcttcggagaacgtaggctttaagctgaacgcacggacaggactgatcacaaccacgaagctgatggatttccacgaccgagcacactatcaattacatattcgcactagtcctggccaggcgtcaacagtcgttgtaatcgatattgtggattgcaacaatcacgcacccctgttcaacagatcctcctatgacgggacactggacgaaaacatccctcccggaaccagcgtactggcggttacagcaacagaccgcgatcacggtgagaatggatacgtgacctacagcatagctggccctaaagcactgccattttctatcgacccatacctgggaataatttccacaagtaagcccatggactacgaactcatgaaaagaatatatacatttagagtgcgggctagtgattgggggagcccgttcagacgggagaaggaggtctctatcttcctgcagttacggaatctcaacgataatcagccaatgttcgaagaggtgaattgtaccggctctatccggcaggactggcctgtcggcaagtccatcatgaccatgagcgccatcgatgtggatgagctgcagaacttgaagtatgagatagtgtctgggaacgaactggagtatttcgacctgaaccacttttccggcgtgatatccctaaagcggccttttattaacctgacggccgggcagcctacgtcttacagcctcaaaattacagccagtgacggaaagaattatgcctctcccacaacattaaatatcaccgtagtaaaggatccacacttcgaggtgcctgttacatgtgataagacaggggtgttgacccagttcactaaaacaatattacatttcatcggtctgcagaaccaggagagctctgacgaggagttcaccagtctcagcacataccagatcaatcattacactcctcagttcgaagaccactttccgcagagcatcgatgtcctggagtctgtcccaatcaacacgcccctcgccaggctagctgcgacagatcctgatgcaggcttcaatgggaagctggtgtacgtaattgccgatggaaatgaagaagggtgcttcgatatcgaactcgagacagggctgctgacagttgccgctccattggattatgaggccacaaacttctatattctgaatgtgacagtctatgatcttgggacgccccaaaagtctagctggaagctcctgactgtgaatgtcaaggattggaatgataacgcccccaggttcccacccggcggctaccagcttacaattagtgaagacactgaagttggcacaaccattgccgaactcactactaaagacgcggacagtgaagataacggaagggtgcgttacactctcttgtcacccaccgaaaagttctccctgcacccgctgacaggggaattggtcgtgactggccacctcgatagggagagcgagccgcgctatattcttaaagtggaagcgcgcgaccaacccagcaaaggccaccaactcttttcagtgaccgacctgatcattacattggaggatgtgaatgacaattcccctcagtgtataactgagcataataggctgaaggtaccagaagacctgcctccgggcaccgtcctcacgttcttggatgcctccgatccagacctgggaccggctggtgaggtgaggtacgtgctgatggatggggctcatgggactttccgcgttgatctgatgactggagcactcatcttagagcgagagctcgatttcgagcggcgcgccgggtacaatctctcactctgggcaagcgatggcggaagacccttagctcggcgtacgctatgtcatgtggaggtgatcgtcctggatgtcaacgagaacctacacccaccacacttcgctagctttgtccatcaggggcaggtgcaggaaaacagccctagtggcacacaagtgatcgttgtggccgcgcaggatgatgatagcggtttagatggagaattgcagtattttctgcgggcagggactgggctcgctgcattctcaatcaatcaggacactggaatgatccagaccctcgcaccactcgaccgcgaatttgcatcctactactggctgacggtgctcgccgtggatcgcgggtccgtgccgctttctagcgttaccgaggtgtatattgaggtcaccgacgccaacgacaaccctccccagatgtctcaggctgtcttttatccatctattcaggaagatgcacctgtaggaacctcagtgctgcagctcgacgcatgggatcctgattcttccagcaagggaaaactgacctttaacatcacatctggaaattatatgggcttctttatgatccatccagttaccggactattgagcacagctcagcaactggacagggaaaacaaagatgagcacattctggaggtgacagtcctcgacaatggggagccctccttgaaaagtacatctagggtggtggtggggattctggacgtgaatgacaaccctccgatattctctcacaagctctttaatgtgaggctaccagagcggctgtcccccgtgagcccaggccctgtttatcgccttgtggctagtgatcttgacgaagggctcaacggccgggtgacttacagcatcgaggactctgatgaggaggccttctcaatagacctagtcacgggtgtggtgtccagctccagcacctttactgctggtgaatataatattttaaccatcaaggcgacagactcggggcagcccccgctctcagcatctgtgaggcttcacattgaatggatcccatggccccgtcccagttctatccccttggcattcgacgagacctactatagtttcacggtcatggagaccgaccctgtgaatcacatggtgggagtcatctccgtcgaggggagacctgggctcttttggtttaatatctcaggtggtgataaagacatggattttgacatagaaaaaaccaccgggagcattgttatcgcgcgccccctcgataccagaagaagatccaactataacctcaccgttgaagtcacagacggaagtcggaccatcgcaacccaggttcacatcttcatgatagcaaatataaaccaccaccgcccacagttcctcgaaacccgctatgaggtcagagtgccccaagacactgtcccaggagtggagctcctcagagtccaagctattgatcaggacaagggtaaatctcttatttatacaatacatggttcacaagacccagggagtgcctcactgtttcagttagatccttctagtggggtgcttgtgacggtggggaaactcgatctagggtcaggacctagtcagcatacgctgacagtcatggtgcgagaccaggagattccgattaagcgcaacttcgtttgggtgacaattcacgtcgaggatggcaatctgcatccacccagattcacccagttgcattatgaggctagtgtcccagacaccatcgcacctggcacggaacttctgcaggtacgcgccatggatgcggataggggagtgaacgctgaagtccactacagcctcctaaaaggcaattcggagggcttcttcaacattaacgcattgctgggcatcatcaccctggctcaaaagcttgaccaggcaaaccatgctcctcataccctgaccgtgaaggcagaagatcagggttctccccagtggcatgacctggctacagtgattattcacgtatacccctccgatcgatctgccccaatcttctcaaagagcgaatacttcgtggaaatacccgaatcaatacccgtaggaagtcccatcttactggttagcgctatgtccccaagtgaggtgacatacgagcttcgtgaaggaaacaaggatggagtcttcagtatgaactcctactccggactgatctcaacacagaaaaagctggatcatgaaaagatcagctcttaccaactcaagattcggggtagcaatatggcgggtgcctttaccgacgtgatggttgtggtggatattatcgacgaaaacgataacgcccccatgtttctcaagtccacttttgtcggacagatcagtgaggctgccccactgtattcgatgatcatggataaaaataacaatccatttgtgatccacgccagtgattcggacaaagaggccaactccctcctggtgtacaaaatactcgagcctgaggccttgaagtttttcaagatcgatccttccatgggcactctcactattgtcagcgagatggattacgaaagcatgccaagctttcagttttgcgtctacgtccacgatcaaggaagcccggtattattcgctcctcggcccgcccaggtgattattcacgtgcgggatgtgaacgacagtcctccccggtttagcgagcagatatacgaagtggcaatcgtgggaccaattcacccaggcatggagcttttgatggttcgcgcatcagatgaagactcggaagtcaactacagcatcaaaacggggaacgctgatgaggctgtgactatccacccagttacaggtagtatctctgtcttaaatcctgcttttttggggctttccagaaaactgacgatcagagccagtgacggactctatcaggatacagcacttgtcaagatctctctgacccaagtgctggacaagagcctccaattcgaccaggatgtatattgggccgccgtcaaggaaaaccttcaagaccgcaaggccctggtgattttgggcgcccaaggaaaccacctcaacgacacactgtcctatttcttgttaaacggaacagacatgttccatatggtccaaagcgccggagtcctgcagacgagaggcgtcgcctttgatagagagcagcaggacacacatgagctagcagttgaagtgcgagacaatcgaacgccgcagagagtcgcgcagggattggtgcgtgtatccatcgaggatgtaaacgacaaccctcctaagtttaagcacctcccgtattatactatcatccaagacggtacggagcctggagacgtcctttttcaagtgagtgccactgacgaagacctggggactaacggagccgttacttacgaattcgccgaggattacacttattttaggattgacccatacctgggggacatctctttgaagaaacccttcgactaccaggctttaaacaaataccacctaaaagtaatcgctcgcgatgggggtaccccttctctgcagtccgaagaggaagttttggtgaccgtgagaaacaaatctaatcctcttttccagtcgccatactataaagtgcgcgtccccgagaatatcaccctctacacgcctatcctccacactcaagcgagatcaccggaagggctgcgactgatatacaacatagtggaagaagagcctctgatgctgtttaccaccgactttaaaacaggcgtgttgaccgtgaccggcccactggattatgagagcaaaaccaaacacgtatttacagtaagagccaccgatacagctctgggctctttcagtgaagctaccgtggaagtcctggtggaggatgtgaatgataatcccccaactttctcacagttggtatacaccacatccattagtgaggggctccccgctcagacccccgtgatacagctcctcgcctcggaccaggacagcggccgaaaccgggacgtgtcttaccagatcgtggaggacggttcagatgtcagcaagtttttccagattaacggaagcaccggggagatgtctaccgtgcaggaattggactacgaagcccagcagcatttccacgtgaaagttcgtgcaatggacaaaggagaccccccactgaccggggagacgctggttgtagttaatgtttccgacatcaatgataatccccccgaattcaggcaacctcagtacgaggctaacgtgtcagagctggctacgtgtggccacctggtgttgaaagtgcaggcaattgatcccgattcccgggacacctcccgcctggagtacctgattctcagtggcaatcaggaccgacacttcttcattaactctagttcaggaattatttcaatgttcaacctttgcaagaagcaccttgattcctcatataatctcagagtgggggcttcagatggcgtgtttcgggccacagtaccggtctatataaacacaactaacgcgaacaagtactctcccgagtttcagcagcacctgtacgaagctgaacttgcagagaacgcaatggtgggaaccaaagtgattgatcttttggcaatagacaaggattccggtccttacggcacaatcgattatactattatcaacaagctggccagtgagaaattcagtatcaatccaaacggtcagattgcgaccctacaaaaactggatagggaaaatagcactgagcgtgtgatagctattaaggtgatggcacgggacggcggcggaagggtcgccttctgtaccgtaaaaattatattgacggacgagaacgacaaccctcctcaattcaaagcctcagagtacaccgtgtcaattcaatctaacgtgtccaaagatagcccggtgatccaagtactggcgtacgacgccgacgaggggcagaatgctgacgttacatatagtgtgaatcccgaggatctggttaaagatgtcatcgagataaaccctgtcacgggagtcgtcaaggtaaaagacagcctcgtcggcctggagaatcagaccctggattttttcataaaagctcaagatggtggcccacctcattggaattccttagtgcctgtgcgtctgcaggtggttccaaagaaggtgtcactgcctaaattctccgagccactgtatacctttagtgcaccagaggacctgcccgaaggtagcgagattggcattgtgaaagccgtcgccgctcaggatcccgttatttactctttagttcgcggcaccacaccagagtctaataaggatggggtgttttcactggacccagacacaggggtcatcaaagtgagaaaacccatggaccacgagtcgactaagctataccagatcgatgttatggctcattgtcttcagaacaccgacgtagtgagcctagtctccgtgaacattcaggtgggagacgttaacgataatagaccagtcttcgaggcagacccttataaggcagtgttgacggagaatatgcctgtcggaacctcggtgattcaggtgaccgccattgacaaggacacagggcgcgacggccaggtgtcctaccgtctctcagcagaccctggaagcaacgtacacgagcttttcgcaattgacagtgaaagtggctggattactaccctccaggagctagactgcgaaacttgccaaacttatcacttccacgtggtggcttatgaccacggccagacgatccagctatcttcgcaggcgctcgtccaggtctcgataaccgacgagaatgacaacgctcctaggttcgcaagtgaggagtaccgtggctcggtcgtagagaatagcgaacctggagaattagtggccacactcaaaactctcgacgctgatatttccgagcagaaccgacaggtgacttgctacatcacagagggagaccccctcggacagtttggcatctcacaagtgggggatgagtggcgcatttcttccaggaagacccttgatcgggaacatacggcaaagtacttgcttcgcgtgactgctagcgacgggaagtttcaggcctctgtgacagttgagatcttcgtgctagatgtcaatgacaattctccacagtgttcgcagctgctgtatacggggaaggtccatgaggatgtctttccaggccacttcatactcaaagtttccgctaccgacctagacactgataccaatgcccagatcacctattccctgcatggccccggagcacacgagtttaagctcgatccacacaccggtgagctgactaccctaactgccctggacagggagcggaaggacgtgtttaacctcgtcgcgaaagcgacagacggaggcgggagatcttgccaagctgatatcacgctgcatgtcgaggacgtcaacgacaacgcgccacgttttttcccctcccactgtgccgtcgcggtgtttgacaacaccaccgttaaaaccccagtcgcggtggtctttgcacgagacccagatcaaggtgccaacgcccaggtggtgtattctttaccagattcagcagagggccatttctcaatcgacgccacaactggggtgattcggcttgaaaagcctctgcaggtccgaccacaagcaccactggagctgaccgtgcgggccagcgatctcggcacccccatccctctctcaacactgggaacagtgactgtatctgtggtaggactcgaggactatttacctgtgtttctcaacacagagcacagtgtccaggtgcctgaggatgcaccacctggaaccgaagttctacagctggctaccctgacaaggcctggggctgagaaaacaggctacagagtggtctctggaaatgagcagggtcgcttccgactggacgccaggactggaattctctatgtgaacgcctcactggatttcgaaacctctcccaagtatttcctgagcatagaatgctccagaaaaagcagcagcagcctgtcggatgtgaccacagtgatggtaaacatcacagacgttaacgagcaccggccacagttccctcaagacccgtactcgaccagagtcttagagaacgccctggtgggtgatgtcatcctgacagtgagcgcgaccgacgaagatggacccctgaattccgatatcacctatagcttgatcgggggcaaccagctgggacactttaccatccatcccaagaagggggaactccaggtggcgaaggctctggacagagaacaggcaagcagttatagcctcaagctccgggccactgattctggtcaacctcctctgcacgaggataccgatattgctattcaagtggccgacgtgaacgataacccaccacgtttctttcagttaaattactctaccacggttcaggagaacagccccatagggtcgaaagtgctccagttgatactgagtgacccagactcacctgaaaacgggccgccatacagcttcaggattaccaaggggaacaatggcagcgcatttcgcgtcacgcctgacggatggctagtgacagctgagggattgagtcggcgggcgcaggaatggtaccagctgcagattcaggccagcgatagcggtattcctcctctcagttcactaacgtctgtgagggtacacgtcactgaacagagccactatgctcctagcgcactgccactcgagattttcattacggtgggcgaagatgaatttcagggcgggatggtgggtaaaattcacgctacggacagggatccccaggacacacttacttattcattggccgaagaggagactctggggagacacttcagcgtgggagcccctgatggtaagattatagctgcacagggcctgcctagaggacattattccttcaacgttacagtgtcggatggtacttttacaacaacagccggggtccacgtgtatgtatggcacgtaggccaggaggccttgcaacaagccatgtggatgggattttatcaactgacccccgaagagttggtgtctgatcactggagaaatctacagcggtttctgtcacataaattggatatcaagcgcgctaacatccatttagcctccttgcagcccgcagaggccgttgctggagtagatgtgttactggtgtttgaaggacacagcggaacattctatgagttccaggagctggcgtccataatcacacatagtgctaaagaaatggagcacagtgtgggagtgcagatgagaagcgccatgcccatggtgccctgccagggccctacttgccaagggcagatctgccataatacagtgcatctggaccctaaggtcggcccaacgtacagcacggcccgactgagcattctcacgccacgccaccacctccagcgcagttgcagttgtaacgggacagctacgcggttcagcggccagagttacgtccgttaccgggcccctgctgcgagaaattggcacatccatttctatttaaagaccctgcagccacaggctatcttactgttcactaatgagactgcctcggtcagccttaaactggcaagcggcgtcccccaactggaataccactgcctggggggattttacggcaacctttcttcccagaggcacgttaacgaccatgaatggcactctatcctcgttgaggaaatggacgcaagcatacggcttatggtggacagtatgggaaatacgagtcttgtggttcccgagaattgccgtggccttcgcccggagagacatctgctccttggcggcctgattttactccattctagtagcaacgtgagccagggttttgagggttgtctcgatgctgtcgtagtcaacgaagaagctttggacctcctggcgccaggcaaaactgttgctggcctgttagagacccaggccctgacacagtgctgcctccattcagactactgtagccaaaacacttgtctgaatggcggcaagtgtagctggactcacggcgccggatacgtgtgcaaatgtcctcctcaatttagcggaaaacattgtgagcagggccgagagaattgcacctttgccccctgtctcgagggtggtacatgcattttatcacctaagggggcttcctgcaattgtccacacccctacacaggcgaccggtgcgagatggaagctcgggggtgtagtgagggccattgtctggttactcccgagatacagagaggggactggggtcagcaggagctgctgatcatcaccgtggctgtagcattcatcattatcagcacagtggggctacttttttactgccgccggtgtaaaagccataagccagtcgccatggaagatcccgatttacttgctcgtagtgtgggcgtggatacacaggccatgccagcaattgaactgaatccactgtctgcttcttcctgcaataatctcaaccagcccgaaccgtctaaagccagtgtgccaaatgagttagtaacgttcggtcctaattccaaacagagacctgtggtttgctctgtcccaccaagactcccccccgcagctgttccctcgcattcagacaacgagcccgtgataaagcgaacatggagttccgaggagatggtttaccctgggggtgccatggtgtggcctccaacctactcacggaatgaaaggtgggaatatcctcacagcgaggtgacacagggccctctgccaccatctgcccaccggcacagtactcctgttgtgatgcctgagcctaatggtctgtacggaggtttcccttttccactggagatggagaataagagagcacccttaccaccgcggtatagcaatcagaacctagaagatctcatgccttccaggccaccatctcctagagaacgactcgtggctccctgtctgaatgaatatacagcaatctcttattaccactcccaatttagacaggggggcgggggtccctgtctggccgatggtgggtacaagggtgtcggcatgagactctcacgagccggtcctagttatgcagtgtgtgaagtggagggtgcacccctggccggccaaggacagcccagagtgccccccaattacgaaggatccgatatggtcgagagcgattacggttcatgcgaggaagtcatgttctag

SEQ ID NO: 187507 - DNA, 13770 bp, synthetic construct
  misc_feature 1..13770: note = Description of Artificial Sequence: Synthetic coding sequence
  source 1..13770: mol_type = other DNA
atggacatcatcatgggccactgcgtgggcacccggccccccgcctgttgtcttatcctgctactgttcaagctgcttgccacagtaagtcagggactgcctggtacggggccactcggcttccacttcacacactcgatctataacgcgaccgtatacgagaattccgctgcgagaacatacgtgaatagccagtctagaatgggaatcaccctcatcgacctgtcttgggatatcaaataccgcatcgtctcaggcgacgaggaaggcttttttaaggctgaggaagtcatcattgctgatttttgcttcctccggattcggactaagggaggcaacagcgcaatactcaatagagagatccaggacaactatttacttatcgttaagggcagcgtgcgaggagaagacctcgaagcctggaccaaggtgaacatacaggttttggatatgaacgacctgcgtcccctgttttcacccaccacttattccgtaacgatcgccgagagcaccccgcttagaacttctgtggcccaagtgacagcaaccgatgctgacattggatctaatggggagttctattactattttaagaataaggtggacctgttctctgtgcacccgacatcaggcgttatttcgctgtcgggcagattgaactacgacgagaagaatcgctacgacctggagatcctggctgttgaccgggggatgaagctgtacggcaacaatggtgtctcttctaccgctaaactttacgtccatatcgagaggataaacgagcacgcccctactattcatgttgtgacccacgttccgttttccctggaaaaggaaccaacctacgccgtggtgacagtagatgatttagatgacggggccaacggtgagatcgaaagtgtgagtatcgtggccggcgaccccctagatcagttcttcctggcgaaggaaggcaaatggctaaacgagtacaagattaaggagaggaagcagatcgactgggagtcgtttccctacgggtataatttgactctgcaagcaaaggataaaggaagtcctcagaagtgcagtgccttgaaagctgtctacatcgggaaccctacacgggacaccgtcccaataaggtttgagaaagaggtgtatgatgtatctatctcagagttcagccctcctggcgtagtcgtggctatcgtcaagctctcccctgagccaatcgacgtggagtacaagttgtccccaggggaggacgctgtatattttaaaatcaatcctcggtccggccttatcgtaaccgcccgccccctgaatacagtgaaaaaggaagtatacaagctcgaggtcaccaacaaggaaggggacttaaaagcgcaggtgaccatctctatcgaagatgcaaatgatcacacacctgagttccaacagccgctttacgacgcatatgtaaacgagtccgtgcccgtaggcacctcagtgctaaccgtgtccgcctccgataaggacaagggagaaaacggttacattacatattccattgcctcactgaaccttctgccctttgtcattaaccagtttacgggcgtgatttctactaccgaggagctggacttcgagagctcacctgaaatctatcgctttatcgtccgtgcctcggattggggtagcccataccggcacgaaagcgaggtcaacgtcacaatccgcataggaaatgttaatgacaattccccattgtttgaaaaagttgcttgtcagggcgtcatttcctatgacttccccgtgggcggacatatcaccgccgtgagcgccattgatatagatgagcttgaactggttaagtacaagataattagtggcaatgaactgggttttttttacctgaatcccgactctggggtgttgcaactgaaaaagagcctgactaactctgggataaaaaatggtaactttgcactcaggattactgcaaccgacggtgagaatctggcggatcccatgtcgatcaacataagtgtgttgcatggtaaggtcagctccaagagtttttcctgtcgagaaacccgcgtggcacagaagttggccgagaagctgctgatcaaagccaaagcaaatggaaaactgaacctggaggatggcttcctggacttttacagcatcaacagacagggcccctactttgacaaatccttcccatccgatgtcgcagtgaaggaggacctgcccgtgggagccaacattctcaaaattaaggcttatgacgcggatagtggtttcaacggtaaagtgttgttcaccatcagcgacgggaataccgactcttgctttaacatagacatggagaccggacagctgaaagtgctgatgcctatggaccgggaacatacagatctctatctgttgaatatcaccatttacgatctcggaaacccccagaagagcagttggcgattattaacgatcaacgtggaagatgcgaatgataattcccccgtattcatacaggatagctattcagtcaatatcttggagagtagcggtattggaacagaaatcattcaggtcgaagcacgcgacaaggatcttggctcgaacggagaagtcacctacagcgttctgactgacactcaacagttcgctataaattcttccactggaattgtatacgtcgctgaccagctggacagagaaagtaaggcaaattactctctgaagattgaagcccgcgacaaggcagaatctggacagcaactgttttctgtggtgaccttgaaagtctttctagatgacgtgaacgactgttcccccgccttcatccctagttcctattccgtgaaagtccttgaagatctgcctgtggggactgtgatagcatggctggagacgcacgatccagatctcggtctgggaggacaggtcaggtactctctcgtgaacgactacaatggacggtttgaaatcgataaggcgagtggcgctatcaggctgtccaaagagttggattacgaaaagcaacagttctataatctcacggtgagggcgaaagataagggccgacctgtctcccttagcagcgtgagcttcgtcgaggtagaggttgtcgatgtgaatgagaacctgcataccccctatttccccgattttgcagttgttggttctgtgaaagaaaattcccggataggcactagcgtcttacaggtgacagcccgtgatgaagactcaggccgggacggtgaaattcagtactccatcagggacggatctgggctaggccgtttctcaattgacgacgaatccggagtgattacggctgcagacatactggatcgcgaaactatgggtagttattggctgacagtctacgctacggataggggtgtagtcccactgtactctaccatcgaggtgtatatagaagttgaggatgtgaatgacaacgcgccactgacttctgagcctatctactaccctgttgtgatggaaaacagccctaaggatgtctcggtcatccagatccaggctgaggatccagatagcagctcaaatgaaaagttgacctacaggatcacatcaggtaatcctcagaacttctttgcgattaatatcaagactggcctcattaccactacttcccgtaagctagacagagaacagcaagccgaacatttcctggaggtcaccgtgaccgatggggggccaagccctaagcagtccacaatttgggtcgtcgtgcaggttctcgacgagaacgataataagccacagttcccggaaaaggtgtaccagataaagctccccgaacgcgaccgaaaaaagcgaggtgagccaatctatagggcatttgcttttgatagagacgagggcccgaatgccgaaataagttattccatagtcgatggtaacgatgatggcaaattcttcattgatccaaagactgggatggtgagctctcgaaagcagttcactgcaggaagctacgatattcttaccattaaagctgtggacaacggcaggcctcagaaatcctcgactgctaggcttcacatcgagtggatcaagaagcctcccccttcccctatacctctgacgttcgatgaaccgttctacaacttcaccgttatggaatctgacagagtgacagaaattgtgggagtcgtctctgttcagccagctaatacccccctatggttcgacattgtcggtggcaattttgatagcgccttcgacgcagaaaaaggggtcggtacaatcgtgattgccaaacctctggatgctgaacagcggtctatttataacatgagcgtggaagtgactgatgggactaatgtcgccgtgacccaggtgttcatcaaagttctggataacaacgacaatggtcctgagttcagtcagccgaattatgatgtgactatctcagaggacgtgctgccagacactgagatcctgcaaatcgaagccactgatcgggacgagaaacataagttgagctacaccgttcattcctccatcgatagcatcagtatgcgcaaatttcgaattgatccatccacaggtgtgctgtataccgccgagaggctggatcacgaggcacaagacaaacacattctcaacattatggtgcgggatcaggaattcccttatagaaggaacctggcccgagttatagtcaacgtcgaggacgccaatgatcattccccatattttacaaaccccctctacgaagctagtgtatttgagtccgcagctctggggagcgccgtgctgcaggtgacagctttggataaggacaaaggcgagaacgcagaactaatctacacgatcgaagctggaaacacagggaacatgtttaaaattgagccggtgttaggtattatcaccatctgcaaagagcctgacatgacgactatgggccagtttgtgctgagtattaaagtcactgaccaaggttctcccccgatgagcgcaacagctatcgttcgaatctcagtgacaatgagtgataatagccacccaaaatttatccacaaggactaccaagccgaggttaacgaaaatgttgatattggcacgagcgttatactgatttccgcaatatctcaatcgacactgatctatgaagtgaaggacggcgacatcaatgggatcttcacaattaacccttacagtggggtcattaccactcagaaagccctggattatgaaaggacatcaagctatcaattgataatccaggcaaccaatatggcaggaatggcttcaaacgccacagtcaatattcaaatcgttgacgagaatgataatgcccctgtgtttctgttcagtcagtattcaggtagcctcagtgaggcagcaccaataaactccatcgtcaggtctttagacaacagtcctcttgtgatcagagcgacagacgcggattcaaaccgtaatgctctcttagtgtatcagatcgtagagagcacagccaaaaaattcttcaccgtggatagcagcacaggcgctattcgaactattgcgaatctcgaccatgagaccattgcgcacttccatttccatgttcacgtgagagacagcgggagcccgcagttgactgccgagtctcctgttgaggtgaacatcgaggtgacggacgttaatgacaaccctcctgtgtttacacaggccgtgttcgaaacaatcctgctgctgccaacctatgtcggtgtggaagttctgaaagtcagtgctactgaccccgattcggaggtgccacccgaactcacctactccctgatggaaggctcgctcgaccactttcttatcgattcaaatagcggagtcctcaccattaaaaataataatctttctaaggatcactatatgctcatcgttaaggtgtccgatgggaagttttactccacgtctatggttaccatcatggtgaaggaggccatggactcaggcctacacttcactcagagcttctactctacgtccatctctgagaataataccaatatcacaaaggttgcaatcgtgaacgccgtcgggaatcggctcaatgagcctctcaagtattcgattctcaaccccggtaataagttcaaaataaagagtacaagtggcgtcatccaaacaactggagttccctttgaccgggaggagcaagagctatacgagcttgtggtggaggcatcaagggagctggatcatctgagagtggcccgcgtcgtggttagagtcaatattgaggatattaatgataactcccctgttttcgtcggccttccctactatgcagctgtacaggtagatgcagaacccggaacacttatatatcaagtcactgctattgacaaggataaaggtcctaatggcgaagtgacatatgtgctgcaggacgattatgggcatttcgaaattaacccgaattccggtaatgtgattctgaaggaagcatttaactccgatctgtctaacatcgagtatggagtgacaatcctggcaaaagatggcggcaaaccttcactgtctactagtgtggaactgccgatcactatcgtcaataaagcaatgccagtatttgacaagcctttctacactgccagcgtaaacgaggacattcgcatgaacactccaatcctctccatcaatgccactagccccgaagggcaggggattatttatattatcatcgacggggacccctttaaacaattcaacatcgacttcgataccggggtccttaaagtggtgtccccactggactacgaagttactagcgcttataaactgactattcgcgcctcggacgccctgactggagcccgggcagaggtgaccgtggatttgcttgtgaatgatgtcaatgacaatccgcctatcttcgatcagcctacttacaatactacactgagtgaggctagtctcatcggaaccccagtgctgcaggtggtaagtattgacgctgactccgaaaacaataagatggtgcactatcaaatcgtacaggatacctacaactctaccgattattttcacattgacagttcctctggcttaatcttgaccgcaagaatgctggatcacgagctagttcaacattgcacactcaaagtgaggagcatcgattccggctttccctctttaagtagtgaagtcctggttcacatctatatttccgatgtgaacgataatccacctgtgttcaatcagctgatttatgagtcttatgtgagcgagcttgcgccgagagggcactttgttacatgcgtccaggcctctgatgctgactccagtgattttgaccgattagagtatagcatcctttctggaaacgacaggacctcatttctgatggatagcaagtctggggtaataacactgtcaaatcatcggaagcaaagaatggagccgctgtactctctgaatgtgagcgtgtctgacgggctgtttacatccacggctcaggttcatattagggtgctgggggcaaatctgtattcacctgccttcagccagagcacctacgtggccgaggtcagggaaaatgtggctgcaggaactaaggtcatacatgttagggccaccgatggtgatcccggtacatatggccagattagctatgccataattaatgatttcgccaaggatcgttttctaatagactcgaatggtcaagtaattactacagagaggcttgacagagaaaatcccttggagggagatgtgagcattttcgtaagagcactggatggcggcggacggaccacattctgcacagtgcgagtgattgttgtggatgagaatgacaacgcgccccagttcatgactgtcgagtaccgggcatcagtacgagccgacgtcggtagaggccatctggttacccaggtacaggctatagatccggatgacggggccaacagtagaatcacttattccctgtattcagaagccagcgtttctgtcgctgatctcctcgagatcgaccctgataatggttggatggtaaccaaggggaacttcaatcagctgaaaaacacagtgctgagtttctttgtgaaagccgtcgacggcggaattccggtgaaacatagcttaatcccagtgtacatacatgtccttccaccagaaactttcctgccttccttcactcagagtcagtactcctttaccattgcagaggatactgccattggatccacagtcgacacactgcgcatcctgccgagtcagaacgtatggttttcaacagttaacggggagcgcccagagaacaacaagggtgggattttcgtgattgagcaggagacaggcactataaaattagataagaggctggacagggaaaccagtcctgctttccatttcaaagtggccgctactatccctctcgacaaggtagatatcgtgtttacggtagacgtagatatcaaagtgctggatttgaacgataataagccagtctttgaaacctcctcttacgatacaatcattatggagggcatgcctgtgggaacaaagctgacgcaggttagggccatcgatatggattggggggccaacggccaggtcacttattctctccactccgactcacagcccgaaaaggttatggaggcattcaatattgatagcaatacgggctggatttcaaccttaaaggacttagatcacgagactgacccaaccttcacattcagcgtagtggccagcgatctgggtgaggcctttagcctctcatcaacagcactagttagcgtgagggttactgacattaacgacaatgctccggtgttcgcccaggaagtctatcgcggcaacgtgaaggaatcagacccacctggcgaggtagttgcagtactatctacatgggatagagatacctctgacgtgaaccgtcaggtaagctaccacataacaggcggtaatcctcgcggacgtttcgccttaggactcgtccagtctgagtggaaggtttatgtcaagaggcctctggatagagaggagcaggacatctactttctcaatatcacagcgactgacggcctgttcgtcacacaggcgatggtggaggtcagtgtgagcgacgttaatgataacagtcctgtgtgtgaccaggtcgcctacaccgccctcctcccggaggatattccatctaacaaaatcatcctgaaagtctctgctaaagacgctgacattggctccaacggatatatccgatactctttgtacggatcaggtaattcagagtttttcttagacccagagtcaggcgaactcaagactcttgcattgctggatcgggagcgcatcccagtgtactcactgatggcaaaggccacagacgggggaggtagattttgccagagcaacatacatttgattctggaagacgttaacgacaacccgccagtcttcagcagcgaccattataacacttgtgtgtacgagaatactgccacaaaggccctgctgactagggtgcaagccgttgatcctgacatcggcatcaataggaaggtggtctactctctggccgactctgctggcggcgtgttcagtatcgactccagcagcggcattatcatcctggaacagccactcgacagggagcaacagagcagttacaacattagcgtgcgggcaaccgatcagtcccccggccagtctctgtctagcctgacaaccgtgacaatcacggttctggacatcaatgataacccgcccgtctttgagagaagggactacctggttaccgttcctgaggacacaagcccagggactcaggtgctggcggtgtttgcaacctcaaaggatattgggacaaatgccgagattacctatcttattcgcagtggcaatgagcaaggcaaattcaaaatcaacccaaagacggggggcatcagcgttagtgaagttcttgactatgagctgtgcaagagattctatcttgtggtggaagccaaggacggcggtaccccagcactgtccgctgttgctaccgttaatatcaatctcaccgatgttaacgacaacccgcccaaatttagtcaggacgtgtactcagccgtaatctcggaagacgctctcgtgggagatagtgtgatactcttgattgccgaagatgttgattcacagcctaatgggcagatacacttcagcatcgtgaacggcgacagagataacgagttcactgttgaccccgtcctaggcctggtgaaagtgaagaaaaaattggatagagagcgcgttagcggctatagtctcctggtacaggcggttgattctgggatccccgcaatgtcttctaccgctacagtgaacattgatatctcggacgtgaatgacaacagtcccgtgttcacacctgctaattatacggcggtgatccaagaaaataaacccgttggaacatctattctgcagttggtcgtaaccgacagagactccttccacaatggacctccattttcttttagtatcctgtccggaaatgaggaggaagagtttgttctggatccccatggcattctgcggagcgcagttgtgtttcagcacacagagagcctcgaatacgtgttgtgcgtgcaggccaaggattctgggaagccacagcaagtttcccacacctatattagggtccgcgtgatcgaagaaagtacccacaaacccactgcaattcccctggaaattttcatcgtgacaatggaggacgactttcctggcggcgtaataggaaaaatccacgccacagatcaggatatgtacgacgtgctgaccttcgctctaaagtcggagcaaaaatccctttttaaagtcaattcccacgacggaaaaatcatcgcccttggcggcctggattccggaaagtatgtgctgaatgtgtccgtcagcgacgggcgcttccaggtacctattgacgtggttgttcacgtggagcagctggtgcatgagatgttgcaaaacactgtgacaattagatttgaaaatgttagccccgaggatttcgtcgggttgcatatgcacgggtttcgccggactctccgtaacgccgtgttgacgcagaagcaagatagcctccgcatcatttccatccagccagtcgctgggacgaatcagctcgacatgttgttcgcagtggagatgcattctagcgaattctacaaaccagcctacttaatccagaagctatccaatgctcggcgccacctggaaaacataatgaggatatcagccatcctggagaaaaactgctctggactggattgccaggaacaacattgtgagcagggactgagcctcgactcccacgccctgatgacctacagtactgcccgaatttctttcgtgtgccctagattttaccgtaatgtccggtgcacctgtaacggaggcttgtgcccggggagcaacgatccatgcgtggaaaaaccgtgtccaggcgatatgcagtgtgtctcttacgaagcatctcgacggccctttttgtgccaatgcccacccggcaagctgggtgaatgcagcggccatacttccttgtccttcgcaggcaattcctatatcaagtacagattgtccgagaactctaaagaggaggatttcaagttagcgctccggttgcgaaccctgcagtccaacgggattattatgtacacacgcgccaacccatgcattatacttaagattgtggatgggaagttgtggttccagttggattgcggttccgggccaggcatcttgggcataagcggacgggctgtgaatgacggttcctggcactcagtgtttctggaactaaataggaacttcaccagtctgagtttagatgactcttatgtcgagagaagacgggcccctctgtattttcaaacgcttagcaccgagagttctatctacttcggagcactcgtgcaggctgacaacattagatcgctgactgacactcgagtcactcaggtgctgagcggcttccaaggatgcttggactcagtaattctcaacaacaacgaactccctctacagaacaaacgttcatcttttgcggaggtggttggcctgactgagttgaagctaggctgtgtactttacccagacgcctgcaaacgatccccatgtcaacatggtggatcctgcactggtctgccttctgggggataccagtgcacctgtcttagtcagttcacgggcagaaactgcgagtccgagataacagcttgtttccccaacccttgcaggaacggcggaagctgcgacccgattggcaacacgttcatttgcaattgcaaggctggcctgactggggtcacttgtgaagaggacattaatgagtgcgagagagaggagtgcgagaacggtgggagctgtgtgaacgtattcggtagcttcctgtgcaactgtactccgggctacgtggggcagtattgcggactgaggcctgtggtggtgcccaatattcaggccgggcactcgtacgtaggaaaggaagagcttattgggatcgcagtggtactgtttgtgattttcatcctcgtcgtgttatttatcgtcttcaggaagaaagtattccgcaaaaattattctagaaataatattactctggtgcaagacccggccaccgcggcgctgctcaacaagagcaatggcattcccttccgaaacctgagaggcagcggcgacggacggaacgtctaccaggaagtcggacccccacaggttccggtgaggcctatggcctatactccttgtttccaatctgatagcaggtccaacctggacaaaatcgtagacggattgggcggagaacatcaagagatgaccacctttcatcccgaaagtccccggattctcactgcaaggcggggcgtcgttgtttgttcggtggccccaaacctacccgccgtctctccttgtcgttcggactgcgattctattcggaagaacggttgggacgcgggaaccgagaacaaaggtgtcgatgatccgggcgaagttacatgtttcgcaggaagcaataagggatctaacagtgaggtgcagagcctgtccagctttcaaagcgattccggggatgacaacgcttctatcgtgacggtcatccagcttgtcaacaacgtggtcgacacaatcgaaaacgaagtcagtgtaatggaccaaggacagaactataacagggcttaccactgggatacaagcgattggatgcctggtgcaagactgagcgatattgaagaggtgccaaactatgagaatcaggacggcggctctgcacatcaaggatccacccgggagttagaatctgattattacttagggggttacgacatcgattccgagtatccccctccccatgaggaggaatttctcagccaagatcagctcccaccccctcttccagaagatttcccagaccagtatgaggcgctgccaccttcccagccggtttccctggcaagtaccctgtctccagactgtcgtagacggccccagttccatcctagccagtatctgcctccccacccatttccaaacgaaactgacctcgttggaccaccggcaagctgtgagttttcaactttcgccgtttccatgaaccagggcaccgaacccactggacctgccgattcggtgtcactgtccttgcacaattcccgcggcacttcctcttctgacgtgagcgcgaattgcggctttgacgacagcgaggtagcgatgtctgactacgagtcagtcggcgagctgtctctggcatcactgcacatcccatttgttgagacccaacatcagacacaagtgtag

SEQ ID NO: 187508 - DNA, 13674 bp, synthetic construct
  misc_feature 1..13674: note = Description of Artificial Sequence: Synthetic coding sequence
  source 1..13674: mol_type = other DNA
atggacatcatcatgggccactgcgtgggcacccggccccccgcctgctgtcttatcctgcttctgttcaaattactcgctaccgtttcgcagggcctcccaggaacaggacccttgggcttccactttacccattcaatttataatgccaccgtgtacgagaactctgccgcccgcacttatgttaactcgcaaagtagaatgggaataactttaatagacctgtcttgggacattaagtatagaatagtctccggagatgaggagggtttctttaaggcagaggaggtgatcatagctgacttctgctttctccggatcaggacgaaaggggggaattctgcgatcctgaacagggagattcaagataattacctgttgatcgtcaagggatctgtcagaggggaggatttggaagcgtggacaaaagtaaatatccaggtgctcgatatgaatgatctacggcccctgttctctcccacaacatactctgtgaccattgcagagtccacacccctgcgcacatccgtagctcaagtgaccgcaactgatgccgatatcggttcaaatggtgaattttactactacttcaaaaataaagtggatcttttttccgtccatccaacctcaggggtaatcagcctgtcaggccgcctgaactatgatgagaagaatcgctacgatctcgaaatcttagctgtggatagaggaatgaaattatacggcaacaatggggtgtctagcaccgcaaagttgtacgtgcacatcgaacgcataaacgagcacgcccccactatccacgtggtgactcacgttcctttttccctagagaaggaacctacctacgccgtggtcaccgtagatgacttagacgacggcgcaaacggagagatcgaatctgttagcatagtggccggcgaccccctcgaccagttcttccttgccaaagagggaaagtggcttaacgaatacaagatcaaagaaaggaagcagatcgactgggaatccttcccctacggctacaatctgactctccaggcgaaggataaaggtagcccacagaagtgcagtgcccttaaagctgtttacatcgggaaccctaccagggacacagttcctatcagattcgaaaaagaagtttacgatgtgtcgattagcgagttttctcctccgggtgtcgtcgtggcgatcgttaaactgtctcccgaacccatcgacgtggagtataagctatcccccggagaagacgcagtttactttaaaatcaatccaaggtcaggactgatcgtcacagcccggccattaaatactgtgaaaaaggaggtctataaactcgaagtgacaaacaaggaaggagacctgaaagctcaggttacaatttcaattgaagacgcaaacgaccatacccccgaatttcagcagccactttatgacgcatacgtgaacgaatctgttcccgtgggaacctccgttctcactgtgtccgcatcagacaaagacaagggagaaaatggctacattacctatagcattgcttcactgaacctgcttccctttgtaattaatcagttcacaggcgtgatcagtacaacagaggaactcgatttcgaatcctcccctgaaatatacaggtttattgtccgggcctcggactggggatctccctaccggcatgagagcgaggtgaacgttactattagaattggcaacgtcaacgacaattcacctctgttcgaaaaggtggcatgtcagggcgtgatcagctacgatttccctgtcggggggcacattaccgcagtttccgccattgatatcgacgaactcgagcttgtgaaatacaagatcatcagcggtaatgagcttggattcttctatctgaatcctgattcaggagttttgcagctgaaaaagagtctgactaacagtgggataaagaatggcaactttgccctgcgcataactgcaaccgacggggagaacctcgctgaccccatgtcaatcaatattagcgtcctgcacggaaaggtgtcgagtaaaagtttctcatgtcgggagactagggtggctcaaaagctggccgaaaagctccttatcaaagcaaaggcaaacggcaaactcaacctggaggacgggttccttgacttttactccatcaaccgtcagggcccgtattttgacaagtccttcccctcagatgtggccgtaaaagaagatctccctgtgggagctaatatccttaaaatcaaagcttatgatgcggactcaggcttcaatgggaaagttctgtttaccatctcggacggaaataccgattcttgcttcaacatcgatatggagactggtcagttgaaagtgctgatgcccatggatagagagcataccgatctgtacctgctcaatatcactatttatgatttagggaaccctcagaaaagcagttggcgactattgacaattaatgtggaagacgctaacgacaactcgcccgtttttatacaggatagctactcagtcaatattctggagtctagcgggatcggcacagagatcatacaagtggaggccagagacaaagatctcgggtctaatggggaagttacttattccgtgctaaccgatacccagcaattcgctattaatagcagtacaggtatcgtgtacgtggcagaccaactcgatcgcgaatctaaagccaactactccctcaagattgaagctcgggacaaggccgagtccgggcaacagctgttctcggtggtcaccctgaaggtcttccttgatgacgtgaacgattgcagccccgccttcattcccagctcctatagtgtgaaggtgctggaagacttgccagtcggcacagtgatcgcatggctggagactcacgatccggatctcggacttggcgggcaagtgcggtactcattagtgaacgactataatgggaggtttgaaattgacaaggctagtggcgccatacgcctgagcaaggagcttgattacgaaaagcagcagttttacaatctcaccgtccgggctaaagacaaaggccgtccagtatcactcagtagcgtaagttttgttgaagtggaagttgtcgatgtgaacgaaaacctgcataccccatacttccccgactttgccgtcgtggggagtgttaaggaaaactcccgaatcggaacaagcgtgctacaggttaccgccagagatgaggatagcggacgtgacggcgaaatccagtatagcattagagacggcagcggactgggccgattctctatcgacgacgaatcaggagtgatcacagcagccgatatcctggacagagaaaccatgggttcttattggctgacggtgtacgcgaccgaccgcggagtggtccctctctatagcactatcgaggtgtatattgaggtagaggacgtcaacgacaacgctccccttacctccgaacccatatactacccagtcgtgatggagaactcgcccaaagatgttagtgtgatccagatccaagctgaggatcccgactcgagttccaatgaaaaattgacgtatagaattacgtccggcaaccctcagaacttttttgccatcaacatcaagacaggcctgatcacgaccacttcccgtaaacttgacagggaacagcaggcagaacactttctggaggtgactgttactgatggaggcccatctccaaaacaatccacaatctgggtggtcgtgcaggttctggacgagaatgataataagcctcagtttcctgaaaaggtatatcaaataaagttacctgagcgtgataggaagaaaaggggggagcccatctatcgggccttcgcattcgacagagatgagggcccaaatgcggagatctcatacagcatcgtcgacggcaatgacgatggaaagttctttatcgaccctaagactgggatggtttcctcacgaaaacagttcacagcaggatcatacgatattttgactattaaggccgttgacaatggccggccccagaaaagctctacagcgcggctgcacatcgagtggataaagaaacctccaccatctcccattcccctgactttcgatgagccgttctacaattttacagtgatggaatcagacagggtgacagagatagtaggcgtcgtttcagttcaaccagccaatacgccactctggttcgatatcgtcgggggtaacttcgattcggcttttgacgcggaaaagggtgttggaaccatcgtcatcgcgaagcctctagatgccgaacagcggagtatatacaatatgtctgttgaggtgaccgatgggacgaatgtagctgtgacacaggtctttatcaaagtgttagacaacaacgataatggccctgaattttcccaacctaactacgatgtcaccatctctgaagatgtgctaccagatacagaaattctgcaaatcgaagcaactgaccgagacgagaaacacaaattgtcatatacggttcacagtagcattgactccatatcaatgcgcaagtttcggatcgacccgtctactggggtgttgtacactgctgagcgacttgaccacgaagcacaggataagcatatcctcaacatcatggtacgggatcaggagtttccatacagacgcaatttggctagggtgattgtcaacgttgaggatgctaacgaccattccccatacttcaccaatcctttatatgaggccagcgtgtttgagagcgccgcccttggcagtgcggtgctgcaggtcaccgccctggataaagataagggagaaaacgcagagctcatttacacgatcgaggccggaaacaccggcaacatgttcaaaatcgaacccgtgctaggtattatcacaatctgtaaggagcctgacatgactaccatgggccagtttgtgctgtccattaaagtgaccgaccagggcagccccccaatgtctgcgacggcaatagtgcgcatctcagttacaatgtcagacaacagtcacccgaaattcattcataaggactaccaggccgaggtcaatgaaaatgtggacatcggaacatcagtgatcttgatctccgccatatcccagtccactctgatctacgaagtcaaagatggtgatatcaatggcatttttacaattaatccctattccggggtgatcaccacccagaaagctctggattatgaaagaacttccagctatcagctcatcatccaagctaccaatatggctgggatggcatccaacgctaccgtaaacatccaaattgtggacgaaaatgataacgcccccgtttttctatttagtcaatatagcgggtcactatccgaggccgccccaatcaattctattgttcggagccttgataactctcctctggttatccgcgcaactgacgcggactccaatcgtaacgcattactggtgtaccagatcgtggagagcaccgcaaagaaattcttcacagttgattctagcactggcgcgatcaggactattgcaaatctggaccacgagaccattgcgcattttcactttcacgtgcacgttagagacagtggaagtccgcagttgacagccgagtccccggtggaagtcaatatcgaggtgaccgatgtcaacgacaatcccccagtctttacacaggcggtgtttgaaacgatcttacttttacccacctatgtgggagtggaagtgctgaaggtcagcgcaaccgacccggattccgaggtccctccagagctgacttatagccttatggaagggtcccttgatcacttcctgatcgatagtaacagcggcgtgctaacaatcaaaaacaataatctgagcaaagaccattatatgctgatcgttaaggtgagtgacggaaagttttactccaccagcatggttactatcatggtgaaagaggcgatggattccgggctgcactttacacagtctttctacagtacaagcatttcagaaaacaacactaatatcacgaaggttgccatcgtgaacgctgtgggcaacagactcaatgagcccctgaaatatagcatccttaacccaggcaataagttcaaaatcaagtccacgtccggagtaattcagaccactggggtgccgtttgatcgggaagagcaggagttatacgaactcgtcgtagaggcttcccgcgagttggaccacttaagggtcgcaagggtcgtcgtacgcgtaaacatagaggacattaacgataattcgccagttttcgtgggactcccctactacgcggccgtgcaggtggacgccgagcccggaaccctgatctaccaggtgactgccatcgataaggacaagggtccaaatggcgaagtgacatatgtgctccaggatgattatggtcacttcgaaatcaatcctaatagcggcaacgtgattcttaaagaggccttcaatagtgatctctccaacatagaatacggcgtgactattctggccaaagacggtggcaagcctagccttagcacaagcgtagagctaccgataaccatcgtcaataaagccatgccagtttttgataagcctttctataccgccagcgtgaacgaggacatccgcatgaacacacccatattatctataaacgccacgtcccccgaaggccagggaattatatacatcatcattgacggggacccattcaaacaattcaatattgacttcgacaccggggtgctgaaggtggtgtcccccctggactacgaggttacttcggcctacaaactaacaatcagggctagtgacgccctgacaggagccagggctgaggtgactgtcgatctcctcgtcaatgatgtcaacgacaatccacctattttcgatcagcccacctataacacaactctgagcgaggcttccctcatagggacccctgtcctgcaggtcgtgtcaatcgacgccgattcagagaacaataagatggttcactaccagatcgtgcaggatacttacaactccacagactatttccacatcgatagtagctccggtctcattctcacagccagaatgctcgaccatgaattagtgcagcattgtaccctgaaagtgaggagtatcgactcaggcttcccctctctgtcttctgaagtgttggttcatatctacatatccgacgttaatgacaatcccccagttttcaaccagctaatctacgagtcctacgtatccgagctggctcccagagggcacttcgttacttgtgtacaagcatccgacgcagattcctcagattttgatagattggagtactccatcctgagtggcaacgaccggacttcctttcttatggactccaaatcaggcgtcataactctgagcaaccatcgaaagcaacgtatggagcccctgtactcccttaacgtgtcagtgtcggatggcttgtttactagcacagcacaggtacacatcagagtgctgggagcaaacctctatagccccgcctttagccagtctacttatgtggccgaagtgagggagaacgttgcagcagggacaaaagtgatacatgttcgcgccaccgatggggaccccgggacctacggccagatttcctacgcaataataaatgattttgctaaggatcgctttctcatcgactccaatgggcaggtgattaccaccgaaagactagacagagaaaacccgctggagggagacgtttccatctttgtgagggctctggacggcggcggtaggacgacgttctgtacagttcgtgtcatcgttgtcgacgaaaacgataacgccccacagttcatgacagttgagtacagagcctcagttcgcgcagacgtgggacggggacatctagtgacacaggtacaagcaatcgatccagacgacggggcaaactcaagaattacatatagtctctactctgaagcctctgtatctgtggccgacttgctggaaatcgatcctgataatggctggatggtgaccaaagggaattttaatcaattaaaaaatactgtgctctcattcttcgtgaaggccgtcgacggcggcattccagtgaaacactcactgatacccgtatatatacacgtgctcccgcctgagacattcctcccctccttcacacagagccagtactctttcacaattgctgaagataccgcgatcggcagtacagtggacaccctgaggattcttccgtcccaaaatgtctggttctcaaccgtcaacggcgagagaccagaaaataataaagggggaatttttgtgattgagcaggaaaccgggaccattaaattggataaacgcttggacagagagacaagcccagctttccacttcaaggtggccgcaactattccactcgataaggtcgatattgtcttcacagtggacgtggacatcaaggtcctagatctcaatgacaacaagcctgtcttcgagacttcaagttacgatacgattatcatggagggaatgccagtgggtacaaagttgacccaggttcgagctattgatatggattggggcgcgaatgggcaggtgacatacagcctgcactccgacagtcaaccagagaaggtcatggaggctttcaacatagactcgaacaccggctggatcagtaccttgaaggatctggaccatgaaaccgaccccacgtttacattttctgtggtggcaagcgatcttggcgaggccttcagcctgtcaagcactgccctcgtgagcgtacgcgtgacagacattaacgataatgcccccgtattcgctcaggaagtctatcgaggcaatgtgaaggagtctgaccccccaggagaagtggtagcagtgctgtccacttgggatcgggatacctccgacgtgaaccggcaggtctcctatcacatcactggagggaatccgcgtgggcgtttcgctctgggactggtccagtcggagtggaaggtgtatgtgaagcggccacttgaccgggaggaacaagacatctactttctgaatatcactgctacggatggcctgttcgtgacccaggccatggtggaggtatccgtctcggacgtgaacgataattctccagtctgcgaccaagtggcatacactgcactcctaccggaagacatcccatcaaacaagattatcctcaaggtctccgccaaggacgcagacataggatctaatgggtatatcagatactcgctctatggtagcggaaactccgaattttttttagatcctgagtccggcgagctgaagaccctggcactccttgatagggagagaatcccagtatactccctcatggctaaggcaacagatggcggcggacgtttctgccagagcaatattcatctaattctggaagatgtgaacgacaaccctcctgtgtttagctccgaccactataatacctgcgtatatgagaacaccgcaactaaagcactgctgactcgtgtgcaggctgtcgatcccgatataggcatcaaccggaaggtggtgtatagtctggccgactccgcagggggcgttttttctatcgattcgtcctcgggtatcattattctcgaacaacccctggatcgcgagcaacagagtagctataatattagtgtgcgggcgacagatcagagcccaggccaatcactgtccagcctgaccacagtgaccatcactgtgctggatattaacgataaccctcctgtttttgaacggagggactatctggtcacagtcccggaggacacctcccctggcacgcaggtgcttgccgtgtttgcgacctcgaaggacataggtaccaatgccgagatcacttacctcatccggtctggaaatgaacagggaaaatttaagataaacccaaagaccggaggtattagtgtgagcgaagttctggattacgaactgtgcaaacggttctaccttgtggtggaggcaaaagatggcggaacaccagctcttagcgcggtggctaccgttaatattaatttgacggacgtgaacgacaacccccctaagttcagccaggacgtgtacagtgctgttatctcagaggacgccttagtgggagatagtgtgatcttgttaatagccgaggacgtggactcccagcccaatggccagattcattttagtatcgtgaacggcgatagagataatgaattcacagtggatcctgtgctgggcttggtaaaggtcaagaagaagctcgatcgcgagagagtctccggatatagcctgctcgtgcaggccgtcgatagcggcatccctgctatgagttcaactgctaccgtgaatatagatatcagcgatgtcaacgacaattcaccagtttttactccagccaactacaccgctgtcatacaggagaacaagccagtcgggactagcatattgcagctggtagtcaccgaccgcgatagctttcataacggcccccctttcagcttcagcattctgtcaggcaatgaggaggaagagttcgtgctggacccacacggcatccttcgatccgctgtggtctttcagcacaccgagtcactggaatacgttctgtgtgtgcaggccaaggactccggcaaaccacaacaagtatcccatacctatatccgggttagagtaatcgaagagtccactcacaagcctacggccattccgctcgaaattttcattgtcaccatggaggacgatttccctggcggcgttattggtaagatccacgcaacagatcaggacatgtacgacgtgttaacttttgctctcaagagcgagcaaaagagtctatttaaagtcaacagtcacgatggtaagataattgcactgggtggcttagacagcggcaaatatgtacttaacgtgtccgtatccgacggccgattccaggttcctattgatgttgttgtgcacgtcgagcagctggtgcatgaaatgttgcagaatacagtcaccatcagatttgaaaacgtttcacctgaagacttcgtgggactgcatatgcatggatttcggaggaccctacgaaacgcagtattgacacaaaagcaggactcgctcaggatcataagcattcagcctgtcgctgggaccaatcaactggatatgctcttcgccgtggaaatgcacagctcggaattctacaaaccagcctatctgatccagaagttatctaatgcccggcggcacctagaaaatatcatgcggataagcgcaatccttgaaaaaaattgctcgggcctagactgccaagagcagcactgcgagcagggacttagcctggattcccacgctcttatgacttactctaccgccaggatatcattcgtatgtcctcggttctatcggaatgtccgatgcacctgcaacggcggactctgccccggcagcaacgacccttgcgtggagaaaccctgtccaggtgacatgcaatgcgtgtcttacgaggccagcaggcggcccttcctctgccaatgtccccctggtaaactcggcgaatgctctggacatacttcgctgagtttcgcaggaaacagttacattaagtaccggctctccgaaaattccaaggaggaagattttaaactggctctgcgactgagaacccttcagagcaatggcataattatgtatacccgcgccaatccgtgcattatcctgaagattgtggatgggaagttatggttccagctggactgtggttctgggcctgggattttaggaatctcaggccgtgctgtaaacgacggctcatggcatagcgtcttcttggaactgaatcgcaacttcacctcactgtccctagacgactcctacgtagaacgaaggcgcgctccactgtactttcagacattaagtacggagtctagcatctatttcggcgccttggtccaggccgacaacatcagatcactaacagacactagagttactcaggtcctgtctggttttcaagggtgtctggactcggtcatccttaataataacgaactccctttacagaataagaggagctccttcgcagaagtcgtgggcttgactgagctaaagcttggttgcgttctttaccctgatgcttgtaagcggtcaccttgccagcacggaggttcctgtaccggtctgccatccggggggtaccagtgtacctgtttgagtcagtttaccggcaggaattgtgagtctgagattaccgcgtgctttcctaacccatgccgcaatgggggttcctgcgatccaatcggaaacaccttcatttgcaactgtaaggctggcctcaccggcgtcacttgcgaggaggacataaacgagtgtgaaagggaggagtgcgaaaacggcgggagttgcgtcaacgtgtttggctctttcctgtgcaattgcacccctgggtatgtggggcagtattgtggcttaagacccgtggtcgtgccaaacattcaggcgggtcactcttatgtcggtaaggaagagctgattggcatagctgtggtgctgtttgtaatcttcatcctcgtagtgctgttcattgtttttcggaagaaggtgtttcgcaaaaactatagccggaacaacatcactttggttcaggatccagccaccgctgctttgctgaacaagtctaacggaataccattccgcaatctgcgtgggtcaggtgacgggaggaatgtgtatcaggaagtcggccccccacaggtgcctgtgagacctatggcctatacaccctgttttcagagtgactctcggtctaacctggacaaaatcgtcgacggcctgggtggcgagcaccaggagatgaccaccttccacccggagtctcctcggatcctgaccgcccggcggggcgttgtggtgtgcagtgtggctcctaaccttccagccgtgagtccctgtcgctctgactgcgacagcatacgtaaaaacggctgggacgcaggaaccgagaacaaaggggtggatgatccaggggaagtaacttgttttgctgggtcaaacaaaggatcgaacagtgaggtgcaatccctgtccagtttccagagcgatagcggcgacgacaatgcctatcactgggacacctcagactggatgcctggcgcgcggctgagtgacatagaggaggtccctaactacgagaatcaggatggtggctccgcccaccagggttccactagggagctggagtctgactactacttgggcggttacgacatcgattcagagtaccctccaccacacgaagaggaattcctttcacaggaccagctccctccacctttgccagaagacttccccgatcaatatgaggcccttccgcctagccagcctgtgtcattggcctccaccctttccccggactgcagacggcggcctcagtttcaccctagccaatatctgcccccacacccctttccaaatgagaccgaccttgtgggtccacctgcgtcatgcgaattttccactttcgctgtgtcaatgaatcagggcacagagcctaccggacctgctgactctgtgtcactctctctgcacaacagccgcgggacgagcagtagtgatgtgtctgctaattgtgggttcgacgatagcgaagtggccatgtcagactacgagtccgtgggggaactcagccttgcctcactgcacatccctttcgtggagacccagcaccagacgcaggtttag

SEQ ID NO: 187509 - DNA, 3765 bp, synthetic construct
  misc_feature 1..3765: note = Description of Artificial Sequence: Synthetic coding sequence
  source 1..3765: mol_type = other DNA
atggacatcatcatgggccactgcgtgggcacccggccccccgcctgctgcctgatcttacttctgttcaaactcctggctaccgtgtcgcaggggctccccggcacaggacccctgggcttccattttacccactcaatatacaacgcaacagtttacgaaaactctgcggccagaacgtatgttaacagccaatcaaggatggggatcaccctgattgatctgagctgggatatcaagtatcgcattgtatctggcgatgaggaaggcttctttaaggcagaagaagtgatcatagctgacttctgtttcctgagaattagaacaaaggggggaaacagcgctatcctgaatcgcgagattcaggacaactacctcctgattgtaaagggctccgtccgcggcgaggacctcgaagcatggacgaaggtgaatatacaggtgctggatatgaatgatctgcgccctctgtttagccccaccacatatagtgtaacgattgctgagagtacacccctgagaactagcgtcgcacaggtgaccgccaccgacgcggacatcggttcaaacggggagttttattactacttcaaaaacaaggttgatttgtttagcgtccatcctacatcaggagtgatctccctttccggaaggctgaattacgacgaaaagaacaggtatgatctagagatccttgccgtcgaccgaggaatgaaactgtacggaaataacggcgtttccagcaccgccaagctgtatgtacacatcgagcgtataaacgaacacgctcccactatccatgtggtgacacatgtgccatttagcctggagaaagaacccacctatgctgtggtgaccgtggacgatttggatgacggcgcaaatggggaaattgaaagtgtatcaatcgttgcaggggatcccctcgaccagttttttcttgccaaagagggtaaatggttgaatgagtacaagatcaaggaaaggaagcagattgattgggagtcttttccttatggttataatctgaccctgcaggccaaagataagggttccccgcagaagtgttcagccctgaaagccgtgtacattgggaaccccactcgagataccgtacccatcaggtttgagaaagaggtgtacgatgtatcaatctccgaatttagtccacctggggttgtggtcgcaatcgtgaaactgagccctgagccaatagatgtcgagtacaaactgagccccggagaagacgcagtgtactttaagatcaaccccagaagcggactgatcgtaacagcccgcccccttaatacagttaagaaggaggtctacaagcttgaggtcaccaataaggagggcgatcttaaagctcaagtcacaatttctatagaggacgcgaacgaccatacccccgaatttcagcagccattgtatgacgcatacgtgaacgaaagtgtgcctgtaggtacatcagtgctgacagtgtcggcttcggacaaggacaaaggcgagaacggttatataacctacagtattgccagcctgaacttgctgcctttcgtcatcaatcagttcaccggggtgattagtacgaccgaagaattggattttgagtcctctcctgaaatttatagattcatcgtccgcgcaagcgactggggttccccctacagacacgagagtgaggtgaatgtcacgatcaggattggcaacgtgaacgacaactcaccactttttgagaaagtggcatgccagggcgtaatatcctacgatttccctgtgggtggccatatcaccgcagtgagcgccatcgacatcgacgagctcgagttggtgaagtacaaaatcatctctggaaacgagcttgggttcttctacttaaatcctgactctggcgtgcttcagctgaagaagagcttaactaacagcggaatcaagaacggaaacttcgcactccgaatcaccgcaaccgacggcgaaaacctggcagaccccatgtcaatcaatatctctgtgctgcatggcaaggtgtccagcaagagtttctcatgccgggagactcgtgtcgcacagaagctggccgaaaaactcttgatcaaggcgaaagcgaacggcaaactgaatctggaggatggctttcttgacttctatagcataaatcgccagggtccctattttgacaagagctttccctctgacgtagcagtgaaagaagacctgcctgtcggtgcgaacattctgaagatcaaggcatacgacgcagactccggatttaacgggaaggtgctgttcaccatctctgatggcaacaccgactcctgtttcaatatagacatggagacaggccagctcaaagtgttgatgccaatggatagggagcataccgatctgtatctactcaacatcaccatctacgatctaggaaaccctcagaaatcctcctggcgactgctgaccattaatgtcgaagatgcaaatgacaactcaccagtctttatccaggattcttattcagtaaatatcctggagtctagcggaataggcacggagatcattcaggtagaggctcgcgacaaagatcttgggtctaatggggaggtgacatactctgtgttgacagatacccagcagttcgccataaattcctccacgggcatcgtctacgtggcagaccaacttgaccgtgagagcaaggcaaactactctcttaagatcgaggcaagagataaggctgagtccgggcagcagctattctcagttgtgacccttaaggtgtttctggacgatgtcaacgactgctcccccgccttcattccatcaagttacagtgtcaaggtcttagaggacctacctgtgggcactgtgatcgcctggctggagacgcacgaccccgatctgggcctggggggccaggttcggtactccctcgtcaatgattacaacggtcgttttgagattgacaaagcgtccggagccattcgcctatccaaagagcttgactatgagaaacaacagttctacaatttgactgttagggccaaggataagggccggcccgtcagcttgagcagtgtctccttcgtcgaggtggaagtcgtcgatgtgaacgagaatctgcacaccccatactttcctgactttgcagtcgtgggctccgtgaaggagaattcccggatcgggacctccgtgctgcaggtgactgccagggatgaggactccggcagagacggagaaattcagtacagcattagggatggttctggactagggcgcttttcaattgacgacgaaagcggggtgatcactgcggctgatattctggaccgggagactatgggtagctactggttaaccgtgtatgctacggaccgaggggtggtcccattgtacagcaccattgaggtgtacattgaggtggaggacgttaacgacaatgcccctctgacaagcgagcccatatattaccccgttgtgatggagaatagccctaaagacgtgtccgttatccagattcaggccgaggatcccgattctagctccaacgagaagctgacttatcgcataaccagcggcaacccgcagaatttcttcgctatcaatataaagactgggtcttgttctgtggctcaagccggcatgcagtggcacgaccactcttcccttcagagccggactcctggatttaaggggtatccatgtctgtctcttctttcttcatgggactatcgccatgctcctccctgtccggcgaccttcctcaattcttag

SEQ ID NO: 187510 - DNA, 9669 bp, synthetic construct
  misc_feature 1..9669: note = Description of Artificial Sequence: Synthetic coding sequence
  source 1..9669: mol_type = other DNA
atggtgaccaccgtggtggccgtgggcgacaccctggcccagcccttagccgccgctgaggttttcatagtggaaattacccttcaagatataaatgacaaccctcctgtgtttcccacagacatgttggatctgacagtggaggaaaatatcggagacggaagcaaaatcatgcagttgaccgccatggatgccgacgagggcgcaaacgcacttgtcacttatacaatcatcagcggcgcagacgattctttccgcatcgaccccgaatccggagacctcatcgccactagacggctagaccgggaacgacggagcaaatatagcttactggtgagagccgatgacggactgcagagctccgatatgcgcattaacatcactgtttctgacgttaacgatcatactcctaagtttagccggcctgtttattcctttgacatccccgaagatacgatccccgggtcactggtggccgccatactggctacagacgacgactctggcgttaatggagaaattacttacatcgtcaatgaggatgacgaggacggaatcttcttcctgaatcctattacaggcgtatttaatctaaccaggctgctggattatgaggtgcagcagtactatattcttacagtccgcgcagaggatggggggggtcagttcacaacaatacgggtgtatttcaacatattggatgtgaacgacaaccctccaatattcagcttaaacagttacagtacgtccttgatggagaatctccctgtcgggtccaccgtacttgtcttcaacgtgactgacgcagacgatgggatcaattcccagctgacatactccatagcgtcaggggattctttaggccagttcacggttgacaagaatggtgtgctgaaggttctaaaggctctggaccgggaatcccagtctttctacaacttggtcgtacaagtgcatgatctgcctcagatccctgccagtcggtttaccagcacggcgcaagtcagtattatccttctggatgtcaacgacaaccctcctacttttctttcccctaagctgacatatattccagaaaatacccctattgacactgtggtctttaaggcgcaagccacagaccccgatagcggccccaatagctatattgaatacaccctcctgaacccactcggtaacaagtttagcatcggcaccatagatggggaagtgagactgaccggagaactggaccgggaggaagtgagtaattacaccctcaccgtggtggcaactgataagggacaaccctccctctccagctctaccgaggtggtcgtcatggtgctggacatcaacgacaataatcccattttcgcccaggccttatacaaagttgagataaacgagaatacgctaaccgggacagacatcattcaggtgttcgctgcggacggcgacgagggaacaaacgggcaggtccgctatggaatagtgaacgggaacactaatcaagagtttagaatcgactctgtgacaggcgcaatcaccgtcgcaaagcctctggatcgcgagaaaacccctacctatcatctcaccgtgcaggccacagaccgcggatctacaccaaggaccgacacttctacggtgtccatcgtactgctggacatcaatgattttgtgcctgtttttgagctctcaccttactccgttaacgtgccagagaatcttggaacacttccccgaacaattttgcaggttgtggctcgtgatgacgatcggggaagtaacagcaagctgtcttacgtgctgttcggggggaacgaggataacgcattcacactctccgcctcaggcgaactgggagtgacccagagcttggatcgcgaaacaaaggagaggtttgttttgatgatcacagcgaccgattctgggagtccagccttgaccggaacaggcacaatcaatgtgatcgtggatgacgtaaacgataacgtccccactttcgctagtaaggcctatttcacaacgattccagaagatgctcccacgggtacggatgttttgctggtcaacgctagcgacgctgacgcctccaagaatgccgtcatcaggatcatcggggggaactcacagtttacaataaaccccagcaccggacagatcatcaccagcgcgctgctggacagggaaactaaggacaattataccctggtcgttgtctgtagcgacgccggcagtccagagcccctctctagcagtacatccgtcttggttacggttacggatgttaacgacaaccctccccggtttcaacaccatccctacgtgacacacatcccgagccctaccctgcctggcagcttcgtgttcgctgtgaccgtgacggacgccgacatcggccctaactctgagctacactatagtctgtctggtaggaactctgagaagtttcacattgatcctctccgtggtgcaattatggccgccggcccccttaacggagcaagcgaagtgacgttctcagtgcacgttaaagatgggggctcgttccccaagactgacagtacaaccgtgaccgtgaggttcgtgaataaggccgacttccctaaagtgagagccaaggagcagacattcatgtttccagaaaatcaaccggtgtctagccttgtgaccacaatcacgggcagcagcctgcgcggcgagcccatgagctattatatcgcgtccgggaatctgggtaacacattccagatcgatcagctcaccggacaggtctccatctcccaacccttggattttgaaaaaatccagaagtatgtggtttggattgaagcacgtgatggcggatttccccccttctccagctacgaaaagctagatatcacagtgttggatgtgaacgacaatgcccctatcttcaaggaagatccgtttatctcagagattctggagaacttgtccccgcgcaagattctcacggtatctgctatggacaaagatagtggaccaaatggccagctagattatgaaattgtgaacggcaacatggagaactcattctcaatcaaccatgccactggagagataaggagtgttcggccacttgatcgagaaaaagtgagtcactacgtgctcactataaaatcaagtgataaagggagtccatcccaaagcacaagcgtgaaggtcatgattaatatcctggacgagaacgacaatgctcccaggttttcccagatcttttccgcacatgtccctgagaacagcccactggggtacacagtgacccgagtcacgactagcgacgaagacattggcatcaacgccatttcaagatattcaatcatggacgcctcgctgcctttcacaatcaacccatcaaccggagatatcgtcatctctcgtccgctgaatagggaggacaccgacaggtaccgcatccgggtttcagcgcacgactcggggtggactgtgagtaccgacgttaccatctttgtgacagatatcaacgataatgccccacggttctccaggacgtcctactacttggactgtccagagctcacagaaattggcagcaaggtgactcaggtgttcgccaccgacccagacgagggctctaatggacaggtgttctattttattaaatcgcaatccgagtatttcaggattaacgccacgaccggggaaatcttcaataagcagattcttaaataccagaacgttactggcttctcaaacgtgaacattaatcgtcactccttcatagtgacctcatctgaccgagggaagcccagcctcatctctgagaccaccgtgaccatcaatatcgtcgactccaacgataatgctcctcagtttctgaaaagcaaatactttacaccagtgactaaaaacgtgaaggtgggcacgaagctcatcagggtgactgcgatcgatgacaaggattttggcttgaacagcgaagtagaatactttatctccaacgataaccacctgggaaaatttaaattggacaacgacactggttggatcagcgtagcgtcatccttgattagcgacctgaaccagaatttctttataaccgtgacagctaaggataagggtaaccctcccctgtcaagccaggctacagtgcatatcactgtgaccgaagagaactaccatactcccgagtttagtcaaagccatatgtccgctacgatccccgagtctcactcaatcggttccatagtacgcacagttagtgcacgggacagggatgctgccatgaatggcctgatcaaatattccatctcatctggcaacgaggaaggcatttttgccatcaacagttctacaggcatcttgacacttgcaaaggcattggactacgagttatgccagaagcacgaaatgacaatttcagctatcgacggaggttgggtggcacgcactgggtattgctcagtgaccgtgaatgtgatcgacgtcaatgacaactcgccagtcttcctgagtgacgattacttccctaccgttttggaaaatgcaccatcaggcacaaccgtgattcatctcaacgctacagacgcagacagcggtaccaacgccgtgatcgcatatactgtccagtcaagcgatagtgacctgttcgtgatagatccgaatacaggtgtgatcacgactcaaggctttttggatttcgagactaagcaatcatatcatctgacagtcaaggcttttaatgtccctgacgaggagagatgttccttcgctacagtgaacattcagctgaaaggcaccaatgagtacgtgcctaggttcgtcagcaagctgtattattttgaaattagcgaggcagcacccaaaggaaccatagtcggggaagtgtttgcgagtgaccgagatctgggtaccgacggggaagtgcactacctcatctttggcaactctcggaaaaagggctttcaaataaacaagaagaccgggcaaatctacgtctctgggatactggatcgggaaaaggaggagcgggtctctttgaaggtgcttgccaaaaattttgggagtattcggggcgctgatattgacgaagtaactgtgaatgtgacagttctagatgctaacgatcctcccatcttcacactgaacatttacagtgttcagatctcagagggtgtgcctatcgggacgcacgtgacctttgtctccgccttcgactccgatagcattccttcttggtctcgcttctcctacttcattgggtccggaaacgagaacggagccttctccatcaacccccaaaccggacaaatcactgtgactgccgagctggaccgcgaaactcttcccatctataacttgagcgtgctagccgtggacagcggcacacctagcgccaccggttccgcaagtctgctcgttactctcgaggatataaacgacaatggccctatgctgaccgtatctgagggagaggttatggaaaacaaacgccctggtacactcgtaatgacacttcagtccaccgatcccgacttaccgccaaaccaggggcccttcacctactatctgctttccacaggtccagcgacctcatatttcagcttatccacagctggcgtgctgagtacaacgagggagatcgaccgggagcagatcgcagatttttacttgagcgtcgtcaccaaagactccggtgtgcctcaaatgagctctaccggcacagtgcatattacggtcatcgaccagaacgataacccaagtcaatcccggaccgtggaaattttcgttaattactatgggaatttatttcctggaggaatcctgggctctgtgaagccacaggaccccgacgtactggacagttttcattgttccttgaccagcggcgttacctcccttttcagcattcccggcggtacgtgtgatttgaacagccagcctcgttctactgatggtacattcgacctcacagtgctcagcaacgatggcgtacatagcaccgtcacttcgaatatcagagtgttctttgcagggttttcaaacgcaactgtggataattcaatcttgcttcggctgggagtcccaaccgtgaaggactttttaactaaccattacttacatttcctccgaatcgcctcttcacagcttacaggcctggggacggcagtacagctgtactcggcttatgaggaaaacaataggacctttctcttggcagcagtgaaacggaaccataaccagtacgttaatcctagtggtgtggctactttcttcgagagcatcaaggaaattctccttcggcagtctggggtgaaagttgaatctgttgaccatgactcatgtgtccacggcccatgccagaacggaggttcttgcctgagacggctggccgtttcctcagtgctgaaatcccgcgagagtttacctgtcatcatcgtagcgaatgagcccctgcaaccatttttgtgcaaatgtctgcctggatacgcaggcagctggtgcgagatcgacatcgatgagtgccttccttcgccctgccattccggtggaacctgtcataatctcgtagggggtttctcatgtagctgcccagatggctttacaggccgagcctgcgagagggacattaatgagtgtcttcagtccccgtgtaaaaatggggccatctgtcagaacttcccaggatctttcaattgtgtctgtaaaacagggtatactggcgtctttggcaaacattgcgagttaaacagctatgggtttgaagaactgtcttatatggagttcccctctcttgaccctaataacaactacatctacgtgaaattcgctactatcaagtcccatgctctccttctctacaattacgataaccagaccggtgatcgcgctgagttcctggccctcgagattgcggaggagaggctgagattctcctacaacctcggaagcgggacgtacaagctaacaacaatgaagaaagtttccgatggacacttccacacagtcatcgccagacgagcgggaatggccgcttcccttacagtggattcgtgctctgaaaaccaggaaccggggtattgcacagtgtccaacgtggctgtgagtgacgactggaccctggatgttcagcccaaccgtgtgactgtaggcggaatcaggagtttggagcctatactccagaggcggggtcacgtggagtctcacgattttgtgggatgcatcatggaatttgccgtaaacggacgaccgctggaacccagccaggccttagcagcacaggggatcctcgatcagtatggagatttcatcagctactgctttaaggaaaagaaatgcaagaaagtctgtttcaccgtgaccccagacacagctctatccctggaaggcaagggcagactggactaccacatgtcccagaacgagaaacgggagtacctgcttaggcagtcccttcgcggggccatgctggagccattcggggtaaattcactagaagtgaaatttcgaacccggagcgaaaacggtgtcctcattcacattcaggaatcttcaaactacacaacagtgaagattaagaatggaaaggtgtactttacaagtgatgccggaattgcgggcaaggtggaaagaaatattcctgaagtgtatgtggccgatggacattggcacactttcttgatcggaaaaaatggaactgccactgtactgtctgtggaccgcatatacaatagagacatcattcaccctacacaagactttggtgggctggatgtgttgacgatctctctaggaggaattccacctaatcaggcacacagagacgcccagactgccgggtttgacggctgtatcgcgtcaatgtggtacggcggagagtcactccccttcagtggaaagcacagcctggcctccatctccaagacggatcctagcgtgaagatcggttgcagggggcctaacatttgtgcctcaaacccctgctggggcgaccttctgtgtattaaccagtggtacgcttatcgctgtgtaccaccaggggactgtgctagccatccttgccagaatgggggaagctgcgaaccagggctgcactctggattcacctgctcatgtcccgacagccatacgggtcggacatgtgagatggtcgtggcgtgtcttggggtgctctgtccccaggggaaggtctgtaaggctgggtctccggccggccatgtgtgtgtgctatcacagggtccagaagagatttccctccccctgtgggctgtgccagcaattgtagggtcttgcgctacagtgttggcactgctcgtgctgtctcttatcctgtgcaatcagtgtcgggggaaaaaagcgaaaaaccccaaagaggagaagaagccaaaagaaaagaagaagaaaggatcggagaatgttgctttcgacgaccctgacaatatcccgccttacggtgatgacatgaccgtgcgtaagcagcccgagggaaaccctaaacctgatatcatcgagcgcgagaatccttatctaatttacgatgagactgacatcccacacaactccgagactatacccagcgcaccgctggctagccccgagcaggagatcgaacactatgacatcgataatgcatcaagtatcgctccatctgatgctgacattatccagcattacaagcagtttagatcgcacacaccaaaatttagcatccagcgccactcaccgctgggcttcgcaagacagtcacccatgcccctcggcgccagtagtttaacttatcaaccctcttacggccagggcctcaggacttcgtcgctcagtcactctgcctgtccaaccccaaaccccttaagtcggcacagtcccgcccccttctctaagtccagcacattttatcggaattcgccagctcgggagctgcacttacccatcagagacgggaataccctggagatgcatggagacacttgccagccaggaatcttcaattatgcgacacgcttgggacgcaggtctaagagcccccaggccatggcaagccatgggtcaagaccaggctctcggcttaaacagccaattggtcagattcccctggagtcaagtccccccgtgggcctatcgatcgaggaggttgagaggctgaacacccctcgcccccgtaatccttcaatctgcagcgccgatcacggcaggagctcttcagaggaggactgcaggcggccactttctcgaacacggaaccccgcagacgggatccctgcaccagagtcctcttcagacagtgatagccacgagagtttcacctgcagtgaaatggagtacgaccgggagaaacctatggtatacacttcacgaatgcccaagctgagtcaagttaatgaatcagacgctgacgatgaagataattatggggctaggttgaagcctagaaggtaccacggaagaagggccgaaggtggccctgttggcacccaggccgctgctcccggaacagcagacaacacactaccaatgaagctcggacagcaagcaggcacctttaactgggataatcttctcaattggggcccaggattcggccactacgttgacgtgttcaaggatctcgctagcctgcccgagaaagccgccgcaaacgaggaaggtaaggcagggactactaagccagtgcccaaggatggggaagccgaacagtatgtgtag

SEQ ID NO: 187511 - DNA, 14946 bp, synthetic construct
  misc_feature 1..14946: note = Description of Artificial Sequence: Synthetic coding sequence
  source 1..14946: mol_type = other DNA
atggacctggcccccgaccgggccaccggccggccctggctgcccctgcacacattaagtgtgtctcagctgctccgggtgttctggctactatccctgctacccgggcaggcttgggtgcacggcgcggaaccaagacaagtctttcaggtgctggaggaacagccacccgggacgcttgtaggcactatccagacacgcccgggattcacctaccgtctcagcgagtcacatgcccttttcgccatcaacagttccactggcgcactgtatacaaccagcactatagaccgcgaatctcttccctccgatgtgatcaatctcgtcgttttgagcagcgctccgacctatcctactgaggtccgggtgctcgtaagggatcttaatgacaacgctccagtcttccctgatcccagcatcgttgtgacatttaaggaagattcaagttcagggcggcaagtgatactggacacagccactgactcagacatcggcagtaacggcgtggatcaccgcagttaccgcatcatccgaggaaatgaggctgggcgctttaggcttgacataacacttaatcccagtggagagggcgcctttctgcacctggtctccaaggggggccttgatcgcgaagttacaccgcagtatcagctgctggttgaggtggaagacaagggcgaaccgaagcgacggggttatctccaggtcaacgtgacagtacaggacatcaacgataacccccccgttttcgggtcaagtcactaccaggcaggcgttcccgaggatgccgtcgtggggtcctccgtgcttcaggtcgctgcagccgatgcagacgaaggtacgaacgcggacatccgatatcgtcttcaagacgagggcacccccttccaaatggaccccgagactggactgattacagtgcgcgaacccctggatttcgaagccagacgccaatatagtctgaccgtgcaggctatggacagaggagttcctagcctgactggtcgggctgaggcattgatccaacttctcgatgttaatgacaacgatccagtcgtgaagttcaggtatttccccgcaaccagtcgttacgcatccgttgatgagaatgctcaggtgggcactgtcgtcgccctgctgaccgtaaccgatgccgactctcctgctgctaatggcaatatctccgtccagattctaggcggtaatgagcagcgccatttcgaagtccagagttctaaggtcccaaacctcagtctcatcaaagttgcatctgctctggaccgcgagcgcatcccatcctataatctcacggtgagcgtgtcagacaactacggcgccccgcctggtgcggctgtccaggccaggagctccgtggcatcactcgttatcttcgttaatgacattaacgaccaccctcctgtgttttctcaacaggtatatcgggtgaacctgtctgaagaggccccaccgggatcatacgtttcaggaatatcagccacagatggagattccggtttgaatgccaatcttcgatattccatcgtgagtggcaacggattgggctggtttcacatttcagaacacagcgggcttgtcactactggcagttcagggggactggatagggagcttgcctcgcagattgtcctgaacatctctgccagggaccaaggggtgcatccaaaggtttcatacgcgcaacttgtcgtcaccctgcttgatgtgaacgacgagaaaccggtttttagtcagcccgaagggtatgacgtttccgttgtagaaaatgctccaactggtacagagttgctgatgctcagggccaccgacggcgacttgggcgataacgggactgtcaggttctccttgcaggaagccgagaccgatagacgttcatttagactggacccagtctcgggccggctgtccaccatctcctccctggatcgcgaagagcaagccttttactccttactggtcctggccaccgatctgggttcgcctcctcagtcgagcatggctagaattaacgtctctttgctcgatataaacgacaattccccggtgttttatcccgttcaatacttcgcccatataaaggaaaatgagcccggcggaagctacatcactaccgtgtccgccaccgatcccgatttaggtaccaatggcacagtgaagtacagcatcagcgccggagaccggtcacgcttccaagttaatgcccagtctggcgtgatcagtacacgcatggcactagacagagaagagaaaaccgcgtatcagctacagatagtggccaccgacggcggcaacctccaaagccccaaccaggctatcgtgacaatcactgtcctcgacacccaggacaatccacccgttttcagtcaagtggcctattccttcgtcgtgttcgaaaacgttgcgttaggataccacgtggggtctgtgagtgcaagcactatggatctgaattcaaacatctcttatctcattacaactggtgatcaaaagggaatgtttgctatcaaccaggtgaccggtcagttgaccacggcaaatgtgatcgacagggaggagcagagtttctaccagctcaaagtggtagcatcaggtgggaccgtgacaggggatacaatggtcaatataacagtaaaggacttaaatgataactcgccacacttcctccaggccatcgaaagcgtgaacgtggtggaaaattggcaggccggtcactccatctttcaggccaaagcagttgatccagacgagggtgttaacggcatggtcctgtactcgctgaaacagaaccccaaaaacctattcgctatcaatgagaaaaatggaaccatctcccttctaggccccctcgacgtgcacgctggtagctatcaaatcgagattctggcaagtgatatgggggtgccccagctgtcatcttccgtcattctgaccgtgtatgtgcatgatgtcaacgacaatagccctgtgttcgatcagctgagctacgaggtgaccctatctgagagtgagccagtcaactcccggtttttcaaagtgcaagcatccgacaaagattcgggagcaaatggagagattgcctacaccattgccgaaggaaatacaggcgatgcttttggaatctttcccgacgggcagctgtacataaaaagcgagttggaccgagaactccaggacagatatgtgttgatggtggttgcttcagaccgcgcagtggagccactgagcgccactgtgaatgtcaccgttatccttgaagatgtaaatgacaatcgccctctcttcaattctaccaattataccttctacttcgaagaggaacaaagggccggatcctttgtcggcaaggtgtccgccgtcgacaaagacttcggacccaacggcgaggtgcgatacagtttcgaaatggtgcaacccgatttcgagcttcacgccataagcggggaaataacaaacacacaccagtttgacagggaaagcctcatgaggcgcagaggaactgccgtctttagctttacagtcattgccaccgaccagggtattcctcagcctctgaaggatcaggccaccgtccatgtatacatgaaggatatcaacgataacgcaccaaaatttctgaaggatttctatcaagccactatcagtgaatccgcagctaatctgacacaggtgctgagagtttccgcatccgacgtggatgaaggcaacaatggcttaatccattattccatcatcaaggggaacgaggaaagacagttcgctattgattcaacaagtggacaggtgacactgattggcaagctggactacgaggcgacgcctgcctactcactagtcattcaggccgtggactctggaacaatccctctgaacagtacatgtactctgaacatagacatcttagatgagaacgataacacccccagttttccaaaatccacgctctttgtggacgtcctggaaaacatgcgaattggagaattggtgtcttctgtgacagccaccgactctgacagtggagataatgccgatctctattacagtattaccggcaccaataaccatggcaccttcagtataagtccaaataccgggtccatctttctggctaaaaaacttgactttgaaacacagagcctatacaagttgaacattaccgcaaaggaccaaggccggccgcccaggtcatccacaatgtccgtggtcatccatgttcgcgatttcaacgacaaccctccttctttcccaccgggggacatttttaagagtattgtggagaacattcctatcggaacttccgttattagcgtaactgcccacgaccccgacgctgatataaatggccagttgtcttacaccatcatacagcaaatgcctcgggggaatcacttcaccatcgatgaggtgaaaggcacaatctacaccaatgctgagatcgatcgggagttcgccaatcttttcgaactgaccgttaaggcaaatgaccaggctgttcctatcgagaccaggaggtatgcattgaaaaatgtaaccatcctcgtgacagatctaaatgacaacgtccccatgttcatctcacagaatgcacttgccgctgatccctccgctgtgatcggctcagtgctgacaaccattatggcggctgatccagacgagggcgcaaacggggaaattgaatatgagatcatcaatggcgataccgacacttttattgtcgatcgctattctggagacctgagggtggcgtccgcactggtcccatcccagttaatctacaatttgatcgtgtctgctaccgatctcggaccagagcgtagaaaaagcaccaccgaactgaccatcatattgcagggactggacggtccagtttttacccagcccaaatacattacgattctgaaagaaggagagcccatcggaacgaacgtgatcagtattgaagcggcttctccacgggggagcgaggccccagtggagtattacatagtctccgttcgttgtgaagagaagactgtggggcgcctgtttacaatcggccgacatacaggtattattcaaactgccgcaatcctagaccgcgagcaaggcgcgtgtctgtacctcgtggatgtttatgccatcgaaaagtctacagccttcccaagaacgcaacgggccgaagtggagataaccctgcaggacataaatgacaacccgcccgtcttccccacggacatgcttgacctgacagtagaagagaacattggcgatgggagtaaaatcatgcaactaacagctatggacgctgacgagggcgcaaacgccttggtcacctatacaatcatctcaggagcagatgactcatttaggatcgaccccgagtcaggtgacctgatcgcgacccgcaggttggatcgcgagaggcggagcaagtacagtctcctggtccgggcggatgacggccttcagtcatccgatatgagaataaatattactgtgagtgatgtaaacgaccacacacctaaattcagccggcctgtttacagcttcgacatacctgaggacacaatccccgggtcattagtcgcagctattctggcaactgacgacgactctggagtcaacggagaaatcacctacatagtgaacgaggacgatgaggacggaatcttcttcctcaaccctattacaggcgtctttaaccttactcgcctcctcgactatgaagtccaacagtactacatccttactgtcagagcggaggatgggggaggccagttcactaccattcgtgtctattttaacatattggacgtgaatgacaaccccccaattttctcacttaacagctattctactagcctgatggaaaatctccctgtcggttcaactgtgctggtattcaacgtgaccgatgccgatgatggcatcaatagtcagctcacatactcaatcgcttcaggggactcgctcggacagtttacggtggataagaatggagtgttgaaagtgctcaaagcactcgaccgagaatctcaaagcttttataacctcgtagttcaggtacacgaccttccacaaattcccgcatccaggtttacatctacagcccaggtgtcaatcatcctgttggacgtgaatgacaaccctccaacatttctttctcctaagctaacatacattcccgaaaatacgcctatcgatacagttgtctttaaagctcaagccacagatccagacagcggaccgaactcttacatcgaatatactctgctgaatcctctagggaataaattctccattggcacgatcgatggtgaagtccgtttgacgggggaactggatcgtgaggaagtcagcaactatacactgaccgtagttgccaccgacaaaggacagccctcattatcttcaagcactgaagttgttgtaatggtgctggatatcaatgacaacaatcctatctttgctcaggcactgtacaaggtggagatcaatgagaacacattgaccggcaccgatatcatacaggtgtttgccgctgacggcgatgaagggaccaacggtcaggtgcggtacggcattgtgaacgggaacacaaaccaggagtttaggattgacagtgtgacaggtgccattacggttgccaagccactggacagagagaaaaccccaacataccacttgacagtgcaggcgactgatagaggctcaaccccacgcacggacacctccactgttagcatcgttctgctggacatcaatgactttgtaccggtgtttgagctctcaccatatagcgtgaacgtgcccgaaaatcttgggactctacctaggacaatcctgcaggtggtggctagggatgatgatagaggatctaattcaaagctctcctacgtgctgttcggcggcaacgaggataatgcctttacgctgtctgcatccggagagctgggtgtgacccagagcctggacagggagactaaagagcggttcgtgcttatgattacagcgacagacagcggcagcccggcccttaccggcaccggcaccattaacgtaatagtcgacgatgttaacgacaacgtcccaacattcgcatcgaaggcgtactttacaacaattcccgaggacgcccccacgggaaccgacgttctactggtgaacgccagcgacgccgatgcatctaagaacgccgtcatcaggatcatcggaggaaacagtcaattcacgattaatcctagcactgggcagatcatcacttccgcgctgctggatagagaaacaaaggataactataccttggtggtcgtatgttcagacgccggctctccggagcccctcagttcctcaacaagtgtcctggttaccgtcacagacgtcaacgacaatcctcctagatttcagcaccatccatacgtaactcacataccttcaccaacactgcccggatcctttgtgtttgccgtcactgtaacggatgcagacattggccccaatagtgaactgcactactccctctccgggcggaattcagagaaatttcatatagacccgctgagaggagctattatggcggctgggccgctgaatggtgcttcggaggtaaccttctccgtgcatgtaaaggacggtggaagttttccgaagacggattccaccacagtgaccgtgcgattcgtgaataaggcagacttccctaaagtgagggctaaagagcagacattcatgtttccagagaaccagccggtcagctctctggtcacaaccattaccggcagctctctgcgaggtgaacccatgtcgtactatatcgcttccggcaacctgggtaatacttttcaaattgatcagttaacaggccaggtctccatttctcaacctctggatttcgagaagattcagaaatatgtggtatggatcgaagcaagagatggaggcttccctcccttcagctcatacgaaaagcttgacataacggtgctggacgtaaatgacaacgcccccatttttaaggaagaccccttcattagtgaaattctcgaaaacctttcccctaggaagatcctgaccgtttctgcaatggacaaagactctgggccaaacgggcagctcgactacgagatagtgaacggcaatatggagaactctttctccatcaatcatgccactggagagatccgcagcgttcggcctctggacagagagaaagtgtctcactatgtcctgaccataaaaagctctgataaaggtagtccttcccagagcaccagtgtgaaagttatgatcaatattttagatgagaacgacaatgctccacgcttttctcaaatcttttctgcgcacgtgccagagaattcccctcttggctatactgtcacccgggtcacgaccagcgacgaggatatcggcattaacgcaattagcaggtactctatcatggatgccagccttccatttaccatcaacccatccaccggcgacatcgtgatatctagaccattaaacagagaggatacggaccgttacagaattcgggtttctgctcatgacagcggctggaccgtttcaaccgacgtaacgatatttgtgacagatattaacgataacgcgccgcggttcagtcgcacttcatactatctagattgcccggagttaaccgagatcggctccaaggtgactcaggtatttgccacagaccctgatgagggcagtaacggccaggttttttatttcatcaagagccagagtgagtacttcagaattaacgcaaccactggagagatcttcaataaacagattctcaaatatcaaaatgtcactggcttctccaatgtaaatatcaacaggcatagttttattgtaactagctctgacagaggaaaaccaagtctaatttctgagacaacggttaccatcaacatcgtggatagcaacgacaacgccccacaatttctgaagtcaaaatactttacacctgtaaccaaaaacgtgaaagtgggcaccaaactgatccgggttacagctattgatgataaggacttcggcctcaactcagaggtcgagtactttatctctaacgataatcacttggggaaattcaagctagacaacgacactgggtggatttcagtagccagctctctgatctctgacctgaatcagaactttttcatcaccgtgaccgccaaggacaaaggaaatcctcctctgtcttcacaggctactgtccatatcacagtcactgaggagaattatcacacacccgaatttagccaaagccatatgtccgcaactattccagagtcacacagcattggatccatagttagaacagtttcagccagagatcgggacgccgctatgaatggtctcatcaaatacagcatctcttctggcaacgaggaaggcattttcgccataaactcctccacaggaattctcactctcgcaaaagccctggactatgaactgtgccagaagcatgagatgaccatttctgccatagatggtggttgggtagctcgcaccggctactgcagcgtgacagtaaatgtgatcgacgtaaatgataattcccctgtgttcttgagcgacgactacttccctactgtgcttgagaacgcccccagtggtactaccgtgattcacttgaatgcaacagacgccgattcgggaaccaacgcagtgatcgcttacacagtacagtcatccgacagcgacttattcgtcattgaccccaacacgggcgtgatcacgacccaaggcttcctagattttgagacaaagcagtcttaccacttgacggtaaaggcgtttaatgttccagacgaagaacgatgttctttcgctactgtcaacatccagcttaagggaaccaacgagtacgttccccgctttgttagtaagctttactactttgagattagtgaggcggcacccaaggggaccattgtcggggaggttttcgcatctgacagagatttggggaccgatggcgaagtgcactatctgatattcggtaattcacgcaagaagggatttcagattaacaagaaaacaggccagatttacgtcagcgggattctcgacagagagaaagaggaaagagtgtctctgaaagtcctcgccaaaaacttcggatccatccggggcgccgacatcgatgaggtgacagttaatgtgactgtcctcgacgctaatgacccacctatatttacactgaacatatacagcgtgcagatatcagagggtgtgcctataggcactcatgtgacatttgtgtccgccttcgattccgatagtattccctcttggagtagatttagctactttatcggaagtgggaacgaaaacggagccttcagcattaacccccagactggccagatcactgtcactgccgagctcgatcgtgagactcttccaatctataatctgagcgtcctggctgtggactccggaaccccctccgcaacaggcagcgcaagccttctcgtgactttagaggacataaacgataatggcccaatgttaaccgtgtcagaaggagaggttatggaaaacaaacgtcccggcacactcgtgatgactctgcagtccaccgaccccgaccttcccccgaaccaagggccgtttacatactaccttctttccacagggcccgccacaagctattttagcttgtcaactgccggcgtgctgtcaacaaccagagagattgatcgagagcagattgcagacttttatctatctgtggtgaccaaggatagtggcgtcccgcaaatgagctccaccggtactgtgcatattaccgttatagatcagaatgataatccctcccagtcgaggactgttgaaattttcgttaactattatggaaatctgtttcctggtggcattctgggctctgttaaaccgcaggatcctgacgtgttagactcattccactgttctcttacatcaggggtaacatccctgtttagtattccaggcggcacctgcgatctgaacagccaaccaagaagtacagacggaaccttcgatctcactgtccttagcaatgatggtgtccacagcaccgtgacttcgaatatcagggttttctttgcaggattcagtaatgcaacagtggataactcaatccttttgagactgggcgtgcctaccgttaaggattttttgacaaaccactacttacatttcctccgaattgccagttcacagctgacaggccttggcacagcagtacagctatacagtgcatatgaggagaacaatcgcacctttctgctggccgctgtaaagaggaaccacaatcagtatgtcaacccatccggcgtggccacattctttgagagcatcaaagaaatcctgctccgacaaagcggtgtaaaggtcgaaagcgtcgatcatgacagctgtgtccatgggccatgccaaaatgggggctcctgccttcgcaggctcgccgtgtctagtgtcttaaaatcacgggagagtctgcctgtgattatagtcgctaacgagcccttacagcccttcctttgcaagtgtctgcctggctatgcagggtcttggtgcgagattgatatagatgaatgtctgccttcaccctgccactctggagggacgtgtcacaatctagttgggggtttcagctgtagttgtcctgacgggtttacaggcagggcctgcgaacgcgacattaatgagtgtctccagtcgccgtgcaagaatggagcaatctgtcagaacttccccggatctttcaactgcgtttgcaaaaccggatatacgggaaagatgtgcgagagctctgtcaattattgcgaatgtaatccctgttttaacggaggctcctgtcagtcaggcgtcgactcctactactgccattgcccctttggagtgttcggcaagcattgcgagcttaattcatacggttttgaagagctctcttacatggaatttccatccctggatcccaataacaactatatctacgtgaagtttgctacgatcaaatcccatgcccttttgctgtataactacgacaatcaaacaggggatagagccgagtttcttgccctagagatcgccgaggaacgattgcgtttctcctacaatctgggttcgggtacctataagttaacaactatgaaaaaagtgagtgatggccacttccatacagtcatcgcccgacgcgctggcatggcggcctccttaaccgtggattcctgttccgagaatcaggaacccggatactgtaccgtgtccaatgtggctgtaagtgatgactggactctcgatgtccaaccaaacagggttaccgtcgggggtataaggtcgctggaacctatactccagagaaggggccatgtcgagagccatgacttcgtagggtgcatcatggagtttgccgttaatggcaggcccctggaaccttcacaagcattagccgcccaggggatcttggaccagtgtcctaggctggagggggcgtgtactaggagtccctgccagcatggtggaacgtgcatggactattggtcctggcagcaatgccactgtaaagaagggcttaccggtaaatattgcgaaaaaagtgtcacacccgatacagcactgtcgttggagggtaaaggaagactggattaccatatgagccaaaacgagaagagagaatatttgctacggcagagcctgcgcggggctatgctggagcccttcggcgttaattcactcgaggtgaagttccgcaccaggtcagagaacggagtgctcatccacatacaggagtcctcaaattacactactgtgaagattaaaaatggaaaagtttactttactagcgatgccgggattgccggaaaggtggaacgtaatatcccggaagtctatgttgcagacgggcattggcacacgttccttattgggaagaatggaactgccactgtgctgtcagtcgacagaatctacaatcgggacataattcaccctacacaagacttcgggggtctagatgtgctcaccatctcgcttggcggcatcccacccaaccaagcacatcgggacgctcaaaccgcaggctttgatgggtgcatcgcttccatgtggtacggcggcgagagtctaccttttagcggtaaacactcgctggcaagtatttctaagacggacccatctgtgaagataggttgtcggggccccaacatttgcgctagcaatccatgctggggtgatctgctctgtataaatcagtggtatgcctaccggtgtgttccccctggggactgcgcgtcacacccatgtcagaatgggggctcgtgcgagcctgggctgcacagtggtttcacttgttcttgcccggactcacacacaggaaggacatgcgaaatggtcgtcgcttgcctgggtgtgttatgccctcaggggaaggtgtgtaaggccggtagccccgcgggacacgtctgtgtgctctcccagggacccgaagagatttctctgccgttgtgggctgtccccgcaatagttggctcttgtgccaccgtcctcgccttgcttgtcctctccctgattctgtgcaaccagtgcagaggtaagaaggcaaaaaatcccaaggaggagaaaaagcctaaggaaaagaagaaaaaaggttctgagaatgtggcctttgacgatccagacaatatacccccatacggcgacgacatgacagttcgaaagcagcccgaagggaatcccaagcccgacataatcgaacgcgaaaacccttatctgatctacgacgagacagacatcccgcacaactccgaaaccattccgtcagcacctttagcgagccctgagcaggaaatcgaacattacgatatcgataacgctagttcaatcgccccgagtgacgctgatataatccagcactacaagcagtttagatctcacactcccaagttttctatccagcggcacagccctctggggtttgcgcgccagtccccaatgcccctaggggcaagctctctgacgtatcagccctcatacgggcagggtctgcgcacctcttccctctctcatagtgcctgcccgactccaaacccgctctcgaggcactcacctgccccctttagcaaaagtagtacgttctatcgaaacagccctgctcgggaactccatcttcccatcagggatggcaacacgcttgagatgcacggcgatacatgtcagcctggaattttcaactatgccactcgtctcggccgaagaagtaaatcccctcaagctatggccagccatgggagccggccgggtagcagattgaagcagcccataggacaaatccctctcgagagctcccctcctgtgggcctttctatagaggaggtggaacgcctcaataccccaagacctcgcaatccctccatttgttctgccgatcacggccgatcaagctccgaagaagattgtcggcgtccactcagcagaactaggaatcctgctgatggtatccccgcacctgagagctcctccgattcggattctcatgagtcatttacctgctcggagatggaatatgacagagagaaaccaatggtatacacctctcgaatgccaaaactaagtcaagtgaatgaaagcgatgcggacgacgaggacaattatggagcgcggctcaaacctaggcgatatcatggtaggagggctgagggaggccctgttggaacgcaggccgccgcgcccggcaccgctgacaacactttacctatgaagttaggccagcaggccggaactttcaattgggacaatctactcaactggggacccggatttggtcactacgtggacgtgtttaaggacctggcgagccttccagaaaaagccgccgccaacgaggaagggaaggcgggcaccaccaagccggtcccaaaagatggcgaagctgaacagtacgtttag

SEQ ID NO: 187512 - DNA, 1239 bp, synthetic construct
  misc_feature 1..1239: note = Description of Artificial Sequence: Synthetic coding sequence
  source 1..1239: mol_type = other DNA
atgggcctgcacctgcggccctaccgggtgggcctgctgcccgacgggctactctttctccttctcctgctgatgctgttagctgacccagccttacctgcaggacgccacccaccggttgtcttagtccctggagacctgggaaatcagttggaagcgaagttggataaacccaccgtagttcactatctctgtagcaagaagaccgaaagctatttcaccatctggctgaatctcgaactcctgctgcccgtgatcattgactgctggattgataatattaggttggtgtacaataagacatccagagccacccagttcccggacggggtggacgtgcgtgtgcccgggtttggaaaaaccttctcactggagtttctcgacccctctaaatctagtgtgggatcctacttccacacgatggtcgaatccctggttgggtggggatacaccaggggcgaggatgttcgtggggccccttacgactggagaagagcccctaatgagaatggtccttacttcctggctctgcgcgaaatgattgaggaaatgtaccagttatacggcggtcctgttgttctggtggctcacagtatgggcaacatgtatactctgtattttctgcagagacagcctcaggcctggaaggacaagtacatacgcgcgtttgtcagcttgggcgcaccatggggcggcgttgctaaaacgctccgtgtgcttgccagtggggataacaatagaatccctgtgattgggcccctgaaaatccgtgagcagcagcgctccgccgtgtcaacttcatggctcctgccttacaactatacatggtccccggaaaaggtattcgttcaaacgcccaccatcaattacacactgcgcgactaccgaaagttcttccaggatataggtttcgaggacggctggcttatgcgacaggacaccgagggcttggtcgaggccactatgccaccaggcgtccagctccactgtctgtacggtaccggagtgccgactcccgattctttttactacgagtcgttcccagatcgggatcctaagatctgtttcggagacggcgatggcaccgtgaatttaaagtcagcactgcagtgccaagcgtggcagtcaagacaagaacatcaggtgctgctgcaggagctgccaggctccgagcacatcgagatgttagcgaatgcgacgacacttgcatatttgaaacgtgtcctgctggggccatag

SEQ ID NO: 187513 - DNA, 480 bp, synthetic construct
  misc_feature 1..480: note = Description of Artificial Sequence: Synthetic coding sequence
  source 1..480: mol_type = other DNA
atgttccccggcctgttcatgctgggcaccttcctgtggagcctgatcgagtatctgattcataggtttcttttccacatgaaaccgccaagcgactcctactacctgataatgctccacttcgtgatgcatggccagcatcataaagcgccattcgatgggtcacgtctagtcttccctcctgttccagcctcactcgttatcggcgtattttacttatgtatgcaactgattctgcccgaggcagtaggtggcacggtattcgcaggcggcctcctgggatatgtcctgtacgacatgacccactattatctacactttggtagtccgcataagggctcctacctgtacagtctgaaggcacaccacgtgaaacaccactttgctcaccagaagagcggctttggtatttctacaaaactctgggattattgcttccacaccctgaccccagaaaagccacacctcaaaactcagtag

SEQ ID NO: 187514 - DNA, 1740 bp, synthetic construct
  misc_feature 1..1740: note = Description of Artificial Sequence: Synthetic coding sequence
  source 1..1740: mol_type = other DNA
atggtgcagtacgagctgtgggccgccctgcccggcgccagcggcgtggccctggcttgttgtttcgttgctgctgccgttgccctgagatggagtggaagaagaaccgcgcgaggggcagttgttcgagccaggcagcgtcagcgtgcgggccttgaaaacatggatagggccgcccagcgctttcggttgcaaaatccagatctcgactcggaagcactgctggccttacctctacctcagctggtgcagaaacttcattcaagggaactggcacctgaggcagtgctgttcacctatgtcggcaaggcttgggaggtgaacaagggcaccaattgcgtaacctcctacctggccgactgtgaaactcagctaagtcaggctccacgacaggggctgctgtatggcgtgccagtcagcttgaaggaatgcttcacttataagggacaagattcgaccttagggctatcgcttaacgagggggttccggctgagtgtgattcggtggtggttcacgtgttgaagctccagggagccgttccatttgtccatacaaacgtaccccaatcgatgttctcatatgattgctcaaaccccttatttggccagacggtgaatccctggaagtcctctaagagtcctggggggagtagtggtggagaaggggccctgatcggatccggcggcagtcctcttggcttgggaacagacatcggcgggtccatccgatttccatcctccttttgtgggatttgcgggctgaaaccaaccggaaaccgtcttagcaagtcgggcctcaaaggctgtgtgtacggccaggaggctgtccggttgagtgtgggccccatggcccgggacgtggagagcctcgccctttgcctgagagcgctcctttgcgaggacatgtttaggcttgatccaacagtgccacccctgccatttcgggaagaagtgtatacttccagccagcctctcagggtggggtactacgagactgacaattatacgatgccaagtcctgccatgaggagggcagtcctagaaactaaacagtccctggaggccgctggtcatactctcgtcccctttttgccctctaacatcccccacgcactcgagaccctcagcaccgggggcctgttttccgatggcggacacacatttctacaaaatttcaaaggggatttcgtggatccatgtctgggcgacctagtcagtatcctgaagcttccccagtggcttaagggtctcctggcgtttctggtaaaacccttgctgccgaggctttctgcttttctctcaaacatgaaatccaggtcagccggcaaactttgggagctccaacacgaaatcgaagtctacaggaagacggtgatcgctcagtggagagcactggacctcgacgtggtgctcacgcctatgttagcacctgctctcgacttgaacgcacctggtcgagccaccggagcggtgagttatacaatgttatacaattgccttgactttcctgccggcgtggtacccgtgactactgtcaccgccgaagacgaggcacagatggaacattaccgcgggtactttggggatatttgggacaagatgctgcagaaggggatgaaaaaaagcgtgggcttgcctgtagccgtgcaatgcgtagcactcccttggcaggaagagttgtgtcttcggtttatgagagaggtagagcgactgatgacacccgagaagcaatccagttag

SEQ ID NO: 187515 - DNA, 456 bp, synthetic construct
  misc_feature 1..456: note = Description of Artificial Sequence: Synthetic coding sequence
  source 1..456: mol_type = other DNA
cggcggcagcaccccctgcccctgctgctgctgcggcacctgcggcctcaggcccaccgggagcctcctcaggtgtatacttcatcccaacctctccgcgtcggatactatgagaccgataattacactatgccatctcccgccatgaggagggctgtgttagaaacaaaacagtctctcgaggctgctgggcatacgctcgtgccttttctcccctcaaatataccacacgcccttgagactctgtctacaggcggcttgttttctgacggagggcacacatttctacagaatttcaaaggcgacttcgtggatccatgtctcggagaccttgtgtccatattgaaactgccccaatggttaaaaggactcctggcgtttctggtaaaaccgctcttgcctagactgtccgcctttctgtcaaacatgaagtcacgttgccgcccactgccatag

SEQ ID NO: 187516 - DNA, 1599 bp, synthetic construct
  misc_feature 1..1599: note = Description of Artificial Sequence: Synthetic coding sequence
  source 1..1599: mol_type = other DNA
atggcccccagcttcaccgcccggatccagctgttcctgctgcgggctttgggctttctcatcgggctcgtaggccgagctgccctggtactcggtggccctaaattcgctagtaaaacccctaggcctgtaaccgagcctctgctactgctcagtggaatgcagctggccaagctgatccgccagagaaaggtgaaatgtatagacgtggttcaggcatacattaaccggataaaagacgttaaccctatgataaacgggatcgtaaagtatcgctttgaggaggcgatgaaggaagctcatgcagtcgatcaaaagcttgctgaaaaacaagaggatgaagccaccctcgagaataagtggcccttcctaggcgttcccctaaccgtgaaggaggcatttcagctgcaggggatgcccaattctagcggccttatgaaccggagagacgctattgccaagaccgacgctacagtagtcgcgctcctcaagggtgcaggggccatacctctgggaataaccaattgctccgaactgtgcatgtggtacgagtctagcaacaaaatttacgggaggagcaacaacccctatgacctacaacatattgttggaggttcctcaggaggagaagggtgcacccttgctgccgcgtgttctgtaattggtgtcggaagtgacatcggaggcagcatcaggatgcctgccttctttaatggcattttcggccacaaaccttcccctggtgtcgtcccaaacaagggccagttccccctggcagtgggcgcccaggaactgttcctgtgcacgggacctatgtgccggtatgccgaggatctagccccgatgctgaaggtcatggccgggccaggaattaagcgcctgaagcttgatacaaaagttcatttgaaggacttgaaattctattggatggagcacgacgggggtagctttctaatgagcaaagtcgaccaggatttaatcatgacacagaagaaggtcgtcgtgcacctggaaaccatccttggcgcaagcgtacagcacgtaaaactcaagaagatgaaatactctttccagctgtggatcgcaatgatgagcgccaagggccacgatgggaaagagcccgtcaaattcgtggacctgctgggcgatcacggcaagcatgtatctcccctctgggagttgataaagtggtgccttgggctgagtgtctacaccatcccgagcatagggctggccctgctcgaagagaaattaaggtacagtaatgaaaagtatcagaaatttaaagctgtcgaggaaagcttaaggaaggagctcgtcgatatgctgggagatgatggcgtgtttctgtacccatcccatcctaccgtggcccccaaacaccacgtgcctctgaccaggccctttaatttcgcctacactggagtcttcagtgcgcttggattaccagtcacccaatgccccctgggcctgaacgccaagggtctccccttgggtattcaggtggttgccggccccttcaatgatcatctcaccctggccgtggcccagtatttggagaagacatttggcggctgggtgtgcccaggcaagttttag

SEQ ID NO: 187517 - DNA, 384 bp, synthetic construct
  misc_feature 1..384: note = Description of Artificial Sequence: Synthetic coding sequence
  source 1..384: mol_type = other DNA
atgagcttcagcggcaagtaccagctgcagagccaggagaacttcgaggcttttatgaaagcaatcggtctccctgaggagctcatacagaagggtaaagacattaaaggggtcagcgaaatcgtgcagaatggtaaacacttcaagtttaccatcaccgctgggagcaaggtgattcaaaatgaatttaccgttggcgaagagtgtgaactggagaccatgaccggtgaaaaagtgaagaccgtggtgcagctggagggcgacaataaactcgtgacaaccttcaagaacatcaagagtgtgactgaacttaacggggacatcatcactaacactatgacactgggggacatagtctttaaaaggattagcaaacgcatctag

SEQ ID NO: 187518 - DNA, 399 bp, synthetic construct
  misc_feature 1..399: note = Description of Artificial Sequence: Synthetic coding sequence
  source 1..399: mol_type = other DNA
atggccttcgacagcacctggaaggtggaccggagcgagaactacgataagtttatggaaaaaatgggcgtgaacatagtcaagagaaagctggccgctcacgataacctgaagctcacaatcacccaagagggaaataagtttactgtcaaggaatcctccactttccggaatattgaggtggtcttcgaactgggcgttaccttcaactataacctagccgacgggacagagttgcgcgggacatggagtctggaagggaataaacttataggtaagtttaagcgcacagataatggtaacgaactgaataccgtgagggagatcataggcgatgaattagtccaaacctacgtgtatgaaggtgtagaagccaagcggattttcaaaaaagattag

SEQ ID NO: 187519 - DNA, 402 bp, synthetic construct
  misc_feature 1..402: note = Description of Artificial Sequence: Synthetic coding sequence
  source 1..402: mol_type = other DNA
atggtggacgccttcctgggcacctggaagctggtggacagcaagaacttcgatgactatatgaagtccctgggcgtgggcttcgccacccgccaagtggccagtatgaccaagccaacaacgatcatcgagaagaatggggatattctgactcttaagactcactccacatttaagaataccgaaatttctttcaaactgggggttgaatttgatgagaccacagcggacgataggaaagtgaagtcgatcgtgacactcgatggtggaaagctggtccacctgcagaaatgggacggacaggaaacaaccctggttagagagcttatcgacggaaaactgattctgactttgactcacgggaccgccgtatgtacacgcacctatgaaaaggaggcttag

SEQ ID NO: 187520 - DNA, 408 bp, synthetic construct
  misc_feature 1..408: note = Description of Artificial Sequence: Synthetic coding sequence
  source 1..408: mol_type = other DNA
atggccaccgtgcagcagctggagggccggtggcggctggtggactctaagggtttcgacgaatatatgaaggagctgggggtcggtattgcccttaggaaaatgggggctatggccaagccggattgcatcataacttgcgatggcaagaatctgacaattaagactgagtctacattgaaaactacccagttttcttgtaccctgggggagaaatttgaagaaaccacagccgacgggaggaagacccagacagtctgtaatttcacagatggagcgctggtccagcaccaggaatgggacggtaaagaatctaccattactagaaaactgaaggacggaaaactcgtcgttgaatgtgttatgaacaatgtgacctgcacccgcatttacgaaaaggttgagtag

SEQ ID NO: 187521 - DNA, 534 bp, synthetic construct
  misc_feature 1..534: note = Description of Artificial Sequence: Synthetic coding sequence
  source 1..534: mol_type = other DNA
atgaagaccgtgaccatgatgatggtggtggagatgcaggccctgacacaggtcttacgggctgtattgtcagcctgcacctgggtgtcccgaaagggtgatctccagcgcatgaagcagactcataaggggaagcctcctagttccatggcattcaccggaaaattcgagatggaatctgaaaagaactatgacgaattcatgaagcttctggggatcagcagcgatgtgatcgagaaagcgcggaatttcaaaatcgtgaccgaggttcagcaagacgggcaagattttacttggtctcagcactactcaggcggccatacaatgacaaacaagttcactgtgggcaaagaatccaatattcagaccatgggaggaaaaacttttaaagcaaccgtgcaaatggaaggagggaagctggttgtgaattttcctaactatcaccagacctctgagattgttggggacaagttggtggaggtcagcacaatcggcggggtgacgtacgaacgcgtctctaagagattagcctag

SEQ ID NO: 187522 - DNA, 534 bp, synthetic construct
  misc_feature 1..534: note = Description of Artificial Sequence: Synthetic coding sequence
  source 1..534: mol_type = other DNA
atgaagaccgtgaccatgatgatggtggtggagatgcaggccctgacacaggtgctgagggcggttctgtccgcctgtacatgggtcagcaggaagggcgacctgcagcgcatgaagcaaacacacaaaggcaaacctccgagtagcatggcgttcaccggcaagtttgaaatggagtccgaaaaaaactacgatgagttcatgaagctactgggaatttcttcagacgtcatcgagaaggcccgcaacttcaaaatagttacggaggtgcaacaggatgggcaagattttacctggagtcaacactatagcggcgggcacactatgaccaacaaattcaccgtcgggaaagaatccaacattcagactatgggcgggaagacttttaaggcaactgttcagatggagggggggaaacttgttgtgaactttcccaactaccaccagacatctgagatagtaggcgataaattggtagaggtgtcaaccattggaggggtgacttatgaacgcgtgtcaaagaggcttgcctag

SEQ ID NO: 187523 - DNA, 387 bp, synthetic construct
  misc_feature 1..387: note = Description of Artificial Sequence: Synthetic coding sequence
  source 1..387: mol_type = other DNA
atggccttcaccggcaagttcgagatggagagcgagaagaactacgacgagtttatgaagctgctggggattagcagtgacgtaattgagaaggctcgcaatttcaagatcgtcaccgaagttcaacaggacgggcaagacttcacctggagtcaacactacagcggaggtcatactatgacgaacaagttcacagtgggtaaggagagcaacatacagacaatgggcggtaaaacattcaaagcaaccgtgcaaatggaaggcggcaagctggttgtcaactttccgaattaccaccaaacatctgagatcgtgggtgataagcttgtcgaagtgtccactattgggggcgttacctatgagagagtgagcaaacgcctggcttag

SEQ ID NO: 187524 - DNA, 501 bp, synthetic construct
  misc_feature 1..501: note = Description of Artificial Sequence: Synthetic coding sequence
  source 1..501: mol_type = other DNA
atggtggaggccttctgcgccacctggaagctgaccaacagccagaactttgatgagtatatgaaggccttgggcgtcggattcgccacacgacaggttgggaatgtgactaaaccaaccgtcataatcagccaggaaggagataaagtcgttattcgtaccctgagcacctttaagaacacagagattagctttcaactgggcgaagaatttgacgagacgacagccgatgataggaattgcaagagcgtcgtgtctttggatggcgacaagctggtgcatattcaaaagtgggatggtaaggagactaattttgtgagggaaattaaagatgggaaaatggtaatggtgagcaatgacaactcccccttcttcttggtgttcttcagcagccctcacacgagccatttgctgccatccagttcactgctcctcccattttttctgttaccttcatttttcaataatacttctctggcccgcttttttaattatatgtag

SEQ ID NO: 187525 - DNA, 399 bp, synthetic construct
  misc_feature 1..399: note = Description of Artificial Sequence: Synthetic coding sequence
  source 1..399: mol_type = other DNA
atggtggaggccttctgcgccacctggaagctgaccaacagccagaacttcgacgagtatatgaaggctttgggagtcggcttcgcgacccgacaggtgggcaacgtcaccaagcccacagtcataatttcacaggaaggtgataaggttgtcatccgtactttgtccaccttcaaaaacactgaaataagcttccagctcggggaagagttcgacgagacgacggccgatgataggaattgcaaaagtgttgtgagcctagacggagataagctggtacatatccagaagtgggacggcaaggaaacgaacttcgtcagagagatcaaggatggcaaaatggtcatgacattaacctttggagatgtggtggcagtacggcactacgagaaagcgtag

SEQ ID NO: 187526 - DNA, 1506 bp, synthetic construct
  misc_feature 1..1506: note = Description of Artificial Sequence: Synthetic coding sequence
  source 1..1506: mol_type = other DNA
atgggcacccgggccgcccggcccgccggcctgccctgcggcgccgagaacccagcgaggcgcaggcttgcactcggcgctcgacaacagatccactcttggtcccccaggacgccttccactaggctcacagcccccgcaggccccgctcggggagtggccaggcccgcgatggctcccgaccctgtggccgctgagaccgccgcacaggggccaacacctaggtattttacatgggacgaggtcgctcaaaggagcggttgtgaagaacggtggctcgtgattgatcgaaaggtctacaatatatctgagttcacccgcagacaccccggaggtagtcgggtgatcagtcactacgctgggcaggatgccacagaccccttcgtggcatttcacatcaacaagggattagtaaaaaaatacatgaactccttgctgatcggagagttgagtcctgaacagccctcctttgaacccaccaagaacaaagagcttactgacgagtttcgcgagcttcgcgctaccgtggaaaggatgggcttgatgaaagccaatcacgtgttcttcttactctatctgctgcacatattgttgttggacggggccgcatggctgacactttgggtcttcgggactagttttctgcccttccttctctgtgcggtcttgctgtcagccgtgcaagctcaagccggatggctccagcacgacttcggccacctaagtgtgttctctacctccaaatggaaccatctgctccaccactttgtcattggccacctcaagggcgcccctgccagttggtggaaccatatgcactttcaacatcatgccaagccaaactgtttccgcaaagacccagatatcaacatgcatcctttctttttcgctctcggtaagatcctaagcgttgagctcgggaagcagaaaaaaaagtacatgccttacaatcaccaacacaagtatttttttctgattgggccccctgccctcctgccattgtacttccagtggtatattttctactttgtgatccagagaaagaaatgggtggatttggcctggatgatcactttctacgtccggttcttcctgacatatgtgcctctcttaggtttgaaagcattcctcgggttgttttttatcgtgcgcttcctggagagtaactggtttgtctgggtcactcagatgaaccacattcccatgcacatcgaccatgaccgtaatatggattgggtaagtacacaattgcaggccacctgtaatgtccataagagcgcattcaacgactggttctctggtcatcttaacttccagatcgagcaccacctcttccccaccatgcccaggcacaactaccacaaggtggcacctttggtgcaaagcctctgcgccaagcacgggatcgagtaccagtctaaacccctgctatctgcctttgccgacatcatccattccctgaaggagagcggtcagctttggttggatgcctacctgcaccagtag

SEQ ID NO: 187527 - DNA, 1083 bp, synthetic construct
  misc_feature 1..1083: note = Description of Artificial Sequence: Synthetic coding sequence
  source 1..1083: mol_type = other DNA
atgaacagcctgctgatcggcgagctgagccccgagcagcccagcttcgaacccacaaagaacaaggaattaacggatgaattcagagagttgcgcgcaactgtggagcggatggggctgatgaaggccaatcacgtgttcttcctgctttatctgctccatattctcctgcttgatggtgcagcttggctgacactgtgggtgttcggcacttccttccttcccttccttctctgtgccgtcttactgtctgccgtccaggctcaggctgggtggttgcaacatgacttcggccatctttctgtcttctccactagtaaatggaaccacctcttgcatcactttgtgatcgggcacctcaaaggcgcccccgcatcttggtggaatcatatgcacttccagcaccacgcgaagccaaactgctttaggaaggaccccgatatcaatatgcacccattctttttcgcactcggtaagatcttgtccgttgagcttgggaagcagaagaagaaatacatgccatataaccatcagcataaatactttttcttaattggtccacccgcactccttcctctgtatttccaatggtatatcttttattttgtgatccaaagaaagaaatgggtagatcttgcctggatgattactttttatgtgagattcttcctcacatatgtccctctgctagggttgaaagcctttctgggccttttctttatcgtgagatttctggaatcaaattggttcgtctgggtgacacagatgaatcatatccccatgcatatcgaccacgacagaaatatggattgggttagtactcagctacaggctacctgtaatgttcacaagagcgcgttcaacgactggttttccggacacttgaatttccagatcgaacaccatttgttccctacgatgccacgtcacaactatcacaaagttgcacctctggtgcagagcctctgtgcgaagcatggaatagagtaccagagtaagcctctcctcagtgcctttgccgatattatccactctctgaaagaaagtggtcagctgtggcttgatgcttatttgcaccagtag

SEQ ID NO: 187528 - DNA, 1083 bp, synthetic construct
  misc_feature 1..1083: note = Description of Artificial Sequence: Synthetic coding sequence
  source 1..1083: mol_type = other DNA
atgaacagcctgctgatcggcgagctgagccccgagcagcccagctttgagcccacaaaaaacaaggaactgacagatgaattccgggagttgagagccaccgtggaacgtatgggcttaatgaaggctaaccacgtgtttttcctcctgtatctcctccacatcctgctcttggatggtgctgcttggcttaccctctgggtatttggaaccagtttccttccttttcttctatgtgccgtcctactttctgcagtacaggcccaggcaggctggctgcaacacgacttcggccatttgtccgttttctcaacgtccaagtggaatcacctgttgcatcacttcgtaatcgggcatctgaagggcgctcctgcttcgtggtggaaccatatgcattttcagcatcacgcgaaaccaaactgctttcgcaaggatcctgatataaatatgcacccttttttcttcgctctcggcaaaattcttagcgtcgagttaggaaaacaaaaaaagaaatatatgccatacaatcaccagcataaatactttttcttgatagggcccccagctctgctgcctctgtattttcagtggtacatcttctattttgttattcagcggaaaaaatgggtggacctggcatggatgataaccttttatgtgcgctttttcctcacgtacgtgcccttacttggactgaaggcctttcttgggctcttcttcatcgtgcgcttcttagaaagtaattggtttgtgtgggtgacacagatgaaccatatccctatgcacatcgaccatgatagaaacatggattgggtctccacgcaactgcaggccacatgtaacgtgcataaatctgccttcaacgattggttttcaggacatctgaactttcaaatcgaacaccatctgttccccacaatgccgcgacacaactatcacaaggtggcccccttggttcagtccttatgcgccaagcacggaattgagtaccagtcaaaacctctgttgtctgcatttgccgatatcattcatagcctgaaagagtctggccagttgtggctggacgcctacctgcaccagtag

SEQ ID NO: 187529 - DNA, 1083 bp, synthetic construct
  misc_feature 1..1083: note = Description of Artificial Sequence: Synthetic coding sequence
  source 1..1083: mol_type = other DNA
atgaacagcctgctgatcggcgagctgagccccgagcagcccagctttgaaccgaccaaaaataaagagttgactgatgagtttagggaactcagagctactgtcgagaggatgggtctcatgaaagccaaccacgtgttcttcctcttgtatctgctccatattctgttattagatggggccgcatggctgactctgtgggtttttgggacgagctttctcccctttcttctgtgtgctgtgcttctatctgctgtccaggctcaggctgggtggctgcagcatgatttcggccatttaagcgttttcagcacttctaaatggaaccacctgctgcatcacttcgttataggacatctcaagggggcacccgcctcctggtggaatcatatgcacttccagcatcacgcaaagccaaactgctttaggaaagatccagatatcaatatgcatccctttttctttgctttaggaaagatcttatcagtggaacttggaaagcagaagaagaaatacatgccttataatcaccagcataaatatttctttctgattgggccccccgccctcctgccactctacttccaatggtacatcttttactttgtgattcagcgtaaaaaatgggtagatctggcctggatgatcactttctatgtgcggttcttcctcacctatgtacccctcttagggctcaaagccttcctggggctcttcttcattgtgcgtttcctcgagagcaattggtttgtctgggtgacacagatgaaccatatcccaatgcatatcgaccacgacagaaacatggactgggttagtacacagctgcaggcaacttgtaatgttcacaaatcagcttttaatgactggttcagtggccatctgaactttcagatcgagcaccatctattccccacgatgcccaggcacaattaccacaaagtggctcccctggttcagagcctctgtgcaaaacacgggatagaataccagagtaagcccttgctgagtgcttttgccgatatcatacactctctaaaggagagcgggcagctctggctcgatgcctacctgcaccagtag

SEQ ID NO: 187530 - DNA, 1131 bp, synthetic construct
  misc_feature 1..1131: note = Description of Artificial Sequence: Synthetic coding sequence
  source 1..1131: mol_type = other DNA
caggacgccttccgggccttccaccaggacctgaacttcgtgcggaagttcctccagcctctgctgataggcgagcttgctcctgaggaacctagccaggacggcccattgaacgcccagctcgtcgaggatttcagagccctgcaccaggcagcagaggacatgaagctgttcgacgcctcacctactttttttgcttttctgctgggtcacatcctcgccatggaggtcctggcatggctgcttatctatttactcggacccggctgggtgccaagtgcattggccgctttcattctggccataagccaagcccaggccggatggctacagcatgacttcgggcatttatctgtgtttagtacctcaaagtggaatcatttattgcaccactttgttattggccatctgaagggggccccagcgtcatggtggaaccacatgcacttccaacatcatgctaagccaaactgctttcggaaagatcctgatattaatatgcacccattcttttttgcattgggcaagatactgagcgtcgaactgggaaagcaaaagaagaagtacatgccttataatcatcaacacaaatacttttttttaattggtcctcccgctttattgccactgtacttccagtggtatatcttctatttcgtcattcaacgcaaaaagtgggttgacctcgcttggatgattaccttctatgtacggttcttcttgacctatgtcccactgttaggtctcaaggcgttcctcggtctgtttttcatccgcttccttgaaagcaattggttcgtctgggttacccagatgaaccacattccgatgcatattgaccatgatcggaacatggactgggtaagcacacagctccaggctacctgcaatgtccacaagtctgcttttaacgactggttcagcggccacctaaacttccaaattgagcaccatctgttcccaacgatgccaaggcataattaccacaaggtggcacccctggtacagagtctctgtgctaaacacggcatcgagtaccagtccaagcctctcctgagcgccttcgcggatatcatccacagtctcaaagaaagcggacaactgtggctggatgcttacttgcaccagtag

SEQ ID NO: 187531 - DNA, 1269 bp, synthetic construct
  misc_feature 1..1269: note = Description of Artificial Sequence: Synthetic coding sequence
  source 1..1269: mol_type = other DNA
atgcacggccgggaggccggccccttcgtgtgcgtgtgcgtgctgctggcatcgatccccactccccaaactccgctcttacaggcctcactgcccccctttcaccccgcttcggcaggccatcccatcacggggcagcaggacgcctttcgcgccttccacccagatcttgagtttgtagggaagtttctcaagcctttattgattggcgaactggctcccgaggagccctcacaggatcatgggaaaaattccaaaataacagaggatttccgcgccctgagaaagacggccgaggacatgaatttatttaagacaaatcacgtcttttttctgctgctgctggcgcacattattgctctggagtccattgcttggttcacagtgttctactttggaaacggctggatcccaactcttattactgccttcgtattagccacaagccaggcacaggcaggatggttacagcacgactatggacacctgtctgtttatcggaagccaaagtggaatcaccttgttcacaaattcgtcataggccacctgaagggcgcatcagcaaattggtggaatcacaggcacttccaacatcatgccaagccaaacatattccataaggaccctgacgttaacatgttacatgtatttgtacttggagaatggcagccaatagagtacgggaaaaaaaaacttaagtatttgccctacaaccaccagcacgagtatttctttctgatcggtcccccactccttatccctatgtactttcagtaccagatcattatgactatgatcgtccacaagaactgggtggatctggcctgggctgtttcctactacatcaggttctttattacatatatcccattctatggcattcttggagctctgctttttctgaattttattcgattcttagagagtcactggttcgtgtgggttacacaaatgaatcacatcgtgatggagatagaccaggaggcatacagagattggttttcatcacaactcactgctacttgcaacgtcgagcagtcatttttcaatgattggttttctggccacctgaattttcagatcgagcatcatctgtttccaacaatgcccaggcataacctgcacaaaatcgcccctctcgtgaagtctctttgtgccaagcatgggattgagtatcaggaaaagccacttctgcgcgctcttctggacatcataagaagcttgaaaaagagtggaaaactctggctcgacgcctatctccacaaatag

SEQ ID NO: 187532 - DNA, 1335 bp, synthetic construct
  misc_feature 1..1335: note = Description of Artificial Sequence: Synthetic coding sequence
  source 1..1335: mol_type = other DNA
atgggcaagggcggcaaccagggcgagggcgccgccgagcgggaggtgtctgttcccacattcagctgggaggagattcaaaagcataacctgcggacagatcggtggctggtgattgataggaaagtgtataatatcacaaagtggtccatccagcatccgggcggacagcgagtcatcggacattacgcaggagaagacgccaccgacgcatttcgggcgtttcatccagacttggagtttgtaggcaagttccttaagccacttctcatcggtgagctggccccagaagagccttctcaggatcacggcaaaaatagcaaaataacagaagatttcagggcccttcggaagactgctgaggatatgaacctgtttaagactaaccacgtcttctttctgctgctgctagcgcacattatcgcactggaatccatcgcatggttcacagtcttttacttcggcaacggatggatccctactcttattacagcctttgtacttgctacgtcacaggcccaagctggctggctccagcatgattatggccacttaagcgtgtatcgaaagcccaagtggaatcacctggtccataaatttgtgattggacacctgaaaggtgctagcgcaaattggtggaaccatcgccacttccagcaccatgctaagcctaacattttccacaaggatcccgacgtaaatatgctccatgtatttgtgctcggtgaatggcagccaatcgagtacggtaaaaagaagctaaagtacctgccttacaaccatcagcacgagtacttcttcctaataggaccaccattgctgattcctatgtattttcagtatcagattatcatgacaatgatcgtgcacaaaaattgggtggacttggcctgggcggtgtcctactatatccgttttttcattacgtatattccattctatgggattcttggggcccttctgtttctgaattttatacgcttcctagaaagccactggtttgtctgggtgacacaaatgaaccacatcgtgatggagatcgatcaggaagcatacagagactggttctcaagccagctaactgccacgtgtaacgttgaacagtcattttttaacgactggttctcaggccacctgaacttccagattgagcatcacttatttccaacgatgccaaggcataatcttcacaagatagctcccttagttaaaagcctctgcgctaagcatggcatcgaatatcaagagaaacctttgcttagggcactgttggatattattcgcagtctcaagaaatccggcaagctttggctggacgcatatctccataaatag

SEQ ID NO: 187533 - DNA, 1161 bp, synthetic construct
  misc_feature 1..1161: note = Description of Artificial Sequence: Synthetic coding sequence
  source 1..1161: mol_type = other DNA
atgggcaagggcggcaaccagggcgagggcgccgccgagcgggaggttagcgtgccaaccttcagctgggaggagattcagaagcacaacctgcggacagatagatggctggtcatagacaggaaagtctataacatcaccaagtggtcaatccagcatcctggtggtcagcgggttataggccactatgcaggagaggacgctactgatgctttccgggccttccatcctgaccttgagtttgttggcaagttcctgaagccccttctcatcggcgagcttgcgcccgaggagccatcacaggaccacgggaaaaactctaaaatcactgaagacttccgcgccttacgcaaaacagcagaagacatgaacctgttcaagaccaatcatgtattttttctgttactgctggcacacatcattgccctcgagagtatagcctggttcaccgtgttttattttgggaacggttggatcccgacattaattaccgcttttgtgctggcgacgtctcaggcacaagccggctggctgcagcacgactacggccatctgtcagtgtacagaaagcccaagtggaaccaccttgtccataaattcgttattggtcatctaaagggagcatccgcgaactggtggaaccataggcacttccagcatcacgctaaacctaacatattccataaagatccggatgtgaacatgttacatgtgttcgtgctcggggagtggcagccaatcgaatacggcaagaaaaagctgaaatacctcccctataatcatcagcacgaatatttctttcttatcgggccccccctcttgatccccatgtatttccaataccagatcattatgaccatgatcgtccataagaattgggtggatctggcatgggctgtgagttactatatccggttttttatcacctatatacccttctatggcattttgggcgcactattgtttctcaatttcatccgatttcttgagagccactggtttgtatgggtaactcagatgaatcacatagtcatggagatcgaccaagaagcctatcgggactggtttagctcacagctgaccgccacctgtaacgtagagcagtcctttttcaacgactggttttcgggacatctcaatttccagattgagcaccagtag

SEQ ID NO: 187534 - DNA, 1338 bp, synthetic construct
  misc_feature 1..1338: note = Description of Artificial Sequence: Synthetic coding sequence
  source 1..1338: mol_type = other DNA
atgggcggcgtgggcgagcccggcccccgggagggccccgcccagcccggggccccactgcctaccttctgctgggagcaaattagagctcacgatcagcccggcgacaagtggttggtgattgagaggcgtgtatacgacatatctagatgggctcagaggcacccagggggttctaggctcatcggccatcacggcgccgaggacgcaaccgatgcctttcgagctttccaccaggacctgaactttgtccgcaagttcctgcagcccctacttatcggagaattggcaccagaagaaccatctcaggacggccccttaaacgcacagctggtggaggactttcgggctttgcatcaagccgctgaggacatgaaactgtttgacgcttccccaacattcttcgcattcttactcggccacatcttggccatggaggtgctggcatggctgttgatttatttactgggccctggttgggtgccatccgccttggccgccttcatcctcgccatctcacaggctcagagctggtgccttcagcacgatttgggacacgccagtatatttaaaaaaagttggtggaatcacgttgcccagaaatttgttatgggacagttgaagggcttttctgctcactggtggaactttagacactttcaacatcacgccaagcctaatatctttcacaaggacccggatgtcacagttgcccccgtgtttctactgggcgaaagtagcgtggaatacggaaaaaaaaagcggcgctatctaccatacaaccagcagcacctgtacttcttcctgatcggacccccccttctgaccttggtcaattttgaagtggagaatcttgcttacatgctcgtctgcatgcaatgggccgatctattgtgggccgcgtctttctatgcccgtttcttcttgtcctatctcccattttatggcgttcctggagtcttgctcttttttgtggctgtaagagtgctagagagccattggtttgtctggatcactcagatgaaccacatccccaaggagattggacacgagaaacacagggattgggtgtcatcgcagctcgccgccacctgcaatgtcgagccatctttattcaccaactggttttctggacatctcaacttccagatcgaacaccacctgttcccccggatgccgcgccacaattactcacgagttgcccccttggtgaagtccctgtgtgccaaacacggtctctcttatgaggttaagccctttctgactgctctggtggacatcgtaaggagcctgaaaaaatcaggcgacatttggctggacgcttacctccatcagtag

SEQ ID NO: 187535 - DNA, 1158 bp, synthetic construct
  misc_feature 1..1158: note = Description of Artificial Sequence: Synthetic coding sequence
  source 1..1158: mol_type = other DNA
atgggcggcgtgggcgagcccggcccccgggagggccccgcccagccgggggctccactccctacattttgctgggagcagatcagagcccacgaccaacccggggacaagtggttagtgattgaacggcgagtgtatgacatatctcggtgggcccaacgtcacccaggtgggtctagattgattggacaccacggcgcagaggacgcaaccgacgccttcagggcgtttcaccaagatctcaatttcgtgcgaaagtttcttcagcctctattgatcggtgagctggccccggaagagccgtcccaagacggccccttgaatgcccaactcgttgaagatttccgggcgcttcaccaggctgctgaggacatgaagttgtttgatgcgtcccctacgttcttcgcattccttcttgggcatatcttagctatggaggtgctggcctggttgctaatttatttgttggggcccgggtgggttcccagcgctttggccgcattcattctcgccataagtcaggcgcagtcttggtgtcttcaacacgacttgggtcacgccagtatcttcaaaaaatcatggtggaaccatgtggcacagaagtttgtgatgggacagcttaaaggattctccgcgcactggtggaactttaggcatttccagcatcacgctaagcccaatattttccacaaagacccagacgtgacggtcgccccagtttttctgctgggtgagagcagcgtagagtacggaaagaaaaagagacggtacctgccctacaatcagcagcacctgtacttctttctgatcggtccgccgttgctcactttagtgaactttgaggtagaaaacctggcttacatgcttgtctgcatgcagtgggccgatcttctctgggcagcatcattctacgcccgatttttcctctcatacttgcctttttatggtgtgcctggagtgctcctttttttcgttgctgtgcgctacgggcgtgagtggcgggggcatacccaagcaactggagatccgcactgcagcccccctcccgagttaccattttctagactccagaatggcgcaagcgggaccgcttcccttgcgtgctggtggaaccatattaacactagcgtggcaggcgctcaggggagatgggtgtag

SEQ ID NO: 187536 - DNA, 1017 bp, synthetic construct
  misc_feature 1..1017: note = Description of Artificial Sequence: Synthetic coding sequence
  source 1..1017: mol_type = other DNA
atgttccaggccttccccggcgactacgacagcggcagccggtgcagctcttcacccagcgcagagtcacagtacctgagcagcgtggactcttttggatctcctcctacagcggctgcctcacaagaatgtgctggactgggagaaatgcccggcagtttcgtcccaaccgtaactgcaataacgactagccaggacttacagtggctggtgcagcctaccctcattagctccatggcccagtcccagggacagcctctggcatctcagccccccgtagtggacccatacgacatgccaggcaccagctactccacccccgggatgtcaggatatagttctggcggagcgtctggaagcggaggcccgtcaacctccgggacaacaagcggtcccgggcccgcccggccggccagagcacgtcctagacgaccgagagaagaaacccttacaccagaagaggaagaaaaaaggagggtgcgccgagaacgcaataaactggctgccgccaaatgccgcaataggagaagggagctgaccgatcgtttacaagctgagaccgatcagctggaggaagagaaggcagagctggagtctgaaatagccgagctgcagaaggagaaagagcggctggagttcgtactggtggcccacaagccagggtgcaaaatcccatatgaggagggacctggaccgggaccactggccgaggtgcgggatttaccagggtccgcaccagccaaggaggatggttttagctggcttctcccccctccccccccacccccattaccgttccagactagccaggatgcaccaccaaatctcacggctagtctatttacacactctgaggttcaagtgcttggggacccattcccagttgttaacccctcatatacctcgagctttgtcctcacatgccccgaggtctcagccttcgcgggagcccagcgaacttcgggctctgaccagccatctgacccactgaacagcccatctctgctggcgctgtag

SEQ ID NO: 187537 - DNA, 909 bp, synthetic construct
  misc_feature 1..909: note = Description of Artificial Sequence: Synthetic coding sequence
  source 1..909: mol_type = other DNA
atgttccaggccttccccggcgactacgacagcggcagccggtgcagttcgagtccatccgccgagtctcaatacctgtcctccgtggattctttcggatcaccccccactgcagcagcttcccaggagtgtgccggtctaggggagatgcccggttcgttcgtccctacggtgactgccattaccacaagccaggatctgcagtggctggtgcagcctacgctcatatcgtccatggcacaaagccagggccagcccctagccagccagccaccggtggtcgatccgtatgacatgccaggtacatcctactcaacgccagggatgtcaggatattcctctggaggggcgtccgggtccggagggcccagtacatccggaacaactagcgggccagggccagccagacccgcccgggcacggccaaggagaccccgggaggaaaccgaaaccgaccagctcgaagaagagaaggctgaactggagtccgaaatcgctgaattgcaaaaggaaaaggagcgcctggaattcgttctagtggctcacaagcctggctgcaagattccctacgaggagggaccggggcccgggccactcgctgaagtccgggatctgcctggtagtgctccggccaaggaggacggcttctcctggttgcttccgcctcccccaccaccaccactgccatttcagacgtcgcaggatgctcctcctaacctgaccgcaagcctttttacgcacagcgaggtccaagtcctcggggaccccttcccggtagtgaacccctcctacacaagctcgttcgtgctgacctgccctgaggtgagcgctttcgccggggcccagcgaacaagcggctctgaccagccatctgacccccttaacagcccctccctgctggctctgtag

SEQ ID NO: 187538 - DNA, 588 bp, synthetic construct
  misc_feature 1..588: note = Description of Artificial Sequence: Synthetic coding sequence
  source 1..588: mol_type = other DNA
atgttccaggccttccccggcgactacgacagcggcagccggtgctcttcaagcccttcagctgaatcacaatacctgagctcggtcgacagcttcggaagcccgccgacggcagccgcctctcaggagaccgatcagcttgaagaagagaaagccgagcttgagtccgaaatcgctgagcttcagaaggagaaggaaagactggaatttgtgttggttgcccataagcccggatgcaagataccttatgaagagggacctggcccaggtccattagctgaggtccgtgatctacccggttcagctcccgccaaggaggacggatttagctggctgctccctccaccacccccaccacccctccccttccagacttctcaggacgcgcctcctaatctgacagctagtctgtttacccattcagaggtgcaagtgttaggcgatccctttcctgttgtcaacccgagctacacctcatcctttgtgctcacttgccccgaggtgtctgcgtttgcaggcgctcaacgcacctcaggatccgaccagcctagcgatcctctcaacagcccctctctgctagcactctag

SEQ ID NO: 187539 - DNA, 876 bp, synthetic construct
  misc_feature 1..876: note = Description of Artificial Sequence: Synthetic coding sequence
  source 1..876: mol_type = other DNA
atgttccaggccttccccggcgactacgacagcggcagccggtgcagttctagtccatctgcagagtcacagtacttatccagtgtagactccttcggcagcccacccactgcagcagcctcccaggagtgcgccggtcttggcgaaatgcccgggtcgtttgtgcctacggtaacggctattacaaccagccaggatctccagtggctggtccaaccaacgctaatatcatccatggcacagtctcagggccagccactggcatctcaaccaccggtggtggacccatacgacatgccgggtacctcctattctacccccggaatgtcaggttattcatcagggggggcgagtggatccggtggtccctctacgagcggtacgacctcaggacccgggcccgcacggcccgccagggctaggccaaggcgcccgcgcgaggagactttgacacctgaggaggaggagaagcgccgtgtgaggagggagagaaataagctggctgccgccaagtgccgcaatcggaggcgcgaactgaccgacaggcttcaggcagagacggaccagctggaggaggaaaaggcagagttagagagcgaaatcgcagaactccagaaggaaaaggagcgacttgaattcgtgttggtagcccataagccaggctgcaagatcccatacgaagaagggcccgggcccgggcctctcgccgaggaggtgcaggtgctgggggacccattcccagtggtaaacccaagttacacttcaagttttgtcctgacgtgtccggaagtctccgcgttcgccggcgcccagaggaccagtggatccgaccagcctagcgatcccctgaactctccctcattactcgccctctag

SEQ ID NO: 187540 - DNA, 912 bp, synthetic construct
  misc_feature 1..912: note = Description of Artificial Sequence: Synthetic coding sequence
  source 1..912: mol_type = other DNA
atgagcgacaacggcgtgtgcgtgctggccttcaagtgccccggcctcctgcgctatactgcctatagatgtaagcagctgtcggatacatctataatcgcagttgcctcccactgtccgctgttacagaaggtgcacgtcggcaaccaggataaactgactgacgaaggtcttaagcagttgggtagtaagtgtagagaactgaaggatattcatttcggccagtgctacaagatctccgatgaagggatgatagtgatcgccaaaggctgtctaaagctacagcgtatctacatgcaggaaaataaactggtaactgatcagagtgtcaaagcctttgccgaacactgccccgaattgcaatacgtagggttcatgggatgttccgtgaccagcaagggcgtgatacacctgactaaactcagaaacctgtcatctcttgatctcaggcacatcacagagctggataatgagaccgtcatggaaatcgtgaaacggtgcaaaaacctgagcagcctcaacctgtgcctcaactggattatcaatgaccgatgcgttgaggtgattgcaaaggaagggcagaacttgaaggagctttacctggtgtcctgtaaaatcaccgactacgccctgatcgccattggtagatacagcatgaccatcgagactgtggacgtggggtggtgcaaagagatcactgatcagggagctaccttgatagcccagagcagcaaatccctccggtatttggggctcatgcggtgcgacaaagtcaacgaggtaaccgttgaacaacttgtacagcaatatcctcacattaccttttctaccgtcttgcaggactgcaaaaggacacttgagcgggcttaccaaatgggctggactcccaacatgtcagccgcaagcagctag

SEQ ID NO: 187541 - DNA, 945 bp, synthetic construct
  misc_feature 1..945: note = Description of Artificial Sequence: Synthetic coding sequence
  source 1..945: mol_type = other DNA
atgagcgacaacggcgtgtgcgtgctggccttcaagtgccccggcttgcttcgctacactgcttaccgctgcaagcaactctccgatacgtcaatcattgctgtggcatcacattgccccctgctgcagaaagtgcatgtgggtaaccaggataagctgaccgacgaggggctcaagcagttaggctctaaatgccgcgagcttaaggacatacatttcggccaatgttacaagatatccgacgagggaatgatagtgatcgctaagggttgtctcaaattacagagaatctacatgcaggagaataaactggtcacagaccaatctgttaaggctttcgctgagcactgtcctgaactccagtatgttgggttcatgggctgtagcgtgacaagcaagggggttatccatcttaccaaactgagaaatctgagtagtctcgatctgaggcacattaccgagctcgacaatgagactgtaatggaaattgtgaagcggtgcaaaaacctgtcatctctaaatctgtgcctgaattggattatcaatgatcgctgcgtcgaagttattgccaaagaggggcagaatcttaaagagctgtatctggtctcctgcaaaatcaccgactacgcactcattgctattgggcgatattctatgactatcgaaactgtggatgtgggctggtgcaaggagataaccgaccagggagcaactctgattgcccagtcgagcaagtccctccgatatttgggacttatgcgctgcgacaaagtgagggtagactatcaagtagtctgctttctgcatatatcgatcgtgaattctctgatgtcctatcctttgagcttcagtatctccacaccagtgtactacatcctttatattcactttatctgtatctacgccatcatcgcgatgcactgcttacccgccttcgtaaactag

SEQ ID NO: 187542 - DNA, 2106 bp, synthetic construct
  misc_feature 1..2106: note = Description of Artificial Sequence: Synthetic coding sequence
  source 1..2106: mol_type = other DNA
atgggccacctgctgagcaaggagccccggaaccggcccagccagaagaggccaagatgttgctcctggtgtcggcgccgaagacctttgttgagactcccccggagaacacccgcaaaggtgcccccccaaccggcggcccctagaagcagggactgcttttttagaggcccatgtatgctgtgctttatcgtccactccccaggggcgcccgccccggccggaccagaagaggagccacctctttcaccaccgcccagggatggcgcttatgccgccgctagtagctcgcaacaccttgcgcggaggtatgctgccctagctgccgaggactgtgcagccgccgccagaagattcctgctctcaagtgccgctgcagctgctgcggctgctgcttcagcatcgtctccagcgtcctgttgtaaggagttgggactggcggccgctgctgcatgggagcagcagggccgctccctcttcctcgcctcactgggacccgtgagattccttgggcccccagcagcagttcaattattccgcgggcctaccccttccccagcagaattgccaactccccccgaaatggtctgtaaacgtaagggggcaggagtcccggcttgcacaccttgcaagcaaccgcgctgcggcggcggcggttgcgggggaggtggcggcggcgggggggggggcggcccagccggtgggggggcttctccaccacgaccacctgatgcagggtgctgtcaggcccctgagcagcctccccaaccactgtgtccaccaccgtcatcacccacctctgagggagcccccactgaggccggaggcgacgcagtgcgggccgggggaacagcacctctttcagcccaacagcaacacgagtgtggtgatgctgattgccgagaatcacccgaaaatccatgtgactgtcacagggagccacctcccgagacccctgatataaatcaactccccccaagcattctgttgaaaatcttctcaaacttgtcactggatgaacgctgtctgtctgcttcccttgtgtgcaaatactggagagatctatgtttagactttcaattctggaagcaactcgacctgagttcccggcaacaagtgacagatgagttgctcgaaaagattgcctcacgctctcaaaacatcattgaaatcaacatttccgactgtcggagtatgtcagacaatggcgtgtgcgtgctggcttttaagtgccctggcctgctgcggtacaccgcgtatcgctgtaagcagctgtccgacacatccattatagcggtcgcctcccactgtcctcttcttcagaaagtgcatgttggtaaccaagacaaattaaccgacgaggggcttaaacagctcggttccaagtgtcgagagctgaaagatatccatttcgggcaatgctataagatcagtgacgagggcatgatcgtaattgccaagggttgtcttaagctccagagaatttacatgcaagaaaacaagctcgtaaccgatcagtccgtgaaggcttttgcagaacactgtcccgaattgcagtacgtgggctttatgggctgttctgtcacctccaagggagtgattcacctaaccaaactgcgcaatttgtccagcctggatctgaggcatataactgagctagataacgaaaccgtgatggagattgtgaagagatgcaagaatctctcaagtctaaacctctgcctgaattggatcattaatgaccggtgtgtggaagtcattgcaaaggaggggcagaatctaaaagagctgtacctggttagctgtaagatcaccgattatgcactgatagctattggcagatactccatgacaattgaaacagtggacgtaggttggtgcaaggagatcaccgaccaaggcgcaactttgatcgcccagtcatccaagagtctaaggtatctcggactgatgcgatgtgacaaagttaatgaagtgactgttgagcagttggtacagcagtaccctcacattaccttcagcacagtgttgcaagattgtaagcgcactttggagcgagcctaccagatgggctggactccaaacatgtctgcggcgtccagctag

SEQ ID NO: 187543 - DNA, 2025 bp, synthetic construct
  misc_feature 1..2025: note = Description of Artificial Sequence: Synthetic coding sequence
  source 1..2025: mol_type = other DNA
atgagcagcagcagccggggccccggcgccggcgcccggcggcggagaactaggtgcaggcgctgtagggcttgtgtgagaacagaatgcggggactgtcatttttgccgggatatgaagaagtttggggggccgggtcgcatgaaacagagttgtctcctacgtcagtgcaccgctcccgtcctcccccataccgcggtgtgcttactttgcggggaggccggcaaggaagatacagtggaaggcgaagaagaaaagtttggcctctctctaatggaatgcactatctgtaatgaaatcgtccaccccggatgtcttaaaatgggcaaagcagagggagtgataaatgcagagatccctaattgttgggagtgtccacgatgtacccaggaagggagaacatccaaggatagtggggaaggacctgggcggcgacgagctgacaacggtgaagaaggagctagtttgggctctggttggaaactgaccgaagaaccccctctcccgccaccgcccccccgacgcaagggcccattaccagctggccccccccctgaagatgtgccaggtcccccaaaacgcaaggagagggaggccgggaacgagcctccaaccccccgcaaaaaagtgaaaggtggccgcgagcggcatctaaaaaaagtcggtggcgatgcgtgcctcttacggggttcagatcccggcggtcccggactcttacctccaagagtgcttaacccgtctcaggcattcagttcctgccatcccggccttcctcccgagaattgggagaagcctaaaccccctcttgccagcgctgagggaccggccgtgccctccccgtctccccagcgcgagaaactcgaacgctttaaacgaatgtgtcagcttctggagagagtaccagacaccagtagtagctctagcgacagcgactccgacagcgattcgtccggtactagtctctcggaggatgaggcaccgggggaagcccggaacggcaggcggcccgctcgcggctccagtggcgaaaaagagaatcgcggagggcgcagagccgtgcggccaggctcaggaggccctctcctgtcatggcccctgggtccggcccctcctccccgcccgccacagctagagcgccatgttgtaagaccgcctccacgcagcccggagcccgataccctgcccctcgccgcaggatccgaccatcccctccctcgcgcagcgtggctcagagttttccaacacctgggcccaagggagttatgcatatgcatgcgggtatgtcgcacatggtcacgctggtgttacgataaacggctctggccccgtatggatctgtccaggaggaaaagtcttaccccgcctatgctctccggcgtggttcgccgccagccacgggccctcgatctgtcttggactggggtgagtaagaagcagctgatgtggcttctgaatagactccaggggctccaggaactggtactgtccggctgttcctggctcagcgtttccgccttgggctccgcccccctacctgcactgaggctgctcgacctcaggtggattgaggatgtcaaggattcccaattgagggagttacttcttccaccgccagatactaagcctggccagaccgaaagtcgcggcagactacagggcgtggcagaactgcgcctggcaggccttgagctgaccgatgcatccctgcggctgctgctcagacacgcacctcaactctctgcattggatctcagtcattgtgctcatgtcggagatcctagtgtgcacctgctcaccgcacctacttctcccctccgtgagacccttgtgcacttgaatcttgccgggtgtcatcgtttaactgaccactgtctgcctctattccggcgctgtccccggctgaggaggctagatttaaggagctgccgacagttgagcccggaggcatgtgcacggttagctgccgcagggccccccgggcccttccgatgtcccgaggagaagctgctgctcaaggacagttag

SEQ ID NO: 187544 - DNA, 2085 bp, synthetic construct
  misc_feature 1..2085: note = Description of Artificial Sequence: Synthetic coding sequence
  source 1..2085: mol_type = other DNA
atgggcatgaaggtgcccggcaagggcgagagcggccccagcgccctgctcacccctcctatgagtagttcaagtcgcggccctggcgccggcgcaagacgacgacgcactagatgcagacggtgcagggcttgtgtaaggaccgagtgtggcgactgtcatttttgcagagacatgaaaaagttcggtggccccgggaggatgaagcaatcttgtctgctgagacagtgtacggctccggtactgcctcacacagccgtgtgcctgctatgcggggaagcaggcaaagaagacacagtggagggggaggaggaaaagttcggactgtctcttatggagtgtaccatctgtaatgagatcgtgcacccagggtgcctgaagatgggaaaggcagagggggtgattaacgccgagatacccaattgctgggaatgcccccgatgcactcaggagggacggactagtaaagactcaggagaaggtccaggccggagacgggctgacaacggagaggagggcgcttcgctcggcagcggctggaagctcactgaggagccccccctgccgccgcccccccccaggaggaaaggacccctgccggcaggcccgccacctgaagacgtgcccggaccgcctaagcggaaagagagagaagcaggtaatgaacctcctactccaaggaagaaagtaaagggtggacgcgaacgccaccttaaaaaggtgggtggggatgcatgcttgctgagggggagcgaccctggcggaccgggacttctgccaccacgtgtgctgaatccctcgcaagccttttcctcatgtcaccccggcttaccccccgagaattgggagaagcctaaacctcccctggcatcagccgagggacccgctgtgccatccccgtctccccagcgggaaaaactggaaaggttcaaacgcatgtgccagttgctcgagcgtgtgcctgatacctcgtcctccagctctgattctgatagtgatagcgacagcagcggcactagcctgtccgaagatgaggcaccaggtgaggctcgtaacggacggaggccagccaggggatcgtctggcgagaaggagaaccgtggaggccgcagggccgttcggccaggtagcgggggtccactgttgagctggcccctaggtccagcaccacctcccagaccacctcaacttgaacgccatgtggtgaggccccccccccggtcaccagaacccgatacattgccgctggcggctgggagtgatcaccccctgccacgggccgcgtggctgcgtgttttccaacatctgggcccgcgggagctgtgcatctgtatgagggtctgcagaacatggagcagatggtgttatgacaagcgtctttggccccggatggacctgtctagaaggaaaagtctcaccccccctatgctgtctggggtggtcaggcggcagccgcgcgctctggatctaagttggaccggtgtgagcaagaaacagttgatgtggctcctgaatcgcctgcagggcctgcaagaattggtactgagtggttgctcttggctgagcgtgagtgccctcggcagcgcgcctctgcctgccctgagactgctcgacttgcggtggatcgaagatgtcaaggattctcagttacgggaactattgttacctcctcccgacactaagcccggtcagaccgagtcgcggggcaggttgcagggcgttgctgaactccgacttgccgggctggagctcaccgatgcatctctcaggctcctgctcagacacgcgccacaactgtcagccttagatctgtcacactgtgcccacgtgggggatcctagcgtgcacctgcttaccgctccaacttcgcccctccgcgaaacgttggtccatctcaatctggctgggtgccaccggctcacggaccactgccttcctctcttccgaagatgcccgagattgcgccgcctggatcttcgaagctgtcgccagctttcacccgaggcctgcgctcggttggccgctgccgggccgcccggtcccttccgatgccctgaggagaagctcctgctcaaagacagctag

SEQ ID NO: 187545 - DNA, 1761 bp, synthetic construct
  misc_feature 1..1761: note = Description of Artificial Sequence: Synthetic coding sequence
  source 1..1761: mol_type = other DNA
tgacggatgaagcagagctgcctgctgcggcagtgcaccgcccccgtgctgcctcacacagccgtctgtttgctctgcggggaggccgggaaagaagatactgtcgagggagaagaagaaaagtttggactctctcttatggaatgtactatctgcaacgaaattgtccacccaggatgcctcaagatgggaaaggccgagggcgtaatcaacgccgagatccctaactgttgggaatgccctagatgcacgcaggaagggcggacatctaaagacagtggggaagggccaggtcgtcgtcgtgccgataacggcgaggaaggcgcttccctgggatccgggtggaaactaactgaagagcctcccttaccgcccccccctccacggagaaaaggacctctcccagctgggccacctcccgaagacgtcccaggacctccaaagcgaaaggagagagaagcaggcaatgaacctcccacgccgcgtaagaaagtgaagggcggtcgcgagcggcatttgaagaaaaagccgaaacctcccctggcctcagcagaaggccctgccgtgcccagtccatcacctcaaagagagaaactggaaaggtttaagagaatgtgccagctcctggagcgcgttcctgacacttcttcaagttccagcgacagtgattccgacagcgattcatcaggaacttctttatcagaggatgaggctcccggggaggcaagaaatggtagaagacccgcacgaggctcatcaggagagaaggagaacaggggaggacggagggcagtgagaccgggctctggcggacctctgctgagttggcctctgggccccgccccccccccaaggccgcctcagctggagcgacatgttgtcaggccacccccccggtcgccggagccggacactctgccattagctgccggctcagaccaccctctgcctcgagccgcatggcttagagtgttccagcacctaggacccagagaactttgcatttgcatgagagtgtgtcgaacttggtcccggtggtgttatgacaaacggttgtggccaaggatggacctgagtcgccggaagtcattgacccctcccatgttatccggagttgttcggaggcagccacgagccctcgatttgtcttggaccggtgtttccaagaagcaacttatgtggcttttgaatcgactccagggacttcaggagttggtcctgagcggctgtagctggctttccgttagcgcgctagggtccgcccctctgcccgctttaagactcctcgacctgcgttggattgaggacgtgaaagattcacagttgcgggaactgctgctgcctccacccgataccaaacccggtcaaacggagtcccggggccgactccagggggtggcggaactgcgcctggcagggcttgagcttactgacgcctccttgcgcctactactcaggcacgcccctcagctcagtgcacttgatctcagtcactgcgcccacgtcggggatccatcagttcatctgctcacagccccgactagccctctgagggaaaccctggtgcacctgaacttggcaggatgtcatcgtcttactgaccattgcctgccgctatttcgaagatgcccaaggctcagaaggctggacctaaggtcatgccgccagttaagtccagaggcctgtgcacggctcgcagctgccggcccccccggcccttttcgttgccctgaggagaagttattactgaaagactcatag

SEQ ID NO: 187546 - DNA, 495 bp, synthetic construct
  misc_feature 1..495: note = Description of Artificial Sequence: Synthetic coding sequence
  source 1..495: mol_type = other DNA
atggacctggaggagtgcatcctgatcaccgacagcaccctgatccagctgtctatacactgcccaaagctgcaggcgctagtcagcctgagcttcagtgatatcattcacctccttaagatgaaggaaccgagccaccataataaaaagctgttcgggttctctttttgtaaatccttgagccattgtgagctaatcaccgatgacggaatcttgcatttgtctaattctacctgcggccatgaaaggttgcgggttctggagctcgacaattgcctgctgatcacagatgtcgccctcgagcaccttgagaattgccgcgggcttgagagactggagttgtacgattgtcaacaggtgaccagggccgggattaaacggatgagagctcagctcccacacgtaaaggttcatgcctactttgctccggtgactccgcctaccgccgtcgctggatccgggcagcggttatgccgttgctgcgtcatcctctag

SEQ ID NO: 187547 - DNA, 1272 bp, synthetic construct
  misc_feature 1..1272: note = Description of Artificial Sequence: Synthetic coding sequence
  source 1..1272: mol_type = other DNA
atggtgttcagcaacaacgacgagggcctgatcaacaagaagctgccaaaagaacttctgctccgtatcttcagttttctggacattgtgactctttgtaggtgtgcccagattagtaaggcgtggaatatccttgctctggacgggtccaactggcagcgtattgatctgttcaacttccaaaccgatgtcgagggccgagtagtcgaaaacatctcaaaacggtgcggaggatttctccggaagttatcattacgcgggtgcatcggggtcggcgactcgtcgctcaagacctttgcccagaactgcagaaacattgagcatctcaacctgaacggatgtacaaagataaccgattccacatgttactcactctccaggttttgcagcaaattgaaacatttggacttgacctcgtgtgtatcaatcaccaattcttctctgaaggggatatcagagggctgccggaacctagagtacctgaacctgagttggtgcgaccaaatcaccaaagatggaatcgaagctttggttcgtggctgccgcgggctgaaagctctcttgctgcgcgggtgtacacaactggaggacgaagccctgaagcatatccagaattactgccacgagctggtgtctttgaacctccagtcatgctcccggataaccgatgaaggtgtggtgcagatctgcagaggctgccatagactgcaggccctgtgtctgtccggttgtagcaacctgactgatgcgagtctcacagctctcgggttgaactgcccaaggctgcagatcctggaagcggctagatgtagccatctgacggacgcaggctttacccttctagcaaggaactgtcatgagctggagaaaatggacctcgaagagtgtattttaatcaccgattccactctgatacaactcagtatccactgccctaaactgcaagcactcagtctgagccactgtgagttaattactgatgacggtatcttgcacctgagtaattctacgtgcggtcacgagaggctgcgcgtacttgagcttgataactgtctgctgatcacagacgttgccctggaacatttggagaactgcaggggcctagagcggctggagctgtacgattgccagcaagtgacaagagcggggattaagcgcatgcgcgcccagctgccccacgtgaaagttcacgcatactttgcgccagtaactccaccgaccgccgtggccggaagcggccaacggctgtgtcggtgttgtgtcattctctag

SEQ ID NO: 187548 - DNA, 1020 bp, synthetic construct
  misc_feature 1..1020: note = Description of Artificial Sequence: Synthetic coding sequence
  source 1..1020: mol_type = other DNA
atgtacatcgccctggtgtggatcctgttcgtgatgtggaccttcgcacaaaactgcagaaatatcgaacacttgaacctcaatggctgtacaaaaattacggactcaacctgttactcattgagccgcttctgcagcaagttgaaacatctagatttaacatcctgcgtttcaattacaaacagcagcctcaagggaatctctgaagggtgtcgaaatttggagtacctgaacctgagctggtgcgaccagatcacgaaggacggtattgaagccctcgtgagagggtgcagaggactcaaggccctgttgttgcggggctgcacacaacttgaggatgaggccttaaaacacattcagaactattgtcacgagctggtcagcctcaatcttcaatcctgctccagaatcactgatgagggcgtggttcaaatctgcagaggctgtcacaggttgcaggcgttgtgcctctcaggttgtagcaatttaacagatgcgagcctgactgcactgggccttaactgccctcgacttcagatccttgaagcagccaggtgctcccacttgacagatgcaggattcactcttctcgccagaaattgccatgagctagagaagatggacctggaagagtgtattctcatcaccgacagcaccctgattcagctgagcatacactgtccaaaattgcaggctctgagtctttcccactgtgaactcattacggatgacggtatactgcacctgagtaactcaacatgtggccacgagagacttagggtgctggaattagacaactgccttctcatcaccgatgtggctctcgagcatctagaaaattgtaggggactggaaagactcgagctttacgattgccagcaggtcacgagggccggtataaaaaggatgagggctcagctgccccatgtgaaggtccacgcatactttgcaccggtgactcctcccactgcggtagccggcagtggccagagactttgtcggtgctgcgttatcttgtag

SEQ ID NO: 187549 - DNA, 1068 bp, synthetic construct
  misc_feature 1..1068: note = Description of Artificial Sequence: Synthetic coding sequence
  source 1..1068: mol_type = other DNA
atggtgttcagcaacaacgacgagggcctgatcaacaagaagctgccaaaggagctgctactcagaatcttctcatttctggacatcgtaacgctgtgtcgatgtgcccagatatccaaggcttggaatattctcgcattggatggaagtaactggcagaggatagatctgttcaatttccaaacggacgttgagggacgggtcgtggagaatatctccaagcggtgcgggggctttctgcggaaattgtccctacgcggctgcatcggagtgggagactctagcttgaaaactttcgcccaaaactgccggaatatagagcatctcaatctcaacggctgtactaagatcactgacagcacttgctattctctctcaagattttgctcaaaactcaagcacatccagaattactgtcacgaactggtgagtttgaacttacaatcctgttccaggatcactgacgaaggggtcgtgcagatttgccgcggttgccatcggctgcaagcgctgtgtctgtcaggctgcagtaatctgactgacgcttcactgacagccctaggcctcaattgcccgcgacttcagatcctcgaagccgcacggtgtagtcatttgaccgacgctggcttcaccttactggcgcggaactgtcatgagctcgagaagatggacttggaagagtgcatccttattacggacagcacattgattcagctgtccattcattgccctaagcttcaagctctgagcctcagtcactgcgaactgattacggacgatggtatcctgcacctgtcaaacagcacctgtgggcacgagcggctcagagttctggagcttgataactgtctcctcatcaccgacgttgcacttgagcacctggagaactgccgcggcctcgagcggctggagctgtacgactgtcagcaggtaacacgcgccggcataaagagaatgagagcacagctcccacatgtcaaggtgcacgcatatttcgcccctgtgacaccgcccaccgctgttgcgggctcggggcagagactctgtcgatgctgcgtgattctgtag

SEQ ID NO: 187550 - DNA, 402 bp, synthetic construct
  misc_feature 1..402: note = Description of Artificial Sequence: Synthetic coding sequence
  source 1..402: mol_type = other DNA
atggacctggaggagtgcatcctgatcaccgacagcaccctgatccaacttagtattcactgccctaagcttcaggcattgagcctcagtcactgcgagttgattacagacgacgggattctacacttgtctaattctacttgtggtcacgagcgactccgtgtcttggagctggataattgtctgctcattactgacgtagccttggagcacctcgagaactgccgtggcctcgagagactggaactgtatgattgccagcaggtgacaagggccgggataaagcgcatgcgtgcgcagctccctcatgttaaggtacacgcctacttcgctcccgttacgcctcctacggccgttgcgggttctggacaacggctgtgcagatgctgcgttattttatag

SEQ ID NO: 187551 - DNA, 1068 bp, synthetic construct
  misc_feature 1..1068: note = Description of Artificial Sequence: Synthetic coding sequence
  source 1..1068: mol_type = other DNA
atggtgttcagcaacaacgacgagggcctgatcaacaagaagctgcccaaggaactcctgttgaggattttttctttcctagacatcgttactctttgccgctgtgctcaaataagcaaggcttggaacatcctggcccttgatggctccaactggcagagaattgacctgtttaactttcaaactgatgtcgagggtagggtagtggaaaatatctccaagaggtgcggtggttttctgaggaagctaagcttacgcggctgtattggggtcggagattcttctctcaagacatttgcccagaactgtcgtaatatcgagcatctgaatctgaacgggtgtaccaagatcacagatagcacctgttactccctctcgcggttctgctcaaagctgaagcacatccagaactattgccacgagctggtatcccttaacctgcagtcttgctcacgaatcaccgatgaaggcgtggtgcaaatatgccggggatgtcaccgcttgcaggcgctttgcctgtccggatgtagtaacctaaccgacgccagccttacagccttaggcctcaactgccctcgcctccaaatcctggaagccgctagatgctcacacctgacagacgccgggttcaccctcctggccaggaattgccatgagcttgaaaaaatggacctggaggaatgcatattgataactgacagcactctgatccagttgtcaatacactgcccgaaattgcaggccctctcattatctcactgcgaactgatcaccgacgatgggatcctacacttgagcaacagtacttgcggccacgagcggttgcgggtgttggagcttgacaactgtctgctgatcactgatgtggcactggagcacctggaaaactgccgagggttggaacgtctggaactatacgactgccaacaagtgacccgagcgggaatcaagcgtatgagagcccaactgcctcatgtgaaggtccatgcctacttcgcaccagttactccgcccacagctgtcgcaggttccggtcagaggttatgtaggtgctgcgtaattttatag

SEQ ID NO: 187552 - DNA, 1260 bp, synthetic construct
  misc_feature 1..1260: note = Description of Artificial Sequence: Synthetic coding sequence
  source 1..1260: mol_type = other DNA
atggtgttcagcgccgtgctgaccgccttccacaccggcaccagcaataccacatttgtggtatacgagaacacttacatgaatattacccttccccccccctttcagcatcccgacttgagcccgctgttaaggtactccttcgagactatggcccccacggggctcagctctctgaccgtgaattcaacggctgtgccgacgacccccgcagctttcaaatcattgaatttacctctgcagattactctctcagccatcatgatcttcatcttattcgtaagcttcctgggaaatctcgttgtatgcttgatggtgtaccagaaagccgcaatgcgctcagccatcaacatcctgctggcctcccttgccttcgccgatatgctgttggcagtgttgaatatgcccttcgccctagtcaccatcctgaccacacgatggatctttggcaaattcttctgccgagtaagcgccatgtttttctggcttttcgtgatagaaggggtggctatcctgcttattattagcattgatcggtttctcatcattgtccaaagacaggacaagctaaacccttaccgagcaaaagtgctgatcgctgtgtcctgggccacctccttctgtgttgcatttccactcgcggtcggtaaccctgatctgcagatcccttctcgggcccctcaatgcgtcttcggctacaccaccaatccgggctaccaggcttacgttatcctgatctcactcatcagcttttttatcccttttcttgttattctgtattcctttatggggattcttaacacccttcgacacaacgccctgcggatccatagctaccctgaaggaatttgcctttcccaggcaagtaagctgggtctgatgtcgctgcagaggccgttccagatgtcaatcgatatgggcttcaagacccgagcatttaccaccatcctgatcctatttgcagtgttcatcgtgtgttgggcaccattcaccacctatagtcttgtcgccactttttcaaagcacttctactaccaacacaatttctttgagattagcacctggttgctgtggctgtgttacctgaagtctgctttgaatccacttatctattactggagaattaagaagttccacgacgcatgcttggatatgatgccaaagtccttcaagttcctcccccaactccccggtcacacgaagcgacggatacgcccatccgccgtctatgtgtgcggcgaacacaggaccgtcgtttag

SEQ ID NO: 187553 - DNA, 1866 bp, synthetic construct
  misc_feature 1..1866: note = Description of Artificial Sequence: Synthetic coding sequence
  source 1..1866: mol_type = other DNA
atgagccccgtgttccccatgctgaccgtgctgaccatgttctactatatatgtctgaggcgccgagccaggaccgcgacaaggggcgaaatgatgaatacacacagagccatcgaaagtaacagccagacgagtcctctgaacgcagaggttgtgcaatacgctaaagaagttgtggactttagtagccactacggatccgaaaactctatgtcctacaccatgtggaatcttgctggtgtgcccaatgtgtttccttcgagcggcgattttacacaaacagccgtgtttagaacatatggcacatggtgggatcagtgtcctagtgccagtctgccttttaagaggacgccaccgaacttccagtctcaggattacgttgagctcacattcgagcagcaggtttaccccactgctgtgcacgtactggagacctaccatcccggcgccgtgattcgcatcctagcctgctctgccaatccatactctccaaaccctccagctgaagtgagatgggagatcctatggagcgaaaggcccactaaggttaacgcatcccaggctagacaatttaagccatgcatcaagcaaataaattttcccacaaacttgatccggctggaggtgaattcatctctgttagaatactatacagagttggacgccgtggtgttgcacggcgtgaaggataaaccagtgctgtctctgaaaacgtcgcttatagatatgaatgacatcgaggacgatgcctacgcagaaaaagatggctgcggaatggatagcttgaataagaagttcagttctgccgtcctgggggagggccctaataacggttacttcgacaagctgccctacgagctgattcagttgatcctcaatcacctcaccctccctgacctctgcagactcgcccagacctgcaagctgcttagccagcactgttgtgaccctctgcaatatattcacctcaatcttcagccctattgggccaagctggatgatacctctctggaattccttcaatccaggtgcaccctcgtgcagtggcttaatctcagctggactggaaatcgaggattcatctctgtggccggattttcccggtttctgaaagtatgtggtagtgagctcgtgcggctggagctcagctgcagccactttcttaatgagacctgtctggaggtaatatccgagatgtgtccgaatctacaggccctcaatctgtcatcatgcgacaaactgcccccccaggccttcaatcacatcgccaaactttgtagtttaaagagattggtgctttaccggaccaaagtggagcagaccgcgctgctgtccattctcaacttttgtagtgaactgcaacatctatcgttaggcagctgcgttatgatagaagactatgacgtgatagccagcatgataggggctaaatgcaaaaaactgcgtacccttgatctctggcggtgcaaaaatattaccgaaaacggaatcgccgagttggccagcggatgccctctactggaggagctcgacctaggctggtgccctaccctacaaagcagcactggttgtttcacaaggctggcacatcaactccctaatcttcagaaactgttcttaaccgcgaacagaagtgtgtgcgacactgatattgatgagctggcctgcaactgtaccagactccagcagctcgatattctcgggacccggatggtgagtccagctagtctacggaagttgctggaaagctgcaaggatctatctctgctcgatgtgagcttctgctcgcagatcgacaatcgcgccgtattggagctgaacgcctccttccctaaggtcttcattaaaaaatctttcacccagtag

SEQ ID NO: 187554 - DNA, 2076 bp, synthetic construct
  misc_feature 1..2076: note = Description of Artificial Sequence: Synthetic coding sequence
  source 1..2076: mol_type = other DNA
atggcccccttccccgaggaggtggacgtgttcaccgccccccactggcggatgaagcaactcgtcggcctgtattgcgataaactcagtaaaacgaatttctctaataacaacgacttcagagcactgctgcagtccctttacgcaacattcaaagagttcaagatgcacgagcagatagagaatgaatatattattgggctgctgcagcagcggagccaaacgatctacaacgtacacagtgacaacaagctcagcgagatgctgtccctcttcgaaaaaggcctgaagaacgttaagaatgaatacgagcagctgaattatgctaagcaactgaaggaaagactcgaagcatttacgagagattttctccctcacatgaaggaggaggaggaggtattccaaccaatgctgatggaatacttcacatacgaggagctcaaggatatcaaaaaaaaagtgattgcgcagcactgcagtcaaaaggacactgcagagttgctacggggcctgtcgctgtggaatcacgccgaggaaagacagaagttcttcaagtatagtgttgacgaaaagtctgataaggaagccgaggtgagtgagcacagtactggcattacacacttgccccctgaggtcatgctgtctatcttctcgtacctgaatccccaggagctgtgtagatgttctcaggtctcaatgaagtggtcccaactgacgaagaccggttctttgtggaaacacttatacccggtgcactgggcccgtggcgattggtattccggacctgcaactgagttggacaccgagccagacgatgagtgggtgaagaacaggaaggatgagtccagagccttccacgagtgggatgaagacgccgacattgacgagtcagaagaaagtgccgaggagagcattgctatcagtatcgcacagatggagaagaggctgcttcacggcctaatccacaatgtactgccatacgtgggtacaagcgtgaaaacattggtcctagcctatagttctgctgtgtcttccaaaatggtgaggcagatactggaactgtgccccaacctcgaacatctggacctgacacagacagacatatcggattctgccttcgacagttggtcctggttgggatgctgccagagcctgcggcaccttgatttgagcgggtgcgaaaagattaccgacgtcgccctcgagaagatcagcagggccctcggtatcttaacctcccatcagagcgggttcctgaaaacatcgaccagcaagatcacaagcaccgcttggaagaataaggacattaccatgcagagcacaaagcagtatgcttgtctccacgaccttactaacaaagggattggggaggaaatcgacaacgaacacccttggactaaacctgtcagttctgaaaacttcaccagcccctatgtgtggatgttggacgccgaagacctagccgatatcgaagataccgtcgaatggcggcacaggaatgtggagtctctgtgtgttatggagacagccagcaatttctcttgctctacttccggctgtttttcaaaagacatcgtgggtctgcgtactagcgtgtgctggcagcaacactgtgccagccctgctttcgcttattgcggtcattcattttgctgtactgggacagccctccggacaatgagctctctgccggagtccagcgccatgtgccgcaaagccgcacggaccaggcttccccgaggcaaagacctcatttacttcggtagcgaaaaatccgatcaagagacgggaagagtcctgctgttcttgtccctcagcggctgctaccagatcacagaccatggacttcgggtcctcacgctcggcggcggtctgccatatctcgaacacctgaacctatccggctgcctgacaatcacaggcgccggactgcaggatctggtgtccgcctgccctagtctcaatgacgaatatttctactattgtgacaatatcaacggaccccacgccgataccgcatcaggctgccaaaatctgcagtgtgggtttcgcgcgtgctgtcgctcaggggagtag

SEQ ID NO: 187555 - DNA, 1698 bp, synthetic construct
  misc_feature 1..1698: note = Description of Artificial Sequence: Synthetic coding sequence
  source 1..1698: mol_type = other DNA
atgaaggaggaggaggaggtgttccagcccatgctgatggagtacttcacatatgaggaactgaaggatatcaagaaaaaggttatcgctcagcattgctctcagaaagacacagcagaattactccgtggcctgtctttatggaatcacgccgaggagaggcagaagttctttaagtattcagtcgacgaaaagtctgacaaggaggccgaagtgagtgaacacagcacaggcatcacgcatctgcccccagaggtgatgctgagcatcttttcctacctgaacccccaggagttgtgccgctgctcacaggttagcatgaagtggtcgcagttgacgaaaaccggctccttgtggaagcacctgtatcctgtccactgggcccgcggcgactggtactctggccccgcgaccgagctggatacagagccagatgacgagtgggtgaagaatcgtaaggacgaaagccgcgctttccacgaatgggatgaggatgctgatatagacgagtccgaggaaagcgccgaagagagtatcgccattagcattgcccagatggagaaacggctgctgcatggtcttatacataacgttctcccttatgtcggcaccagtgtcaaaacactggttcttgcgtatagtagtgctgtctcttcgaaaatggttcggcaaatcctggaactatgcccgaatttggaacatctagacttgacacagactgatataagcgactccgcctttgactcatggagctggttgggctgctgccaatcattaaggcacctggacctttcaggctgcgaaaaaattactgatgtggcactggaaaaaatctcaagagccctgggcattttgacctcccaccaatccggcttcttgaagacatccacctcgaaaattacaagcactgcttggaaaaacaaagacataaccatgcagagcactaaacagtatgcttgtctgcatgacttgaccaataagggtattggggaagagatcgataatgaacacccttggaccaagcccgtctcctctgagaacttcacatccccctacgtctggatgttggatgccgaagacctcgcagacatcgaggataccgtggaatggagacacagaaatgttgaatcattatgtgttatggaaactgcttctaatttcagttgttcaactagcgggtgcttcagcaaggacattgtgggactgcgaacctcagtgtgttggcagcaacactgcgcgtcccccgcattcgcgtactgtggccattcattttgctgtaccggcacagccttgaggacaatgtctagtctgcccgaatccagcgctatgtgcaggaaggctgcacgcacgaggctgccaagaggtaaggacctgatatattttggatcagagaagtctgatcaggagacaggccgcgttctgctgtttctttcactttctgggtgttatcaaataaccgatcatgggctgagggtcctcaccctgggcggtgggctcccctacctggaacatctgaatctcagcggttgtctgacaatcaccggggccgggttgcaagacctggtatcagcatgtccttcactgaatgatgaatatttctactattgtgataacattaacggtcctcacgcagacactgcatccggttgtcaaaacttgcaatgcggctttcgcgcttgctgccgctccggcgaatag

SEQ ID NO: 187556 - DNA, 2025 bp, synthetic construct
  misc_feature 1..2025: note = Description of Artificial Sequence: Synthetic coding sequence
  source 1..2025: mol_type = other DNA
atggcccccttccccgaggaggtggacgtgttcaccgccccccactggaggatgaaacagctggtaggattatattgtgataagtccttgtacgccacattcaaagaatttaagatgcacgaacagattgagaacgaatacataatagggctgctgcagcagagaagccaaaccatctataatgtacactcagacaataagttaagtgaaatgctctctctgtttgagaaaggcctgaagaatgttaagaatgagtacgagcagttgaattacgccaagcaactcaaggagcgcctcgaggcttttactcgcgattttctcccccacatgaaggaggaggaagaagtctttcaacccatgctcatggagtacttcacatacgaggaactcaaagatattaagaagaaagtcatcgcacagcactgctcccagaaagatacagccgagctacttcgagggctaagcctgtggaatcacgctgaggagcggcagaaattttttaagtatagtgttgatgaaaaatcggataaggaagctgaggtgtctgaacactcaactggtatcactcacctccctccagaggtaatgctgagcatcttcagttacctcaacccccaggaattgtgcaggtgctcacaggtgtccatgaagtggagccaactcactaagacaggcagcctgtggaaacacctgtatccagtgcactgggcccgcggcgactggtactccgggcctgctaccgaattggataccgagccagatgatgaatgggtcaaaaatcggaaggacgagtcacgagcttttcatgagtgggacgaggatgcggacattgacgagagcgaggaatccgcagaggagtcaatcgcgatctctattgcacagatggagaagcggctgctgcatggcctgattcataatgtgcttccctacgtaggcacatccgtgaagaccctggtattagcgtattcctcagccgtgtccagtaagatggtgcgacaaatcctggaattgtgcccgaatctggaacacttggacttgacacaaaccgatattagtgactcagcatttgactcctggagctggcttggctgttgccagtccctccggcacctggatctgagcggatgcgaaaaaatcactgacgtggctctcgagaagatttccagagctctgggaatcctcacctcacaccagagcggctttctgaaaacaagcacctctaaaatcaccagtaccgcctggaagaataaagacatcacaatgcagtccacaaagcagtatgcctgtctgcatgacctcacgaataagggaatcggagaagaaatcgataatgagcatccctggacaaaacccgtctcttcagaaaactttaccagcccttatgtatggatgctcgatgctgaggacctggccgatattgaagatacagtggagtggcgccatcgcaatgtggagagtctgtgtgtgatggagaccgcatctaatttctcctgctcaacttccgggtgcttttctaaagatatcgtaggtctgcgaacctctgtgtgctggcagcagcactgcgcttcaccagctttcgcctactgcgggcattcattctgttgcactggaaccgccctgcgaactatgtcttccctgcctgaatctagcgcaatgtgcagaaaggccgccagaacacggctgccccgcgggaaggacctcatttatttcggctccgaaaagagtgatcaggaaactggtcgggtgctgttgttcttaagtctgtcgggctgctaccagattacggaccatggcctgcgcgtgcttactctgggggggggactaccgtacttagagcacctgaacctcagcggatgccttaccattaccggtgccggcctacaagacttagtgtcggcctgtccctccctaaacgacgagtacttctattactgcgataacatcaatggacctcatgcagataccgcttctgggtgtcagaatttacagtgcggcttccgagcctgctgcaggtcgggagaatag

SEQ ID NO: 187557 - DNA, 1440 bp, synthetic construct
  misc_feature 1..1440: note = Description of Artificial Sequence: Synthetic coding sequence
  source 1..1440: mol_type = other DNA
ggcaagggcagcagcagcatcagcagcgacgtgagcagcagcaccgaccacacgcccaccaaggcacagaaaaatgtggccactagcgaggacagcgatctttctatgaggacattgtccactccgagtccagcgctcatctgtcctcccaatcttcccggatttcagaacggccgaggatcctctaccagtagctccagcattacgggcgagaccgtggccatggtacacagtccaccacccacacggctgacacaccctttgattcggttagcctcaagaccccagaaggagcaggcctccattgacagattgcccgaccactctatggtccagatcttctcctttcttcctacaaaccaattatgccggtgcgcccgcgtttgtcggcggtggtacaacttagcttgggatccccgactgtggcgcactattcggctgacaggggagacgattaacgttgaccgagctttaaaggtccttacgcgaagactctgccaagacacacccaatgtctgtctcatgcttgagactgttactgtgtctgggtgccgaaggctgactgaccgcggtctgtatacaatagcccagtgctgtccagagctgaggagactagaggtatctggttgctacaacatcagcaacgaagccgtctttgatgtagttagcctctgtcctaacctggagcacctagatgtttcagggtgctcaaaagtgacctgtatttcactgacacgggaagcatcaatcaagctttcccccctacacggtaagcagatctcgataaggtacctcgatatgacggattgttttgtgttagaagatgaaggcctgcacactatcgctgctcactgtacccaactgacccatctctacttgcgtcgttgcgtgaggttaactgatgagggcctgagataccttgtgatctattgcgcatctatcaaggagctgtccgtttcggactgccggtttgtgagcgactttggactgagggagatcgccaagctggagtctcgcctccggtatctgtccatagcccactgcggcagggtaacggacgtgggcatccgctacgtggccaaatattgcagtaaactccgatacttgaatgcccgcggttgtgagggaattaccgatcatggggtcgaatacctggccaagaattgtactaaactgaagtcattagacatcggaaagtgcccacttgtgtctgatacaggcttagagtgtttagctctcaattgttttaacctcaagcggctctcgctgaaatcatgtgaatcgataaccggacagggactgcagattgtggccgcgaactgctttgacctgcaaacattaaatgtgcaggattgcgaggtgtccgtggaggccttacgctttgtgaaacggcactgcaaaaggtgtgtaatcgaacatacaaatcccgcctttttttag

SEQ ID NO: 187558 - DNA, 1476 bp, synthetic construct
  misc_feature 1..1476: note = Description of Artificial Sequence: Synthetic coding sequence
  source 1..1476: mol_type = other DNA
atgggcgccaacaacggcaagcagtacggcagcgagggcaagggctccagcagcatttcctctgacgtctcgtcctccactgaccatacaccgactaaggcccagaaaaacgttgcaacctccgaggattccgatttgagcatgcggacgctctccaccccatcccctgctctgatttgccctcctaatctacctggctttcaaaatggtcggggctcatccaccagctcgtcttccattactggagagaccgtggcaatggtacatagcccaccccctactagactcactcaccccctaattagactcgcttcccgccctcaaaaagagcaggcttctatagacaggctccctgaccacagcatggtccaaatcttctctttcctaccgacaaaccagctgtgccggtgtgccagagtttgccgtaggtggtacaacttagcatgggaccccagactctggcgcacaatccgcctaaccggtgagactataaacgttgaccgagctctcaaggtcctaacacgccgtctttgccaggacacccccaacgtgtgccttatgctagagacagtgaccgtgtccggatgccggagacttacagacaggggtctgtatacaattgcccagtgctgtcctgagctgagaaggcttgaggtctctggctgctacaacatcagtaacgaagctgtatttgacgttgtgtccctttgtccgaatctggaacatctggatgtttctgggtgtagtaaagtgacctgcatcagccttactcgggaggcttccatcaaactgagtccactccacggaaagcaaatctccatccggtatctggatatgactgattgctttgttctggaggacgaaggcctccacacaatcgccgcccactgtacccagctaactcatctgtacctgagacgatgcgttagactgactgatgaaggattgcggtacctggtcatttattgcgcctccatcaaagagctctctgtgtctgattgcagattcgtgagtgatttcggcctgagggaaattgccaagcttgagtcaaggctgcgctacctatccattgctcactgcggccgcgttaccgatgtgggcatccggtatgtcgccaagtactgctccaagttgcggtacctcaacgcgagggggtgtgaggggattacagatcacggcgtggagtaccttgcaaagaactgcacaaagctgaagtcattagacatcggcaagtgccctcttgtttctgacacagggctggagtgcctggctctgaactgttttaaccttaagagactgagcctgaagtcctgcgaaagcatcaccggacaaggcctgcagatcgttgctgccaattgctttgacctccagacccttaatgtacaggattgtgaagtgagcgtggaggccttgaggtttgttaagcgacactgtaaaaggtgtgtaatcgaacacaccaacccagcgtttttttag

SEQ ID NO: 187559 - DNA, 3000 bp, synthetic construct
  misc_feature 1..3000: note = Description of Artificial Sequence: Synthetic coding sequence
  source 1..3000: mol_type = other DNA
atggagaacctggagagccggctgaagaacgccccctacttccggtgcgagaagggaactgattctattccactgtgcagaaagtgtgagacctgtgtgctcgcttggaagatcttctcgaccaaggagtggttctgtcgcattaacgatattagtcagcgcagattccttgtgggcattttaaagcagctcaactctctatatctgttgcactactttcagaatattctccagacaacacaggggaaagacttcatctacaacagaagtcgtataaatttatcaaagaaggaaggaaaggtcgtgaagtccagcttgaaccagatgctggataaaaccgtggaacagaaaatgaaagagatcctctactggtttgccaactccacacagtggacaaaagctaattacactttgctacttctccagatgtgcaatcccaagctattgctaacagcagcgaatgtgatccgggtcttatttcttagggaggagaataacatcagcggcctcaatcaagatatcactgatgtgtgcttttcgcccgaaaaggatcactctagtaagagcgccacaagccaggtctattggactgctaagacacaacatacctccctgcccttatcaaaggctccagagaacgagcatctgttgggagccgcctccaatccggaagagccatggagaaattccctgcggtgtattagcgaaatgaataggttgttctctggtaagggagatataactaagcccggttacgacccctgcaatctgctggttgatttggacgacatccgcgacctgtctagtggtttttcaaagtatagggattttatccgttacctgcccatccacctgtccaagtacatcctccgaatgctggaccgacacactcttaataaatgtgccagtgtgtcacagcattgggccgcgatggcccaacaggtaaagatggacctgagcgcccacggcttcatccagaaccagattacattcctgcagggcagttatacgcgagggattgatccgaattacgcgaataaagttagcattccggtacccaagatggtcgacgacggcaaaagcatgcgagtgaagcacccaaagtggaagttacggacaaagaatgagtacaacctgtggaccgcctatcagaacgaagaaacgcagcaggttcttattgaggaaaggaatgttttctgtggcacatacaacgtgcgaatcctctctgatacctgggaccagaacagagtgattcactacagcggtggagaccttatcgcggtatccagcaaccgaaaaatccatttgctggatatcattcaggtcaaagccattcccgtggaattccgtgggcatgccgggagcgttagagcccttttcttgtgtgaagaagagaattttctgctgtccggatcctacgatctgtccataaggtattgggacttgaaaagcggcgtgtgtacacgcatcttcggcggacaccaggggaccatcacatgtatggacctgtgcaagaaccgactcgtctccggcggaagagattgtcaggtaaaagtatgggatgtcgacactgggaagtgcctgaagactttccggcataaagaccccatcctagccaccaggatcaacgacacctatatcgtaagtagttgcgagagggggttagtcaaagtatggcacattgccatggcacagctcgtaaaaaccctgtccggccacgagggcgccgtgaagtgtctgttcttcgatcagtggcacctgctatcaggctcaacagacggattggtcatggcatggagtatggttggcaagtacgaaaggtgcctgatggctttcaagcacccaaagatggttgtcaataccgaatcaaatgtactcatgttccagttcgaacacatcaagtggcagtatgccgtggagaagaccaaacagaaaaaaaacaaggagaaagaagaggagaaggaagaaaatagcttaatggagattctttcgaagtgtaacatccaagtgcacagtcccagagagtcagtgtcttctaagcaaaccgtgattcaggagcttctccctgggaagccgcctaagtccagggtcttgctgaagcctgccaagttcagtagcgctgttctgatcgaagagctgcagtcccagggtaagtcaaagtcaccacgcagagacgctgacgatgtggagaaggcccagaaacagggacagctggagactcctggaaagcttccttcacatcctaaaaagaagagctggaaaatacctatgtctccagaccaattcctgctgaccgtctctgctctgcagcatgcccacaattcaggtgagtttgcttacccgtgcaggccccagaccgagatcacagatgtgtggggcccaagcatttcttacccgcggaaggtgctgaatttcaaaggcaagagcattcaaagggccgtggacagactgcgcctcagtaatccacccatcgatgtgaagcggacaagtatcccactggaaatacaaaaattgcagccaaatctgaagatctcccttcatagcccccgggtccaaagtaccatcccccagccaatgatcatcaggtccaggtttagcggctcactcaaaggcggagatcaagtgaccagttctatcgaacgcgccgtctgcagcactggtcccctcacatctatgcaggtgatcaagccgaatcgtatgctggctccacaagtcggtaccgctacgcttagcctgaaaaaagagagaccaagaatttacactgccctggatccgttccgagtgaacactgaatttgtgcttctcactgtcaaagaggagaaggagcatcaggaggctaaaatgaaagaataccaggcgagagagtcgactggagtcgtcgaccccgggaaggtttccaaggcagcctggatccggaagatcaagggactgcccattgacaatttcaccaaacagggtaaaaccgcggcccctgagctggggcagaatgtatttatctag

SEQ ID NO: 187560 - DNA, 3186 bp, synthetic construct
  misc_feature 1..3186: note = Description of Artificial Sequence: Synthetic coding sequence
  source 1..3186: mol_type = other DNA
atggagaacctggagagccggctgaagaacgccccctacttccggtgtgaaaagggaactgattccatccctctatgtcgtaagtgtgagacctgtgtgttggcttggaaaatcttcagcaccaaggagtggttttgtcgcattaacgacatctcacaacggcgttttttagtgggcatactgaaacagctgaacagtctgtatctgctccactactttcagaacatcttacagactacacaaggcaaagactttatctacaaccggtcccgtatcaacttatctaagaaggaaggaaaggtggtgaagtcatccttaaatcagatgttggacaagaccgtcgaacagaagatgaaagaaatactctattggtttgccaacagtacccagtggacaaaggccaactacaccctgttgttactgcaaatgtgcaacccaaaattgctgctaacagccgccaacgttatcagggtactgttcctgcgggaggaaaacaatattagtgggctcaaccaggatatcactgatgtgtgtttttcgcccgagaaagatcattctagtaaaagtgccaccagccaggtatactggaccgcaaaaacacagcataccagccttccgctgtctaaggccccagaaaatgagcatctacttggagccgcaagcaaccccgaggaaccctggcgtaattcactcagatgcatttcagagatgaacaggctcttcagtgggaagggcgatatcacaaaacctggctacgacccttgcaaccttttagttgacttggacgacattagggacctctcttctggattttcaaaatacagggactttatacgatacttaccaatccacttgagtaagtacattctcagcatgctcgggtgtatgcggggttttcctaggcacctgcccagttggccatcctcaggagtgtctggtagcatctttttctttcctgggatgctggaccggcatacactgaataaatgcgccagcgtctcccagcactgggcagcaatggcccaacaggttaaaatggatctgagtgcgcatggatttatccaaaatcaaattactttcctccagggctcttataccaggggaattgatcctaattacgcaaacaaagtgtctataccggtgccgaaaatggtcgacgacggcaaaagtatgcgtgtcaagcatcccaagtggaagctccgcacaaaaaatgagtataatctgtggaccgcgtaccagaacgaggaaacccagcaggtgctaattgaagaaagaaacgtcttctgtgggacctataacgttagaatcctgtctgacacatgggaccaaaatcgggtcattcactactccggtggtgacctgatcgccgtctccagcaaccggaagattcacctgctggacatcatccaagttaaagctattcctgtggagtttagaggccacgcgggtagcgtcagagctttgttcctctgcgaagaagaaaactttctgttgagtgggagctatgacctgagcataaggtactgggacctgaagagcggagtgtgcaccagaatcttcgggggacatcagggaacaatcacgtgtatggacttgtgtaaaaacagacttgtgtctggcgggcgtgactgtcaggtgaaagtgtgggatgttgacacaggcaagtgtttaaagactttcagacacaaggatcccatcttagccaccaggattaacgatacctatattgtctcatcatgcgagcggggactggtaaaagtttggcacatcgctatggcccaactggttaagacgctgtcaggtcatgagggcgcagtcaagtgcctcttttttgatcagtggcacctgctcagcggatcgacagacggtctggttatggcctggtccatggtgggaaaatacgaacggtgcctaatggcatttaagcacccaaaggaagtcctggatgtgtctcttctatttctccgggtaatctcagcttgtgcggatggcaaaataagaatttacaattttttgaatggcaattgtatgaaggtcctgaaggcaaacggtcgcggcgatcctgtgctgtccttcttcatccagggaaatcggatggtggtgaataccgaaagcaatgtcctgatgtttcagttcgagcacatcaaatggcaatacgccgtggagaagactaagcagaagaagaataaggagaaggaagaagagaaagaggaaaactccctaatggagattctgagcaagtgtaatattcaagtgcacagtccaagggaaagcgtttcatctaaacaaactgtaattcaggagctcctgccgggcaagcctccaaagagcagagtgctgttgaagccagcgaaattctccagcgatgatgtagagaaggcccagaagcaagggcagttggaaaccccaggaaagctacccagccacccaaagaagaaaagctggaagattcctatgtcccctgatcaattcctgctgacagtctcggctcttcaacacgcgcataattccggtgaatttgcctatccatgcagacctcagaccgagatcaccgacgtctgggggccctccatttcatatccccgaaaagtcctaaacttcaaaggcaaatccattcagagagccgtcgaccgactacgactgtctaatcccccgatcgacgtcaaacggacgtccatcccactcgaaatccagaaactccagcctaacctcaagatcagcctccatagcccccgtgtgcagtccactattccccaacctatgataataaggtcaaggtttagcggaagtctaaaggggggggatcaggttaccagcagtatagaacgagccgtctgctccaccggcccgctgacaagcatgcaggtaattaaacctaatcgaatgctcgcgcctcaagttggaaccgccaccttgagcctgaagaaagaacggccccgaatctatacggcactggacccgtttagggtaaacacagagtttgtcctacttacagtaaaagaggagaaggagcatcaagaagcaaagatgaaagagtaccaggccagagaaagcacaggcgtggtcgacccaggaaaggttagcaaggcagcttggatccggaagatcaagggtctccctatcgataactttacaaaacaaggcaaaacagccgcgcccgagctgggccagaacgtattcatttag

SEQ ID NO: 187561 - DNA, 3159 bp, synthetic construct
  misc_feature 1..3159: note = Description of Artificial Sequence: Synthetic coding sequence
  source 1..3159: mol_type = other DNA
atggagaacctggagagccggctgaagaacgccccctacttccggtgtgagaaggggactgacagtatcccattatgcaggaaatgcgagacttgcgtgttagcttggaagatcttttcaaccaaggaatggttctgccgcataaacgacatatcacaaaggcgctttttggtgggaatattgaagcaactgaattctttatatctgttgcactacttccagaatatcttacagaccacacagggcaaggattttatttataatcgctcgcgtataaatctcagcaagaaggaaggtaaagtcgtgaagtcatcgttaaatcagatgctggacaaaacagttgagcagaagatgaaagaaatactgtactggttcgctaactcaactcagtggacgaaggcaaactataccctgctgctgctccagatgtgcaacccgaagctgctcttgaccgctgccaatgtgattcgagtgctgttcctccgcgaggagaataacatatccggcctgaaccaagacatcactgatgtctgcttttctccagaaaaggaccattcatccaaatctgccacctcacaggtatactggaccgccaagacccagcatacatcactgcctctatcaaaggcacctgaaaatgagcaccttctcggcgccgcctcaaaccccgaggagccttggcgtaatagcctgaggtgtatctcagaaatgaatagactgttctctggtaagggagacatcacaaagcccggatatgacccctgtaacttgttggttgatttagacgatatacgtgacttgtcctctggctttagtaaatatagagatttcatccgctatcttcccatccatctgtccaagtacattctgagaatgctcgaccgccatactctgaacaaatgtgccagcgtatcacagcactgggctgctatggcccagcaggtaaagatggatcttagtgcccacggttttatacagaatcagatcacattcttgcagggcagctatactcgaggaatcgaccccaattacgccaataaagtaagtatccccgtgcctaagatggtggatgatggcaaatctatgagggttaagcaccctaaatggaaactgcgcacaaaaaatgagtataatctttggaccgcctaccagaacgaagagactcagcaggtattgattgaagagcgcaatgttttttgcggaacttataacgtccgaatactgtctgatacctgggatcagaaccgggtgatccactacagcgggggcgacctgatcgccgtttccagtaataggaagattcatcttttagatattattcaggtaaaggccattccagtggaattccgggggcacgccggctcagttagagcgctgttcttgtgcgaagaagagaattttctactttccggaagttatgacctgtcaattcgatattgggatctgaagagtggggtgtgcacccgaattttcgggggccaccagggcaccatcacttgtatggacttgtgcaaaaatagactcgtgtccggaggacgagattgtcaggttaaagtatgggacgtcgataccggaaagtgccttaagacctttcgacacaaggaccctattttggcaacacgcattaacgatacatacattgtgagctcttgcgagcgaggcctcgtgaaagtttggcatatagccatggcccaactggtgaaaaccttgtcaggtcatgagggtgccgtcaaatgcctgttttttgatcagtggcatttgctgtctggctccactgacgggttggtgatggcctggagtatggtgggaaagtacgaacgttgcctaatggcatttaagcatcccaaggaggtgctggatgtctctttactgttcttgagggtgatatcagcctgtgccgacggcaaaatcagaatctacaactttctgaacggtaattgcatgaaggttttgaaggccaatggacgtggtgaccccgtactgtcgttctttatacagggtaacagaatggtggttaacactgagtccaacgttctgatgttccaatttgagcatataaagtggcagtatgcagtcgagaaaactaaacaaaaaaaaaacaaagagaaggaggaggaaaaggaagagaactctcttatggagatcctgtcaaaatgtaacatccaggtacattcacctcgcgaatcggtgagtagtaagcagacggtcatccaggaactgttgcctggtaaaccccccaaatctagggtgctgctaaagcccgccaaattctcgagtgcagtcctgattgaggaacttcaatcccaaggcaagagcaagagccccaggcgcgatgccgacgatgtggagaaggctcaaaagcagggccagctggaaacacctggtaaacttcctagccatcctaagaagaaatcgtggaagatcccaatgtctcccgaccagttcctgttgacggtgtcagctctgcagcatgcccacaatagcggcgagttcgcttatccatgcagaccccaaacagagattactgatgtctggggcccgagtatttcttacccacgcaaggtgttgaactttaaggggaagagcatccagcgagcggtggatcgattgagactctccaacccgcccattgatgtgaaaaggactagtattcccttagagatccagaagctccagcctaacctcaagattagcctccacagtccgcgcgtgcaaagtacgattccccagcccatgatcattcgatcaagattctccggcagcctcaaaggcggtgaccaggtgacatcctctattgaacgcgcagtgtgtagcaccggaccccttacatctatgcaagttatcaagcccaataggatgcttgctcctcaggtaggaactgccacactgtccctgaaaaaggagagaccaagaatctacactgccctcgatccatttcgggtaaataccgagttcgttcttctgacagttaaggaggagaaggagcatcaggaggctaaaatgaaggaatatcaggcccgagagtcaaccggtgtggttgaccccggaaaggtgtctaaggccgcctggatcagaaaaattaagggactcccgatcgacaactttactaagcaaggcaaaaccgctgctcccgagttagggcagaacgtgtttatttag

SEQ ID NO: 187562 - DNA, 3156 bp, synthetic construct
  misc_feature 1..3156: note = Description of Artificial Sequence: Synthetic coding sequence
  source 1..3156: mol_type = other DNA
atggagaacctggagagccggctgaagaacgccccctacttccggtgcgaaaaaggcaccgacagcattcccctgtgtaggaagtgcgaaacttgcgttctcgcatggaagattttttctactaaggaatggttttgccggattaacgacatatcccagcgcaggtttctggtggggatccttaaacaattaaacagcctgtaccttttgcactattttcagaacatccttcagaccacgcaagggaaagattttatttataacagaagtagaatcaacctgtctaaaaaagagggcaaggtggtcaagtccagccttaaccagatgctagacaaaacagtcgaacagaagatgaaagagattctctactggttcgcaaacagcacacagtggacaaaagctaattatacactgcttttgttacaaatgtgcaatcccaaactgttacttactgcagccaacgtcattcgagtgctatttctcagggaggagaacaacatttcaggtttaaaccaggatatcactgatgtgtgtttcagtcccgagaaggaccatagttccaaatccgcaacaagtcaggtctattggacggctaagacacagcatacgtcgttgcccttatcgaaggcaccagagaacgagcatctgctgggcgccgctagcaaccccgaggaaccgtggagaaatagcctgcgttgtatatccgagatgaaccgcttgttctcgggcaagggggacatcacaaaacccggatacgacccttgcaacctgctggtggaccttgacgatatcagagacctgagctccggattcagcaagtatcgcgatttcatccggtacctgccaatccacttgtctaaatatatacttagaatgctggacaggcacacattaaacaagtgcgcttccgtgtctcaacattgggccgccatggcgcagcaggttaaaatggacttatctgcacacggattcattcagaatcagattacttttctccagggcagctataccagagggatcgaccccaactacgccaataaagtgtccattcctgtgcctaaaatggtggacgatggcaaaagtatgagggtgaaacatcctaagtggaagctccgcaccaagaatgagtacaacctatggacagcatatcaaaatgaggagacacagcaggtgctgatagaagagcgcaatgtcttttgcggaacatataacgtccgcatccttagtgacacttgggaccagaatcgggtgatccattacagcggcggcgatcttatagctgtttcttctaacagaaagatccacctgctcgacataatccaggttaaggcaatcccagtggagtttcgcggacatgcaggctctgtgcgggccctctttttgtgtgaagaagaaaactttctcctgtcagggtcatacgaccttagcatcaggtactgggatctgaaatctggggtgtgtacccggatctttggcgggcaccaggggacaataacgtgcatggacctgtgcaagaaccggttagtcagcggcgggcgggactgccaggtgaaggtttgggatgtagataccggcaaatgcctaaaaacattccgacacaaagacccgattctggcaacccgaattaacgacacgtatatcgtatcgtcctgtgaaagggggctcgtgaaggtatggcacatcgccatggcacagctggtaaaaacccttagcggccatgagggtgcggtgaaatgcttgttcttcgatcagtggcacctccttagtggctcaacagacggactcgtgatggcgtggagtatggtggggaagtacgagcgctgtctaatggccttcaaacacccaaaagaggtgctggatgtctcgctgctgttcctccgggtgataagcgcctgtgccgatggcaagataaggatctataacttcctaaatggcaactgtatgaaggtgttgaaggcaaacggaagaggtgatccagtgcttagcttttttatccaaggcaatcggatggtggtgaacacagagtcgaacgttcttatgtttcagtttgagcatatcaaatggcagtatgccgtggagaaaacaaagcagaaaaagaataaggaaaaggaggaggagaaagaggaaaactctttgatggaaattctctccaagtgcaatatccaggttcacagccctcgggaatccgtgtcatctaagcagaccgtcatccaggaactcctccctggaaagccacccaagtcccgagtgttgctgaagccagctaagtttagtagtgcagtgcttatcgaagaacttcagtctcagggcaaaagtaaatctccccgaagggacgacgacgttgaaaaggcgcagaagcaaggccagctggaaacccctgggaagctcccatcacatcctaaaaagaagtcttggaagattcccatgagcccagaccagtttttgctgactgtctcagccttacagcacgcccataattctggggagttcgcttatccctgcaggcctcaaaccgagatcacggatgtgtggggaccatccatcagttacccgagaaaagtgctcaacttcaagggcaaaagcatccagcgggctgtcgaccggctaaggctttctaacccgcccattgacgtgaaaagaacctctattccgctagaaatacagaaactacagcccaatctgaaaatctccctgcacagcccacgggtccaatctacaattccccagccgatgatcattaggagcagattcagtggctcacttaaaggcggagatcaggtgactagttccatcgaacgcgctgtgtgttctacggggcccctcacttcaatgcaagttattaagcctaataggatgcttgcaccccaggtgggcaccgcgacgctgtcactcaagaaagagcgaccccgaatttacactgccctcgacccctttagagtgaacaccgagtttgtcctccttacagtgaaggaggaaaaagaacaccaggaagccaaaatgaaggagtatcaggccagggaatctactggagtggtcgaccctgggaaagtatccaaagccgcttggatcaggaagataaaggggctgcccatcgataatttcaccaaacaggggaagacagcagcaccagagttggggcagaacgtgtttatatag

SEQ ID NO: 187563 - DNA, 1629 bp, synthetic construct
  misc_feature 1..1629: note = Description of Artificial Sequence: Synthetic coding sequence
  source 1..1629: mol_type = other DNA
atggagcccgacagcgtgatcgaggacaagaccatcgagctgatgtgcagcgtgccaagatccctttggctcggatgcgccaatttggtggagagcatgtgcgccctgtcttgcctgcagtccatgccctcagtgagatgcttgcaaataagcaatggtaccagctccgtcatcgtaagtcggaaaagacctagcgagggcaactatcagaaggagaaagatctgtgtataaagtactttgaccaatggagcgaatccgatcaagtagaatttgtggagcatttaatttccagaatgtgtcactaccagcacggacacatcaattcctaccttaaaccaatgcttcagcgcgatttcataacggccctccccgagcaaggactagaccatattgccgagaatatactctcttacctggatgctcgctcactctgtgccgccgagctggtctgtaaggagtggcaacgagtcatctcggaagggatgttatggaaaaagctcatcgaacgcatggttagaaccgatccgttatggaaaggcctgagtgagcggcgaggttgggaccagtatctgtttaagaaccggccgaccgatgggccaccaaattctttttatcgcagcctctatcccaagatcattcaggatattgagacgatagagtccaattggaggtgcggcaggcataaccttcagagaattcagtgccggagcgagaacagcaagggagtgtattgtctgcagtacgacgacgagaaaattatatctggccttagagataacagtataaagatatgggacaaaacctcacttgagtgtctaaaggtgctgactgggcacaccggctcagtgctgtgtttacagtatgacgaaagagtcatcgtgaccggaagctctgacagcaccgttagagtttgggatgtaaatacaggggaagttctgaacaccctgatacaccacaacgaggccgttttgcacctgcgattcagcaacggccttatggtcacatgttctaaagatcgaagcattgctgtttgggatatggcaagcgcgactgacatcacattgaggcgcgtcctcgttggacacagagccgccgtgaatgtagtggacttcgatgataagtatattgtctccgcatccggcgataggacaatcaaagtttggtctacttccacgtgtgagtttgttcgcaccctgaacggccataagagaggaatcgcctgtctacagtacagggaccggttggtcgttagtggcagctccgataacactattcgcctttgggacatcgagtgcggtgcctgcctccgtgtactggaaggccacgaggaactggtccggtgtatccgttttgacaataagaggattgtttcaggggcgtacgacggaaaaatcaaggtttgggatctgcaggccgctctggacccacgggctccggctagcactctctgcctgcggacccttgttgaacactccgggcgagtgtttcgcctccaatttgatgagtttcagataatttcctcgagccacgacgatacaattctgatttgggattttctcaatgtgcctccaagtgctcagaacgaaacccgcagcccatctcgcacctatacttacatcagtcgctag

SEQ ID NO: 187564 - DNA, 1590 bp, synthetic construct
  misc_feature 1..1590: note = Description of Artificial Sequence: Synthetic coding sequence
  source 1..1590: mol_type = other DNA
atggagcccgacagcgtgatcgaggacaagaccatcgagctgatgaacacctctgtaatggaggatcagaacgaagacgagtcacctaagaagaataccctttggcaaattagtaatgggacatcgagtgtcattgtttctcgaaaacggcccagtgagggaaattaccaaaaagagaaggacctctgtattaaatattttgatcagtggagcgagagcgatcaggtcgaatttgtcgagcacctgatcagtaggatgtgccattatcaacacgggcacataaacagctacctcaaaccaatgcttcagcgtgattttatcacagctttgcctgagcagggccttgatcacattgcggagaatattctatcctatctggatgctcgttccctgtgcgctgccgaactggtctgtaaagaatggcagagggttatttcggagggcatgctgtggaaaaaactaattgaacggatggtccgaactgatcctctgtggaaagggctcagtgagagaagggggtgggaccagtacctgttcaaaaatcgccccaccgacgggccccccaactcattttataggtccttgtaccccaagatcattcaggatatcgagaccatcgaatccaattggcggtgcggaaggcataatctacaaagaattcagtgccgctccgagaacagcaaaggtgtgtattgcctgcagtacgatgatgagaagattatctccggacttcgtgacaattcaatcaaaatttgggataagacctcactggaatgccttaaggtactaacaggtcatacgggcagcgttctgtgtctacagtatgacgaaagggtgattgtgacgggcagttctgattcaaccgtgcgtgtgtgggatgtgaacacgggtgaggtcctgaacaccctgattcaccacaacgaggcagttctgcacctgcgtttctcaaatggacttatggtgacatgctctaaagaccgaagtatcgccgtgtgggatatggcgtccgcaaccgatatcaccttaagacgcgttctcgttgggcatagggctgctgtcaatgttgtggattttgatgataagtacatagtcagtgcctctggagacaggactattaaggtgtggtctacttcgacttgcgagttcgtcagaacgctgaacggccataagcgggggatcgcatgtttacagtatcgcgaccggctcgtggtttctgggtcctcggataacaccataaggctttgggatatcgagtgtggcgcttgcctccgggtgctggagggccatgaagagttggtccgatgtattcgcttcgacaataagaggatagtttccggagcgtacgatggtaagataaaggtgtgggacctacaggcagcgttggacccccgcgcgccggcttccaccctgtgcctcagaaccctcgtggagcactcgggaagggtctttcggttgcagtttgatgagttccagattatctcgtcctcccatgacgacactattctaatctgggacttcctcaatgtgccccctagcgcgcagaacgagactcgcagtccatctcgaacttacacctacatctctcgatag

SEQ ID NO: 187565 - DNA, 1527 bp, synthetic construct
  misc_feature 1..1527: note = Description of Artificial Sequence: Synthetic coding sequence
  source 1..1527: mol_type = other DNA
atggagcccgacagcgtgatcgaggacaagaccatcgagctgatgatctcgaatggtacctcctctgtaattgtatctcgaaaaagaccttcagagggtaactatcagaaagagaaggatctgtgtatcaagtatttcgaccaatggagtgaaagtgaccaggtggagtttgtcgagcacctcatttcaaggatgtgtcactaccagcacggtcatataaactcatatctcaaacccatgcttcaaagagacttcatcacagctctgccagagcaaggcttagaccatattgccgaaaatattctgtcataccttgatgctcggtcgctctgcgccgccgagcttgtgtgtaaagagtggcagagagtgatctcagagggaatgctgtggaagaagctcattgaaaggatggttaggacggatccactgtggaaagggctctctgagaggaggggttgggatcagtatcttttcaagaatagacctacagatggcccgcccaactcattttatagaagcctgtatcccaaaatcattcaggacatagaaactatcgagagcaattggcgatgcggaagacacaacctacaacgcatacagtgccgctcagaaaatagcaaaggagtctactgtctgcagtacgacgatgagaaaatcatcagcggcctgcgggacaactctattaagatctgggataaaacatccctcgaatgcctcaaagtgctgaccggacacaccgggtcagttctgtgcctgcagtacgatgagagagtaattgtgactggctccagtgactccactgtccgagtttgggacgtcaatacgggggaggtgctgaacacactcattcaccataacgaggccgtgttgcacctcaggttcagcaacggtctcatggtgacgtgtagtaaggacaggagtatagcagtctgggatatggcgtcagcaaccgacatcacgctccgccgggtactggtagggcacagggctgctgtgaatgtggtggattttgacgacaaatatattgtgtccgccagcggagaccgtaccatcaaagtgtggtccaccagcacttgcgaattcgttcggactcttaacggacacaagagagggatagcttgcttacagtatcgcgatcgcctggtagtgagcggaagttctgacaatacgatacgactgtgggacatcgagtgcggagcctgtctgcgagttctcgagggtcacgaagagttggttcggtgcatccgatttgataacaaaaggatcgtttcaggggcttacgacggcaagatcaaggtctgggacctccaggcagcactggaccccagagctcccgcttcaacactgtgcctccgcaccctcgtagaacatagcggccgggtgttcagactgcagttcgacgaatttcagataatctctagttcccacgacgacaccattctcatatgggattttttaaacgtccctccgtctgcccagaacgaaacccgctcaccctctcgcacctacacttacataagcaggtag

SEQ ID NO: 187566 - DNA, 1533 bp, synthetic construct
  misc_feature 1..1533: note = Description of Artificial Sequence: Synthetic coding sequence
  source 1..1533: mol_type = other DNA
atggaggaccagaacgaggacgagagccccaagaagaacaccctgtggcagatcagcaacgggacgtcgtcggtcatcgtgtctagaaagcgcccatctgaggggaattaccagaaagagaaagacctctgcatcaaatactttgatcagtggtccgaatctgatcaagttgaatttgtcgaacatctcatttctagaatgtgccattaccagcatggtcatattaactcatacctgaagccaatgctgcagagagactttatcaccgctctaccagaacaaggcctcgaccacatcgctgagaacattctatcctatctggacgctcggtccctgtgtgcggcagagcttgtgtgcaaggagtggcaacgggtgatttccgaagggatgttatggaaaaaacttatcgaaagaatggttaggacagacccactgtggaagggcttaagcgagcgtcgaggatgggaccagtacctttttaagaatcgtcctacagacggcccccctaacagcttttataggagcctgtaccctaaaatcatccaggatattgagaccatcgaatccaactggaggtgtggaagacacaatctgcagagaattcagtgccggagtgaaaactccaaaggcgtgtactgtctgcagtacgacgacgagaaaatcataagtggcctgagggacaattcaatcaagatctgggacaagacatctctggaatgtttgaaggtgctaacagggcacaccggatctgttctgtgcttgcagtacgacgagcgagtcatcgtgacaggaagctcagattccacggtgagggtctgggacgtcaatactggggaggtgttaaacactctgattcaccataatgaggcggtactacacctccgtttctcaaatgggctgatggttacgtgctcgaaagatcggtcgatcgcagtgtgggatatggcttccgctaccgatatcactctgaggagagtactggtgggccacagagcagcagtgaacgtcgtggacttcgacgacaagtacattgtctctgcatctggcgataggaccatcaaggtttggtccacgtccacatgcgagttcgttcggacattgaatggccacaagcgcggcattgcctgcctgcaatatcgcgataggcttgtggtgagtggatcttcagacaatacaatccgtttatgggatattgagtgtggggcctgtcttcgcgtgttagagggccacgaagaactcgtacggtgcattagatttgacaacaagaggatcgttagcggtgcctatgacggaaagatcaaggtttgggatctccaggccgctctggatcccagggcgccggcctccactctgtgcttgcgaactctcgtggaacacagcgggagagtattcaggctgcagttcgacgaatttcaaatcatctcttctagtcacgacgacactatcttaatatgggatttcctgaacgtgccaccctctgcacagaacgaaacacggtcacctagtcggacctatacctacatttccagatag

SEQ ID NO: 187567 - DNA, 1395 bp, synthetic construct
  misc_feature 1..1395: note = Description of Artificial Sequence: Synthetic coding sequence
  source 1..1395: mol_type = other DNA
atggagatccggctgcccgacctggccctgaagcggatcttcagcttcttagacctcttcggactgctgcaggtctcccaggtcaataaacactggaatagaatagccgactccgattatctctggcgcagcctctcgttacagaggtgggattgctccaattttacgaatcaacatctagggacacacacatggaagcagttttttcttcaccagaggaggaaggagttgagactagcactggcacagcctcacaacttcatttataaggtgacaaaaaatattgccttcgaaactgagctggcttatctgtctggcaaccggctcaccgtggacgaacaggagaaatcgatcatctgtagcgtgtctcccaagcaagaactgtgtgcatgggatgtgcaagagggcaccatgatttggagcagcccagtgcaggagttccactttagtaacctcgtgacactgccccagatgcatctcgcgattaccatggaccgtaaaaagactatcaaagtctggaactgtcaggaccgggacgccctcgctgtgctcccaatgccgcaaccgtgctactgcatggaggcatacctgacaaaagacggcccattcttaatggtgggggatgctgcgggggacatctacactttcacgcttccagggttaagagacgtcagtaaagtgactgcatttcagtacgggatcgtcctcctgcactgttcacctgacaaaaagtgggtgttcgcatgtggcacatactctagaacacttccccaggtctttctcaccgaatctctgttgagaccaagtgagggatcagtgcctctgtcgacttttctgccacacaagctgtgtgccagcgcctgctggacccctaaagtgaagaaccgcattactctgatgtcacagtccagcactggcaaaaagacagagttcattaccttcgatctgaccactaagaaaactgggggccaaaccgtcattcaggcatacgagatcgccagcttccaggtggccgcccacttgaagtgtcctatctggatgggcgccagtgacggatatatgatagtgtttaccagcggtccttatctgctgcttttttccattaccgggttcttgctgcagcgttttgaggaccatcaagccgcgattaataacttttgggtagatccatgctatgttctcaccacaagtgagaatagcgttcatgtctacatgtgggaagagggaggcagacacccttacttgcggtcttgttgccatctggagaatacctggcacgatcatactactgactcttgcatatcttctgtgatgtgcgataacgcctcaatcgtgctcagggtcaggaaagtaagtgacagttcaatcctagttatgtactcccttaatacttag

SEQ ID NO: 187568 - DNA, 1092 bp, synthetic construct
  misc_feature 1..1092: note = Description of Artificial Sequence: Synthetic coding sequence
  source 1..1092: mol_type = other DNA
atgctggccctgcgggacgagccccacagccccgacagccggagccaggcttttgaaacagaactcgcatatctgtctggtaataggttaactgtcgatgagcaggagaagagcatcatttgttctgtcagccccaagcaggagctttgcgcttgggatgttcaagagatgcatctagcgattaccatggatcgaaagaagactattaaggtgtggaattgccaggaccgagatgctttagccgtgctgcccatgccccagccttgctactgtatggaggcttatcttaccaaggacggtccatttctcatggtaggcgacgctgccggtgacatttataccttcacactgcccggattgagagacgtgtccaaggtcacagcatttcagtacggcatcgtgctgctccattgctcaccagataagaagtgggtgttcgcttgtggcacatactccagaacgttaccccaggtgttcctgacagaatccctgcttcgccctagtgagggctcggtgcccctgagcacctttttgccacacaagctgtgcgcctccgcatgctggacgccaaaagttaaaaatcgtatcaccctgatgtcccagtcttccacgggaaaaaaaaccgagtttatcaccttcgatctgacaactaagaagaccgggggccagaccgtcatccaggcatacgaaatcgcgtcattccaggtagcagcgcatttgaagtgtccaatctggatgggcgcatccgacggctacatgatcgtgtttacctccggaccatacctccttctgttctccatcaccggtttcctcctacagcgtttcgaagaccaccaggcagcgattaataacttctgggtggacccatgctacgttctgactacatccgagaactcggtgcacgtatacatgtgggaagaggggggcagacacccttacttaagatcctgttgtcatcttgagaacacatggcacgatcacactaccgactcgtgcattagcagcgtcatgtgtgataatgccagcattgtcctccgggtgcggaaggtgtcagacagctcaatcttagtgatgtattcactcaatacatag

SEQ ID NO: 187569 - DNA, 1185 bp, synthetic construct
  misc_feature 1..1185: note = Description of Artificial Sequence: Synthetic coding sequence
  source 1..1185: mol_type = other DNA
atggagatccggctgcccgacctggccctgaagcggatcttcagctttcttgacctgttcggactgttgcaggttagtcaagtgaataaacattggaacagaatagcggattcagattatctttggcggtccctttctttacaacgctgggattgctctaatttcacaaatcaacatctggggacccacacatggaaacagttctttctccatcagcgacgcaaggagcttaggctagcactcgcccaaccacacaacttcatttataaggtgacaaagaatatcgcctttgagaccgagctggcttatcttagcggcaaccgcctgaccgttgatgagcaagagaaatccattatttgctccgtgtctcctaagcaggagctttgcgcttgggacgttcaggaagtcggagacgccgcgggagacatctacaccttcactctcccggggcttagggacgtcagcaaagtcacagcattccagtatggaatcgtactccttcactgttcccccgacaagaagtgggtgttcgcctgcggcacctattctcgtaccctgccccaggtgttcttgactgaaagcctactacgcccaagcgagggctccgtgcctttaagcacgttcctgccacataaactctgtgccagtgcatgttggactcccaaagtcaagaataggatcaccttgatgtcacagtcctcgaccgggaaaaagactgagttcatcaccttcgatctgacaacgaaaaaaaccggcggacaaactgtcattcaagcgtacgaaatcgcctcttttcaagtggcagctcacttgaaatgtccaatctggatgggtgccagcgatgggtacatgatcgtgtttacgtccggcccctatctgctgctattttcaataacaggatttttgctccagcggttcgaggaccatcaggctgctattaataatttttgggtggacccctgctatgtgctgacaacttctgagaactccgtgcatgtatatatgtgggaggaggggggccggcatccttatctgcgaagctgttgtcatctggagaacacttggcacgatcataccaccgattcctgtataagcagtgtgatgtgtgacaatgccagcattgtgctgcgggtgcgcaaagtgtcagattcatcaatcttggtcatgtacagcctgaacacatag

SEQ ID NO: 187570 - DNA, 1338 bp, synthetic construct
  misc_feature 1..1338: note = Description of Artificial Sequence: Synthetic coding sequence
  source 1..1338: mol_type = other DNA
atgagccccacccaccagatccaggaccccaagcactggaaccggatcgccgattctgactacctttggcggagcctgtctcttcagcggtgggactgttccaactttactaatcagcatctcggaacccacacttggaagcagttttttctgcatcagcgcaggaaagagctaaggcttgccttggctcagccacacaacttcatttacaaagtgactaaaaatattgcattcgaaaccgaactcgcctatctgtctggcaaccggctgactgtggatgagcaagagaagagtatcatctgctcagtcagtcccaagcaggagctgtgtgcttgggatgtacaggagggcactatgatttggtcctcgccggtgcaagagttccactttagcaacctagttaccctcccccagatgcacctggcaataaccatggaccggaagaagaccatcaaggtgtggaactgccaagaccgcgatgccctggccgtcctcccaatgccacagccttgttattgtatggaagcatatctcaccaaagacggcccattcctgatggtcggtgacgctgccggagatatttatacattcactcttccaggtttgcgagacgtctccaaggtgacggctttccagtatgggattgtgctgttgcactgctctccagacaaaaagtgggtgtttgcatgcggaacctattcccgcacactgcctcaggtgtttctgaccgaatccctgctcaggcccagcgagggcagtgtgccactgagcacattcctgccacacaagttgtgcgcctcagcgtgctggacaccaaaagtgaaaaacaggatcactctcatgagtcagtcttctacaggtaaaaagacagagtttatcacatttgaccttactacgaaaaagactggcggacagaccgtcatccaggcttatgaaatcgcttcctttcaggtggcagctcacctgaagtgtcccatctggatgggggcgagcgacggctacatgatcgtgtttacgtctggcccctatctgttgctttttagtattacagggttccttctgcagcggtttgaagaccatcaggctgcaatcaataacttctgggtcgatccatgctacgtcctcaccacttcagaaaactctgtccatgtctacatgtgggaggaaggtgggcgacatccctatctccggtcctgctgccacctggagaacacatggcacgatcataccactgattcatgcatctcatccgtgatgtgtgataatgctagtattgtgctgagagtacgaaaagtgagtgactcctccatcctcgttatgtattcgctgaacacttag

SEQ ID NO: 187571 - DNA, 1239 bp, synthetic construct
  misc_feature 1..1239: note = Description of Artificial Sequence: Synthetic coding sequence
  source 1..1239: mol_type = other DNA
atggccgccgccgccggcgaggaggaggaggaggaggaggccgccagagagtctgcagcacgcccagcggcaggtcctgcactgtggcggctccccgaagaattacttctcctgatctgctcctacctcgatatgagggctctgggtagacttgcacaagtgtgccgctggctcaggaggtttacatcatgtgatctcctatggcgaagaatagcccgagcatcactaaatagcggctttactagattgggtaccgaccttatgaccagcgtcccagtcaaagaaagggtgaaggtgtcacaaaactggagattggggagatgtcgcgaagggatactgctcaaatggcggtgccggcagatgccctggatgcagcttgaggatgactccctgtatataagccaggccaactttatactggcctatcagttcaggccagatggagcttcactgaaccgccgaccactgggggtgttcgcaggtcatgacgaggatgtgtgccactttgtactcgccaactcgcacatagtctccgccgggggtgacggtaaaattggcattcacaagattcacagtactttcaccgttaaatactccgcccacgaacaggaagtaaactgcgtggattgcaagggtggaattattgtatctgggtctcgtgaccgcacggcaaaggtgtggccccttgcatctggacgcttggggcagtgtttgcatacgatccagactgaggacagggtgtggtccatcgccattagtccgttgctcagctctttcgtcactgggacggcgtgttgcggtcatttctcaccactgcgaatatgggacctaaactcgggccagctgatgacccatctcggttctgacttcccaccaggggccggtgtgttggacgttatgtatgaaagcccctttacactcctgagctgcgggtatgacacttacgtaaggtattgggacttgcggacaagtgtcagaaagtgtgtgatggagtgggaggaacctcatgatagcacactctattgtctacaaacagacgggaaccacctgcttgccaccggatcctcatattatggcgtagtgcgactctgggatcgccgtcagcgtgcctgtctgcatgctttcccgctgacctcgacaccacttagtagtccagtctactgtctcaggctcacgaccaaacacttgtatgctgcactgagttataatctgcatgtgttggactttcaaaatccgtag

SEQ ID NO: 187572 - DNA, 1239 bp, synthetic construct
  misc_feature 1..1239: note = Description of Artificial Sequence: Synthetic coding sequence
  source 1..1239: mol_type = other DNA
atggccgccgccgccggcgaggaggaggaggaggaggaggccgcccgagaatccgccgcacgccctgctgccggtcccgccctttggcggctgccggaagaactgttgctgctaatctgcagctacctggacatgagagccttgggtcgtctggcccaggtatgtcgatggctgcgccgattcacatcctgtgatctgctgtggcgcagaatagctagagcttcactgaacagcggcttcactcgtctaggcaccgacctaatgacttctgtgcctgtcaaggaacgagtcaaagtctcgcagaattggagacttgggcgctgtagggaaggcatactgctgaaatggaggtgttcccagatgccctggatgcagctcgaggatgacagcctgtatatctcacaggccaactttattctcgcatatcagtttcgccctgatggggcaagccttaacaggagacctcttggcgtgtttgccggccacgatgaggatgtgtgccacttcgttctggcgaatagtcatatcgtcagcgccggtggcgacggaaagattggaatccataaaatccactctacatttaccgttaaatattcagcacatgagcaagaggtgaattgcgtagattgcaagggcggaatcattgtgtccggctccagggaccgaacagcaaaagtgtggcctcttgccagcggacggctgggtcagtgcctccacactatacaaaccgaagatcgggtgtggagtatagctatttctcccctgctctcatcattcgtgaccggcacagcatgttgcgggcatttctctcctttgcggatttgggatctgaacagcggccaattaatgacacacttgggaagtgacttcccgccaggagccggagtgctcgatgtcatgtatgagagcccttttaccctgctctcctgcggatacgacacatacgttaggtattgggacttacggaccagcgtacgtaaatgcgttatggagtgggaggaaccccacgatagcaccctttactgcctccaaacagacggaaaccacctactagcaaccggctccagctactacggcgtggtgcggctctgggatagaagacagcgggcgtgcttgcatgcgttccccttgacttctactcccctcagttcccctgtctactgcctgagattaaccactaagcacctatatgccgcattgtcatacaatttgcatgttctggactttcaaaacccctag

SEQ ID NO: 187573 - DNA, 639 bp, synthetic construct
  misc_feature 1..639: note = Description of Artificial Sequence: Synthetic coding sequence
  source 1..639: mol_type = other DNA
atgcgggccctgggccggctggcccaggtgtgccggtggctgcggcgttttactagttgcgacctgctgtggcgcagaattgcacgggcctctttgaactccggctttacacgcctggggacagacttaatgacctccgtgccagtgaaagagagggttaaggtttcacaaaactggcggcttggcaggtgtagagaaggaatattgctcaagtggaggtgcagacagatgccgtggatgcagctggaagatgattctttatacattagtcaggccaattttatactggcctaccagttccgacctgatggagccagtctcaatcgcaggccgctgggagtgttcgcaggccatgatgaagacgtctgccattttgtgctggcgaacagtcatatcgtttcggctgggggagacgggaaaatcgggatacacaagatacactctacctttaccgttaagtactccgctcacgagcaggaggttaactgtgtggattgtaagggaggaattattgtctccggctctcgggacagaacagcaaaggtgtggcctctggcttccggcagactcggccagtgcctgcacactattcagaccgaggatagagtgtggtcgatcgctataagccccctcctctag

SEQ ID NO: 187574 - DNA, 576 bp, synthetic construct
  misc_feature 1..576: note = Description of Artificial Sequence: Synthetic coding sequence
  source 1..576: mol_type = other DNA
atgaccagcgtgcccgtgaaggagcgggtgaaggtgagccagaactggcgtctgggcagatgtcgagagggtatacttctgaagtggcgttgccgtcaaatgccctggatgcagctagaggacgattctctctacatctcacaggctaacttcatcctggcctaccagttcaggcccgacggtgctagcctgaacagacggccacttggagtgtttgcaggacatgacgaggacgtttgccatttcgtgctggcgaattcccacatcgtgtctgcgggcggggacggtaagataggtattcacaagatccatagtaccttcactgttaagtacagtgcccatgagcaggaagtcaactgcgtcgattgtaaaggcggaattattgttagcggcagtagggacaggacagctaaggtttggcctctggcttcaggtagacttggccagtgcttacatactattcagacagaagatcgagtgtggtcgattgccatcagccctctgctgagcagctttgtgaccggtactgcctgctgtgggcatttttccccattgagaatctgggacctgaactag

SEQ ID NO: 187575 - DNA, 1884 bp, synthetic construct
  misc_feature 1..1884: note = Description of Artificial Sequence: Synthetic coding sequence
  source 1..1884: mol_type = other DNA
atgtgcgtgccccggagcggcctgatcctgagctgcatctgcctgtactgcggcgtgctcctacctgttttgttgccaaatctcccttttctgacatgcttgtctatgtccacgcttgaaagcgtaacatacctgccagagaagggtctgtactgtcagagactccccagctcacggacgcacggtggaactgagtccctgaagggaaaaaacacggaaaacatggggttctacggaactctcaagatgatcttctacaagatgaagcgtaagctggatcatggcagcgaggttcggagctttagcctagggaagaagccatgtaaagtctccgaatacacttcaaccactggcctggttccatgctcggcaacacctactacttttggggacctccgagcagcaaacggccaaggtcaacagaggcgaagaataacctctgtgcagccaccgactggcctgcaggagtggctgaagatgttccagagttggagtggcccagaaaagcttttggccctagacgaattaattgatagctgtgagcctacgcaggtgaagcacatgatgcaggtcatcgaaccacagttccaacgcgactttattagccttttacctaaagagttggcattgtacgtgttatcttttctagaaccaaaggacttgttgcaagctgcccagacctgcaggtattggaggatcttagccgaggataacttgctgtggcgcgagaagtgcaaggaggagggcattgacgaacctcttcacattaaaagaaggaaagttatcaaaccgggcttcatccattcgccctggaagtctgcatatattcggcaacaccggatcgacacaaattggaggcgaggcgagctgaagagccctaaggtcctgaagggccatgacgaccatgtgatcacttgcctacaattttgcgggaatagaatcgtttctggtagtgacgataacaccctgaaggtgtggtccgccgttacagggaagtgtttacgaaccttggtgggccacaccggaggtgtgtggagctcacagatgcgggataatatcattatatcgggctccaccgatcgaacgctgaaagtctggaatgccgagactggcgagtgcattcatacattgtatggccatactagcaccgtgcggtgtatgcatctacacgagaagagggtggtcagcggcagtcgtgacgccaccttgcgcgtgtgggacatcgaaaccgggcagtgcctgcacgtcctcatgggccacgtcgccgccgtgcgatgcgtgcagtacgacgggcgtcgtgtggtgtccggagcatatgactttatggtgaaagtttgggacccggaaacagaaacatgcttgcatacccttcagggacatactaatagagtgtattcattacagttcgatgggattcatgtcgtgtcgggctccctggatacttccatcagagtgtgggacgtagagacgggaaactgtattcacacacttaccggacatcagagcctgacatccggcatggaactcaaggataatatcctagtgtctggcaacgccgatagcaccgtaaagatctgggatatcaaaacagggcagtgcttgcaaactctgcaggggccaaacaagcaccaatcagcagtcacatgcctgcagttcaacaagaatttcgttatcacctcgtcagatgacgggactgtgaaactatgggatttgaagacgggcgagtttattagaaacttagtgactttggaaagtggcggcagtgggggagtcgtctggcgcatcagggcaagtaatacaaagctggtctgcgccgtcggttcaagaaacggtacagaagagacaaagctcctcgttctagacttcgacgtggacatgaaatag

SEQ ID NO: 187576 - DNA, 2124 bp, synthetic construct
  misc_feature 1..2124: note = Description of Artificial Sequence: Synthetic coding sequence
  source 1..2124: mol_type = other DNA
atgaaccaggagctgctgagcgtgggcagcaagcggcggcggaccggcggctcacttagaggcaacccatcttccagccaggtcgacgaggaacagatgaatcgggtggtcgaagaggagcaacaacagcagcttcggcagcaagaagaggaacacactgctcggaatggtgaggtggttggagtggagccacgacctggaggtcaaaacgactcacagcaggggcagcttgaagagaataacaacaggttcatatcagtcgacgaggattcttccgggaatcaggaagagcaggaggaagatgaggagcacgccggcgaacaggacgaggaggatgaggaggaggaggagatggatcaggagagtgatgacttcgatcagagcgacgattccagtcgtgaagacgaacatacgcacacaaatagcgtgacaaactcatcctctatcgttgacctacctgtccaccagctgtccagtcccttctatactaagactactaaaatgaaacgtaaactggatcatggctccgaagtgaggtcattctcccttggcaagaaaccatgtaaggtaagtgaatatacctccacaactgggttggttccctgttccgctactccaacaacctttggggacctgcgcgcggcaaacggccagggccagcagaggcgcaggatcacatccgtgcagccccctacaggactgcaggagtggttaaagatgttccagtcctggtctggtcctgagaagcttctggctctcgatgaactcattgattcttgtgagccaacccaggtaaagcacatgatgcaagtgatagagccacagttccaaagggacttcataagtctcctacccaaggagcttgcactctacgtgctgagctttctggaacctaaggatctgttacaggccgcccaaacatgccgttactggcgcattctggctgaagataaccttctgtggcgagagaaatgcaaggaagaagggattgacgaacccctgcacatcaagaggcgcaaggtgataaagccaggattcatacacagcccatggaagagcgcatatatcagacagcaccgcattgacaccaattggcggcggggagagctgaagagccccaaagtcctcaaaggccatgacgatcacgttatcacgtgcttacagttttgtggcaatcggatagtgtccggctcagacgataacaccttgaaagtgtggtctgcagtgacagggaaatgtcttcggaccctggtcgggcataccggcggagtctggtcctctcagatgcgggataatatcataatctcggggagtaccgaccggaccctgaaagtctggaacgcggaaactggcgagtgcatccatacattgtacgggcatacttcgaccgttagatgcatgcacctacacgagaaaagggtcgtatctgggagccgcgacgccacgctgagggtttgggacatcgagaccggccaatgtctccacgtccttatgggacatgtggcagccgtgcgctgtgtgcaatatgacgggcgccgcgtagtgagtggagcatacgactttatggtcaaagtctgggaccccgagaccgagacttgtttacatactttgcagggccacactaatcgggtgtattcccttcagtttgatgggatacacgtagtgtccggtagcctggacacttccatccgcgtttgggacgtggaaacagggaactgcattcacaccctaacagggcatcagagtttaacgtctgggatggagctcaaagacaatattctggtgtctgggaacgccgacagtacagtgaaaatttgggacattaagacgggccagtgcctccagacattgcagggcccgaacaaacaccagtcagctgttacatgtctgcagttcaataaaaatttcgtgatcacctcttcagacgacggcactgtgaaactttgggacttaaaaaccggtgagttcattcgaaatctcgttacactggagtcgggtgggtccggcggtgtggtctggaggatccgggcatctaatacaaaactggtgtgtgcagtcgggagcaggaatggcaccgaggaaacgaaactcctcgtcctggattttgacgtcgacatgaaatag

SEQ ID NO: 187577 - DNA, 1770 bp, synthetic construct
  misc_feature 1..1770: note = Description of Artificial Sequence: Synthetic coding sequence
  source 1..1770: mol_type = other DNA
atgagcaagcccggcaagcccaccctgaaccacggcctggtgcccgtggatctgaaatccgctaaagagcccctgcctcaccaaacagtgatgaagatcttcagcatttcaataatagcacaggggctcccattctgcaggaggcgtatgaaaagaaaacttgaccatggctccgaggtgcgttccttcagtctcggaaagaagccctgtaaagtgtcagaatatacttctacaactggcctggtgccctgcagtgccacacctaccacattcggtgatctgcgagcagccaatggacagggccaacaaagacggcggataacctcagttcagccaccgacaggcctccaggagtggttaaaaatgttccagtcttggtctggaccagaaaagcttctggcactcgatgagctgatcgatagctgcgagcccacccaagtgaagcatatgatgcaggtcattgagccacagtttcaacgtgactttattagcctactccccaaggagctggcactatatgtgttgagctttctggaacctaaggatcttctgcaggccgctcagacttgtcgatattggcgcatccttgccgaagacaacttgctatggcgggaaaagtgcaaggaagaaggaattgatgaacccctccacattaaaagaaggaaggttattaagcctggatttatccattctccatggaagtccgcatatatcagacagcaccgtatcgacacgaattggcgacgcggtgagctcaaaagcccaaaggtactgaagggtcacgatgatcatgtgatcacttgtcttcagttctgtggcaatagaatcgtcagtggctcagacgacaacaccttaaaggtctggtcggctgtgacaggtaagtgtcttcgaacacttgtgggccacaccgggggggtttggagtagccagatgagggataatattatcataagcgggagtaccgatcggaccctaaaagtctggaacgccgagacaggggaatgtatccacaccctctacgggcacacaagtactgtaaggtgtatgcacttgcacgagaaaagagttgttagtggttcaagagacgctacgctccgggtctgggatatcgaaaccgggcagtgcctccacgtgctcatgggccacgtagccgccgtccggtgtgttcaatatgacggcagaagggtggtcagcggtgcctatgactttatggttaaagtgtgggatcccgaaaccgaaacatgtctgcatacattgcaagggcacacaaaccgtgtctacagcctgcaattcgacgggatacatgtggtatccggttcccttgacaccagtattagggtgtgggacgtggagaccggaaactgtattcacaccttgaccggacatcagtcgctgacatcaggcatggaattaaaggacaatattctcgtctccgggaacgcagattcgaccgtgaaaatatgggatatcaagactggccagtgcctacagaccttacaagggccgaataaacaccagtccgcagtcacttgtctacagtttaataagaatttcgtcatcacgtccagcgacgacggcactgtgaagttatgggacctgaaaaccggtgagttcatcagaaacctcgttaccctagaaagtggcggctctggcggcgttgtctggagaatccgggcttctaatacgaaacttgtctgcgcggttggctcccgaaacggtaccgaggaaacaaaacttctggttcttgacttcgacgtcgatatgaagtag

SEQ ID NO: 187578 - DNA, 1596 bp, synthetic construct
  misc_feature 1..1596: note = Description of Artificial Sequence: Synthetic coding sequence
  source 1..1596: mol_type = other DNA
atgctgttcttcaagtgcatcagcctgctgctgatctggctgatcccagggcagtccactacaggacttgttccttgcagtgctacgccgactaccttcggagatctgcgcgccgccaacggtcagggtcagcagagaaggaggattacatcggtgcagccccccacaggcctgcaggagtggttgaaaatgttccagagctggagcggcccggaaaaacttttggccctcgatgagcttattgatagctgtgagccgacccaggtgaaacatatgatgcaagtcatcgagccccaatttcagcgggatttcatctctctgcttcccaaggagcttgcgctgtatgtgctgtcattcctggagcctaaggatcttctgcaggccgcgcagacatgccgttattggcggatactcgccgaagacaacttactgtggcgtgagaaatgtaaagaggaggggattgacgaacccttgcatattaaacgcaggaaggtcatcaagccaggttttattcatagcccctggaaaagcgcttatatccgccaacatcgcattgataccaattggcggagaggcgaacttaagtcacccaaggtgctcaagggccacgacgaccacgtgattacgtgcctgcagttttgtggaaaccgaattgtctcggggtccgacgataacactctcaaggtgtggtcagccgtcacaggcaaatgtctgcgcactctggtgggccatactggaggcgtctggtcttcgcaaatgcgagataatataatcatttcggggtctactgacagaaccctcaaagtatggaacgccgaaacaggggaatgtattcacactctgtacggtcatacctccacagttcggtgcatgcacctgcacgaaaagagagtggtgtcaggctcacgagacgctaccctgcgcgtatgggatatagagactgggcagtgtctgcatgtactcatgggccacgtcgccgcggtgcgttgcgttcaatatgacgggaggcgggtggtgtcaggcgcttatgacttcatggttaaggtgtgggatcctgaaaccgagacatgtctgcacacgctgcagggccacacgaatagggtgtacagtttacaattcgatggaatacacgtggtgtccggcagccttgatactagcattagggtgtgggatgtggagacaggcaattgtatccacaccttaacaggtcatcagtcacttacgagtggaatggagttgaaagataatatcctggtcagcggtaacgcagattcgaccgtcaagatctgggacataaagacaggacagtgcctacaaactctgcaaggaccaaataagcaccaaagcgccgttacttgtctgcagtttaataaaaacttcgttattaccagttctgatgatggaacggtcaagttgtgggacctgaagacaggggaatttattaggaatttggtgacacttgaatctggtggcagcggcggcgtcgtttggcgaattagggcaagcaataccaagctggtatgtgccgttgggtcccggaacgggacggaggagactaaattgctggtgctagactttgatgtggatatgaagtag

SEQ ID NO: 187579 - DNA, 1797 bp, synthetic construct
  misc_feature 1..1797: note = Description of Artificial Sequence: Synthetic coding sequence
  source 1..1797: mol_type = other DNA
atggacgactacagcctggacgagttccggcggcggtggcaggaggagttggcacaagcacaggctcctaaaaaaagacgccgtccagaggcagccgagcgtagagctaggcgcccagaggtgggctctggtaggggggaacaagcctccggagatcccgcgctggctcaacgcttactggagggtgccggcagaccccccgccgccagggccacacgagcagaaggtcaggacgtcgccagcagaagtcgctcccccttggcgagagagggagccggtggaggcgagcagctggtcgaccagctcattagggacctgaacgaaatgaatgatgtacccttctttgatattcagcttccatacgagctagctatcaatatttttcagtaccttgacagaaaggagctgggcaggtgcgcccaggtgtctaaaacttggaaggtgatcgctgaggacgaggtgctttggtaccgcttgtgtcagcaagaagggcacctgcccgactcgagcatctccgactacagctgctggaagttaatctttcaggaatgcagggcaaaggaacatatgctgaggacaaattggaagaataggaaaggagccgtcagcgagttagaacatgtgcccgataccgtcctgtgcgacgtacattctcacgatggcgtggtaattgctggctacacctctggagacgtccgtgtatgggatacacggacatgggactacgtcgcccctttcctcgagtccgaagatgaagaggacgagcctggcatgcagccgaacgtgagcttcgtacgcataaattcgagcctggccgtggccgcctacgaagacgggttccttaatatctgggatcttcggaccggtaaatatcctgtgcataggtttgaacatgacgcccggatccaggccctcgctctttcacaggatgatgcgaccgtggcgacggcctctgcctttgatgtggtcatgttgtctccaaacgaagaggggtactggcagatcgctgctgaatttgaggttcctaagttggtccagtacctcgagattgtgcctgagactcgcagatacccagttgccgttgcggcggccggagacctgatgtacttgctcaaggcagaagattctgctagaactctgttgtatgcgcacggacctcctgtgacctgcctggatgtgtccgctaaccaggttgcatttggcgttcaaggcctgggatgggtctacgaggggagcaaaatccttgtgtatagcctggaggcagggcgaaggctgttaaaactgggaaatgtcctcagagactttacctgcgtgaatctgtctgattctccccccaacctgatggtgtctggaaacatggatggcagagtgaggatccatgatctacgctccgggaatatcgcccttagtctcagtgcccaccagcttagagtctccgcagtgcaaatggatgattggaagatcgtatctggcggggaggaaggcttggtttccgtctgggactaccgaatgaaccaaaaactctgggaggtgtactcgggtcacccagtccaacatatcagtttctccagtcactcccttattaccgcgaacgtaccgtaccagacggttatgcgtaacgccgacttagattcatttacaactcataggaggcacagaggactgattagagcctacgagtttgcagtggaccaacttgcattccagtcacccctgccagtgtgccggtcttcctgtgacgccatggcgactcattattacgatttagcactggcgtttccctataaccacgtctag

SEQ ID NO: 187580 - DNA, 1599 bp, synthetic construct
  misc_feature 1..1599: note = Description of Artificial Sequence: Synthetic coding sequence
  source 1..1599: mol_type = other DNA
atggacgactacagcctggacgagttccggcggcggtggcaggaggaacttgcccaggcccaggccccgaaaaaacgccgcagaccggaagccgctgaaagacgagcacgccggccggagaatgagatgaacgacgtgccctttttcgatattcaactgccttacgaactggccatcaacatttttcagtatctcgatcgcaaagaactgggacggtgtgcccaggtatctaaaacctggaaagtgattgccgaggatgaggtgctgtggtataggctatgtcagcaagagggtcacctacccgactcctccatcagcgactacagctgctggaagttgatcttccaggagtgccgcgcgaaagaacacatgcttcgcactaattggaagaataggaagggcgccgtgagcgagttagaacatgttcccgataccgtgctctgcgacgtgcattctcacgacggagttgttatcgccgggtatacctcgggcgacgttagggtgtgggacacacgcacgtgggattacgtcgcaccttttttagaatccgaagatgaagaggatgaacccgggatgcagcctaatgtatcttttgtgaggatcaattcgagtctcgcagtggcagcctatgaggatgggtttctgaacatctgggatttaaggacggggaaatatccagtgcatagatttgaacacgatgcaagaatacaggctttggcactcagccaagacgatgctacagtagcaacagccagcgcctttgatgtggtcatgctgtcacccaatgaggagggatattggcagatcgccgcagaatttgaggtaccaaagcttgtccagtatctagaaatagtgccagaaacaagacgctatcccgtcgcagttgccgctgccggagacctcatgtacttgttgaaagctgaggactctgcaagaactcttttatacgcacatggacctcccgttacttgtctagacgtgtctgccaatcaggtggcttttggcgtgcagggactagggtgggtgtatgaggggtccaagattttggtgtactcattagaagctggacgccgccttctgaagcttggcaatgtgctgagagattttacctgcgtgaatctgtctgatagtccccccaacctgatggtcagcggaaacatggatggccgcgtgaggattcatgatctgaggtcggggaacattgctctttctttgagtgctcaccagctgcgagtcagcgcagtccaaatggacgactggaaaattgtgtctggaggtgaagaggggctggtctctgtgtgggactacaggatgaaccagaaactctgggaggtttattctgggcatccagtacagcacatatccttctccagtcacagcctgatcaccgcaaacgtgccttaccagaccgtcatgcgcaatgccgatttggacagtttcactacccaccgcagacacaggggcctgatacgtgcctacgaatttgcagtcgatcagctcgcttttcaaagtcccttacctgtgtgcaggtcttcatgcgatgctatggcgactcactactacgacctagcgctggcctttccttataatcatgtgtag

SEQ ID NO: 187581 - DNA, 1599 bp, synthetic construct
  misc_feature 1..1599: note = Description of Artificial Sequence: Synthetic coding sequence
  source 1..1599: mol_type = other DNA
atggacgactacagcctggacgagttccggcggcggtggcaggaggaactcgcccaagcgcaagccccaaaaaagagacgacgaccggaggccgcggaacgacgggcccggaggccggaaaacgaaatgaatgacgtgcctttctttgatatccaactcccatacgagttagctatcaatatctttcaatacctggaccgcaaagaactggggagatgcgcccaggtcagcaaaacctggaaagtgattgccgaggacgaggttctctggtataggctttgccagcaagagggtcacttgcccgacagctcaatctccgactattcatgctggaagctgattttccaagagtgcagagcgaaagagcacatgctccggacaaactggaagaacaggaagggcgctgtgagcgagctcgagcatgtgcccgatactgtgctttgtgacgtgcacagccatgatggggtggtgatagcaggatacacaagcggtgacgtgcgtgtttgggacacgaggacttgggattatgtggcacctttcctggagagcgaggacgaggaagatgagcctggaatgcagccaaatgtgagctttgtcaggataaactcctccctagctgtagccgcatacgaagatggatttctcaatatatgggatttacgcaccgggaaatacccggtgcatcgcttcgagcacgacgcgaggattcaggcacttgctttgagtcaagacgacgcgacggtggcaaccgctagcgccttcgatgtggttatgctgagtccaaacgaagagggatactggcagattgcggccgaattcgaggttcccaaattggttcagtacctggagatcgtccctgaaactcggcgctaccctgttgccgtggctgcagctggggacttgatgtacttgctgaaggcagaggatagcgcaagaacgctgctgtatgcacatggcccacccgttacatgtctggacgtgagcgctaatcaggtggctttcggtgtccagggactcggctgggtttatgaggggtctaagatcctggtatactccctggaagcagggagaagactgttaaagctaggcaacgtcctacgggactttacatgcgtcaatttaagcgattccccaccaaacctaatggtgtcagggaacatggatgggcgcgttcgcatccacgatctcaggagcggcaacatcgctctctccctgtccgcccatcagctccgagtatccgcagttcagatggatgactggaagatcgtgtcagggggtgaggaaggcttggtctctgtctgggattaccgcatgaatcagaagctgtgggaagtatattctggacatcccgtacaacacattagtttctcctctcatagcttgatcaccgcaaacgtgccttatcagacagtgatgcggaacgctgacctagattccttcacaacccatcgtcgccatcgcggcctgattcgcgcctatgagtttgctgtggatcagctcgcctttcagagccctctgccagtctgcagatcaagctgcgatgcaatggccacacactattacgacttggccctggcgtttccttacaatcacgtctag

SEQ ID NO: 187582 - DNA, 2871 bp, synthetic construct
  misc_feature 1..2871: note = Description of Artificial Sequence: Synthetic coding sequence
  source 1..2871: mol_type = other DNA
atggaggccggcggcctgcccctggagctgtggcggatgatcctggcctatcttcatctgccagatctgggccgttgcagcctcgtgtgcagagcttggtatgagttgattctgtcccttgacagtaccaggtggcggcagctgtgtcttggctgcactgagtgtagacaccccaattggcccaaccagcctgacgtggaacccgagagttggagggaagccttcaaacagcactacctcgcctcgaagacctggaccaagaacgctttggacctagagtcctcaatttgtttctccctgttccgccgccgaagagagagacgtaccctgagcgtaggtcccggacgagaattcgatagtttgggaagtgcgctggccatggcttctttgtatgaccgcatcgtcttgttcccgggcgtctacgaagagcagggagaaatcattttgaaggtgcccgtggagattgttggccaaggaaagctgggcgaggtggccttactggcatctatagatcaacactgtagcactactagactttgtaatctggtgtttacgccagcctggttctctcctattatgtacaagaccacctcaggacacgtgcagtttgacaactgtaactttgaaaacggtcacattcaagttcatggacctggcacctgccaggtcaaattttgtaccttcaaaaatacacacatcttcctccataatgtccctctgtgcgtccttgagaactgtgagttcgtgggaagcgagaataacagcgtgacggttgagggacaccctagtgctgacaagaactgggcctacaagtacctgctcggcctcatcaaatctagtcctacattccttcctactgaggactcagactttctaatgagcctggacctcgaatcaagagatcaggcatggtcaccaaagacctgtgatatcgtcatcgagggatcccagtctccaacaagtccagctagctccagccctaagcctgggagcaaggctgggtctcaggaagcagaagtgggcagtgatggggagcgtgtcgcccaaacaccagactcctcagatggcggcctgtctccctcaggcgaagacgaggatgaggaccagctgatgtaccggttgtcctaccaagtccagggtcctagacctgttctcggaggctcgttcctcggcccacccctgccaggtgcctcaatacaattaccgtcctgtctcgtgctgaacagtctgcaacaagagttgcagaaggacaaggaagcaatggctctggccaacagtgtgcagggctgtctgatacggaaatgtctcttccgcgatggcaaggggggggtttttgtctgtagtcatggcagagccaaaatggaggggaacatttttcggaatcttacatacgctgttcgctgtatacacaacagtaagattataatgcttaggaatgatatttacaggtgcagggcctccggcatattcctgcgactggagggcggcggcctcatagccgggaacaatatatatcacaatgccgaagcaggtgtggatattcggaagaaatcaaacccactgatcttgtgcaatcagattcaccacgggttgcgctccgggatcgttgtgcttggtaatggcaaagggattatcagaaataaccaaattttctcgaataaagaggctggcatctatatcctttatcacggaaacccggttgtaagcggtaatcacatctttaaaggtagggccgctggcatcgcggttaatgagaatgggaaagggttaatcaccgaaaacgtgatccgcgagaaccagtggggcggggtggacatccgcaggggcggtatccctgtcctgaggtctaacctgatctgtttcggctactctgatggggtagtcgtgggcgatgagggtaagggacttatcgagggaaatacaatctacgcgaacaagggatgtggcgtgtggatgatgtcatcctcccttccacacgttactagcaatcacgtgtcctataatgggctgtatggggtcgctgttttctctcagaaggatggcagtagtgaactaccgagaggtcatagagctcaggagaatttcagcgaggacggcgatgcaatcctctgggaaacagagctggagaaggaggacgatcccctacgccggcctattacgatagctctagttgaatccaatagtatcaaccacaacggtgcctcgggcctgtacgtccagagcagcgaggcactccacgtgatcaccaacgtgatccacgctaacggcgatcgcggtattaccgtggcccagagtagccagccaaccagggttgcaaataacagcatatcttgtaaccgccagtccggcgtcaaagtagaagcccaatgcaaggttgaactgcgtggaaatggcatctacgacaaccgggggcacgggatcattaccaaaggtgactccactatagtaatcgaaaatgacattattggtaatcgtggatctggtttgcaactgttgcctcgcagcgatactaaagtgattaagaaccgcatccactcgtttagggcctatggtatcgctgtccgcggcagagctaaagccctcgtgcaggaaaacattatatttcaaggcaagaccagtaagaccatttttcagcaaatttctaacaacagagaatgtataatgcaaaataacaagttcctcgtgttcaaaaaaaagtctgatacttggagactggtgaaccctccagctcgcccccacctggagaactccctgagaaggccttctgctgcgcataacggccagaaagtcacggcaatggcaacgagaataacggctagagtggagggcggataccacagtaatagatccgtgttttgcactattctctag

SEQ ID NO: 187583 - DNA, 216 bp, synthetic construct
  misc_feature 1..216: note = Description of Artificial Sequence: Synthetic coding sequence
  source 1..216: mol_type = other DNA
atggaggccggcggcctgcccctggagctgtggcggatgatcctggcctacctgcacctgcccgaccttggtaggtgttctctagtgtgccgtgcctggtatgaattgatactgtctctagacagcaccagatggcggcaactctgtctcggctgtacggagtgccgccacccaaattggccaaaccagcctgatgtggaacccgagtcctggtag

SEQ ID NO: 187584 - DNA, 1446 bp, synthetic construct
  misc_feature 1..1446: note = Description of Artificial Sequence: Synthetic coding sequence
  source 1..1446: mol_type = other DNA
atgctgcggaacgacatctaccggtgccgggccagcggcatcttcctcagactggaaggaggcgggctaatcgctggcaacaatatttaccataacgccgaggctggggttgatatcagaaaaaagagtaaccccctcatcctctgcaatcagattcaccatgggctgaggagcggtatagtggtgttgggaaatggaaagggaatcatccgaaataaccagatcttttctaataaggaagccggaatttacatcctctaccatgggaatcctgtggtctccggaaaccatatcttcaaagggagggccgccgggattgccgtcaacgagaatggcaaggggttgataaccgagaatgtgatcagggagaatcagtggggtggagtcgacattcgacggggtggaatcccagtactgaggagcaatttgatctgctttggatactcggacggtgtcgttgtcggggacgaaggcaaaggccttatcgagggaaacacaatctacgcgaataaaggatgcggggtctggatgatgtcatccagcctgccccacgttacgtccaatcacgtgtcctacaatggcctgtacggcgtagccgttttttcccagaaagacggcagttctgaacttcctagaggacaccgggcccaggagaattttagtgaggacggggacgccatcttatgggagaccgaacttgagaaggaggatgatccgctgaggaggccgattacgatagcactggtggaatccaacagcataaatcacaacggtgcgtcaggactgtacgtgcaatccagcgaggctctccatgtcatcacgaatgttatacatgccaatggcgaccgaggaatcacagttgcccagtcctctcaaccaaccagggtcgctaataattctatctcttgtaacagacagagcggtgtgaaggtggaagcccagtgtaaagtcgaactccggggtaacggtatttacgataatcgcggccatggcattattactaagggtgattcaaccatagtgatagagaacgacattatcggtaaccgtggaagcgggcttcagcttcttcccaggagcgatacaaaggtgattaagaaccgaatacacagcttccgggcatacggtattgcagtgcgcggccgtgctaaagccctggtgcaggagaacataatattccaaggaaaaaccagtaagacaatctttcagcagatatctaacaatagggagtgcatcatgcaaaataataaatttttagtcttcaaaaagaaaagcgacacttggcgactcgttaacccacctgccaggccccatctcgaaaacagcttacgccgcccaagtgcagctcacaacggacagaaggtcactgccatggccacaagaattaccgcccgggtcgaaggcggctaccattccaataggagtgtattctgcactatactctag

SEQ ID NO: 187585 - DNA, 2532 bp, synthetic construct
  misc_feature 1..2532: note = Description of Artificial Sequence: Synthetic coding sequence
  source 1..2532: mol_type = other DNA
atggtggccgaggagagcggccccggcgcccagaacagcccctaccagctgagaagaaaaaccctcctgccgaagagaaccgcctgtccgacgaagaactctatggaaggggccagcacatcaactacagagaatttcggacacagagccaagcgcgcacgagtgtcaggcaagtcccaggaccttagtgccgcccctgcagaacagtatttgcaggagaagctacctgacgaggtcgtgctcaagatctttagctaccttctcgagcaggacctatgtcgagccgcatgcgtttgcaagcgtttttcagagttagcgaatgacccaatcctgtggaagcgcctctatatggaagtttttgagtataccagaccaatgatgcaccccgaacctgggaaattttaccagataaatcccgaagagtacgagcaccccaatccatggaaagagtcttttcagcagttatataagggtgcacatgtcaagcctggattcgccgaacacttttactccaatccagcgcggtataaaggcagggaaaacatgctgtactatgatacgatagaagacgctttgggcggcgtccaggaggcccactttgatgggctgattttcgtacactccggaatttacacggacgaatggatctatatcgagtcaccaatcacaatgattggggcagccccaggaaaggtggcagacaaagtaatcattgagaatacacgagattctactttcgtgtttatggaaggcagtgaggatgcatatgtcgggtatatgacaatccgcttcaatcctgatgataaatcagcccagcatcataacgcccaccactgtctggagattactgtgaactgttcccccatcattgatcactgcataatccggtcaacatgcactgttggaagtgctgtgtgcgtctctgggcagggagcatgcccaaccataaagcattgcaatatcagcgattgcgaaaacgttgggttgtatatcacagaccacgcccaggggatctatgaagacaatgagatatctaataacgcattagccggcatatgggtaaaaaaccacggcaatcccattattcgtagaaaccacatccaccacggccgagacgtcggcgtctttacgtttgatcacggtatggggtactttgagtcttgtaatatccaccggaaccggattgctggcttcgaggtgaaggcatatgcaaacccgaccgtggtgcgttgcgagatccaccatggacagaccggaggaatctatgtccacgagaagggcagaggtcagtttattgaaaataagatctacgcaaacaatttcgctggggtgtggattacgtcgaactccgacccaacaattagggggaactcgatattcaatggtaaccagggcggggtttacatttttggggatggaagaggtctgatcgagggtaacgatatttatggaaatgccttggccggcatccagatccggacaaattcctgcccaatagtgaggcacaacaaaattcacgatggccagcacgggggcatttacgtacacgaaaaaggtcagggcgtgatcgaggaaaatgaggtttattcaaacactctggctggtgtgtgggtaacgacagggtccacccccgttctgaggcggaacaggattcacagtgggaaacaagttggtgtttacttttatgacaacggccacggtgtcctcgaagataatgatatttataaccatatgtacagcggcgtccagatcaggacgggttccaaccctaagattcgtcgaaataaaatctggggtggccaaaatggcggaattctggtgtacaattcaggactgggctgtattgaggataacgagatcttcgacaatgcgatggccggggtgtggattaagacagattcaaaccctacacttcggaggaataagattcacgacgggcgggacggcggaatttgcatcttcaatgggggcagaggcctcctggaagaaaacgacatctttcggaacgcccaggccggcgtcttgatcagcaccaactcacatcccattctacgcaaaaatcggatattcgacgggttcgcagccggaatcgagattaccaaccacgcaaccgctacacttgagggcaaccagatattcaacaacaggtttgggggtttgttcttggcgtctggagttaatgttactatgaaagacaataaaatcatgaataaccaggacgccatagagaaggctgtgtctcgagggcagtgtctgtacaagataagttcttacaccagctatccaatgcatgacttttaccgctgccacacctgcaacaccaccgaccggaatgctatttgtgtgaactgcattaaaaagtgccaccaggggcacgatgtcgagttcattaggcacgataggtttttctgcgattgcggcgccggcaccttgtctaatccttgtaccttagctggagagcccacccacgatactgatacactgtatgattcagctcctccaattgaatcaaatacgctgcagcataactag

SEQ ID NO: 187586 - DNA, 282 bp, synthetic construct
  misc_feature 1..282: note = Description of Artificial Sequence: Synthetic coding sequence
  source 1..282: mol_type = other DNA
atggagggcgccagcaccagcaccaccgagaacttcggccaccgggcaaaaagagccagagtatcagggaaatcacaggacctatccgcggcacctgctgaacagtaccttcaggagaagctccccgacgaggtggtcctgaagattttctcatacctactggaacaggatctgtgtcgtgccgcttgcgtctgcaagaggttctccgagttagccaatgaccctattctgtggttaggggaggtggctcacgcgtacaatccctcgacactcgggggctag

SEQ ID NO: 187587 - DNA, 2532 bp, synthetic construct
  misc_feature 1..2532: note = Description of Artificial Sequence: Synthetic coding sequence
  source 1..2532: mol_type = other DNA
atggtggccgaggagagcggccccggcgcccagaacagcccctaccagctcaggcgcaagaccttactgcccaaacggacagcctgtcccaccaaaaacagtatggagggggctagcacaagcactacagagaactttggccacagggccaaaagagcccgggtcagcggtaaaagccaggacctgagtgccgcgcccgcagaacagtacctccaggagaaattacctgacgaggtagtcctaaagatattttcctaccttctggagcaagatctttgccgggcggcttgtgtgtgcaagcgcttttctgagcttgcaaatgatccaattctgtggaaaaggctgtatatggaggtgtttgaatatacacgccctatgatgcatcctgagcctgggaagttttaccagattaacccggaagagtacgaacaccctaacccttggaaggaatccttccagcagctgtacaaaggtgcccacgtgaagccgggcttcgctgagcacttttatagtaatcccgcccggtataagggtcgtgaaaacatgctctattacgataccatcgaggacgccctgggtggcgtgcaagaagctcactttgatgggcttatttttgtacattcagggatttacactgacgaatggatctatatcgagtccccaatcactatgattggggctgccccgggcaaagtagccgataaggtaatcatagagaatactcgcgacagcaccttcgtcttcatggagggatctgaggacgcttatgttggatacatgaccatacgcttcaaccccgatgacaagagcgcacagcatcacaacgcacaccattgcctggagatcaccgtcaattgtagtcctattatcgatcactgcatcatacgatctacatgcactgtaggatcggccgtttgtgtgtctggacagggcgcctgccctacgatcaaacactgcaacatctcagactgtgagaatgtaggcttgtatattaccgatcacgcgcaggggatctatgaggataacgagattagcaacaatgctctggccgggatttgggtgaagaaccacgggaacccaatcatcagacggaatcatattcaccatggccgggatgtgggagtgtttacattcgatcacggcatggggtactttgagagttgcaatatccacagaaatcggattgccggctttgaggtcaaagcgtatgctaatcctacagtggtccggtgtgagattcaccacggtcagaccgggggcatttatgtccacgagaagggaaggggacaatttatcgaaaacaagatttatgctaataacttcgctggcgtatggataacttccaactccgaccctacaattcgagggaactcaatctttaatggcaaccaaggcggcgtatatatctttggcgacggacggggactcatcgaaggcaatgatatctatggcaatgccctcgccgggatacaaattaggaccaattcatgcccaattgtgaggcacaataagattcatgacggacagcacggcggcatttacgtccacgaaaaaggccagggcgtcattgaagagaacgaagtctatagcaacacactcgccggtgtgtgggtgactacaggctcaactcccgtgctgcgccgcaacaggatacacagcgggaaacaggttggcgtgtatttttacgacaatggccacggggtcctggaggacaatgatatctataaccatatgtactctggagtgcagatccgaactggctccaacccgaagattagacgcaacaagatttgggggggccagaacggaggtattctggtgtacaactcaggccttggatgtattgaagataacgagatctttgacaatgccatggcaggcgtctggataaaaacggattcaaacccaacactgcggagaaacaaaattcacgatgggcgtgacggcgggatctgcatcttcaatggcggtaggggcctcttagaagagaatgacatttttaggaacgcccaggccggggttcttattagtaccaactcccacccaatcctgagaaaaaatagaatttttgacggtttcgctgccgggatagaaatcacaaatcacgctaccgcgacactggagggcaaccagattttcaacaaccggtttgggggactttttctcgcctccggtgttaatgttactatgaaggacaacaaaatcatgaacaatcaagatgcaatcgaaaaggccgtctcaaggggacagtgtctctacaagatatcaagctatacgtcatacccaatgcacgacttctacaggtgtcacacctgtaatacaactgaccgaaatgcaatctgcgtaaactgcatcaagaagtgccaccagggccatgacgttgaattcatccggcacgaccggttcttttgtgactgtggggcaggcaccctttccaacccctgcaccttagccggagaacctactcatgacaccgataccttgtacgactccgcgccacctatcgagagtaacacccttcagcataactag

SEQ ID NO: 187588 - DNA, 2784 bp, synthetic construct
  misc_feature 1..2784: note = Description of Artificial Sequence: Synthetic coding sequence
  source 1..2784: mol_type = other DNA
atgaacagcgtgcgggccgccaaccggcggccccggcgggtgagccggcctaggcctgtccagcagcaacagcagcagcccccccaacagcctcctccccagcccccccagcagcagcccccccagcagcagcctcctccaccaccccagcaacaacagcagcagcagcctcctcctcctcctcccccccccccacccttaccccaagaacggaacaatgtcggagagcgagatgatgatgtgcctgccgacatggtcgcggaggaatccgggccaggagcgcaaaattcaccatatcaattacgcagaaaaacgctgctcccaaaacggacagcttgcccaactaaaaactcaatggagggcgcgagtacctctaccactgagaactttggccatagagcaaagagggcccgcgtgagtggcaaatctcaggacctgtcagcagcaccggctgagcagtatttgcaggaaaagttaccggatgaagtggtattgaagattttctcatacttgctagaacaggatctttgtcgcgcagcttgtgtctgtaagcgattttctgagctggctaacgaccctatcctctggaaacgcctgtacatggaggtttttgagtacacgaggcccatgatgcatcccgagccaggcaaattctaccaaattaatccagaagagtacgagcaccccaatccctggaaggagagtttccagcaactctacaagggcgcacatgtcaagcctggatttgccgagcacttttatagcaaccctgcacggtacaagggtcgcgagaacatgttgtattatgacacaatcgaggacgccctgggcggcgtccaggaagcccactttgacggattaatcttcgttcactcagggatctatactgacgagtggatttacattgagagccccattaccatgataggggcagcaccaggaaaagtggcggacaaagtgatcatcgaaaacacaagggactcaacatttgtcttcatggaaggttccgaagatgcatatgtggggtatatgactatcaggttcaaccccgatgacaaaagtgcgcagcaccacaatgctcatcactgtcttgagatcaccgttaattgtagcccaatcatcgatcactgcatcatccgctcgacatgtacggtgggatctgccgtctgtgtgtccggccagggcgcctgtccaactatcaagcactgtaatatttcagactgcgaaaatgtaggcctatatattaccgaccacgctcagggaatctatgaggataacgaaatctcaaacaatgcgctggcaggaatttgggtgaagaaccatgggaatcccatcatcaggaggaaccacatccaccacgggcgggacgtcggtgtgtttacctttgatcatgggatggggtatttcgaatcctgcaacatccacagaaaccgcatcgctggattcgaggtcaaagcgtatgccaaccctacagttgtgaggtgcgaaatccatcatgggcagaccggcgggatctacgtccacgagaaggggagggggcagttcattgaaaataaaatttacgccaataactttgccggtgtctggatcactagcaacagtgacccaactatcagaggcaattccatttttaacggtaaccaaggcggagtatacatcttcggtgatgggcggggtctcattgaaggtaacgacatttacggtaacgcacttgcggggatccagattcgaacgaattcttgcccgatcgtgcgacacaacaagatccacgatggacaacacgggggcatttatgtgcacgaaaaggggcagggcgtaatcgaagagaacgaggtttattccaacacgcttgccggcgtgtgggtcacaactgggagtactcccgtacttcggaggaataggattcactcgggcaaacaggtgggcgtctacttctatgataacgggcacggcgtgttggaggacaacgacatctataaccatatgtacagtggtgtgcagatcagaacaggatctaatcccaagatccgacgcaacaaaatctggggcggtcagaacggggggatcctcgtttacaattcagggctcggctgtatcgaggacaatgagattttcgacaacgccatggccggggtgtggatcaaaacagatagcaatcctacacttcggcgcaacaagattcacgacggccgagacggaggaatttgtatcttcaatggcggcaggggactcttggaagagaacgatatcttccgcaatgcacaggcaggggtgctgatctcgactaatagtcatcccattttacgaaaaaatagaatcttcgacggttttgctgccggtatagaaatcactaatcacgctactgctacattggaaggtaatcaaatttttaacaaccggttcggcggtctctttctggcctccggtgtcaatgttacgatgaaggacaataagatcatgaacaatcaggacgcaatcgagaaagctgtgtctcggggacaatgcctctacaaaatatctagctataccagctacccaatgcatgatttctatcgttgtcatacttgtaatacaactgatcggaatgctatatgtgtaaactgcattaaaaagtgccatcagggacatgatgtcgagtttattcggcatgatcgttttttctgtgactgcggggctggaaccctgtccaatccgtgtaccttagctggagaaccaacacacgataccgatacactctacgacagcgcacccccaatcgaatccaacaccctgcagcataactag

SEQ ID NO: 187589 - DNA, 1056 bp, synthetic construct
  misc_feature 1..1056: note = Description of Artificial Sequence: Synthetic coding sequence
  source 1..1056: mol_type = other DNA
atggagatcaaggaggagttcaccagcctggtgatggacgaggccctccttaaggagatgacattcatgcatgagaaaggtcagggggtgatcgaagaaaatgaggtgtattctaacaccttagccggagtctgggttaccacgggctccacgccagtgctgcggagaaaccggatccattccggaaagcaggtcggagtgtacttttacgataatgggcacggcgtactggaggacaatgacatctataaccacatgtattcaggagttcagatccgcactggaagtaaccccaagataaggcggaacaagatctggggtgggcagaatgggggtatcctggtctataactctgggttggggtgtatcgaagacaacgagatatttgacaatgccatggcgggagtctggatcaagactgattctaatccaactctgcgtcgaaataaaatccacgatggacgagacggcggtatttgtatatttaacgggggacgtggactactagaggaaaatgatatcttccgcaacgcccaggctggtgtcctcatcagcacgaattctcaccccatcctcagaaaaaacaggatcttcgatggcttcgcagctggcattgagatcacaaatcatgcaacagccacactcgaggggaatcagatctttaataaccgattcggaggactctttttagcaagcggcgttaatgtgaccatgaaggataacaagattatgaataaccaggacgccattgagaaagcggtctccagagggcagtgtctgtacaaaattagttcttacacaagctaccctatgcacgacttctaccgctgtcatacatgtaatacaacagacaggaacgcaatctgtgtcaactgcattaaaaaatgccatcagggacacgacgtggagttcatccggcacgacaggtttttttgcgattgtggggccggaaccttgtcaaatccctgcaccctcgccggtgaaccaactcatgacacggacacactgtacgactctgccccaccaattgaatctaacacactacaacataactag

SEQ ID NO: 187590 - DNA, 1305 bp, synthetic construct
  misc_feature 1..1305: note = Description of Artificial Sequence: Synthetic coding sequence
  source 1..1305: mol_type = other DNA
atgcccagcgagatcctgctgaagatcttcagctacctggacgccgttagtttactttgtaccggatgcgtgtctcgcagattctaccatctggctaatgacaacttcatctggatcggcatctactcaactgccttctcccccgccagaagcaattggaagttcaactccgtggaaaaaatagccatgagcatgagtttcctctccgtccaggacaaagaagctggatactggaagaaagaatatattacaaaacaaatcgcaagtgtaaaggccgctctcgcggacattctcaaaccagtgaacccctacaccggactcccagtcaagacaaaggaggccctgaggatcttcggtctcgggtgggccataattctgaaggagaaagggggcaaggaatacattatggagcatgtggacttgagcataaatgatacgtccgtgacagttatatggtacggtaagaagtggccctgtctggcctcactgtctacattggacctgtgtggcatgacccctgtcttcacagattggtacaagactcctaccaaacatcgtctgagatggcacagcttaatcgcaaagtacaatctttcccacctgacgatctccactatgatcggttgcgaccgactcattaggattttttgcctgcacccgggcctgctggtgggcgtttggaagaaggaggaagagctggcctttgttatggccaacctgcacttccaccacttagtggagcgcagcacgcttggttccgccacgatcccatacgaactccctccccacagtccattcctcgacgattcaccagaatacggccttcatggctatcaattacacgtggatcttcactccgggggcgtattttatctgtgcggcacattccgcaacctcttcacaaaaagggggaatatcgagaacgggcacgtgaaattgatcgttatccacttaaaaaataatcgtgaacatcttccgctgatcggaaaagtgggactctcctggaaaaccgatatctttgacggctgtatcaagtcctgcagtatgatggatgttaccctgctggatgagcatgggaagcccttctggtgtttttcttcaccagtttgtttgcgaagtcccgccacaccctctgattcttctagctttctcggacaaacttataatgtggactatgtagatgcggaagggagagtgcatgtagaacttgtctggatccgcgagaccgaagagtacctgattgtgaatctcgtgctgtacctgtctatagccaagattaaccattggtttggcaccgagtattag

SEQ ID NO: 187591 - DNA, 1533 bp, synthetic construct
  misc_feature 1..1533: note = Description of Artificial Sequence: Synthetic coding sequence
  source 1..1533: mol_type = other DNA
atggccaccggccggggccggatcctgcagcagcactggctgggcttacaaactcttcgcggcccctcacggggtgggggggccgccagaggcagagcccgggcttttggctgcagaaaaggccccggagttaaactgagcgccggcagcgctgcgctgcgctgtcacgccgggggcggtcagcactgggagagcagtttcagttgttgttccgggttcttggatggcatgcctagcgaaatactcctcaaaatcttcagctacctggatgccgtttctctgctgtgtacaggttgtgtttccaggcggttttatcatctggctaatgataattttatatggataggtatttattcgacggcctttagccccgcaagatcaaactggaaatttaacagtgtcgaaaaaatcgccatgtcaatgagctttctgagtgtgcaggataaggaagctgggtactggaagaaggaatatatcactaagcaaatagcctcagtgaaggcagccctagcagatatcctcaagcccgttaatccgtacaccgggctgcccgtcaagactaaagaggcgctaagaatctttggcctggggtgggccataatactcaaagagaaaggtggaaaggagtatattatggagcacgtggatctgagcatcaacgacacttcagtcacggtaatctggtacggaaagaaatggccctgtcttgctagcctgtctacactcgatttatgcggaatgacaccggtgtttacagactggtacaagacacccaccaaacatagacttagatggcattccctgattgcgaaatacaacctgagtcacctgacaatctcaacaatgatcgggtgtgatagactgatcagaatcttctgcctacatcctgggttgcttgtgggagtctggaaaaaagaggaggagctggcatttgtaatggctaatcttcacttccatcaccttgttgaacggtcaacactgggttctgctacaatcccatatgaacttccgccccattcaccctttctcgatgattcccctgaatatgggcttcacggctatcagttacacgtcgacttgcacagcggcggcgtgttttacttatgtggtacgtttcgcaatctgttcaccaaaaggggaaatattgagaatggccatgtgaaactgattgtcatacatctcaagaataacagagagcacctccctctgatcggcaaggtagggctcagctggaaaacggatatttttgatggctgcatcaagtcttgttccatgatggatgtgacgcttcttgatgaacatggaaagcctttttggtgcttctcctcccctgtgtgtcttaggtcacccgccacaccatctgactcaagctcatttctgggtcagacttacaacgtcgattacgttgatgctgaaggcagggtccacgtggaattggtatggattcgcgaaacggaagaatatctgatagttaacctggtactgtacctaagcattgctaagattaatcattggttcgggaccgagtactag

SEQ ID NO: 187592 - DNA, 879 bp, synthetic construct
  misc_feature 1..879: note = Description of Artificial Sequence: Synthetic coding sequence
  source 1..879: mol_type = other DNA
atgatggccttcgccccccccaagaacaccgacggccccaagatgcaaaccaaaatgtcaacttggacacctctcaatcatcaactgctcaatgatcgggtgttcgaggaaaggagagcattgcttgggaaatggttcgacaagtggacggacagtcagcgccgccgaatcctgactggccttttggaacgatgttccctgagccagcagaagttctgttgccggaagctgcaagaaaagatccccgccgaggctcttgacttcactaccaagctgcctcgggtgctgagcttatatattttttcattcttggacccaagaagtctttgtcgctgtgcgcaggtatgctggcattggaaaaatcttgctgagctcgaccagctgtggatgctgaaatgcctccgttttaactggtacattaatttcagtccaactcctttcgagcaggggatatggaagaaacactatattcagatggtgaaggaactacacatcactaaaccaaaaactccacccaaggacgggttcgtcattgccgacgttcaactggttacctctaactccccggaggagaaacaatctccactttcagcgttccgcagctctagttcgttgagaaagaagaacaactccggtgagaaagcactgccgccttggagatcaagtgataaacacccaacagacataataaggttcaactatctggataatcgggaccctatggaaacagtccaacaaggaaggcgaaagcggaaccagatgacccctgacttctcccgccagtcacatgataaaaagaataagctgcaggataggactcgtctgcggaaggctcagtccatgatgtccagaagaaatccctttcccctttgtccttag

SEQ ID NO: 187593 - DNA, 891 bp, synthetic construct
  misc_feature 1..891: note = Description of Artificial Sequence: Synthetic coding sequence
  source 1..891: mol_type = other DNA
atggacggcgacggcgaccccgagagcgtgggccagcccgaggaggcctccccggaagagcagccagaagaagcaagcgctgaggaggagcgccctgaagaccaacaggaagaagaagcagccgcagccgcagcctacctggacgaactcccggagcctttgttgttgcgggtcctggcagccctgcctgcagctgaactggtgcaagcttgccgactggtctgcctaaggtggaaagagctggtcgacggagcaccattgtggttgctgaagtgtcagcaggaaggcctggtccccgaggggggcgttgaagaagagagggaccactggcagcagttttatttcctgagtaagagacggagaaatctcctacgaaacccttgcggcgaagaggacctcgaaggctggtgcgatgtggagcacgggggggacgggtggcgagtggaagaactgcccggagactcaggcgtggagttcacccatgacgagagtgtcaagaagtattttgcctcctcctttgaatggtgcaggaaggcccaggtgatcgacctgcaagccgagggatattgggaagaactgttagacactacacagcctgcgatcgtggtgaaggactggtacagcggtagatctgatgccggttgtttgtacgagctcaccgtgaaactcttgagtgagcatgagaatgttcttgccgaattctcctccgggcaggtggctgttccccaggatagtgatggaggcggatggatggagatcagccacacttttactgactatggtccaggtgtgagattcgtaaggttcgaacatggcgggcaggacagcgtgtattggaaggggtggttcggcgccagagtcactaattcatccgtatgggtggagccttag

SEQ ID NO: 187594 - DNA, 594 bp, synthetic construct
  misc_feature 1..594: note = Description of Artificial Sequence: Synthetic coding sequence
  source 1..594: mol_type = other DNA
atggacggcgacggcgaccccgagagcgtgggccagcccgaggaggcgtctccagaggaacagcccgaagaggccagcgccgaggaggagaggcccgaggatcagcaggaagaggaagccgcagccgccgctgcttacctggatgagctgccagagcctctcttattgagagttctggctgctctcccagctgcagagctagttcaggcctgtaggttggtatgtctccggtggaaggaactagtagacggggccccactttggctactgaagtgccagcaggaagggttagtacccgagggtggagtcgaggaggagagggaccattggcagcagttttattttctgtctaagagaaggcgtaacctcctgcggaacccgtgcggagaagaggacctggaaggttggtgtgacgttgagcacggaggggatggatggcgagtggaagagcttccaggtgattcaggggtggaatttacccatgatgagagtgcccctgtattgccagggggagtcgcaaaacaccgtggcttactgggcggcgctgcggggcatgacagcgctggacaccgcggggagggcctggttagatag

SEQ ID NO: 187595 - DNA, 1614 bp, synthetic construct
  misc_feature 1..1614: note = Description of Artificial Sequence: Synthetic coding sequence
  source 1..1614: mol_type = other DNA
atgaagcactacagccccaccgactacgtgaactggctggaggagtataaagtgaggcagaaagcgggcctggaagcgcgtaagatcgttgcttccttctctaaaagatttttctccgagcatgtgccttgcaacggcttctccgatattgagaacctggagggaccagagattttttttgaggatgagcttgtgtgcatccttaacatggaaggcagaaaagctctaacttggaaatactacgccaagaagattctgtactacctgaggcaacagaagatcttgaataatctgaaggcattcctgcagcagcccgacgactacgaatcctacctcgagggtgcagtatacattgaccaatactgcaaccctctctcagacatcagcctgaaggatatacaagcgcaaatagattcgattgtagaactagtctgcaagaccttacgggggattaactcacggcacccgtctctagcattcaaggccggtgagtctagcatgattatggaaattgaactccagtctcaggtcttagatgctatgaactacgttctgtacgaccaactgaaatttaaagggaaccgcatggactactacaatgctttgaacctatacatgcaccaggttctcattcgccggactggcatcccaatctccatgagcctactctaccttaccattgcacgccagctcggagtacctctggagcctgtcaattttccaagccattttcttctgagatggtgccagggtgctgagggcgctaccctggacatttttgactacatctatatcgacgcctttggcaagggaaagcagctgactgtcaaggagtgcgagtacctgatcggtcagcacgtaacagcggccttatacggtgtagtgaatgtcaaaaaagtgctgcagagaatggtgggcaacctgctgtccctgggcaaacgggagggaatcgaccagagttatcagttgctgagggacagcctggatttatacctcgctatgtaccccgatcaggtgcaattgcttctgcttcaggccaggctgtattttcacctgggaatttggcccgagaaggtcctggatatcctgcagcatattcagaccctggaccctgggcaacatggcgccgtgggctatctcgtgcagcacactctcgagcatattgaaaggaaaaaggaagaggtgggagttgaggtcaaacttcgttcagacgagaaacatagagatgtgtgctactctatcggactgatcatgaagcacaaacggtatggctacaattgcgtgatttatggatgggaccccacctgtatgatgggacatgaatggattcgtaacatgaacgtgcactccctgcctcatggtcaccatcagccgttctataacgtcctcgtggaagacggtagttgcaggtatgcagcacaagagaatctggagtacaatgttgaaccccaggaaatatcgcatccagatgtgggccggtacttcagcgagttcaccggtacccactatatcccaaacgccgaacttgaaatcaggtatccagaagatttagagtttgtgtacgagacggttcagaatatctactctgccaaaaaagaaaatatcgatgagtag

SEQ ID NO: 187596 - DNA, 1887 bp, synthetic construct
  misc_feature 1..1887: note = Description of Artificial Sequence: Synthetic coding sequence
  source 1..1887: mol_type = other DNA
atggccgccgccgccgtggacagcgccatggaggtggtgcccgccttggccgaagaggccgccccagaggtggccggattaagctgcctggtgaatcttcctggcgaggtattggaatacatcttatgttgcgggagcctgaccgccgcggacataggacgcgtgtcttcgacctgtaggcgactgcgagagctgtgtcagtcctccggcaaagtgtggaaggaacagttcagagtcagatggccgtcactcatgaagcattacagtccaaccgactatgttaattggcttgaagaatacaaagtgcggcagaaggctgggctagaagcccgcaagatcgtagcttcctttagcaagaggttttttagcgaacacgtgccatgcaacggtttctcagacatcgagaatctggaaggccctgaaattttctttgaggacgaattggtttgcattctcaatatggaaggtcggaaggccttaacatggaagtattacgccaaaaagatcctctactatcttagacagcaaaaaatcctcaataatcttaaagcatttctccagcaacccgacgattacgaatcctacctggaaggagcagtgtatatcgatcaatattgtaacccattgagcgatatctccctgaaggacattcaagcacagatcgattccattgtcgagttagtttgtaaaactctcaggggcatcaacagcaggcatccaagcttggcgttcaaggccggggaatcctctatgatcatggaaatcgagttgcagtctcaggttctggacgccatgaattacgtactgtatgaccagttgaaattcaaaggcaacagaatggactattacaacgcgctgaacctgtacatgcatcaggttctgatcaggaggacaggtattccaatctcgatgagtctgctctaccttacaatagctagacaactgggagtccccttagagccagtaaacttcccgtctcacttcctgttgcggtggtgccagggagcagaaggggccactctagatatctttgactatatttatatcgacgcgtttggaaaagggaagcagctgacagtgaaggagtgtgaatacctcatagggcagcacgtgacagccgctctgtacggcgtagtgaacgttaagaaagtcctgcaacgcatggtaggaaatctactctccctgggcaagcgggagggtattgaccaatcttatcagcttctcagagactcattggatctttaccttgctatgtaccccgatcaggttcagttactgcttctccaggcaagactctatttccatcttggcatttggcctgagaagtcattttgcctggttctcaaagttctcgacatcctccagcacatacaaaccctcgaccccggtcagcacggagccgtcggctatctggtgcaacacactctcgagcatatcgaacgaaagaaggaggaagtgggcgtcgaggtgaagctaagaagtgacgaaaagcatagggatgtgtgttatagtataggcttgattatgaaacacaaacgatacgggtacaattgcgtgatttatggatgggacccaacctgtatgatgggtcacgaatggatccggaatatgaatgtgcattctttgccccacggacaccaccaacctttttataacgtgctggtggaggatggaagctgtcgctatgctgcacaggagaacttagaatacaacgtggagccacaggaaatcagccatcctgatgtaggcaggtatttcagtgaatttacaggtacccattacatcccgaatgcagaactggaaattagataccctgaggatctcgagttcgtatacgaaacggtgcagaatatctattccgccaagaaagagaacattgacgagtag

SEQ ID NO: 187597 - DNA, 1866 bp, synthetic construct
  misc_feature 1..1866: note = Description of Artificial Sequence: Synthetic coding sequence
  source 1..1866: mol_type = other DNA
atggccgccgccgccgtggacagcgccatggaggtggtgcccgccttagctgaagaagccgctcccgaagtggcagggctgtcatgcctggtgaatctgcccggtgaagtcttggaatatattttgtgctgcggatctctcacagctgccgacatcgggcgagtctcatccacgtgcagacgcctgcgagagctatgccagagtagtggaaaagtgtggaaggagcagttcagggtgcgttggccctcattgatgaagcactactccccaacagactacgtgaactggcttgaggagtataaggtccggcaaaaggcaggacttgaagccaggaagattgttgcctcttttagcaagaggttctttagcgaacatgttccatgtaatggctttagtgacattgagaatctggagggaccagaaatcttctttgaagacgaactggtctgtattctgaacatggaaggtcggaaggctttgacctggaaatattacgcgaaaaaaattctgtattacctccgtcagcagaagatcctaaacaacctgaaggccttcctgcagcaacctgacgattatgagtcatatctggagggcgcagtgtacatagatcagtactgcaatcctctcagcgatatttctctcaaggatattcaggcccaaattgactcaattgtagagttagtatgtaaaactctgcggggaataaacagcagacacccctcactggcttttaaggcgggcgagagtagcatgatcatggagattgagctgcagagtcaggtgctagacgcaatgaattacgttctgtatgatcagctgaagtttaagggaaatcgcatggactactacaacgcgctcaacctgtatatgcaccaggtgttgatccgtcgaaccgggatccctatcagcatgtcccttctgtaccttaccattgcccgccagttgggggtgccactcgagccagtgaactttccttcacacttcttattgaggtggtgtcagggcgctgaaggagctaccctcgatatttttgattatatttatatagacgcctttggtaaaggcaaacagttgaccgtgaaagaatgcgagtatctcatcggtcagcacgtcaccgcagcgctgtacggagtggtgaacgtgaagaaggtgctgcagcgcatggtgggtaaccttctcagcctcggaaagcgggaggggattgatcagagctatcaacttctgagggactctctggacttgtacctggctatgtaccctgaccaggtccagctcctgctgctgcaagcccgcctgtactttcacctcgggatatggcccgaaaaggtacttgacatcctgcagcacatccagactctggacccgggccagcatggggccgtcggctacttggtccagcacacccttgagcacatcgaaaggaaaaaggaggaggtgggtgtcgaggtgaaattgcgctccgatgagaaacatcgagacgtgtgttatagcatcgggctcatcatgaaacataaacggtatggctataactgcgtcatttatgggtgggatcccacctgtatgatgggccacgagtggattcggaatatgaatgtgcactctctacctcacgggcaccaccagcccttttacaacgtgttggtggaagatgggtcttgccgatacgctgctcaagagaatttggagtacaacgtggagccccaagagattagccaccccgacgtgggacgctatttttctgaatttactggcacccactatattcctaacgccgaattggagattcgttaccctgaggacctggaattcgtatatgagacagttcaaaacatttattccgctaagaaagaaaacattgatgaatag

SEQ ID NO: 187598 - DNA, 1434 bp, synthetic construct
  misc_feature 1..1434: note = Description of Artificial Sequence: Synthetic coding sequence
  source 1..1434: mol_type = other DNA
atgaagcactacagccccaccgactacgtgaactggctggaggagtacaaagtacgacaaaaagcaggtctcgaggcgcgtaaaattgtagcttctttcagcaagagattctttagtgagcacgtgccgtgtaacggcttcagcgatattgagaatctggaaggtcctgagatattcttcgaagacgagctagtgtgcattctgaacatggagggaagaaaggccctgacatggaagtattacgcaaaaaagatcttatactacttgcgacaacagaagattctgaataaccttaaggcgttcttgcaacagccagacgactatgagagctacctggagggtgccgtgtatatagaccagtattgcaatcccctgtccgatatatccttgaaggatattcaggcgcaaatcgactccatagtggagctcgtgtgtaagaccctaagaggtattaattctaggcacccaagcttggcctttaaggccggagagagttccatgatcatggagattgaactgcaaagccaggtgttggatgccatgaattacgtgctgtacgaccagttgaagttcaaaggcaacaggatggactactacaacgccctgaacctctatatgcaccaggtgctgatccggcgaaccggaatacccattagtatgtccctcctctacctcacaattgccaggcagctgggagtgccattggagcccgtcaatttcccgtcccatttccttctgagatggtgccagggcgctgagggtgaaggcatcgatcaaagctaccagctgttgagagattccctggatctgtacctggcgatgtatcctgaccaggtgcagctgctgctcttgcaggctcgtctgtatttccacttgggcatctggcctgaaaaggtgctggatatcctgcagcacattcaaacactggaccccggtcaacatggggcggtcgggtacctggtacagcatacactggagcatatcgagcgcaaaaaggaagaagtgggtgtggaggttaagctccgctcagacgagaaacatagggacgtgtgctatagtataggattaatcatgaaacacaagaggtatggctataactgcgttatctatgggtgggacccaacctgcatgatggggcacgagtggattcgaaatatgaatgttcactccctcccgcacggccaccatcagccgttctataacgtcttggtggaagatggatcttgcaggtatgctgcccaggaaaacttagagtacaatgtcgaaccccaggagatctcccatcctgacgtcgggcgatacttcagcgagttcacaggcacacattatattcctaacgctgagctagagatcaggtatcctgaggacctggagtttgtgtacgagacagtgcagaacatttacagtgcgaagaaggagaatattgacgagtag

SEQ ID NO: 187599 - DNA, 1212 bp, synthetic construct
  misc_feature 1..1212: note = Description of Artificial Sequence: Synthetic coding sequence
  source 1..1212: mol_type = other DNA
atggagcccgtgggctgctgcggcgagtgccggggcagcagcgtggaccctcggtcaacatttgtcctgtctaatctcgcggaagtcgttgagagagtattgaccttcttgcccgccaaagcgctcctgcgcgtcgcatgtgtgtgtagactgtggagagaatgcgtgcgtcgagttctgcgtacacatagatccgttacttggattagcgctggactcgctgaagctggccacctggaaggacactgtttggtccgggttgtcgctgaggagctcgaaaatgtgcgtatcttacctcataccgtgttatacatggcagactccgagacattcatctcccttgaagaatgccgcgggcacaagagagcccgcaaacgtactagcatggagaccgcgttggctctggagaaactgttccctaagcaatgccaggtgctgggcatcgttacaccaggcattgtggtgacacccatggggagcggatccaataggccgcaggaaatagaaatcggagaatccggattcgctcttctttttcctcaaatcgagggaatcaagatccagcctttccactttatcaaagaccccaagaacctcaccctggagaggcaccagctgacggaagtggggttgctggacaacccagagctcagggttgttttggtctttgggtacaattgctgcaaagttggggcctccaactacttgcaacaggtggtgtccactttctctgacatgaatattatcctggcgggtggacaagttgataacttaagctcactcacgagtgaaaagaatccacttgacatagacgccagcggtgtggttggcctgtccttctctggacacagaattcagagcgcaacagtgttgctgaacgaggacgtttcagatgagaaaacagcagaggccgcaatgcagcgcctgaaagcagctaacatcccggaacataatacgatcgggttcatgttcgcctgtgttgggcggggatttcagtactacagggcaaaaggaaatgtagaggccgatgccttccgcaaatttttcccgagtgtgcctttatttggatttttcggtaacggagagatcgggtgcgatagaattgtcacaggcaatttcatcttacgcaagtgtaatgaagtcaaagacgatgatttgttccactcctacaccacaattatggcactaatccatttaggatcttccaagtag

SEQ ID NO: 187600 - DNA, 831 bp, synthetic construct
  misc_feature 1..831: note = Description of Artificial Sequence: Synthetic coding sequence
  source 1..831: mol_type = other DNA
atggagcccgtgggctgctgcggcgagtgccggggcagcagcgtggatccccggtctaccttcgtgttgtccaatttggcagaggtcgtggaaagggttcttaccttccttccagccaaggcattgctccgagttgcctgcgtctgtcgcctctggcgggaatgcgtgcggagggtgttgcggactcaccggagcgttacatggatttccgccgggctggctgaagccgggcacctcgaaggccactgtctggtgagggtggttgccgaggaactggaaaatgttcgcattctgccacacaccgtgttatacatggctgattcggagacctttatttccctcgaagagtgccgggggcataagcgcgcgcgaaagagaacctccatggagacagccttggctttggaaaagctctttccaaaacagtgccaggtattggggattgtgacacccggaatcgtggtgacgccaatgggttctggctccaacagaccccaggagatcgaaatcggggaaagtggtttcgcactgctcttccctcagattgaggggatcaagatccagccatttcacttcattaaagatcccaagaacctcacgctggagagacaccagctcactgaagttggcctcttggacaacccagagctaagagtcgtgctggtcttcgggtacaattgctgcaaggtaggtgcctccaactatttacagcaggtcgtcagcacattttccgacatgaatatcattttagcgggcggccaagtcgataatctgtcctctcttacgtcagaaaagtatgtattgtgcgcctcagacttcgtttgtgaatag

SEQ ID NO: 187601 - DNA, 900 bp, synthetic construct
  misc_feature 1..900: note = Description of Artificial Sequence: Synthetic coding sequence
  source 1..900: mol_type = other DNA
atggccgacagcgagaccttcatcagcctggaggagtgccggggccacaaaagagctagaaaacggacttcaatggagactgcactggctctggaaaagcttttccccaaacaatgccaggttctgggaatcgtgacacccggaatcgtcgtaactcctatgggcagcgggtccaacagaccccaggagattgagattggagagtccgggtttgctcttcttttcccccagattgaaggaataaaaatacagcccttccatttcataaaggacccaaagaatcttacgttggagaggcaccagctgaccgaagtaggcctgctggataaccccgagctgagggtggtgcttgtgttcggttataattgctgcaaagttggggcctctaactacttgcagcaggtggtgagcacattctcagatatgaacataatccttgcaggggggcaagtagataacctgagtagtttgacctccgaaaagaatcctctggacatcgacgccagcggcgtggtgggcctcagctttagcggccaccgaatacagtcggccacagttctattaaacgaggatgtgtccgacgagaagaccgcggaggccgctatgcaacgactgaaagcagctaatatccccgagcacaatactattggcttcatgttcgcatgcgttgggagggggttccagtactacagagcaaagggcaacgtggaggccgatgcgtttcgcaagtttttccccagtgtgccactttttggattttttggaaatggcgagattggctgcgatcgaatagttactgggaacttcattctgagaaagtgcaatgaagtcaaggacgacgatctgtttcatagctacacaacaattatggcacttatccatctgggaagcagcaaatag

SEQ ID NO: 187602 - DNA, 1743 bp, synthetic construct
  misc_feature 1..1743: note = Description of Artificial Sequence: Synthetic coding sequence
  source 1..1743: mol_type = other DNA
atgggcgagaaggccgtgcccctgctgcggcggcggcgggtgaagagatcttgtccttcgtgcggaagcgaactcggagtggaagagaagagggggaagggcaaccctatcagcatccagctgtttcctcctgagctggtggaacacatcatcagctttctgcctgtgagagacctagtggcccttgggcagacttgcagatacttccacgaggtatgtgacggtgagggagtctggaggcgaatttgtagaaggctgtcaccccggctgcaggatcagggttcgggtgtacgcccctggaagagggctgcaatcctgaactatactaagggcttatactttcaggcgtttgggggtagaaggcgatgcttaagcaaaagcgtcgctcccctgctcgcacatggttacagacggtttctgcccaccaaggaccacgttttcatcctggattacgtgggaaccctgttcttcctgaagaacgcactcgtctccacactgggacagatgcagtggaaacgcgcatgtagatatgtggtactttgcagaggcgcgaaagatttcgctagcgatccacgttgcgatactgtttaccggaaatatctctacgttctggctactcgggagccacaagaagtcgttggaactacatctagtcgcgcatgtgattgtgtcgaagtctatctacagtcttctggccaacgggtcttcaagatgaccttccatcattctatgaccttcaagcagatcgtgctggttggccaggagacccagcgtgccctgctcctactcaccgaggagggaaagatttactcacttgtggtaaatgagacccagctcgaccagccccgaagctacactgtccagttagcactccgcaaagtatctcactatctccctcatctccgcgtggcctgtatgacgagtaatcagtcttctacactgtacgtgaccgaccaggggggggtttactttgaagtacatacccccggggtgtaccgggacctattcggcaccctacaggcctttgacccccttgaccagcagatgcccctggccctgtctctgcccgccaaaatactgttctgtgcgctgggatacaaccatcttggactggttgacgaattcgggcggatttttatgcagggcaataacaggtatgggcagttaggcactggcgataaaatggacaggggcgaacccacccaggtgtgctacctccaacggccaatcactctctggtgcggcctgaaccatagtttggtgctctctcagtccagcgaatttagcaaagagttgctgggctgtgggtgtggcgcagggggcagactccctggatggccaaaaggctctgcttcttttgtcaaacttcaggtgaaggttccactctgcgcatgcgccttatgcgcaactagagagtgcctgtatattctcagcagtcacgatattgagcagcatgccccatatcgccaccttcctgctagccgagtagttgggacacccgaaccctcactgggggcacgagctccacaagatccaggcggcatggcacaggcatgtgaagaatacctctctcagatccactcctgtcagacgctgcaggatcgcaccgagaagatgaaagaaattgtcggatggatgccactgatggcagcacagaaggattttttctgggaagctttggacatgctgcaaagggcagaagggggtggcggcggtgtgggtcctcccgcccccgagacttag

SEQ ID NO: 187603 - DNA, 957 bp, synthetic construct
  misc_feature 1..957: note = Description of Artificial Sequence: Synthetic coding sequence
  source 1..957: mol_type = other DNA
atgggcgagaaggccgtgcccctgctgcggcggcggcgggtgaagcgctcatgtccatcctgcggctccgaattgggagtggaggagaaacgaggcaagggaaatccaattagtattcaactgtttcctcctgagctggtggagcacattatcagttttcttcccgtgcgagacctagtagcgctcggtcaaacgtgtcggtatttccatgaggtctgtgatggcgagggcgtgtggcggcgtatatgtcgacgactctcaccccgcttacaggatcaggacaccaagggcctttatttccaggcatttggaggccggaggcggtgcctgagtaagtcagtggcccccctgctcgcccatggatatagaagatttttacccactaaggatcatgtgttcattctcgattacgtgggcacgttgttcttcttaaagaatgccctggtgagcacgttaggacagatgcaatggaaaagagcctgcagatacgtggtgctgtgtcgcggtgccaaagacttcgccagcgaccccaggtgcgataccgtctaccgaaaatacctttacgtgttggccacaagagagccacaggaggttgtcggcaccacatccagccgggcttgtgattgcgtcgaggtttacttgcagagcagcggccagcgggtttttaaaatgacttttcatcactcaatgactttcaaacagatcgttctcgtcggccaggaaacccagcgtgcactcctactgctgaccgaagagggaaaaatttactccctcgtggtgaacgaaacccagctcgatcagcctcgttcatataccgtgcagctggccctcaggaaggtatcacactaccttccccatctccgggtcgcttgcatgaccagtaaccagtcatctactttgtatgttacggatcctatcctctgcagttggctgcagccaccatggcccgggggatag

SEQ ID NO: 187604 - DNA, 1857 bp, synthetic construct
  misc_feature 1..1857: note = Description of Artificial Sequence: Synthetic coding sequence
  source 1..1857: mol_type = other DNA
atggtgtgggagagccagcaggagcggggcggccagggcccccggcggcaggaaggccgcagcagagaaggagccatccgaatggtgagggggagccaaagaaggaagttgcagaaatttacccgtttatgtgggagagaagaggggttgcgggtcaagagatcctgtccaagttgcggctctgagcttggcgtggaggagaagagaggtaaggggaacccaatctcaatccagcttttcccccctgagctggtggagcatattatttccttcctcccagtccgcgacctagtagctttgggacaaacctgtcgatacttccacgaagtctgcgatggggagggagtttggcgccgtatctgccgacgtcttagcccacgtttacaggaccagggaagtggcgtaaggccatggaagagggctgctattctgaactacacaaagggtctctactttcaggccttcggaggcaggcggcgttgtctaagcaaaagtgtggcccctctgctcgcccacggctaccggaggtttttgccgacgaaggaccatgtcttcattcttgactatgtaggaactctctttttcctcaagaacgctcttgtttccaccttaggtcaaatgcagtggaagcgagcttgtagatacgtcgtgctctgccgtggcgccaaggatttcgcctccgacccccggtgcgacaccgtataccggaagtatctgtacgtgctggctacacgcgaacctcaagaggtcgtgggcaccacctcatccagagcttgcgactgtgtggaagtatacttgcagtcctctggccagcgggtgttcaaaatgacattccatcacagtatgacatttaaacagatagtgttggtagggcaggagacccagcgtgctctgctgttgcttactgaagaaggcaaaatctactctcttgtagttaacgagactcagttggaccagccgcgctcatataccgtacagctggctctccgcaaagtgtcacactacctcccacatcttagggtagcctgtatgacgtccaatcagtcatcgaccttgtacgtgactgatcagggaggcgtgtatttcgaggtgcatacgccaggcgtgtaccgcgatctctttgggacccttcaggctttcgatccacttgatcagcaaatgcccctggcattgtcattgccagcaaaaattctgttttgcgctctggggtataaccatctggggctggtcgatgaattcggccggatatttatgcaagggaacaaccgatatggtcaattgggcaccggagacaagatggataggggcgaaccaacacaggtctgctacctgcagcgacccatcacactgtggtgcgggctgaatcactcactggtgttgtcccagtcatccgagttctccaaagaattactcggttgcgggtgtggcgccggaggaagactacctggctggccaaaagggtccgcttcattcgttaagctgcaggtgaaggtccctctttgtgcatgtgccttgtgtgcgacacgcgaatgcctctacattttgagctcacacgacattgaacagcacgcgccctatcggcacctgccagcgtccagggtggtcgggactccagagccgtctctgggagcgagagcccctcaggaccctggtgggatggcccaggcttgtgaggaatatttgtctcagattcattcctgccagacgttgcaggacaggacagagaagatgaaggaaatcgtgggctggatgcctctgatggcagcgcagaaagatttcttctgggaagcactggacatgttgcagcgtgcagaaggcggcggagggggagtcgggccaccagcccctgagacttag

SEQ ID NO: 187605 - DNA, 957 bp, synthetic construct
  misc_feature 1..957: note = Description of Artificial Sequence: Synthetic coding sequence
  source 1..957: mol_type = other DNA
atgggcgagaaggccgtgcccctgctgcggcggcggcgggtgaagcgaagctgtccttcgtgcggatctgaactaggagttgaggagaagcgggggaaaggcaatcccatatccatacaattgtttccgccagagctcgtggagcacatcatatccttcttgcccgtgagggatttggtcgctctgggacagacctgtcggtacttccacgaggtctgtgacggggagggggtgtggcggcgcatctgtcgcaggctttctccccgtttacaagaccaggacacaaagggcctgtacttccaagctttcggcgggcgccggagatgcctctcgaaaagcgtcgcccctttgctggcccacggttataggcgcttccttcccacaaaagaccacgtgtttatcctggactatgttggaactctgttttttctcaaaaacgccttggtgtctaccctgggccagatgcaatggaagcgggcatgccgctatgttgtgctgtgcaggggtgccaaggattttgccagcgatccccgttgcgacactgtatacaggaagtacctctatgttctggccacgcgtgaacctcaagaggtcgtgggaaccacgtcctccagagcctgtgactgtgtggaagtatacctacagtcctccgggcagcgagtgtttaagatgacttttcatcatagcatgacattcaagcagatcgtcctagtgggacaggaaacccagagagcgctcctgcttctgaccgaggaaggaaaaatttactcacttgtagttaatgaaactcagctggatcagccgcgcagttataccgtacagctggccctaagaaaggtgtctcactatctgccccatctgcgggttgcatgcatgacaagcaatcagagcagtacactgtatgtaacggaccccatcctgtgtagttggctgcagcccccgtggcccggcggctag

SEQ ID NO: 187606 - DNA, 1707 bp, synthetic construct
  misc_feature 1..1707: note = Description of Artificial Sequence: Synthetic coding sequence
  source 1..1707: mol_type = other DNA
atggtgaagcggagctgccccagctgcggcagcgagctgggcgtggaggaaaagcgtggtaaggggaatcccattagcattcaactctttcccccagaactcgtggagcacattatctcattcctgcctgtacgcgatttggtcgccctgggacagacatgtcgctatttccacgaggtgtgcgacggcgagggcgtttggaggagaatttgtaggaggttatctccccggctacaggatcaagggagtggcgtgaggccatggaagcgggctgcgattctgaactacaccaagggcctgtactttcaggctttcggtggtcggagacggtgcctctcgaagtctgttgcacctcttctcgcacacggctatcgtaggttcctgccaacaaaagatcatgttttcatactggactatgtgggtaccctctttttcctgaaaaatgcgctggtgtctactctggggcaaatgcagtggaagcgggcttgtagatatgttgtcctgtgcaggggggctaaagacttcgcctcagatcctagatgcgacactgtgtatcgcaaatatctgtacgtgctggctactagggagcctcaggaagtggtggggactacttcaagccgcgcctgcgattgtgttgaagtgtatcttcagagcagtgggcaacgagtgtttaagatgacctttcaccattctatgacgtttaaacagattgtgctggtcggacaagagactcagagggccctgctcttattgaccgaagagggaaaaatctacagtctcgtggtgaatgaaacacagctcgaccaaccccgcagctacactgtccagcttgcattgcgcaaggtgtcccactacctgccccacctgagggtggcctgtatgacctcaaatcaatctagcacactctatgtgacagaccagggtggcgtgtacttcgaggtccacacaccaggcgtgtatcgagatctgttcggtaccctgcaagccttcgatcctctagaccagcagatgccacttgctctcagcttacctgccaaaattctgttttgcgctctcggctacaaccatcttggcctggtcgatgaattcggccgcattttcatgcagggcaacaatcggtatggccagcttgggacaggggacaaaatggaccgcggcgaacccactcaggtgtgctaccttcagcggccaataacactctggtgtggccttaatcattctttagtcctgtctcagtcgagcgagttctctaaagagttgctgggttgtggttgtggtgcaggcggcagacttcccgggtggccgaagggttctgcatcttttgttaaattgcaggtaaaagtaccgctgtgcgcgtgcgctctgtgcgccacccgggaatgtctgtatatcctttcctcacatgacatcgagcaacacgcaccataccgccacttgcccgcctcccgcgtggtggggacacccgaacccagcctcggagccagggcacctcaggaccccgggggaatggcccaggcctgcgaggaatatctgtcacagatacacagctgccagacactgcaggacagaacggagaagatgaaagagattgtgggttggatgcccttgatggccgcccaaaaggactttttctgggaagctctggatatgttacagcgtgctgagggtggcggaggaggggtgggaccccctgctcccgaaacctag

SEQ ID NO: 187607 - DNA, 1104 bp, synthetic construct
  misc_feature 1..1104: note = Description of Artificial Sequence: Synthetic coding sequence
  source 1..1104: mol_type = other DNA
atgcccttcctgggccaggactggcggagccccggctggagctggattaagaccgaggacggatggaaacgatgtgagtcatgcagtcaaaagctcgaacgggagaacaaccgatgcaatatctctcattccatcattctgaattcagaggacggagaaatcttcaacaacgaggagcacgagtacgcttccaagaaaagaaaaaaagaccactttcgcaatgacaccaatactcagtctttctacagggaaaaatggatctacgtccacaaggagtccactaaggagagacacggatattgtacactaggagaggcctttaatcgcctggactttagcagcgcaattcaggacatcagaagatttaattatgttgtaaagctgctgcaactgattgctaaatcgcaactgaccagcttatccggagtagcccagaagaactacttcaatatcctggacaagattgtgcagaaagtgctcgacgatcaccataatcccagattaataaaagatctgctccaggacttgagttcgacactgtgcatcctaattaggggagtaggcaagagcgtactggtcggcaacattaatatctggatttgtaggctggaaacaattttggcatggcagcagcaattgcaggacctacagatgactaaacaggtgaacaatgggctgactctgagtgatcttccgctccacatgctgaacaatattttgtatcggttttccgatgggtgggacatcatcaccctgggccaagtaacacccactctttacatgctgtcggaggatagacagctgtggaagaaactatgtcagtatcactttgccgagaaacagttttgcaggcacttaatcctcagcgaaaagggccatattgagtggaagctgatgtacttcgcactgcagaagcactaccccgctaaagagcagtacggagacacactgcatttttgccgccactgctccattctgttctggaaggattatcacttagcgctgctgtttaaggactccggacacccatgcactgcagcagatcccgatagctgcttcacccctgtgtctcctcagcattttattgaccttttcaaattctag

SEQ ID NO: 187608 - DNA, 1077 bp, synthetic construct
  misc_feature 1..1077: note = Description of Artificial Sequence: Synthetic coding sequence
  source 1..1077: mol_type = other DNA
atgcccttcctgggccaggactggcggagccccggctggagctggatcaagactgaagatggctggaagaggtgtgagtcatgcagtcagaagctcgagcgggagaataatcgctgcaacatcagccattccatcatcctgaatagcgaggatggcgagatctttaataacgaggaacacgaatatgctagcaagaagcggaaaaaagaccacttcaggaatgatacaaatacccagtcgttctatcgcgaaaagtggatttatgttcataaagaaagcaccaaggaacggcacggatactgtaccctaggtgaggcctttaaccggctagacttctctagcgcaatccaagatataagaaggtttaactatgtggtcaaactccttcagttgattgcaaagagccagcttacctccttatccggagtcgcacagaagaactatttcaacattctagacaagattgtccagaaagtgcttgacgatcaccacaacccaaggctgatcaaagatctcctccaggacctgagctccacactttgcattctcattcggggtgtcggaaaatcagtgcttgtgggcaatataaacatatggatttgtcgcctcgagaccattctcgcgtggcagcagcagctgcaggacctccagatgaccaagcaggtcaataatgggctgactcttagcgacctgccccttcacatgcttaataacatcctgtatcgattttcagacggatgggatataatcactctgggacaggtgactcccacgctgtacatgctgtcagaggacaggcagctatggaagaagctgtgtcagtatcacttcgccgaaaagcaattttgtaggcacctgatcctgtccgagaaggggcacattgagtggaaactcatgtattttgccctgcagaagcattacccagctaaggagcaatacggcgacacactgcacttctgccgccactgctctattctgttctggaaggactccggacatccctgtacggcagccgatcccgatagttgctttactcccgtatccccccagcatttcatagacctcttcaaattttag

SEQ ID NO: 187609 - DNA, 876 bp, synthetic construct
  misc_feature 1..876: note = Description of Artificial Sequence: Synthetic coding sequence
  source 1..876: mol_type = other DNA
atggagaagtacagcatcatgaagagcatgaacatgcaccggaagaaggggaaaagaactattctagaaatgacccagattctcaaaagacacggatattgtacgctgggagaggcatttaatcgcctagactttagctctgcgattcaagacatacgccgctttaactatgtggttaagcttttgcagcttatcgccaagtcgcagctaacatcgctttcgggagtggctcagaagaattattttaacatactagacaaaatagtccagaaggtgctcgacgatcaccataacccacgcctgataaaagatctgttgcaggacctttccagtacgctctgtattttaatacgaggagtcggaaagagtgtgctcgtcggcaatattaacatctggatatgtaggctagaaaccattcttgcatggcaacagcaactccaggatctccagatgaccaagcaggtgaataacggattgactcttagcgacctgcccctacacatgcttaataatatcctttaccggttctccgatggatgggacatcatcacactgggtcaggttaccccaacgctgtacatgctgtcagaagataggcagctttggaagaagctctgtcaataccacttcgccgagaagcagttctgccgacacttaatcctgtctgagaagggccatattgagtggaagttaatgtacttcgcactacagaaacattaccctgccaaggaacagtacggggatactctacatttttgtcggcactgttcaattctgttctggaaagatagcggtcatccttgcaccgctgccgaccccgattcgtgcttcacccccgtgagtcctcagcatttcatcgatcttttcaaattctag

SEQ ID NO: 187610 - DNA, 876 bp, synthetic construct
  misc_feature 1..876: note = Description of Artificial Sequence: Synthetic coding sequence
  source 1..876: mol_type = other DNA
atggagaagtacagcatcatgaagagcatgaacatgcaccggaagaaaggaaagcgaaccattctggagatgacacagattctgaaaagacatggctattgtactttgggcgaagccttcaatagacttgacttttcatccgctatccaggacattcggagatttaattatgtcgtgaaactactccagctgattgcaaagagtcagttaacatcactgtccggggtggcccagaaaaattactttaatatacttgataagatcgtgcagaaggttttggacgatcatcacaacccccggctgattaaggatctgctgcaagacttgagctctaccttgtgtatcctgatccggggtgttgggaaatccgtgcttgtaggaaatatcaacatctggatttgtaggctggaaacaatcctcgcctggcagcagcagttacaggatctacagatgacaaaacaggtgaacaacggacttacgctgagtgatctgccactccatatgttaaacaacatcctttaccggttttcagatggttgggatatcattacactgggtcaggtcactcccacactctacatgctgagtgaggaccggcagctgtggaagaagctctgccagtaccacttcgccgagaaacagttctgtaggcacctcatcctgtctgaaaaaggtcacatcgaatggaagctaatgtactttgcgctgcagaaacattaccctgccaaggaacagtatggagacacgctccacttttgcaggcactgttccatccttttctggaaagacagcggtcacccatgcactgccgccgatcctgatagttgttttacaccggttagcccccaacactttatagacctgtttaaattctag

SEQ ID NO: 187611 - DNA, 993 bp, synthetic construct
  misc_feature 1..993: note = Description of Artificial Sequence: Synthetic coding sequence
  source 1..993: mol_type = other DNA
atgcccttcctgggccaggactggcggagccccggctggagctggattaagactgaagacggatggaaacgatgtgagagctgctcgcaaaaactggaaagagaaaataatcgttgtaatatcagccattctattattttgaatagcgaagacggagagatcttcaataacgaagagcacgagtatgcatccaaaaagagaaagaaggatcacttccgcaacgacaccaatactcagtcgttctatagagagaaatggatttatgtccataaggagagcaccaaagagcgtcacggttactgtaccctcggagaagcctttaaccgtctcgacttcagttctgccatacaggacattcggagatttaactacgtcgttaaacttcttcagctgatcgccaaatctcagctgacaagtctctcaggagtcgcccagaaaaactatttcaatatactagataaaatcgttcagaaggtactcgatgatcatcacaaccctcgtctgatcaaggacttactccaggatttatcttcaactctgtgcatcttaatcaggggcgtggggaaatccgtcctcgtcgggaacataaacatttggatttgccgattggaaacaattctggcctggcagcagcagctgcaagacctccaaatgacaaaacaggtgaacaatgggctcactctgtccgaccttcctctgctgtcagaggaccgtcagctctggaaaaaactgtgccagtatcatttcgcagaaaaacagttttgccggcatctcatcctgagcgaaaagggccacattgagtggaagcttatgtatttcgcactacagaagcactacccagctaaggaacagtatggagataccttgcatttctgtagacactgctccatcttgttttggaaggacagcgggcatccctgtacagctgccgaccccgatagctgcttcacacccgtcagccctcagcatttcatagacctgtttaagttctag

SEQ ID NO: 187612 - DNA, 378 bp, synthetic construct
  misc_feature 1..378: note = Description of Artificial Sequence: Synthetic coding sequence
  source 1..378: mol_type = other DNA
atgcccttcctgggccaggactggcggagccccggctggagctggatcaaaacagaggacggctggaaacgctgcgaaagttgttctcaaaagctcgagagggagaacaatcggtgcaatatttcacactccatcatcctcaactccgaagacggagagattttcaataatgaggagcatgaatatgcaagtaagaaaaggaaaaaggatcactttaggaatgacactaatacccagtctttttaccgcgagaaatggatttacgtccataaagaaagcacaaaagaaagacacggttattgcacgttaggggaggcatttaataggctggatttcagttcggccatccaggacatccggcgtttcaattatgtctag

SEQ ID NO: 187613 - DNA, 852 bp, synthetic construct
  misc_feature 1..852: note = Description of Artificial Sequence: Synthetic coding sequence
  source 1..852: mol_type = other DNA
atgggcgccagcgtgagccggggccgggccgcccgggtgcccgccccggaacccgagcctgaagaggccctagatctctcccagctgccccctgagttactgttagtggtgctatcacacgtacctccaaggacgttgctgggtcggtgccggcaggtttgtcggggatggcgcgcactggtcgatggccaagccctgtggctgctcattctggcccgggatcatggcgcaactggaagggctctactgcacttagcacgctcgtgtcagtctcccgcgcgtaatgccagaccctgtcctcttggccgcttctgtgcccgaagacccattgggcggaacctgattcgtaatccctgtggacaagagggtcttcggaaatggatggtgcagcatggaggcgatggctgggtcgtcgaggagaatcgcacgaccgtgcccggtgcgccatcccagacttgcttcgtcacatctttcagctggtgctgcaaaaagcaggtcctcgacttagaagaggaggggctctggcccgaattgctggacagtggccgcattgaaatctgtgttagcgactggtggggagctcgccacgatagcgggtgcatgtaccgtctgctcgtgcagctgctggacgcgaatcagacagttttagataagttttcagctgttcctgacccaattccccagtggaacaacaatgcgtgcttacatgtgacacacgtgttcagtaatatcaagatgggcgtccgattcgtttcatttgagcataggggacaggacactcagttctgggctggtcactacggggcccgcgtcacgaatagttctgtgatagttagagtcagactatcatag

SEQ ID NO: 187614 - DNA, 852 bp, synthetic construct
  misc_feature 1..852: note = Description of Artificial Sequence: Synthetic coding sequence
  source 1..852: mol_type = other DNA
atgggcgccagcgtgagccggggccgggccgcccgggtgcccgcccccgaacccgaaccagaggaggccctcgatctcagtcaactgcctccggaactacttctcgtcgtgctttctcatgtacccccacgaacacttttgggacgctgccgccaggtttgcagggggtggcgggcattagtcgacgggcaagccctgtggttacttattctggcaagagatcacggggccacagggagagctctattgcacctagctcgcagctgtcagagccccgcacggaatgcgaggccgtgtcccctgggaagattctgtgccagacgccctatcggcaggaacctgatccgaaacccctgcggacaagaaggcctgaggaaatggatggtccaacatggaggcgacgggtgggtggtcgaggagaaccgcacaacagtgccaggtgctccaagccagacgtgtttcgttacgtcattctcctggtgttgcaagaagcaagtgctagatctggaggaagaggggttgtggcctgagctgctggatagcggtcggatcgagatctgcgtgtctgattggtggggcgccagacatgacagcggctgcatgtaccgcctgctggttcagctgctagacgctaatcaaaccgtgcttgataaatttagtgccgtcccagaccccatacctcagtggaataataacgcttgtctgcatgtaacacatgtgttttctaatattaagatgggggtgagattcgtgtcattcgaacataggggacaagacacccagttctgggccgggcactacggtgccagggtaactaactcctctgtgatagtacgggttcgcctctcttag

SEQ ID NO: 187615 - DNA, 1107 bp, synthetic construct
  misc_feature 1..1107: note = Description of Artificial Sequence: Synthetic coding sequence
  source 1..1107: mol_type = other DNA
atggccgccgccgccgaggagcggatggccgaggagggcggcggcgggcagggcgatggcggcagctccctggccagtggttcaacccagcgccagccacccccacctgcaccccaacaccctcagcctgggagtcaggcccttcctgccccagccctggctcctgaccagctgccccaaaataacactttggttgccctgcctattgtcgctatcgaaaacatattgtccttcatgtcttatgatgaaataagccagctgaggctggtgtgcaagagaatggatctggtgtgccaaaggatgctcaaccagggatttcttaaggtggaacggtaccacaacctttgtcagaagcaggttaaagcacagctccctcggcgcgaatccgagagacgaaaccactcactcgctcggcacgctgacatcctggcagcggtcgagactcgcctgtctctgttgaatatgaccttcatgaagtacgttgatagtaatctgtgttgttttattccagggaaggttatcgatgaaatttatcgggtgctacggtatgtcaattccacacgagctccccagcgtgcccatgaagtgttgcaggagctcagggatataagctctatggcaatggagtactttgacgaaaagattgttccaattctcaaacgtaaactgcctgggtccgatgtttctgggcgtttgatggggagtccacctgtgcctgggccaagtgccgcccttaccacaatgcagctattcagcaagcagaatcctagtcgccaggaagtgactaagctgcaacagcaagtgaaaactaatggcgccggcgtcacggttctgcgccgggagatcagcgagttacgcacgaaggtgcaggagcagcagaagcaactacaggaccaggatcagaagctgctggagcagacacagatcataggcgagcagaacgcacgattggccgagttagaaaggaaactgagggaagtcatggagtctgccgtgggcaatagctcagggtctggtcaaaatgaggaatcaccgaggaagagaaaaaaggcaactgaagcaatcgacagtctgcgcaagagcaagagactccgtaatcggaagtag

SEQ ID NO: 187616 - DNA, 540 bp, synthetic construct
  misc_feature 1..540: note = Description of Artificial Sequence: Synthetic coding sequence
  source 1..540: mol_type = other DNA
atggccgccgccgccgaggagcggatggccgaggagggcggcggcgggcaaggggatggagggagttccctcgcctccggctcaacccagcgacaaccacccccgcccgcccctcaacatccccagcccgggtcgcaggctctgccggctccggcgttagcacccgatcaattgccgcaaaataatactctggtggctcttcctatagtggcaatcgagaatattctctcctttatgagctacgatgaaatctcccagctgaggttggtatgcaaaagaatggacctcgtctgccagcgaatgctcaatcagggttttcttaaagttgaaaggtaccacaatctttgtcagaagcaagtcaaagcccagttgccacggagagaatcagagcgacgcaaccactcactcgcccggcatgcggatatcctggcagctgtggaaacccgtctgtccctcctgaatatgactttcatgaagtatgttgattctaacttgtgttgcttcatccccggcaagttccaagatcgtctccagccttag

SEQ ID NO: 187617 - DNA, 1416 bp, synthetic construct
  misc_feature 1..1416: note = Description of Artificial Sequence: Synthetic coding sequence
  source 1..1416: mol_type = other DNA
atggccgccatggagaccgagaccgcccccctgaccctggagagcctgcctacagatccactgcttctgatactgtccttcttggattatagagatctgatcaactgttgttacgtgagtagacgcctgtctcagctctcctcccacgatcccctatggaggcgacattgtaagaaatattggttgatttccgaggaagagaaaacccagaagaatcagtgctggaaatccctcttcatcgatacatacagcgatgtcggcagatatatcgaccactatgccgccatcaagaaggcctgggacgatcttaagaaatatctggagcctcggtgtcctcgcatggttctcagtctgaaagagggagcacgagaggaagacctagatgctgtagaagcccagatagggtgcaagctgcctgatgactatcggtgctcataccgcatccataatggacagaagctggttgttcctggattgcttgggagcatggcactcagcaaccactatcgcagcgaagacttacttgatgtggatacagccgccgggggcttccagcagcgccagggcctgaaatactgtcttcccttaaccttctgtatccacaccggactatcccagtacattgctgtggaggcggctgaaggcagaaacaagaacgaggtgttctaccagtgccctgaccagatggcccggaatccagctgcgattgatatgtttatcattggagccaccttcaccgattggttcacgagctatgtcaaaaatgtggttagtggcggctttccaattatccgggatcagattttccgatatgtgcacgacccagaatgcgtcgctacaaccggcgatatcactgtcagcgtgtccacctccttcctgccagagctcagtagtgttcacccacctcattacttcttcacatatcgaattcgcattgagatgagcaaagacgctctgcctgagaaggcctgccagctggacagccgttactggagaattacaaacgcgaagggagacgtggaagaagttcagggccctggggttgtgggggagttccccattatctcaccaggccgcgtctacgagtataccagttgcaccactttctcgacaacttccggctatatggaaggttattacacatttcactttctttatttcaaagacaagatcttcaacgtagctattcctagattccatatggcttgccctacatttagagttagtattgcccggctcgaaatgggccccgacgaatacgaggaaatggaggaagaagaggaggaggaagaagaggaggacgaggacgatgacagtgccgatatggatgaatctgatgaagacgacgaagaggaacgccgcagacgcgtgtttgatgttcctattcggcgtagacggtgttctcgtcttttctag

SEQ ID NO: 187618 - DNA, 519 bp, synthetic construct
  misc_feature 1..519: note = Description of Artificial Sequence: Synthetic coding sequence
  source 1..519: mol_type = other DNA
atggagaccgagaccgcccccctgaccctggagagcctgcccaccgaccccctgcttctcattttatcatttctggactaccgggatctgatcaactgctgttatgtgagccggaggctctcacagctttcatcacatgacccactgtggcgccggcattgcaaaaaatattggttgatttctgaggaggagaaaacccagaagaaccaatgctggaaaagtctgttcatcgacacttactcggacgtgggccgttacattgaccactatgctgctataaagaaggccggcatgatatcaagaaacatctggagccctggcgtcctcggctggttcgtgtccattaaccgaggttgctccaggggtcggccaagatgctgcggaagcgcagattggtgcaaattacctgatgactatcgatgcagttaccggatccataacggtcaaaaactggtggtccccgggagctactgggaggcatggcattgcctgatcaccattgtgctgaagatatgttag

SEQ ID NO: 187619 - DNA, 1248 bp, synthetic construct
  misc_feature 1..1248: note = Description of Artificial Sequence: Synthetic coding sequence
  source 1..1248: mol_type = other DNA
atggccgccatggagaccgagaccgcccccctgaccctggagagcctgccaaccgaccctttactgctcattcttagtttcctcgattacagggatctgataaattgctgttacgtgagccggagacttagccagttgtctagtcacgacccgctttggcgcagacactgtaaaaaatattggttaatctccgaggaggagaagacacagaaaaatcaatgttggaagtcacttttcatcgatacgtacagcgacgttgggagatatatcgatcactatgccgccatcaagaaagcttgggatgatctaaagaaatatcttgaacctcggtgcccacgcatggtcctatcgttgaaggagggcgctcgagaagaggacctggatgctgtggaagcacagatcgggtgcaagttacccgatgattaccggtgctcttatcgcatacacaatggccagaaactcgtcgtgcccgggttgctcgggtctatggctctgtcgaaccactacagatcggaggacctgctagacgtggatacagctgcggggggtttccagcaacgccagggcctaaagtactgtctaccactgaccttttgcatacacactggtttaagtcagtatattgccgtggaggcggcagagggccgaaataaaaacgaagttttttatcagtgcccagatcagatggcgcgtaaccctgctgccatcgatatgtttattattggcgcaactttcaccgactggttcacctcctatgttaaaaatgtggtgagcggcggctttcccataattcgggaccaaatatttcgttacgtgcacgacccggagtgcgtcgcgaccactggtgacattacggtcagcgtgagcaccagcttcctcccggagctcagctcggtacatcctccacactacttttttacctacaggattaggatcgaaatgagcaaagatgccctgccagaaaaggcctgtcagctggacagcagatattggcgcatcaccaatgccaagggggatgtggaggaagtacaggggcctggtgtggtgggcgagtttcccattataagtcctggccgggtgtacgaatacacctcatgcacaacgttctccacaacttcaggatacatggaggggtattatacctttcactttttgtacttcaaggataagatcttcaacgtggccattccccgttttcatatggcttgccccacctttagagtttcaatagcacggctggtttcctag

SEQ ID NO: 187620 - DNA, 2238 bp, synthetic construct
  misc_feature 1..2238: note = Description of Artificial Sequence: Synthetic coding sequence
  source 1..2238: mol_type = other DNA
atggaggaggagctgcagcacagccactgcgtgaactgcgtgagccggcgctgtatgacaaggcctgagccagggatatcctgcgatctcatcggctgccctctggtctgtggcgccgtcttccatagctgtaaggctgacgagcaccgcctcctgtgtccatttgaacgggttccctgtctcaatagcgatttcggttgtcccttcactatggccagaaataaagtggccgagcatctagagatgtgccctgcttctgttgtttgttgtaccatggaatggaacaggtggccggtttcttatgcagatcgcaaaagctacgaaaacctctcaagggacgtggacgaggttgcccagctagatatggctctggcactgcaggatcagcgtatgctactagaaagcctaaaggtcgccacaatgatgagcaaggcaacagacaaggtttccaagccccgcgaacagataagcgttaaatccagtgtgcccgagataccgcacgccaatgggctcgtgagtgtcgatgaggaatcctacggggctttgtatcaagcgacagtcgaaactacacggtcactggcagccgctctcgacatactaaacaccgcaaccagagacataggaatgttaaatacatccgttcctaacgacatggatgaacagcagaatgcacgagaatctcttgaagaccagaacttgaaagaccaggaccatctctacgaggaggaaattggagcagtgggcggaatagactacaatgatacgaaccagaatgcgcaaagcgaacaaaatggaagtagcgacctgctgtgtgatctgaatacgtcctcttacgacaccagcgctctgtgcaacggttttcctttggaaaatatctgcacccaagtgattgaccagaaccagaatcttcatggggattctaagcagtcgaatctgacaaacggggattgcgtggcctcgagcgatgggacctccaagccctccagctccctagccgtggctgcgcagttgcgtgaaattatcccttcgtctgcattaccgaacgggacggtgcagcatattctgatgccagacgatgaaggcgaaggtgagctgtgttggaagaaagtagatctgggagacgtcaagaacgtggacgtactgtcatttagtcacgcaccaagctttaatttcttgtcaaactcatgttggtctaagccgaaggaagataaagccgtggacacctctgacctcgaggtggcggaggatcccatgggacttcagggaatcgatcttattacagccgctttacttttctgcctgggcgacagccctggtggtcggggaatatccgacagtcggatggcagatatataccacattgatgtgggaacacaaactttttctttgccaagtgctattctcgctacatcaactatggttggtgagattgctagtgcatccgcgtgcgaccatgccaacccacagctctcaaacccgtcgccgtttcagacactggggctggaccttgttctggagtgcgttgcccggtatcagcctaagcagaggtccatgttcacgtttgtgtgcggtcagctgttcaggcgcaaggagttctcgagtcacttcaagaatgtgcacggggatatacacgcaggacttaatggatggatggaacagcggtgcccactcgcttattatggctgtacatacagtcagaggcgcttttgtcccagcattcagggggccaagataatccacgaccgtcatctgagatccttcggcgttcagccctgcgtgtccactgtgttggtcgagcctgccagaaactgcgttctgggcctccacaacgatcatttgtcatctttgccttttgaggtgctccagcacattgcgggctttctggatggattttctctgtgtcagctgagctgcgtgtcaaaattgatgcgggacgtttgtggttcactgctgcagagtagggggatggtgatcctgcagtggggaaagagaaagtaccccgagggaaatagtagctggcagatcaaggagaaagtctggagattctccacagccttttgcagtgtgaatgagtggaaatttgccgacattctgtccatggccgaccacctaaagaagtgctcttataacgtggtggaaaagagagaggaggctatcccactgccctgcatgtgtgtgactagagagctgaccaaggagggaagaagcctgcgctccgtgcttaagcctgttctttag

SEQ ID NO: 187621 - DNA, 1620 bp, synthetic construct
  misc_feature 1..1620: note = Description of Artificial Sequence: Synthetic coding sequence
  source 1..1620: mol_type = other DNA
atggccgtgtgcgcccggctgtgcggcgtgggccccagccggggctgccgtaggaggcagcaacgcagaggacccgccgagaccgccgccgccgatagtgaacctgacacagacccagaggaggagagaattgaggcatctgctggagtcggtggaggtctgtgtgcgggaccaagccccccccctcctcggtgcagtcttctggagcttcccccagagctccttgtagagattttcgcctccttaccaggaacagatttgccttccttagcccaggtgtgcactaaatttagaaggatccttcacactgatacaatttggagaagaagatgtagggaagaatacggagtgtgtgaaaacctgcgcaagctggagattaccggagtatcttgtcgtgatgtttatgcgaaactgctgcacaggtatcgccacatcttaggactgtggcaacccgacatcgggccctatggaggcctgctgaatgtggtagttgatggcctctttatcattggctggatgtatttgcccccacacgaccctcatgttgacgaccctatgcggttcaagcccctgttccgtatccacctcatggaacggaaagcagccaccgtggaatgcatgtatggacataagggcccacaccatggccacattcaaatcgttaagaaagatgagtttagtactaagtgtaatcagactgaccatcaccgcatgtccggcggcaggcaggaagagtttcggacctggctacgagaggagtggggcaggacgttagaggacatattccacgagcacatgcaggaactcattctcatgaagtttatttacacttcccagtatgataattgtttgacttacaggaggatatacttgcctccaagcaggcctgacgatctgattaagccaggattgtttaaaggcacttacgggtcacacgggctcgaaattgtcatgctgtccttccacggtaggcgcgccaggggaactaaaataaccggcgatcccaatattcccgctggccaacagactgtggagatcgacttacggcatcggatccagctgccagacctcgaaaatcagagaaactttaatgagttgtctcgcattgtccttgaagtcagagagcgcgtgcggcaggagcagcaggagggaggacacgaggccggggaaggccgcgggaggcagggcccccgcgagagccagccatcccccgcccaacctcgggccgaggcaccatcaaaaggaccagatggtaccccaggcgaagacggcggagagccgggagacgcagtcgcagccgctgagcagcctgctcaatgcgggcagggccagccctttgttctgccagtcggggtgtcctcacggaatgaggattacccacgaacttgtcggatgtgtttttatggcaccggactgatcgctggtcatgggttcacatctcccgagcgcacccctggcgtctttatcctgttcgacgaggatagattcggtttcgtctggttagagcttaagtctttttcactatacagtcgcgtgcaggcgactttcagaaatgccgatgctcccagcccacaggctttcgacgagatgctcaagaacatccagtcattgacatcctag

SEQ ID NO: 187622 - DNA, 1068 bp, synthetic construct
  misc_feature 1..1068: note = Description of Artificial Sequence: Synthetic coding sequence
  source 1..1068: mol_type = other DNA
atgcccttcctgggccaggactggcggagccccggccagaactgggtgaagactgcagatgggtggaagcgttttctggacgagaagagcgggagctttgtgagcgacctcagctcgtactgtaataaggaagtttataacaaagagaaccttttcaactctctgaattacgatgtcgctgcgaaaaagaggaagaaagatatgctcaatagtaagacaaagacacagtacttccatcaggaaaaatggatctacgtgcataagggttccacaaaagaaagacacgggtactgtaccctcggcgaagcttttaataggctggacttcagcacagcgatcctcgatagccgccgatttaactacgtggttaggcttttggaactcatcgctaagagccaactgacctccctttcaggcatcgcacagaagaatttcatgaacattcttgagaaagtggtgttgaaagtactagaagatcagcagaacattaggttaatccgtgagcttctgcagacgctgtacacaagcttatgtacccttgtgcagcgcgtcgggaagtcagttctcgtgggcaacatcaatatgtgggtgtacagaatggaaacaatcctccactggcagcagcaactaaacaatatccagattacacgacccgcctttaagggtcttacattcacagacttacccttatgcctccagctgaatataatgcaaaggctgtctgatggacgagatctggtttcgttgggccaggccgctcccgatttgcacgtgctttcggaggaccgcttattatggaagaaactgtgccagtaccacttttccgagcgccagattaggaagcgtcttatcttaagcgacaagggccagctggattggaaaaagatgtacttcaagctcgtgcgttgctatcctaggaaggaacagtacggcgataccctgcaactgtgcaaacactgtcacatcttatcatggaagggaactgaccatccttgcacagcaaacaacccagagagttgctcggtttccctgtcaccgcaggattttatcaacctcttcaaattctag

SEQ ID NO: 187623 - DNA, 789 bp, synthetic construct
  misc_feature 1..789: note = Description of Artificial Sequence: Synthetic coding sequence
  source 1..789: mol_type = other DNA
atgcccttcctgggccaggactggcggagccccggccagaactgggtgaaaaccgccgacgggtggaaacgatttctggatgagaagtctggctcatttgtgagcgacttgtccagctactgcaataaggaggtgtacaataaggagaatctcttcaattcacttaattatgacgtggccgctaagaaaaggaaaaaagatatgctaaactccaaaacaaaaacccagtatttccaccaggaaaaatggatctacgttcacaaagggagtaccaaagaacgccatggttactgtaccctcggcgaggcatttaataggctcgacttttctacagcaattctcgacagtaggaggtttaactatgtagtgagaccggcgtttaagggccttaccttcacagatcttccactgtgcctccagctgaacatcatgcagagactctctgacggacgggacctggtctccctgggacaagcagcgccagatctgcatgttttgtcagaggatagactgctgtggaaaaaactctgccaatatcatttttcagagaggcagattcgcaagcgcctcatcctctcagacaaaggacagctagattggaaaaagatgtacttcaaactcgtcagatgttatccgaggaaggagcagtatggggatacattacagctgtgtaagcactgtcacattctgtcttggaaagggactgaccatccttgcacagccaataatcccgagagttgttcagtttctctgtcgcctcaagattttataaacctatttaaattttag

SEQ ID NO: 187624 - DNA, 1668 bp, synthetic construct
  misc_feature 1..1668: note = Description of Artificial Sequence: Synthetic coding sequence
  source 1..1668: mol_type = other DNA
atgctgctgttcctgagcgtgccccagccccggccccccggcgccaggacacgagctggagcagcccgcgtagctcggtggcgacggctgaggctccagcagcttcgcaggctacgcggattgctgcgcgtgcttcgcgggcgcccaggggctgggtccaggaggcggggtcggatggcactctgtggtcaggccgccggtgctgcttcactcccctctgaactgatcgtgcatatcttctctttcctgccagcaccagacaggttgagagcttctgcgtcctgttctcattggagggaatgtctcttttatcctgccctgtggcctcagctgcgcatctgcctcagggtgtctccggcagaacagccccgacttgagttcctaatgcgaaaatgcggctggttcgtccgggaattgcgggttgagtttgcggccgagaattacctctccggagggggtcctggtgatggaggaggtgcagatacaggtacgggcggagaggaggtggaggcccttcagctgtcggcccggtggttggaggtgctccgcacttatttagaactcgtgttgtgcgtgctcgtcagcattcgcaacaatcgcaacctgcagaagttttctctgttcggagatatttctgtgctgcagcagcagggaagccttagtaacacatatctatccaaagtcgatcccgacggaaagaagataaaacaaatacagcagctgtttgaggagattctgtccaatagccgacagctgaaatggctttcgtgtggattcatgctggagatcgtgacgcccacatccctgtcgtccctttcaaacgccgtggctaatactatggagcaccttagtctcctcgataacaacatacctggcaacagtacgctaatcacagccgttgagcttgagagattcgtcaacctccactcactggccttagacttttgcgacttcactgcggagatggcgcgggtgctcacagacagcaaccacgttccattgcagcggctctcactgcttgtccataatgtcagcgtaatgcacaagagcctggataatatgcctaatgacgagcattggaaggccctctctcgtaaatcaacaagtttcagagtgtacattatggcctttgacataaagagcgaggacatgctcaaaatcttaaagcccagtatccccttagagcgcatacatttcgattcctacattacctgcgtgagcggggccatagtggacctgatctcgagacagtatgacaaattcctcacgcactttatcctcatgaatgatgtgatcgatacaagtggattcccagacctcagtgataatcggaacgaagatccactggtccttctggcatggaggtgcaccaaacttagcctcctagctatccatggctataccgtttgggcgcacaatctgatcgccattgcccgactacggggcagcgatctcaaagtgttggaagtgaccgaggagtcaatcgatttcgatcagggggaactcgcggatcaggatgtggacccggttcacaacctgattgaacaagtatcactggggttgggccagccatggcatgcagtgatggacattgagtcactgtccgtgtttacagagccaaacagacacttttatcgggagatgcagtcttttagcgaggatatctag

SEQ ID NO: 187625 - skipped

SEQ ID NO: 187626 - DNA, 2136 bp, synthetic construct
  misc_feature 1..2136: note = Description of Artificial Sequence: Synthetic coding sequence
  source 1..2136: mol_type = other DNA
atgcacctgaagccctactggaagctgcagaagaaggagcaccccccagaagtctccagggagacccagcgcacccccatgaaccaccagaaggctgtgaatgatgagacctgcaaagccagccacatcaccagttccgtttttccaagcgcctctctcggaaaggcatctagcagaaaacctttcggtatcctgtcccctaatgtgctgtgttctatgtccgggaaatcaccagtggagagctccttgaacgtgaagacaaagaagaatgctccctctgctaccattcatcaaggcgaggaagagggtcccctggatatctgggccgtggtgaaaccgggcaacacgaaggaaaagattgctttctttgcttctcaccagtgttccaaccgcatcggttcaatgaaaataaagagctcgtgggacattgatggaagagctactaaacggagaaaaaaaagcggggacctcaagaaggctaaggtgcaagtcgagcgtatgagggaggttaactcccggtgttatcagcctgaaccatttgcctgtggcatcgagcactgtagcgtgcactacgtgtctgacagtggggacggggtgtacgccgggcgccccttgagtgttatccagatggttgcatttctcgagcagagagcttccgccttactggctagttgttcaaagaactgtacgaacagcccagctatcgtaaggttcagtgggcagtcccgtggggtaccagcagtcagcgagtcatactcagcccccggcgcttgcgaagaacctaccgagagaggcaatctcgaggtaggcgagccacaatcggaaccagtcagggtactggacatggtcgcaaaattagagtccgagtgcctgaagcggcagggccagagagaacctgggagcctgtcacggaacaactccttccgacgtaacgtcggaagggttctgttagcaaattctactcaggcagacgagggcaaaactaagaaaggtgtcctcgaggcacctgacacccaggttaatcctgttgggtccgtgtccgtcgactgtggcccgtctcgagctgatcgctgcagtccaaaggaggaccaggcatgggacggcgcgagccaggactgtccacccctgccagctggtgtgtcgtttcatatcgattctgccgagctcgagcctggcagtcagaccgcggtgaaaaatagcaatagatacgacgtggagatgacagacgaactcgtgggactgccattctcctcccacacttacagtcaagcttcagaactcccgacagacgcagtggactgtatgtcacgagaattggtgagtttgacttctagaaatcctgaccagcgcaaagaatctctttgcatttccattaccgtatctaaagtagacaaggaccagccttcgattctcaattcttgcgaagatcccgtgcctggtatgttgtttttcctgccgcccggacagcacctgtcggattactcccagctgaacgagtctaccacgaaagagagtagcgaagcaagtcagctggaggatgcagctggaggtgattctgcctctgaggaaaaaagcggttccgcggagcctttcgtgcttcctgcatcctccgtggagagcacactcccagtgctggaggcgtccagttggaaaaaacaggtgagccatgatttcctagagactaggttcaaaatccagcagttactcgaacctcagcaatatatggcttttctcccccaccatataatggttaaaatcttcaggctgctccctaccaagtcccttgtggcgttaaagtgcacttgctgttatttcaagtttatcatcgagtattataatattcgcccagccgattcgcgctgggtgagggatccgaggtatcgagaagatccttgcaaacaatgtaagaaaaaatatgtgaagggggatgtgtcactctgcagatggcatccgaagccgtactgtcaagccttaccctatgggcctggttactggatgtgttgtcaccggagtcagaaaggtttcccgggctgcaaactggggctgcacgacaaccattgggttcccgcgtgtcacagtttcaatagagccatccacaaaaaggccaaggggactgaggcagaggaagaatattag

SEQ ID NO: 187627 - DNA, 2136 bp, synthetic construct
  misc_feature 1..2136: note = Description of Artificial Sequence: Synthetic coding sequence
  source 1..2136: mol_type = other DNA
atgcacctgaagccctactggaagctgcagaagaaggagcaccccccagaagtctctcgtgagacccaacgcacacccatgaatcatcagaaggccgtgaacgatgaaacatgtaaggcgtcccacattacctcatcagttttccccagcgcttcacttgggaaagcgagctcacgcaagccgtttgggatcctctctcctaacgtgctctgctcaatgtcagggaaatctcctgtcgagtcctccctcaacgtgaagactaagaaaaatgcaccttcagctactatccatcagggggaggaggaagggccactggacatttgggctgtcgtgaagcctgggaatacgaaggaaaagattgctttcttcgcctcccaccagtgtagcaacaggataggctctatgaaaattaagtctagttgggacatagatggaagagctacgaaacgcagaaagaagagcggagatcttaagaaggcgaaggttcaggttgagagaatgagagaggtcaacagccggtgttatcagcctgagcctttcgcatgtggaattgagcactgctctgttcattacgtgagtgactcaggtgatggggtctacgccggccggcccctctcagtcattcaaatggttgcattcttggaacaacgggcctcagcattgctcgcatcctgctcaaagaactgcaccaattctcctgcaattgtcagatttagtggccaatctcgcggggtgcccgccgtctccgagtcctactccgctcccggagcatgcgaagaaccaaccgaacgcggcaatctggaagtgggcgagccacaaagcgagcccgtgcgggtattggatatggttgcaaagttggaaagcgaatgcctgaagcgtcagggccaaagggagccaggcagtctttctcgcaacaattcctttaggcggaacgttgggcgtgtgttgttggctaattctacgcaagccgatgagggcaagaccaaaaagggggttttggaggccccagatacccaggttaaccccgtgggcagtgtcagtgtagactgcggccctagcagagcagaccgctgtagccctaaggaggaccaagcttgggacggcgccagtcaggactgtcctcctctccctgccggcgtctctttccatatcgatagcgcggagctagagcccggatctcagaccgctgtgaagaacagcaacaggtatgatgtcgagatgaccgatgagctcgtaggattgccgttttccagccacacatactcgcaggcctcagagctgcccacagacgctgtggactgtatgtctcgggaactagtctctctgacctcccgaaacccggaccaacgaaaggaatctctctgcatttccatcaccgtttccaaggtggataaggatcaacccagcatcttgaacagctgcgaggatccagttcccgggatgctgtttttcctacccccgggccagcacctgtctgactattcccagctgaatgaatccactaccaaggaaagcagtgaagccagccagctagaagacgccgcaggtggcgactccgcttctgaggagaaatctggcagcgctgagcctttcgtgctaccagcaagctccgtggagtctacactcccggtgctcgaagcctccagctggaaaaaacaggtaagtcatgacttcctagagacacgcttcaaaatccaacaattgttggagcctcagcaatatatggccttcctgcctcaccacatcatggtgaagatttttagactgttgccgacaaagtcactcgttgcgcttaagtgtacctgctgttacttcaaattcattattgaatattacaatatcagaccagcagattcccgttgggttcgtgatcccagatacagggaggatccttgtaaacagtgcaaaaaaaaatacgtgaaaggagacgtctcactgtgcagatggcaccctaaaccctattgtcaggcgcttccgtatggtcccggttattggatgtgctgccacaggagccagaaagggttccctggctgtaaactggggctgcatgataaccactgggtgcctgcctgccatagttttaacagggcaattcacaaaaaggctaagggaaccgaagcagaggaagagtactag

SEQ ID NO: 187628 - DNA, 567 bp, synthetic construct
  misc_feature 1..567: note = Description of Artificial Sequence: Synthetic coding sequence
  source 1..567: mol_type = other DNA
atggccagctggctgcccgagaccctgttcgagaccgtgggccaggggccacctcctagtaaggattactaccagctgttggtgactaggagccaagtgatcttccgatggtggaagatctccctccgctcagagtaccggtccacaaaaccaggagaggcaaaggagacgcacgaagacttcctcgaaaatagtcacttacaggggcagaccgcgctgattttcggtgctcgcatcctagattatgtcattaacttatgtaagggtaagttcgatttcttagaacgactgagtgacgacttgctcttgaccatcatctcttatctcgatttggaggatatcgctcgactgtgtcaaactagccacagatttgcgaagctttgcatgtcggataaattatgggagcagattgtacaaagcacctgtgacacaataacccctgatgtcagggcattggctgaggacactggctggcgccaactttttttcacaaacaaattgcaactgcagaggcagttgcgtaagcgtaagcagaaatatggaaacctccgcgaaaaacagccttag

SEQ ID NO: 187629 - DNA, 2832 bp, synthetic construct
  misc_feature 1..2832: note = Description of Artificial Sequence: Synthetic coding sequence
  source 1..2832: mol_type = other DNA
atgggcccccggaagaagagcgtgaagacctgcatcatgaacaacgaaattcccgaggaaatgactgcagacgaaacaaaagactacatgaaccaactgtcgcacgaggtgctgtgtcatatcttcagatacctgcccctacaggatatcatgtgtatggaatgtctgtcacgcaaactgaaagaggctgtgactctctatttgcgcgtagtgcgcgtggtggacctgtgtgccggacggtggtgggagtacatgccttcaggctttaccgatgccagctttctgactttgctcaaaaagatgcctgatgttgagcagttatatggtctgcacccgcgctacttggagcgtcggagagtgaggggacacgaggccttttctatccccggagtacttgaagcccttcaagcctgtcccaatctagtgggagtagagacgtcccacctcgagctggtggagtcgatctggacatacatgcctcacgtacatatacttggtaaatttaggaacaggaacggcgctttccccattccccctgagaacaaactcaagatcccgattggcgcaaagattcagacactccaccttgtgggcgtgaacgtccccgagattccatgcatacccatgctccgccatctgtacatgaaatgggttcgcctgactaagcctcagccatttaaagactttctgtgtatttcactgcgaacatttgtgatgcggaactgtgcaggccccacaaactcactcaagtacgtccctctcgtgactggcctggcctcggcacgtaaccttgagcatctggaaatggttcgtgtgccgtttttgggcggtctgatccaacacgttgtcgaggactcatggaggagtggaggcttcagaaacctccacaccatcgtactgggagcttgcaaaaatgccctggaagtggacttgggatatctcataatcaccgctgccagacggctccatgaggtgagaatacagccatctctgactaaggacggggtgttttcggctcttaagatggccgagttggagttcccacagtttgaaaccttacaccttggatatgtggatgaatttcttctgcagtcgcgaatggccaacgcagacctggtcaaatacgggcttgcagatgtcgttgagaacccagggatcatcaccgatattggcatgaaggcagtgaatgaagtgttttcatgcattaaatatcttgccatctacaattgtcctcaccttcataacccttataattggatttccgaccattcaaggtggactcggctggtggacataaatcttgtccgttgtcatgccctcaagcttgactcctttggccagtttatcgagctccttcccagcctggaatttatctctctggaccagatgttccgcgagccacccaagggctgtgctcgagtgggcctttccgccggaacagggataggggtgtcatctgcgctggtttctaaccaaaactcaaataacgacgacaataacgcacagaacaacaacgcaaacatccacgacaacaaccaccatcacccggatgatagcgacgaggagaacgatttccggcaggacctgcagcctggagagcagcagttcgctgcagacgctttaaacgaaatggaagacattgttcaagaggacggagaggtcgtggcagaatctgggaacaatacgcccgcccattcgcaagccattattcctgtggacgtggacgaggagcaggcaggaccatctggactgcagagggtagtaaaaccaaccagtatcactgtgcatgattcagaatctgatgacgaggaagattctcttgaactgcaagaggtatggattcccaagaatggcactcggcggtactcggagcgggaagaaaagactggcgaatctgttcaatctagggaactgagcgaagtggccaagacaaaacctcggcatgcaatgaagaggaagagaaccgcagataaatccacctctacctctgatcctgtgatcgaggatgatcacgtacaggtgcttgttctcaagagcaaaaacctggtaggagttaccatgacaaattgtggcatcaccgacctagtccttaaggactgccccaagatgatgttcatccatgctacaagatgcagggtcctcaaacatctgaaggtggaaaatgcacctatcgttaaccgcttcgactacgcccaatgtaagaaactcaatatggaccaagtgctggaccagatacttcgcatgccgcccgagcggaatcgaatcatctatctgagacccatgcagcaggtagatacactaacactggagcagaagctgttttcagggccctacccctaccacatctgcattatccacgagttcagtaatcctcctaatgttcggaacaaagtccggattcgtagttggatggataccatagccaacataaatcaggaattgataaaatacgaattcttccctgaagcgacgaggagcgaagaagacctgaagaagtaccctaagtacccctggggccgagaaatctatacgttggaaggtgtggtagacggtgccccatacagtatgatctcagatttcccatggttgaggtccctccgtgccgcggaacccaattccttcgccaggtacgactttgaggacgatgaggaatccacgatctacgccccccggaggaagggtcagctgagcgcagacatctgtatggaaaccatcggtgaagaaatcagcgagatgcggcaaatgaaaaagggggtctttcaacgagttgtagccatatttatacattactgcgacgtgaacggcgaacccgttgaggacgactatatatag

SEQ ID NO: 187630 - DNA, 3567 bp, synthetic construct
  misc_feature 1..3567: note = Description of Artificial Sequence: Synthetic coding sequence
  source 1..3567: mol_type = other DNA
atgggcccccggaagaagagcgtgaagacctgcatcatgaacaacgagattcctgaagaaatgaccgcggatgaaacaaaggattacatgaatcagctgtctcatgaggtgctatgccatatttttcgctacctccctctgcaagacatcatgtgcatggagtgcctgtcaaggaagctgaaggaggctgtgaccctctatctgcgtgtcgtgagggttgtggatctctgtgcagggcgttggtgggagtatatgccttctggctttactgatgcctcctttcttaccctgttaaaaaaaatgcccgacgtggagcaactatacggcctccatccccggtaccttgagcgccgacgggtccgggggcacgaggccttctccatccccggagtgcttgaggcactccaggcatgcccgaaccttgtgggcgttgagacctcacacttagagttggttgagagcatatggacctacatgcctcatgtccatatcctggggaagtttaggaacaggaatggggctttccccatccccccagagaacaagctgaaaatacctataggcgcaaagatccagactcttcatttagtgggagtgaacgttccagaaataccctgtatcccaatgttgagacatctctatatgaaatgggtcagactgacgaagcctcaaccttttaaagatttcctttgcatctctctgaggactttcgtgatgcgaaactgtgcgggcccaacaaactctttgaaatacgtcccactcgtgactggcttagctagtgccagaaacttagaacacctcgaaatggtgcgtgtaccatttctgggcggtcttattcagcacgtggtggaggattcttggcgtagcggcggcttcaggaatcttcatacaatcgttctgggagcctgcaaaaacgctctagaggtcgatcttggttacttgatcattaccgccgcccgtcgcttacatgaagtgcggatccagccaagcctcaccaaagacggcgtgttttctgcattgaagatggccgagcttgaatttccacagtttgagaccttgcatctgggttacgtggacgagttcttgttgcagagtcgaatggctaatgccgacctggtgaagtacggactcgccgatgtggtggagaatccaggaatcataacagacatcgggatgaaagcagttaatgaagtgttcagctgcataaagtacctggctatttataattgcccccacctccacaacccgtacaactggattagtgatcacagtaggtggactcggttggttgatataaatttggttaggtgtcatgccttgaaacttgatagctttggccagttcatcgagcttctaccctcgctggagttcatctccctggaccagatgtttcgcgaacctcccaaggggtgtgcgagagtggggctctctgcgggaaccggtattggagtcagctccgcattggtgtctaatcagaatagcaacaatgacgacaataacgcgcagaacaataatgccaacattcacgacaataaccaccatcaccccgacgatagtgacgaagagaacgatttccggcaggatctacagccaggagaacagcaatttgcagcagacgccctgaacgagatggaggatattgtccaagaggatggggaggtggtggcggagtcagggaacaatactccagcacatagccaggccataatccctgttgatgtggacgaagaacaggccggtccctctggcctgcagcgggtggtgaagccgacatccattaccgtgcacgacagcgaaagtgatgacgaggaggacagtctggaactgcaggaagtgtggattccaaaaaatggaaccaggagatacagcgagcgggaggagaagacgggtgaatccgtccagagtcgggagcttagcgtttcaggcaagggaaaaacaccccttcggaaacgctataacagtcatcagatggggcagagtaaacaatttcctttggaagaatcaagctgtgagaaggggtgtcaggttacttctgaacaaattaaggccgatatgaaagcagcccgcgacattcccgaaaagaagaagaacaaggacgtatatccctcctgctcatccactacagccagcaccgtcggcaattcctcttcacataacacagcctctcaatccccagattttgttcggacagtgaatagtggtggtagcagcgagccaagccccacagaggtggatgtctctcgtcaatgtgcgtgctctccagggggatccgaggattctgaggccatggaagaaggagacgctgagtccagcgtgtgtccgcgctgctgttgccatagaccgcaagagtcacaacgtcgaacctcgcggtgttcagacgaagagaggccatcaacttcgagggcatgtgtagtaaacgggccagacgggaccagatccgccttcagttttcgaacgcttccacagggcggcagtagcgggccagcgcacgatgagaggaccaatggaagcggttccggtgctaccggcgaggatcgccgcggctcttcacagcctgagagttgcgacgttcagagtaatgaggattatccgcggagaccactgacccgggcaaggtctagactgtctcacgtactgctggtgagtgagagcgaagtagctaaaacaaagccccgacatgcaatgaagaggaagaggaccgcagataaaagtacaagcacatctgatccggtgatcgaggatgatcatgtccaagttcttgtattgaagtcaaaaaatttggttggggtcaccatgactaattgtgggatcactgacctggtcctcaaggactgccccaagatgatgtttattcacgctacaaggtgtcgagtacttaaacacctgaaagtagaaaacgctcccattgtgaatagattcgactatgcccagtgcaaaaagcttaacatggaccaggtgttggatcaaattctgcgcatgcctcctgagaggaatcggataatctacctgcggcctatgcagcaggtggatactctgaccctggaacagaaactcttttctggcccctatccataccacatctgcatcatacatgagtttagtaacccacccaatgtcagaaacaaagtcagaataaggtcctggatggacaccatcgccaatattaaccaggagctgatcaagtatgagttctttcccgaggcaacccgttcagaagaggacctgaagaagtacccaaagtatccgtggggtagggaaatttacaccctggaaggagtcgttgacggcgccccatactcgatgatctcagactttccttggctgagaagcctcagagcagccgagcctaatagctttgctcggtacgattttgaagacgacgaggaatcaaccatttacgcccctaggagaaagggccagctatcagcagatatctgtatggaaactattggagaagagatatccgagatgcgccagatgaaaaaaggcgtgttccagcgcgtagtggccatattcatccactattgtgatgtcaatggtgaacccgtggaagacgactacatctag

SEQ ID NO: 187631 - DNA, 3342 bp, synthetic construct
  misc_feature 1..3342: note = Description of Artificial Sequence: Synthetic coding sequence
  source 1..3342: mol_type = other DNA
atgggcccccggaagaagagcgtgaagacctgcatcatgaacaacgagattcccgaggaaatgactgcagatgaaaccaaagactatatgaatcagctctcccatgaggtcttgtgtcacatctttcgctacctgcccctgcaagacataatgtgcatggaatgtttgagtaggaagttgaaggaagccgtaactctgtacctcagggtcgtgcgtgtggtcgatctgtgcgccggtcgctggtgggaatacatgccttccggtttcacggatgcctcctttcttacccttcttaagaaaatgcctgacgtcgagcaactgtacggtcttcacccccggtatctcgagagaaggagggtcagaggacacgaagcctttagcatccctggtgtcctagaggccctgcaggcttgccctaacttggtgggcgtggagacgagtcacttagagctggtcgaaagcatttggacttacatgccccacgttcatatcctcggaaagtttcgtaaccggaatggcgcttttcccatccctcctgagaataaacttaagatcccaattggcgcaaagattcaaacactgcacctcgtcggcgtgaatgtgcccgagattccttgtatcccgatgttgcgacacctgtacatgaaatgggtgagattaacaaaacctcagccatttaaagatttcttgtgtattagtctgagaacttttgtgatgcgaaattgcgccgggccaaccaatagtcttaagtacgtacctctcgtcactgggttggctagcgccagaaacctggagcaccttgagatggtgagagtgccctttctggggggactcatccagcacgtggtcgaagattcatggcgtagcggcgggttcaggaacctgcatacaatcgttcttggagcatgtaagaatgccctggaggtggatttaggctatctcattatcaccgctgctcggcgtctacacgaagtcagaatccaaccaagcttaaccaaggacggtgtcttttcagccttgaagatggcagagctggagttcccgcagttcgagacccttcacctgggatacgtggacgaattcctacttcagtccagaatggcaaacgcggaccttgtgaagtacggcttggcagatgtggttgaaaaccctgggatcattactgatataggtatgaaggctgtgaatgaagtgttctcctgtattaagtacctggcgatctacaattgtccccatttgcataacccgtataattggatctcagaccacagtcgttggaccaggctggttgatatcaatctcgttcgttgccatgccctgaaactggactcatttggacaatttatagagctgctccctagcctggaattcatctcacttgaccagatgtttcgggaacctcccaagggatgcgctcgcgttggattgtctgcaggtacaggcattggcgtgtcatcagcgcttgtgagcaaccagaattccaataacgatgacaacaacgcgcagaacaataatgcaaacatccatgacaataatcatcaccaccctgacgatagcgacgaggagaacgattttagacaggacttgcagccaggggaacagcagttcgccgcagacgctttgaatgagatggaggacatagtgcaggaggatggcgaggtggtggctgaatccggcaataacaccccagctcactctcaagcaatcataccagttgacgtcgatgaagagcaggccggcccgagcggtctacagcgggtggtgaagccaacttcgattacagtgcatgactcggaaagcgacgacgaagaagattccctggagctccaagaggtgtggattcctaagaacggcactagaaggtacagcgagagagaggagaaaactggggaatcagtccagagcagagagttgagcgtctccggcaaggggaagacccccttaaggaaaaggtataactcacaccaaatggggcagtccaaacagtttccgctggaggagtcctcctgtgagaaaggttgccaagtcacgtccgaacagattaaggctgatatgaaagctgctagggacattccagagaagaaaaaaaacaaggatgtctacccatcatgtagcagcacaactgctagtacggtgggaaactcatcctcccataacacagcctcacagtctcccgactttgtccgcacagtaaattcggggggctcatccgagccaagccccactgaggtcgatgtgtccagacagtgcgcctgttcccccggcggaagcgaggatagtgaggcaatggaggaaggagacgcagagtcctctgtttgtcccaggtgctgctgtcaccgccctcaggagtcccagcgccggacctcgcggtgttccgatgaggaaaggccgagtacatccagggcatgcgttgtgaatggccctgacgaggtggcaaagactaagccaaggcacgcgatgaagcgaaagcgcacggcagataagagcacatcgacatccgatcccgtgatcgaggatgatcatgttcaagttcttgtcctgaagtccaaaaaccttgtgggtgttacaatgacaaattgtggtataacggatcttgtccttaaagactgtccgaaaatgatgtttatccatgcaacgcggtgccgggtgctcaaacaccttaaagtcgaaaatgcccctattgtcaatagatttgactacgcccaatgcaagaaacttaatatggaccaggtgcttgatcagatattgcgcatgcctcccgagaggaatcgcattatctacttgcggcctatgcagcaggtggatactctgacactcgagcagaagctgttctccggaccgtacccatatcacatctgcatcattcatgagttcagcaatcctcccaatgtccggaataaggtgcgaattagatcctggatggacacaattgccaacataaaccaggaactgatcaaatatgagttctttcctgaagccacccggtccgaagaagacctgaagaagtatcctaaatacccatggggtcgcgagatctatacactggaaggtgtggtggatggcgcgccatactcaatgattagcgattttccatggttaaggtcccttcgagccgcagagccaaactcatttgctcggtacgactttgaggacgatgaggagtcaactatatacgctccaagaaggaagggccaactgagcgcggacatatgcatggagactataggcgaggagatttctgaaatgaggcagatgaagaaaggcgtattccagcgcgtggtggctatttttattcattattgcgacgtgaatggcgagccagtggaggacgactacatctag

SEQ ID NO: 187632 - DNA, 2832 bp, synthetic construct
  misc_feature 1..2832: note = Description of Artificial Sequence: Synthetic coding sequence
  source 1..2832: mol_type = other DNA
atgggcccccggaagaagagcgtgaagacctgcatcatgaacaacgaaattcccgaagagatgactgcagatgagacaaaggactacatgaaccagttgagccacgaggtcctctgccacatttttagatacttgccgttgcaagatattatgtgcatggagtgtctgtctaggaagctcaaagaggccgtaacactgtaccttagggtggtgcgcgttgtggatttatgcgcaggtcgttggtgggagtacatgcccagcggtttcaccgatgcctcctttctaaccctgctaaaaaagatgcctgatgtggagcagttatacggcctccatccacggtacctcgaaagaagaagagtccggggccacgaggccttttctattccaggcgtgctcgaggccctgcaggcatgtcctaacctggttggggtggagaccagccatctagagctcgtggaatccatttggacctacatgccacacgtgcacatcctcggtaaatttcgcaaccggaatggagctttccctattcccccggagaacaaacttaaaattcccataggggctaaaatacagacacttcatttagtgggagttaacgtcccagaaatcccctgtattcccatgttgcgccacctgtacatgaaatgggttaggcttaccaagccgcagcctttcaaagattttctgtgcattagccttcgcaccttcgttatgcgcaattgcgctgggcctaccaacagcttgaagtacgttcctctggttactggactggcaagtgcacgcaacctcgaacacctcgagatggtgcgcgtacctttcctggggggtctcattcaacacgtggtcgaagattcctggcgatccggtgggttccgtaatctccatactatcgttctgggagcctgcaaaaacgcactcgaagtggacctgggatacctcataatcacggcagctaggcggttgcacgaagtgaggattcagccttctctcacaaaggacggcgtgttttccgcactgaagatggccgagctagagtttccacagttcgagactctacacttaggatacgtggacgagttcttgctccagtcacgtatggctaatgcagatttggtgaagtacggcctcgccgacgttgtggaaaatccaggcatcatcaccgacataggcatgaaagctgtcaatgaggttttctcttgcatcaagtatcttgccatctacaattgcccccacctgcataatccatataattggatctctgaccattccaggtggaccagactggtagacatcaacctggtgcgctgtcacgcgcttaagctcgattcctttggtcaatttattgagctacttccaagcctcgaattcatatctctcgaccaaatgtttcgggaaccccctaagggctgcgcccgtgtcggcctgtctgccggaaccggtattggtgtttcctccgctttggtgtcgaatcagaactccaacaatgacgacaataacgcccagaataacaatgctaatattcacgataacaaccaccaccaccctgacgactctgatgaagagaatgacttccgacaagacctccaacccggcgagcagcaattcgccgcggacgcattgaatgaaatggaggatatcgttcaggaggatggggaagtggtcgccgagtctggaaataacactccagcacattctcaggcaattatccccgttgacgttgacgaagagcaagccggccccagcggactccagagagtagtgaagccaacgtccatcacagtgcatgacagcgaatctgatgatgaagaagacagcctggagctgcaggaagtgtggattccaaagaatggtacaaggcggtatagcgaacgggaggaaaaaactggagaatctgtgcagtctcgcgagctaagcgaggtcgcaaagacgaagccacggcatgcgatgaagcgcaaacgcaccgccgacaagtccacgtcgacgtctgacccggtgatcgaagacgatcacgtgcaggtcctcgtgctaaaatccaaaaatctggtgggagtcacgatgacaaactgtgggatcacagatctggtattgaaggactgcccaaaaatgatgttcattcatgcaacccgctgcagggtgctaaaacatctgaaggtcgagaacgcacctattgtaaaccgcttcgattatgcccagtgtaagaagctgaacatggaccaggtgctggaccagatccttaggatgcccccggaaaggaatcggatcatctatctgaggccaatgcaacaggtggatacactaaccctcgaacagaaattattctcaggtccatatccttaccatatatgtatcatccacgagttctccaatccacccaacgtgcgaaacaaagtgaggatacgcagctggatggacactatagctaacataaatcaagaattaataaagtatgaatttttcccagaggcgacgcgctcggaggaggacttgaagaaatatccaaaatatccctggggacgcgaaatttacactctcgaaggcgtagtcgatggtgccccatactcaatgatttccgattttccttggctgaggtctcttcgagccgccgaaccgaacagcttcgcacggtatgatttcgaggatgatgaggaatccaccatttacgcccccagaaggaagggtcagctgagtgctgacatttgtatggaaaccataggggaggagatatccgaaatgcgccagatgaaaaaaggtgtcttccagcgcgtcgtcgcgatctttatccactactgtgatgtgaacggggagcccgtggaggacgattacatttag

SEQ ID NO: 187633 - DNA, 1329 bp, synthetic construct
  misc_feature 1..1329: note = Description of Artificial Sequence: Synthetic coding sequence
  source 1..1329: mol_type = other DNA
atggacgaggagagcgagctgatccagccccaggaccagagctgctgggctttcctgccagacctgtgcttgtgtcgagtgttctggtggctgggcgatagggaccggtctcgagcagccttagtgtgccggaaatggaaccagatgatgtacagtgccgagctgtggcgctatagaacgatcacattcagtgggcgccctagccgggttcacgcatccgaggtggagtccgccgtgtggtatgttaagaaattcggacgctacttggaacatctggaagtcaagttcatgaatccatacaacgccgtgctgactaaaaagttccaggtgacaatgaggggactcctgtcgtgtttaagcaaaagcaataataggttaaagtcactctccatacagtacttggagctcgacagactcgtctggcggaactctatacgcagctcatttatctcgagcctctcattcttcttaaaaaaaatgggaaagagactggactacctcaacctgaaaggagcgcgtcttaccgtggaacagggatgtcagatcttagacagcttaagctatatgcggaatgagaatgtaatcagtgaactgaacatcgaagactacttctctcaccaccttgctgtatataatagtcctcagtttaagaaaacaatgtcaacattccacaatttggtgtctctgaacctcaattataattgcatatctgatgaactcctagagaatttgtgtgaaaacgcttcaacattgcgtaccattaacatcaaatgtcacgtccacgacccccatgggcaagtcatctggggcatgtcatgggccaagttggctaggcaggccaccaacttgaaggtcaacttttttttcgagcggattatgaaatatgaaaggctcgcacggatcctattacaggagatccctatcagatccatctccctgcgatcatgttacttttcagacccggattgcagcatgcggcctacacttatcgacctgctgccaacgttcagacatactcttcagaagctaacatgcgagtttaataacaatcacgagtcgctggacgaggagctgcaccttctaatcattagttgtaggaagctgttttacttcaagatctgggcgtttctcgatgtcagctttgtggaacgcattcttaaaagccagaaagaaagacagtgcgccctacgggtcttcaaggcacgcatttacacgaaccgttacgaaactaatgaggaagataaaacacttcaggagatttaccgaaagtacagaaaattgattgagtccgagctgtcctattttgttatagtgtatagcgtgatgtag

SEQ ID NO: 187634 - DNA, 1164 bp, synthetic construct
  misc_feature 1..1164: note = Description of Artificial Sequence: Synthetic coding sequence
  source 1..1164: mol_type = other DNA
atggccggcagcgagccccggagcggcaccaacagccccccccccccattttctgattgggggagacttgaggccgcaattctctctgggtggaagaccttctggcaatctgtcagcaaagaacgtgtagctaggactaccagccgggaagaagtcgacgaagccgccagtacattaacaagactccctatcgatgtgcagctatacatactctcattcctttctccgcatgacctctgtcagctcggaagtaccaaccactactggaatgagaccgtacgagacccaattctgtggcgatactttctgctcagggacctaccatcctggtcctctgtggactggaaaagtctgcccgacctcgaaatcctgaaaaagccaatttccgaggtcaccgatggagcattctttgattatatggcagtgtataggatgtgctgtccttacacccggcgcgctagcaaaagctctagacccatgtacggtgcagtcacatccttcctgcatagtcttatcatccagaacgaacctcggttcgctatgtttgggccaggtctcgaggaactcaatacctctcttgtgctctcccttatgagtagcgaggagctctgcccaaccgcggggttgccccaaagacagatcgatggtatcgggtcgggtgtgaatttccaactcaacaatcagcacaaattcaatattcttatcctgtattctacgacccggaaggagcgcgatcgggctagggaagaacacacttccgctgtgaacaagatgttttcaaggcacaatgaaggggatgaccagcagggcagtcggtattccgtcatcccgcagatccagaaagtgtgcgaagtggtggacggatttatctacgttgccaatgccgaagctcataagagacatgaatggcaggatgaattctcacacattatggcaatgactgatccagctttcggatccagtgggcggcctctgctggtgctgagctgtatctcgcaaggggatgtgaaacgtatgccgtgtttttacttagcccatgagctgcacctgaacctactgaaccatccatggctcgtgcaggatacagaggccgagaccctcaccgggttcctgaatggcatcgagtggatccttgaagaggtggaaagcaaaagagcgcggtag

SEQ ID NO: 187635 - DNA, 924 bp, synthetic construct
  misc_feature 1..924: note = Description of Artificial Sequence: Synthetic coding sequence
  source 1..924: mol_type = other DNA
atggccggcagcgagccccggagcggcaccaacagcccccccccccccttttccgactggggccggctggaagcagccatactatctggctggaagactttctggcaatcagtgtcaaaggagcgcgttgctcggactacttcccgggaagaagtcgacgaagcagcctccactctgactaggctccccattgatgtgcagctgtatattctgtcctttttgtccccacacgacctgtgtcaactcggatctacaaatcattactggaacgagactgtaagagaccccatcttgtggaggtatttcctccttcgagatctcccatcatggtcttcagtggattggaagtcactgcctgacctggaaattctgaaaaaaccaattagcgaggtaacagacggcgcattctttgattacatggccgtctataggatgtgctgcccctacacaagacgggccagtaagagtagtaggcccatgtacggtgctgtgactagcttcttacattcactgattatccagaacgaaccccgctttgccatgtttggaccaggattggaagagcttaatacgagcttagtactgtcccttatgagcagcgaagaactctgtcctaccgccggcctccctcagcggcagatagatggtattggtagcggagtcaacttccagctaaataaccaacacaaatttaatatcctgattctgtactccaccacgagaaaagagcgggaccgggccagggaagagcacaccagcgctgtcaacaaaatgttttctcggcacaatgaaggagacgatcagcagggatctcgatattccgttattcctcagattcagaaggtttgtgaagttgtcgacggcttcatctatgtggccaacgccgaggcgcacaagtctaaatattcatacgttcatttctag

SEQ ID NO: 187636 - DNA, 2130 bp, synthetic construct
  misc_feature 1..2130: note = Description of Artificial Sequence: Synthetic coding sequence
  source 1..2130: mol_type = other DNA
atgggcaaggcccggcggagcccccccggccaccaccggcactgcgaaggatgctttaatcggcattgccacatccccgtagaacctaatacctcttgtctggtaatcagctgtcacctcctgtgcggtgccacctttcacatgtgtaaagaggccgagcaccagctgttgtgccctctggagcaggttccttgcctgaacagcgaatacggctgccccctttccatgagccggcacaagctggccaaacatctgcaagtttgcccagcaagtgtggtatgctgctccatggagtggaaccgatggcctaacgtcgactctgagacaaccttgcatgagaacataatgaaggaaaccccctctgaggagtgcctcgataccgctctggcactgcaggatcagaaggtcctgtttcgttcactgaagatggtcgaactgttcccagagaccagagaagctaccgaagaagaaccgactatgaatggcgaaacttccgtagaagagatgggcggcgccgtgggaggggtggatattgggctggtgcctcacggactgtccgccactaatggggaaatggccgaactatcacaggaggaacgggaagtacttgccaaaactaaggagggaatggatttggtgaagtttggtcagtgggaaaatatcttctccaaagagcatgcagctagcgctttaacaaatagcagtgctagctgtgagagcaaaaacaaaaacgatagtgagaaggagcagataagtagcggtcataacatggtggagggagaaggtgctcctaagaaaaaggagccacaggagaaccagaagcagcaggacgtgagaacggctatggaaactactggcctggccccgtggcaggacggggttctggagaggctgaaaacagcagtggacgccaaggactataacatgtacctagttcataacgggcgcatgctcatccacttcggacaaatgcccgcgtgcacgcctaaggagcgtgacttcgtgtatggtaagctcgaagcacaggaagtcaaaactgtttatacattcaaggtgcctgtgtcctactgcggcaagagggcacgccttggggatgccatgttgtcttgtaagcccagcgagcacaaggctgtggataccagcgatctgggcatcacagttgaggatcttcccaagagcgatctgatcaaaaccaccctgcaatgcgctctggagcgtgaactcaaaggccatgtgatatccgagtcaagatcaatcgatggcttgttcatggactttgcaacacagacctacaattttgaacctgagcagttctcttcagggactgtgctggccgacctgacagccgcaacacccggtgggcttcatgttgagctccacagcgagtgcgtaacacggcgtcataataagtcaagttctgcatttacgtttacgtgtaataaatttttcagacgcgatgaattcccactgcattttaaaaacgtgcatactgacatacagagctgcctcaacggatggtttcagcataggtgtccgcttgcatatttggggtgcacgtttgtccagaaccactttagacctcctggccagaaggcaaaagtgatctacagtcaggagctcaagaccttcgcaatcaagccagaggtcgctccagagctttcagaaggccggaagaataatcaccttctggggcatggcggcaagtcccagaatagcttgacctccctccctcttgaaatcttaaaatacattgcgggatttctcgacagtgtgtctctcgcacagctgtcacaagtgtctgtgctgatgcgcaatatctgtgctaccttgctccaagagaggggtatggtgttgctccagtggaagaagaaaagatattcacacggaggaacctcctggcgagttcacagggagatctggcagtttagttctctgtttagtaaaatcaaatcatgggaattcaacgaagtcacgtccatgagtgagcacttgaagagctgtcccttcaatattgttgaacacaagacagatcctatactattgacttccatgtgccaacctagagagcaggcccgcgaatcactcgtcagtactttccgcatcaggccacgaggacgctatgtaagttag

SEQ ID NO: 187637 - DNA, 2811 bp, synthetic construct
  misc_feature 1..2811: note = Description of Artificial Sequence: Synthetic coding sequence
  source 1..2811: mol_type = other DNA
atgaccaccggcctgagcgaccagcaggtggtgtgcgacctggaccaccgagctgtggaagccctgttacaggctgttcggaaaaggatggctggcgcatccccagcagttccacatgaaagagccaggctcactgggggagcggccgctgttgaacctgcttgcagaggaggcggaggagcaatggcatcattggatttaccctaccgatgcccccgttgtggcgagcacaagaggtttcggtcactgtcgtctctgcgggcgcacctggaatattcccacacctacgaaaccctttatattctgtctaagaccaattctatctgcgatggagccgctgccgcggctgcagctgctgccgccgcgtccggcttccctctggcgccagagccggccgctctacttgcagtgccaggcgccaggcgagaggtattcgagtccacttccttccagggaaaggagcaagccgccgggccatcgcctgcagccccccatttgttgcaccatcaccaccatcatgcccccttagctcactttccaggagatttggtcccagctagtttaccctgtgaagaattggccgaacccggattggtgcctgcagccgcagccagatacgcccttcgggagatcgagattcctctgggagagctgttcgcaagaaagtcggtggcttcatctgcctgcagcacgccccccccgggcccgggccccggcccttgcccagggcctgccagcgcttctcccgcctcgccttctccagccgatgtcgcctacgaagaagggctggctagactgaaaattagggctctagagaagctggaagtggacaggcggctagaacggctgagcgaagaggtggaacaaaagatcgctggccaggtggggaggctacaggccgagctggaaagaaaggccgccgagctggagacggctcggcaggagagcgcgcggctgggtagggaaaaggaagaactggaggagagggcctccgagctgagcagacaagtcgacgttagcgtggagctcttggccagcctgaaacaagacttagtccacaaagagcaggaactgtcaagaaagcagcaggaagtggtccagattgatcagtttctgaaggagacagccgctcgggaagcaagcgcgaaacttcgattgcagcaatttattgaagagttactggaacgcgccgaccgcgctgagaggcaattgcaagtgatttcctcttcttgtggctccactccctccgcgtctctaggacgcggcggcggtgggggaggcgccggccctaacgctcgcggtccgggacgcatgagagagcaccacgtgggacctgccgtgcctaacacctacgctgtgtcacgacacggaagttcgccaagcacgggtgcatctagtcgagtccctgctgcctctcaaagtagcgggtgctacgactccgactcacttgaactcccaagaccagaggaaggtgcccccgaagatagtgggccaggcggactcggtacgagggcccaggccgccaatggaggatccgaaagatcccagccaccccggtcaagcggcctgcgaagacaggccatccaaaactggcaacgaaggccacgacggcattcaacagagggggaggaaggggacgtttccgacgtcgggtcgaggacaacggagagcgaagctgagggtcctctggacgcgccccggccgggacctgccatggcaggcccgctctcttcatgtaggcttagcgccagacctgaaggaggatcgggccggggtaggagggccgagagagtgtccccaagccgatctaacgaggtgatctcgccagagatattaaaaatgcgtgccgctttattctgtatcttcacataccttgacacgcgaacactgctgcatgctgccgaagtgtgccgagattggcggtttgtcgctagacaccctgcagtgtggacgagagttctcctggagaacgctagagtgtgctccaaatttctggcaatgctggcgcagtggtgtacccaagctcattctctgaccctccagaatctgaagccccgccagcgaggcaaaaaagagagcaaagaggagtacgctcgcagtactcgcggatgtctggaagcggggctggaaagccttttgaaggcagctgggggcaatcttctcattctgagaatctcacactgtccaaatatactgaccgataggtctctctggctggcatcttgttattgccgggctctgcaggccgttacttatcgctccgcgacagaccctgtgggccacgaggtaatttgggccctcggcgcaggttgtagagagatcgtctctttgcaggtcgcacctctgcacccttgccagcaacctacccgattctcaaaccgatgtctgcaaatgatcggcaggtgttggccacatttgagggctctgggggtgggcggcgccgggtgcggtgttcaaggcctcgcctcacttgcacgtaattgtatgcgcctacaggtactcgaacttgaccatgtctccgaaataacacaggaagtggccgctgaggtgtgccgagaggggttgaaaggtttggagatgctggtgttaaccgcgacgcccgttactcctaaagcacttctgcatttcaattccatctgccggaacttgaaatccatagtcgtgcagatcggcatagccgactattttaaagagccgtcttcccccgaggcacagaagttgttcgaagacatggtcactaaactccaggctctgcgcagacgccccgggttctcgaaaatcctgcatattaaagtagagggcgggtgttag

SEQ ID NO: 187638 - DNA, 2628 bp, synthetic construct
  misc_feature 1..2628: note = Description of Artificial Sequence: Synthetic coding sequence
  source 1..2628: mol_type = other DNA
atggccagcctggacctgccctaccggtgcccccggtgcggcgagcacaagcgctttcgaagcctgagttctctgcgcgcccacctggagtatagccatacatatgagaccttgtacattctatccaagaccaacagcatctgcgatggagccgccgccgcagccgcagccgctgcagccgcgtctggtttcccactcgctcccgagcctgccgctctgctggccgtacctggtgcccggagagaagttttcgagagtacctctttccagggaaaggagcaggctgcaggaccatccccagcagccccccatctcctgcatcatcaccaccatcacgcacccctggcccactttcctggcgaccttgtaccagcgtcactcccgtgtgaagaactggccgagcccgggctagtgcccgctgcggcagccagatacgccctgagggagatcgagatccctctgggagaactgttcgctaggaaatccgtggctagtagtgcgtgttcgactccgccccctggaccgggtcccggaccgtgtcccggccctgcttctgccagcccagcctctccatctccagctgatgttgcatacgaggaagggttggccagattgaaaattcgagccctggaaaagcttgaagtcgatagacggcttgagcgcctttccgaagaggtggagcagaaaattgccggacaggtgggccggctacaggccgagcttgaacgaaaggcagcggaacttgaaacggctagacaggagtctgctcggctgggacgggagaaagaggaattagaggaacgcgcatccgaattatcccgccaagtggatgttagcgtagagcttcttgctagtctgaagcaagacctcgtccacaaggagcaagagttgagccgaaagcagcaggaggtggtgcagatcgatcaattcctgaaggagactgccgctagagaggcctcagctaagttgcgactacagcagtttatcgaggagttgctggagcgggccgaccgggccgaacggcagctccaggtcatatcaagctcatgcggttccaccccatccgcatcactagggagaggcggtggcggtggcggcgcaggtccgaatgcccgaggccccggaaggatgagagagcaccacgtgggccccgccgttcccaatacctatgctgttagccgccacggctcaagcccaagcacaggggccagctctcgcgtccctgccgcatcacaatccagtggctgttacgactctgactctctcgaactgcctaggccagaggagggggctcctgaagactctggccctggggggctgggcacaagggcacaggccgcaaatggggggtccgaacggtcccagccaccacggtccagtggcttgagacgacaagccattcaaaactggcagcgtcgaccccggagacatagcacggagggggaggagggcgatgtctcggatgtgggaagtagaaccaccgagtccgaggccgaaggacccctcgacgcccccaggcccggtcctgcgatggctggccccctcagctcatgccgactgtccgctagacctgaggggggatctggcagaggtagacgcgctgagcgggtcagccccagcagaagcaacgaagtgatctctcccgagattctcaagatgagagctgcgctgttctgcatcttcacatatctcgacacacgtactctgctgcacgcggctgaagtctgtagggattggaggttcgtcgccagacaccccgctgtgtggacacgggtcctgctggagaacgcgcgtgtgtgttcgaagtttctggccatgctggcacagtggtgcacccaagcccactccctgacactgcagaacctcaaacctagacagcgggggaaaaaggaaagtaaagaggagtacgcgcggtcaacaagaggatgtttggaagctgggctagaatccctcctgaaagctgcgggcgggaatttgttaatcctgcggattagccactgcccgaacatactcactgataggtctttatggctcgcctcatgttattgccgagctctgcaagcggtgacttatcggtcggccactgatccagtgggccatgaggtaatctgggccctgggagccggttgtcgcgaaatcgtcagcttgcaggttgcccccctgcacccatgtcagcagccgacacgcttcagtaacaggtgtcttcaaatgatcgggagatgctggccccacttgcgggccctgggcgtgggaggagccggatgcggggttcaaggtttagcgagcctggccagaaactgcatgaggctgcaggtcttggaacttgaccacgttagtgagattacccaggaggtggccgctgaggtatgccgagagggcctgaaaggtctggagatgcttgtgctcacagctactcccgtgacacccaaggcgttgttgcatttcaattccatctgtcgaaacctcaagtccatcgtcgttcagatcggcatcgctgactattttaaggaaccttcctcaccagaagcacaaaaacttttcgaggacatggtgaccaaactgcaggccttaaggcgccgtcccggcttttctaagattctccatataaaagttgaaggtggctgttag

SEQ ID NO: 187639 - DNA, 2154 bp, synthetic construct
  misc_feature 1..2154: note = Description of Artificial Sequence: Synthetic coding sequence
  source 1..2154: mol_type = other DNA
atggccagcagcagcgacagcgaggacgacagcttcatggccgtggaccaggaagagacggtcctcgaaggaacaatggaccaggatgaggagcctcaccccgtgctggaggcagaggagacaaggcacaatcgcagtatgtctgagctgccggaagaggtattggagtacatcctatcgttcctgtccccataccaggagcataagaccgcggctctggtgtgtaaacagtggtatagattaatcaaaggtgttgctcaccagtgttatcatggctttatgaaagctgtccaagaaggtaacatccaatgggagtctcggacctacccttatccggggaccccaatcacccagagattttcccacagcgcgtgctactacgatgctaatcagagtatgtacgtgtttggcgggtgcacgcagagttcttgtaatgctgcattcaacgatctttggcggttggacctcaattctaaggagtggatacgccctctggctagcgggtcgtatccatctccaaaagccggggccaccctggtggtgtataaggatctgctcgtactctttgggggctggactaggccttccccgtaccccctccatcagccggagaggtttttcgacgagattcacacatactctccaagcaagaattggtggaactgtatcgttaccacacatggaccaccacctatggcaggacattcgtcctgcgtcatcgacgataagatgattgtgtttggcggttctctgggcagccgtcaaatgtcgaatgacgtttgggtacttgatctggagcaatgggcctggtcaaaaccaaacatttcaggacctagccctcaccctcggggggggcagtcccaaattgtaatcgatgatgccaccatcctgatactcggaggttgtgggggtcctaacgctctgttcaaggacgcatggctcctacacatgcatagcggtccgtgggcctggcaaccgctcaaagtagagaacgaagaacacggtgcccctgaactgtggtgccaccccgcttgtcgggtggggcagtgcgtcgttgtgttttcccaggccccatccggaagagcacctctttctccatcattgaacagtcgcccatcacccataagcgccaccccccctgcgctggtgcccgagaccagagagtatcgttctcagtctcctgtccgaagcatggatgaggccccctgtgtaaatggacggtggggaactcttcgcccaagggcacagcgccaaactccctccgggtctagagaaggctcactatcccccgcccgaggggacggcagcccgatcctaaatggaggctctctgagcccaggaaccgccgctgtgggtggttcctcattggactctcccgtgcaggccatctcgccctcaacccctagtgcccctgaaggatatgacctgaagattggactctcactggctcctcgaaggggcagtctcccagaccagaaagatcttcgcttaggcagcattgacctgaactgggacctgaagcctgcaagcagctcaaacccaatggacggcatggacaatcggaccgtgggcgggtccatgcgtcatccaccggaacagacaaatggcgttcacaccccgccacacgttgcctccgctctcgccggagcagtgagcccaggcgctcttagaagatctctggaggctatcaaggcaatgagtagtaagggtcccagtgcttccgccgcactgtcgccgcctttgggatcttctcctggttctccaggcagccagagtttaagctcaggcgagaccgtgcccatcccacgcccgggccccgcgcagggagatggtcactcattacccccgatagcccgaaggctggggcaccatcctcctcagagtctgaacgttggaaaacccctctatcaatcaatgaactgtaaaccaatgcaaatgtatgtgttggacatcaaggataccaaagaaaagggacgtgtcaagtggaaggtgttcaatagcagcagtgtcgtaggaccaccagaaactagccttcatacagtagtacaggggcggggagaactcatcatcttcggggggctcatggacaagaagcagaatgtcaaatactaccccaagaccaatgcactttacttcgtcagggccaagcgatag

SEQ ID NO: 187640 - DNA, 900 bp, synthetic construct
  misc_feature 1..900: note = Description of Artificial Sequence: Synthetic coding sequence
  source 1..900: mol_type = other DNA
atgagcagccccccccagatcgtgatcgacgacgccaccatcctgatcctgggcggctgtgggggcccaaacgcgctctttaaagatgcgtggttgctccacatgcactctggaccatgggcttggcagcccttgaaggtggagaacgaggagcatggcgcaccagagctgtggtgtcacccagcatgtcgggtgggccagtgtgtggtggtgttctcccaggccccatccggtcgagcaccactgtcaccgtccctcaatagtaggccatcccccattagtgcaacaccccccgctctggtcccagaaacgcgcgaataccgcagccagtctcccgttagatctatggacgaggcaccttgtgtcaatgggcgctggggaacccttcgacctagggcacagagacagacgccatcagggtcccgggaaggtagtctgagtcctgctcgcggcgacggatcaccaatcctgaatggaggctctctgagcccaggcacagccgctgtgggcgggagttccctcgactcccctgttcaggctattagcccgtctaccccatctgcccctgaggggtacgacctcaaaataggcctgagtctggcaccccgccggggcagtctgccagatcagaaggatcttcggctgggaagcattgatttgaattgggatttgaaaccagctagcagttccaatccaatggatgggatggataatcgcactgttggcggtagcatgcggcatcctccggaacaaacaaacggcgtacatacccccccccacgtcgcatctgcactggcgggtgccgtgtccccaggtgcattgcggaggtccttggaggcaatcaaggcgatgagcagtaagggcccatccgccagtgcagcactgtcccctcccttgtag

SEQ ID NO: 187641 - DNA, 900 bp, synthetic construct
  misc_feature 1..900: note = Description of Artificial Sequence: Synthetic coding sequence
  source 1..900: mol_type = other DNA
atgagcagccccccccagatcgtgatcgacgacgccaccatcctgattcttggagggtgcggcggtccaaatgctttgttcaaggacgcttggttgcttcacatgcattctgggccctgggcatggcaacctttaaaggtggagaatgaggagcatggagcgcctgagttgtggtgccatccagcctgcagagtggggcagtgtgtagtggtgttcagtcaagcgccctccggccgggctcccctgtctccttctctaaacagccgcccttcgcccatttcagcgaccccgcccgccctggtaccagagacccgggagtacaggagccagtcacctgtccgctccatggatgaggctccctgcgttaacggccgatggggcactctgcgccctagagctcaaagacaaactccttcaggcagtagagagggttctctatcaccagcacggggagatggttcaccaattctgaacggaggtagtctttctccgggtactgccgccgttggtgggagttcactagattctcccgttcaggccatttccccaagtacaccatcagcacccgaaggatacgatttaaaaatcggcctaagccttgcaccacggcgtggctccttacccgatcagaaagacctcaggttaggatctatagaccttaattgggatctgaagcccgcaagttcatcaaaccccatggacggcatggacaataggacagtcggaggctccatgagacatcctcccgaacaaacgaatggcgttcatactccaccccacgtcgcctcagcactcgctggtgcagtgagcccaggcgcattgcgccggagcctggaagcaattaaggcaatgtcatccaaagggcctagtgccagtgctgctctcagtcccccattgtag

SEQ ID NO: 187642 - DNA, 2127 bp, synthetic construct
  misc_feature 1..2127: note = Description of Artificial Sequence: Synthetic coding sequence
  source 1..2127: mol_type = other DNA
atgagcttcaaggacaaggacgagcggatcagctgcctggaggcctatgtcaccttgacctcgaagtcttccaggtttactgacgaaaccgaaatactcaaaatgagccagcgtcattcaggtcaagccggcacagaagccggcaacggcgccgacagtccacctattgtgaattccaagtacagtacctttagagatttctgttctacttctagcttccaagacagcggatacaatgaactgaagtcttgttcgttcgataacattgacaaagaatacctggggaagaaagagaaagggccgacccttctctacgaacaccccgagacttctgggcttggacttacacatcctctggagtctcccacacagaagaagaagtgcattctgccccgcaaggaaaaagataagactcctgagctctgtgaaactcctaagatctcaggaaagaagtgcctgcctcgccgcagactcaacgtctcatttgctctgctgaagggggactttgagagtcagaacagctcactggaaagctccatatcccaagtcattaacctcgagaagaatattcccagctccgcctcgggtttctcaagggctaataattttagtccgctcgtgacaagcacactgaaaactgaagaagttacttcctgtagccaaaagctgaggctcaatttcagccagcagaagacttcaaccatcgacgacagcaaggacgattgctctctgttcgaggttgaatgcatcagtcccatccaaggtaacaattttaaggacagcattacgcacgacttctctgactcctctctttgtattaatgacgagaacgcatgtccagaactcttaggatcttccgtcagcggaaccacttgtggcactgatgaggacatcttcgtcacccccatctccaacctagtcgctaatatccgattcaacgcatctcagattctttctccttcccctgaggtgcggggctctatcagtacacctgaggattccggctttaactcgctcagcctcgagaagagcgaggacagcctgtcagatcaggaagggtccttccaggaattattgcaaaagcacaaaggaaccccaaaggttggcgataccattcgcaagactcggcacctgggcaggagccgccgactcagtaccctacgggaacagtcaagtcagagcgaaacagaggaagaaaaacagatcgtacatccagactcagaaaagagagccgccgcagccagcgccatttcagaggggcagctgtcaagtgatgaatcaggcgacctgacattctctctgaaaaatctgagcaaaacaccagccttacaacttgtccacgaactgtttatgaagagtaagagaaagagattacaggagaacagcgggcatgaatttttggagcagggtgacggagaaaagatagccgtgctgcagtgtatcttggccggcctgatcgggaagaaaatgggcatcgaaaagttggacatacttactgagcttaagtacagaaacctgaaacacatactggctatggtgcttgaaagtctgacagcagaatctttatgcagtgtttggaaagtctctcgcaactggcgggagatcgtggtacaagataaaaatgccaatcgccgtcgcaagttttacataacccagcttaaaaccgatagcgagggtgctgttcttaacgtggaagacgccgccaccaggctgcagcttctgaatcgcagcgcgttgcgctcggtgcaggcacaggccaggatcccgggctctcaaagggaacaaggttcgaccttgagcccgtggggggaggtgctgactccgctcgccagttcatctgtaacccacttatcctcaaaacaagaggagtatgtgaaggtggccaaaaccctgtttacagacgaggcactcaaaccctgtccaagatgccaatcgccagccaaatatcaaccctacaagaagagaggcctgtgtagccggaccgcctgcgggttcgacttttgcgtcctctgtctgtgcgcatatcacgggagcgaggaatgtagccgcggcgctgcaaaaccacgcaatagaaaagacgccctcccgggttcggcgcagagcaagcggaacttaaagcggctgtag

SEQ ID NO: 187643 - DNA, 675 bp, synthetic construct
  misc_feature 1..675: note = Description of Artificial Sequence: Synthetic coding sequence
  source 1..675: mol_type = other DNA
atggccgtgggcaacatcaacgagctgcccgagaacatcctgctggaactgttcactcacgtgccagcacggcagttactgctcaactgcaggctcgtatgctcactgtggagggacctgatagacctcgttacgctgtggaaaaggaagtgcctgagagaagggtttatcactgaggactgggatcaaccagtggctgactggaaaattttctacttccttcgctccctgcaccggaaccttctgcacaacccttgcgccgaggaggggttcgagttttggtccttggatgttaatgggggggacgaatggaaggttgaggacttgtccagagatcagaggaaggaatttcctaacgatcaggtgcggtcccaggcccgcctgcgggtccaggtgccagcagtgagatccgcaccagtcgtgcgtgcccgcgccagtggcgatctgcccgccaggcccggggatcaccctgctgaagagagatgccaggtcgagggcgggctgccccacatactccagctcccggcacgcagacccctgcacttagtctcagcacggcgaaggggacattcattgctcgggcgactcgtcaggccagagggtcatcaacagcagcatcaccatagggctcccgcggccctcactccacccgagcctccaagtgccgagccatag

SEQ ID NO: 187644 - DNA, 768 bp, synthetic construct
  misc_feature 1..768: note = Description of Artificial Sequence: Synthetic coding sequence
  source 1..768: mol_type = other DNA
atggccgtgggcaacatcaacgagctgcccgagaacatcctgctggagctttttacccacgtccccgcgcgacagttgctgctcaactgtcgtctcgtatgcagtctctggcgagatctgattgacctggtgaccctttggaagcggaagtgtctgagagaggggttcataacagaagattgggaccagccagtcgcggactggaaaattttttattttttaagatccctccacagaaatctgcttcacaacccatgcgccgaggaaggatttgaattttggagcctggatgttaacggaggagacgagtggaaggtggaagatctgtctcgggaccagcggaaggagttcccaaatgatcaggtcaaaaagtacttcgtgacgtcttactacacctgcctcaaatcccaggtagtcgatttgaaagctgaaggatattgggaggaactgatggacaccacacgcccagacattgaggtgaaggactggttcgcggctaggcccgattgcgggtcaaagtatcaactgtgtgttcagctcctgagttctgcacacgcgcccctgggcaccttccaacccgaccctgctacgatccagcagaagtcggacgccaagtggagagaagtttcccatactttttccaactacccacctggcgttcgatatatttggttccagcatggcggcgtcgatacgcattactgggcggggtggtacggaccgagagtaaccaacagctccattacaattggacctcctctgccatag

SEQ ID NO: 187645 - DNA, 675 bp, synthetic construct
  misc_feature 1..675: note = Description of Artificial Sequence: Synthetic coding sequence
  source 1..675: mol_type = other DNA
atggccgtgggcaacatcaacgagctgcccgagaacatcctgctggagttgttcacccacgttccggcgagacagcttctgctgaactgtcgactggtatgtagtctttggagggaccttatcgacctggtgacactgtggaaacgaaagtgccttagggagggctttattacggaagattgggatcagccggttgctgactggaagatcttttattttctccgatcgctacaccgcaacctcctgcacaatccctgcgcagaagaaggctttgaattctggagcctcgacgtgaacggtggggacgaatggaaggtagaagacctgtctcgagaccagcggaaggaatttcctaatgaccaggtcagatcacaggctcgattgagagtccaagtgccggccgtgagatccgctccagtggtcagggccagagctagtggtgacctccccgcccggccgggtgaccatccagcggaggaaagatgccaggtggaaggcggactgccccacatcctgcagctaccagcccgacgtccgctacaccttgtgtcagcgagacggcgcggacacagcctcctgggtagattggtcaggccagagggtcaccaacaacagcatcaccacagggccccagctgccctcaccccccctgagcctccttctgcggagccctag

SEQ ID NO: 187646 - DNA, 675 bp, synthetic construct
  misc_feature 1..675: note = Description of Artificial Sequence: Synthetic coding sequence
  source 1..675: mol_type = other DNA
atggccgtgggcaacatcaacgagctgcccgagaacatcctgctggagctttttacgcacgtgccggcgcgacagctgctgcttaactgtcgactggtctgctccctctggcgagatcttatcgatcttgtgacactatggaagagaaaatgcctgcgagagggcttcatcacagaagattgggaccagccagtcgccgattggaaaatattttatttccttaggtctttacaccgcaacttattacataacccatgtgctgaagagggattcgagttttggtccctcgacgtaaatggcggagacgagtggaaggtggaagacctctctcgggatcaaaggaaggagttcccgaacgatcaggtccgctcccaggctcgcttgagggttcaggtgcccgcagtacggagcgccccagtggtacgggcccgggcttcgggcgatctgcccgccagaccaggagatcatcccgccgaagagcgctgtcaggtcgagggcggactacctcacatcttgcaactacccgctcgtagacctcttcatctggtgtcagccaggaggagagggcatagcctgctgggccgcctcgtgcggccagaagggcaccagcagcagcatcaccatcgcgcgcccgctgccctcaccccccccgagcctccgagcgccgagccttag

SEQ ID NO: 187647 - DNA, 771 bp, synthetic construct
  misc_feature 1..771: note = Description of Artificial Sequence: Synthetic coding sequence
  source 1..771: mol_type = other DNA
atggccgtgggcaacatcaacgagctgcccgagaacatcctgctggagctctttactcatgtgccagccagacagcttctcctgaattgcaggctggtgtgctcgctgtggcgggatttgattgatctggtgacgttgtggaaacggaaatgcctccgcgagggatttatcaccgaggattgggaccaacccgtggctgactggaaaattttctacttccttcgatctcttcacagaaatcttctgcacaacccctgcgcagaggaaggtttcgagttctggagcttagacgtgaacggaggtgacgagtggaaagtggaagacctgtctagagatcagcgcaaggaattccccaacgaccagcacctcccgcaggtaccaggaggcggtcctcagggtcgacgcgttttaggcggtgccgacggctatcataccgctggacatcgggggcaggggctggttcggtcccaggcgcgcttgcgggtgcaggtacctgcagtgcgaagcgcacccgtggtgcgcgccagggcgagcggagacctgccagctcggccgggggaccatcctgctgaggagcgctgtcaggtggagggaggtctgccacatattttacagctgccagcgaggagacccttgcatcttgttagtgccaggcgacgaggacactccctccttgggcggttggtgagaccagaagggcaccagcagcagcatcaccatagggcacctgctgcactaactccccccgagcctccctctgctgagccctag

SEQ ID NO: 187648 - DNA, 768 bp, synthetic construct
  misc_feature 1..768: note = Description of Artificial Sequence: Synthetic coding sequence
  source 1..768: mol_type = other DNA
atggccgtgggcaacatcaacgagctgcccgagaacatcctgctggaactcttcacacacgtccctgctagacaacttcttttaaattgtcgactggtctgttcactgtggagagatctgattgatctcgtcactctctggaaacgtaaatgcctgcgagaaggcttcatcactgaggactgggaccagcctgtagccgactggaagatattttattttcttaggtctttgcaccgaaatctcctgcacaatccctgcgctgaggaagggttcgaattctggtcattggatgtgaacggaggggatgaatggaaagtggaagatttgtccagagaccaacgaaaggaatttcctaacgaccaggtgaaaaagtactttgtcaccagctattacacatgccttaagtcacaagtggtcgaccttaaggcagaaggctactgggaagagctcatggatacgacaaggcctgacattgaggtcaaggactggttcgctgctagaccggactgcggcagcaaatatcaactgtgcgtacagctactgtcatctgcccacgcacccctggggactttccagccggacccagcaaccatacagcaaaagtctgatgccaaatggcgcgaggtgagtcataccttctccaattacccaccaggcgtgaggtatatttggttccagcatggcggcgttgacacccactactgggccggatggtacgggcccagggtgaccaattccagtatcactattggccctccgcttccctag

SEQ ID NO: 187649 - DNA, 498 bp, synthetic construct
  misc_feature 1..498: note = Description of Artificial Sequence: Synthetic coding sequence
  source 1..498: mol_type = other DNA
atggccgtgggcaacatcaacgagctgcccgagaacatcctgctggaactttttacacatgttccagcgagacagctgctacttaattgccgcttggtgtgtagtctgtggagggatctgatagacctcgtcaccctgtggaaaagaaaatgcctgagagaaggatttatcacggaggattgggaccagccagttgccgattggaagatcttttatttcctgaggagcctccacaggaacctgctgcataatccttgcgctgaagaagggtttgaattctggtcgttggacgtcaatggaggagacgaatggaaggtcgaagacttgtcccgcgatcagaggaaagagtttcctaacgatcaggtaagatctcaggcccgtctccgcgtgcaagtgccagccgttagatccgcacctgtggtgcgcgctagagccagcggtgacctccctgcaaggccaggagatcatcctgcggaagagcggtgccaggtggaatag

SEQ ID NO: 187650 - DNA, 861 bp, synthetic construct
  misc_feature 1..861: note = Description of Artificial Sequence: Synthetic coding sequence
  source 1..861: mol_type = other DNA
atggccgcccccgcccccggcgccggcgccgccagcggcggcgccgggtgtagcggcggaggcgcaggcgcgggggctggtagcggcagtggcgccgccggcgccggcggtcggctgccgtctcgggtgctagagttagtgttcagctaccttgaactcagcgaactgagatcctgcgctctggtgtgcaagcactggtatcgctgcctgcacggggatgagaatagtgaggtgtggaggagtctctgtgcaagaagcctcgcggaagaagcactgcggaccgacatcctgtgcaacttaccttcctacaaagccaagattagagcctttcagcacgccttcagcaccaacgactgttcaagaaacgtgtatatcaagaaaaacgggttcaccctgcatcggaacccaattgcacagtcaacagacggagcaagaactaagattggttttagcgagggaagacacgcctgggaagtctggtgggagggtcccctgggaaccgtggctgtcatcggtattgccacaaagcgcgccccaatgcagtgccagggttacgtagctctgttagggtccgacgatcagtcctggggttggaatctggtggacaataacctgctccacaatggagaagtgaacggaagtttccctcagtgtaataacgcccccaaatatcagattggcgaaagaatcagggtcatcctcgacatggaagataagactctggcattcgagcgggggtacgaatttctcggcgtcgcttttcggggtctgcccaaggtctgcctgtatcccgccgtgagtgcagtatacggcaataccgaagtcaccttagtttatctcggcaagcctcttgacggttag

SEQ ID NO: 187651 - DNA, 1812 bp, synthetic construct
  misc_feature 1..1812: note = Description of Artificial Sequence: Synthetic coding sequence
  source 1..1812: mol_type = other DNA
atggaccggggcagcctgctgcccttccagctgtggtgcccccggccatttggtacctattcacagaaccagcctcgccccccatcggccgccctgaagcccagcgcctgccctgaaccaggaggcggcgccgaaccagatcatggacctgcccatagcgaaaacacacctcctgcactagccacagaagtgccagcaagtcagcccgctccgttgctgagtgctgcggcagccggggacgagggtcgcgtcctgctagatacgtggtacgttataaaaccgggaaacaccaaagagaaagttgcttttttcgtagcgcaccagtgtggtggaggaagtcgggcgtctagtatgaaggtcaagggacattggggctccgattcatccaaagcgaaaagacggcgacgttgcctggatcccactaaagcccctcccgaccccgggggcagggaggggccgcccgccgccgaagaaggtccagccagtgcgggcgaggatgtggatctgctgagcgttgcggagatggtcgccctggtcgaacagagggcggcacttgccctccagagttacccaagaccaaccacgccagctcctgtagtcttcgtgagcgcggaacagggtgggcccgcgaaaggagtagggtcagagagacgttctggagggggagattgctcacgtgtggctgaggctgttgcgcactttgaagcacagcgggacagtccgcctacgaagggactccggaaggaggagagaccgggcccaggacccggagaggtccgaattgcctttaggataagcaacggacgggagcccagagctccagattcaggccttcctagcgggggcggggggcgcccaggatgtgcctatcctggtagccctggacctggggcacgggctaaggacaaaataacatgcgacctctatcagctgatatcaccctccagggatgcgttaccctcaaacgtagagttcctgctcgcgcgggctgacgaggctagtgagggcgactccccagcccctgcccgtcccgaagatacaccaccagcaccacctcccccccccgcccgtgactgtggtgcctctggcttccatgtggacgtggttgtcacaggggtcgtagacgagtgcatcttctttggaaaagacggtacaaagaacgtgaaagaggagaccgtttgtcttactgtctccccagaagagcctccccccccagggcaactgttctttttacagaaccgcgggcctgacgggccgcccgaacctccccctgccgacagccctgctactgctccgggacctgatgacgccgaagggacagccgacacttccctatgtcgtctctaccgccacgtgtcccatgactttttagagattcgattcaaaatccagcgcttgctggagccacgtcagtacatgctgcttcttcctgaacacgtgttggtgaagattttttccttcctccctacccgagcattggctgctttgaaatgcacatgtcaccacttcaagggaatcatcgaggcgttcggagtgcgagcaaccgatagccggtggtcccgagaccccctatatagagatgatccttgtaagcagtgtcgaaaaagatacgaaaagggcgatgtctccctttgccgctggcacccaaagccttatcaccatgacctgccttacggcagatcttactggatgtgttgccggagagccgacagagagacgcccgggtgccggctggggctgcacgacaataattgggtgctgccttgcaatggcccaggcggaggcagagctgggagagaagagggtagatag

SEQ ID NO: 187652 - DNA, 609 bp, synthetic construct
  misc_feature 1..609: note = Description of Artificial Sequence: Synthetic coding sequence
  source 1..609: mol_type = other DNA
atgacctgcctgaccgacgtgcccaccggctgcgccgccgtggagcctaccgcccgccttccagctgcagcatgggcctctaccatcaccacggggtgttgtcctgctatgggccaggccggagccggcccagccggcagaaggggcggcgaggccggcggtggggaagggcgggctcaccacgcgcaccccagtccactgccgcgagagccacgcgtacggactgggcccccagcccattctcccacccctgggtccatcgatccttcacctgaactgtcgtgggggtccgcaggcgtcacgcaagaatctcccctgttggacccagtggatttccttttatttcgtaccagggccgtggaccctctccggagggtgttttttttcttctaccagcacctgacatttttctctattcagccccaacccccaccctgccatgctttccatcccaaggaccctcctgcgggttctcggagacagctcattctggtaccattgaagggcccacctatcctcgcacccattctgtccctcacgcctatcctttcccggtggtcgtgttactttccaagaagtagaatcgctcaaggatggcacctcagctag

SEQ ID NO: 187653 - DNA, 1359 bp, synthetic construct
  misc_feature 1..1359: note = Description of Artificial Sequence: Synthetic coding sequence
  source 1..1359: mol_type = other DNA
atggccagccggatcaacaccaacttcaccctgatccccaaccagaaacttcgtaggagcaatcgccagacctcatgctattctaagacactagggtccggatttcaaccaatcagcacattcggaaactttaaagcgctccctcttgaaatcttccaaataattctaaagtatttgagcgtgaaggacattagcatgctgtccatggtgtctaaaactgtttctcagcacataatcaactacatctccacctctagcggaagtaagcgcttgcttctgcaggatttccacaaccttgaactccctgaccggcggcaggattcagccatccttgagcactaccggagcctcggtctcctgtttaagcgctgcaccctactgcttcctactaaagaacggttgaagtacatccacaagatacttaccgaagtctcttgtttcaagttcaatggttgcgctgctcccatgcagtgtttgggtctgacatgctatggtatgtttctacagactctcacggccgggtgggatgagctcgagtgccacagggtgtacaattttctgtgcgagcttactaacctctgccggaagatacaaatggctgtctgttctaaacctggaagcgcacagaagctcgagctgagaatcagactgttttgcaggaacgttctccttgatcactggacccacaggtccgattctgctttctggttaactcgcattttaaagccgtggcccatggtgaatcaggcccggttattatacattatttttggccctatcagtccccaggacgggcaggtggtttggcaggaaatgatcgaagagcccaccgacgagttcagtctcaagggtctggccgatgccatcaaactcttgtacgatgcatctaccaaagagtggaccgccgatgacgtcatttctttggttgacgaactgagcgttgtacctagggagtggttgctggagaacaatgcaaggcttctgatgctatcaggcaataacatctgcttctctttcatggcgtctaaggcagtcaacggcagaaccatcgagctggcacgactagtggtcttcctcgcactggtgtgtgagaaggagctttattgtatggactggacagttaaaatgatgcagaaggtatgcaaagtgttcagtacccccgtggagcgcaaaaattttctgcaaaatgtggccaacgcctttgcatgcgtaattatggaaatgctacagtctatcatgtcaggggatagggacgaggacgatcgcagctttctaaacctcttccatcttgtccatgcccaagcaaattttcataaggaagtgctgtatctaaccatgaatacccctctctccacgtag

SEQ ID NO: 187654 - DNA, 2133 bp, synthetic construct
  misc_feature 1..2133: note = Description of Artificial Sequence: Synthetic coding sequence
  source 1..2133: mol_type = other DNA
atgggcggcaagcagcgggacgaggacgacgaggcctacggcaagccagtgaagtacgatccctcctttagaggacccataaagaaccggtcatgtacagacgtcatctgttgcgtcctgttcctccttttcattctcggatatatcgtagtcggtatagtcgcctggttgtacggggatccaaggcaggttctgtatccccggaatagcacgggcgcatattgcggcatgggagaaaacaaagacaaaccctatctgctttactttaatatcttttcttgtattctgtcatcaaatattatttcagtggccgagaacggcctccagtgtcccaccccccaagtctgtgtcagttcgtgtcctgaggacccctggaccgttgggaagaatgagttttctcagaccgtgggagaagttttttatacaaagaaccgaaacttctgtttgcctggtgttccttggaacatgactgtaatcacatcactgcaacaagagttgtgtccgagctttttgctcccgtcagcgccagccctaggccgctgtttcccctggacaaacgtgacaccacccgctttgcctgggatcaccaatgataccacaatacaacaagggattagcggtctcattgattctctgaatgcacgcgatatcagtgtgaaaattttcgaggacttcgctcagtcttggtactggatcctggtggccctgggagtggccctagttctctcccttctattcatactccttctgaggcttgtggctggaccgctggtgctggtgcttattctgggcgtcctgggtgtactggcttatggaatttactactgttgggaggaatatagggttctgagagataaaggcgcttccatctcacaactgggattcacgacaaatttgagcgcataccagtctgttcaggaaacttggctcgctgccctgattgttttggccgtgctcgaggcgatccttcttctgatgctgattttcctccgccaacgtattcggatagccatcgccttgctcaaggaggcaagcaaggccgtggggcagatgatgtcgactatgttttatccccttgtgaccttcgtcctcctgttaatatgcatcgcgtattgggctatgaccgccctatacttggccaccagtggacagccacagtacgtcctctgggcatcaaatattagcagccccggatgtgagaaagtgccaatcaatacttcatgcaaccctacagcgcacttggtaaactcatcatgcccaggcctgatgtgcgtcttccagggctacagtagtaaaggactgatccagaggagcgtattcaatctgcaaatttatggagtcttggggcttttctggactctgaattgggtcctggctctgggacagtgcgtcctggcgggggcattcgcgagcttctactgggccttccacaaaccacaggacatcccaacctttcccctgatcagcgcttttattcgcacactgcgctaccacaccggctcactggcatttggcgccctcattctgacattggtccagattgcgcgagtgattctggagtacattgaccataagctgcggggagtacagaatcctgtcgcccgatgcattatgtgctgctttaagtgttgcctttggtgcctggagaagtttataaaattccttaaccgcaacgcctatatcatgattgcaatatatggcaagaacttctgtgtcagcgccaagaacgcgttcatgctgctgatgcgtaatattgttcgagtggtggtgctggacaaggtgacagatctccttctcttcttcggaaaactgttagtggtgggcggagttggtgttctgtcattcttctttttctctggtcgaattcctgggttgggtaaggactttaaatctccacaccttaactactactggttacctattatgacgtcaattctgggggcttatgtgatagccagcggattcttttccgtgtttgggatgtgcgtggatacccttttcttatgtttcctcgaggaccttgagcggaacaacggctcactggacagaccttattacatgtctaaatccctgttgaaaattctagggaagaagaatgaggcaccaccagataacaagaagaggaaaaagtag

SEQ ID NO: 187655 - DNA, 1206 bp, synthetic construct
  misc_feature 1..1206: note = Description of Artificial Sequence: Synthetic coding sequence
  source 1..1206: mol_type = other DNA
atgaagtgcgacttcaactgcaaccacgtgcacagcggcctgaagctcgtgaaacccgacgacataggccggctggtgtcctacacaccagcgtacctggaaggcagctgcaaggactgtataaaggactatgagcggctgtcttgcataggctctcccatcgtgagcccgcgaatcgtccagctcgaaaccgagagcaagaggttgcacaacaaggagaatcagcatgtccagcagactctgaactccaccaatgagattgaagccttggagacatcaaggctgtatgaagactcgggctattcatccttttccctgcaatccggactgtccgagcatgaagaaggaagtcttctcgaggaaaacttcggcgactctcttcagagctgcctgctccagattcagtcacctgatcaatatccaaacaaaaatctgttgcccgttctgcactttgagaaagtcgtctgtagcacactcaaaaagaacgctaaacgaaaccctaaagtggacagagaaatgcttaaagagattatcgcaagagggaactttaggctgcaaaatattattggacgaaaaatgggccttgagtgcgttgacatcctatccgagctctttaggagggggctgcggcacgtactggccaccatcttagcacagctgagtgacatggatctcattaatgtgtccaaagtgtccacaacatggaaaaaaattttagaggacgacaagggtgctttccaactgtactccaaggcgattcagcgagtgaccgaaaataataacaagttttcccctcatgcatctacacgcgagtatgtcatgtttagaacccccctcgcgtctgtccagaaatctgctgctcagacaagcctcaagaaagacgcccagaccaaactctccaatcagggcgaccagaaaggttcaacatactctcgacataatgagtttagcgaagtggccaagacactcaagaagaacgagtcactaaaagcctgtatcagatgcaactcacctgcgaagtacgactgctacctgcagcgagccacatgcaagcgcgaagggtgtggtttcgattactgtaccaagtgcctatgcaactaccataccactaaggactgttctgatgggaaactgttgaaggcttcatgcaagattggaccattgccgggcactaaaaagagtaaaaagaacctgcgtagactctag

SEQ ID NO: 187656 - DNA, 882 bp, synthetic construct
  misc_feature 1..882: note = Description of Artificial Sequence: Synthetic coding sequence
  source 1..882: mol_type = other DNA
atggacgccccccacagcaaggccgccctggacagcatcaacgagctgcctgaaaacatcctgctggagctgtttacccacgttccggcaagacagctgcttctgaactgtagactggtgtgttcactttggagagaccttatcgatctgatgaccctatggaagagaaagtgtttgagagaaggatttataacaaaagattgggaccagcccgttgccgactggaagatattctacttcttaagatccctgcacagaaacctcctaagaaatccgtgcgctgaggaggatatgttcgcatggcaaatcgatttcaatggcggcgatcggtggaaggtggaaagcctccccggcgcacacggtactgattttcccgatccaaaagtgaagaagtatttcgtgacaagctatgagatgtgtctgaaatcacagctggtggatctggtggcggaggggtactgggaggaactgctcgacactttccgcccagatatcgtcgtcaaggactggtttgcagcccgggccgattgcggctgtacttatcagcttaaggtccagctcgcgagtgctgactacttcgtgctggcttcttttgagcctcccccggtaaccatccagcagtggaacaatgccacttggacggaggtgtcttatacatttagcgattacccaagaggtgtgcgttacatcctttttcagcatggcgggagggacacacagtactgggccggatggtatggaccaagagtaaccaattcctcaattgtcgtgagtcctaaaatgacccggaaccaggcgtccagtgaggcccagcccggtcagaaacatggacaggaggaggcggctcaatcaccttatagggccgtcgtgcagattttctag

SEQ ID NO: 187657 - DNA, 750 bp, synthetic construct
  misc_feature 1..750: note = Description of Artificial Sequence: Synthetic coding sequence
  source 1..750: mol_type = other DNA
tgaaacgagctgcccgagaacatcctgctggagctgttcacccacgtcccagccaggcagttgctgcttaattgccggctggtctgctccttgtggagggatctgatcgatctaatgacattgtggaagcggaaatgcctcagagaaggtttcatcacaaaggactgggaccagcctgtcgcggattggaaaattttttacttcttaaggagtttacaccggaatcttctgcgcaatccatgtgccgaggaggacatgttcgcatggcagattgactttaacggcggcgatcgttggaaagtggagtcccttcctggagcccacggaactgatttcccggatccaaaggtgaaaaaatatttcgtcacctcttacgaatttgccgctcgtgccgattgcgggtgcacatatcaactgaaagtccagctggctagtgctgactacttcgtgctggcatcatttgagcccccccccgttactatccagcagtggaataacgcgacctggacggaagtatcatatactttctcagattacccaaggggcgtgcgctacattctgtttcagcacggagggcgagatactcagtattgggcagggtggtatggccctagggtgactaattcttcaatagtcgtgtccccaaagatgacacgtaatcaggccagctccgaagctcagcctggtcagaagcatggtcaggaggaagcggctcagagtccatacagggccgtcgttcagatcttttag

SEQ ID NO: 187658 - DNA, 1569 bp, synthetic construct
  misc_feature 1..1569: note = Description of Artificial Sequence: Synthetic coding sequence
  source 1..1569: mol_type = other DNA
atgcggctgcgggtgcggctgctgaagcggacctggcccctggaggttcccgagacagagcctacgcttggccacctcagatcccaccttcggcagagcctcctatgcacatgggggtatagcagtaacaccaggtttaccatcacattgaattacaaggatcctcttacgggagacgaggagacactcgcttcttacggaatagtctcaggcgatctgatctgtttaattcttcaagatgacatccccgccccaaatataccgtcgtcaacggacagtgaacacagctccctccagaacaatgagcagccctctctggctacctcttccaaccagacctcaatgcaggacgaacagccgagtgattcctttcagggacaggccgctcaaagcggcgtgtggaacgacgattctatgctcggtccatcccagaattttgaagctgagtccattcaggacaacgcccacatggccgaaggtaccgggttctacccaagtgaaccgatgctgtgtagtgaatccgtggagggtcaagtccctcactctctggagactttgtatcagagtgctgattgtagtgacgccaatgatgccctgatcgtgctcattcatctcttaatgctggaatcagggtatatcccacagggcacggaagctaaagccctcagcatgccagagaaatggaagctttcaggagtgtacaagctccaatacatgcatccactctgtgagggctcttccgctaccctgacctgcgtgcccctcggaaacctgattgtcgtcaacgcaactctgaaaataaataatgagatccgcagcgtaaagcgcctgcagctgctgcccgagagcttcatttgcaaagagaagttaggtgaaaatgtggcgaacatctacaaggatctccagaaactgtctaggttatttaaggaccagttggtatatcccctgctcgccttcacccggcaggccttaaatttgccagacgtttttggactggtggtcctcccattagaacttaagctccgtattttccgtttgctggatgtgaggagcgtcttatccctgtctgcggtgtgcagggatctgttcacagcatccaatgaccctctgctttggagatttctctatcttcgcgacttccgggacaataccgtgagggttcaggatacagattggaaggagctgtaccggaagaggcacatccagcggaaagagagcccgaaagggaggttcgttatgctgctaccatcaagcacccataccatccccttttaccctaatcctctacaccctcgccccttccctagctcccgcttgccacccggcataataggtggtgagtatgaccagcggcccacactcccatacgtcggcgatcccatcagttctctcatcccaggaccgggtgagacacctagtcagtttccgcccttgaggcctcgcttcgaccctgtgggaccactgccaggccccaaccccatcctacccggcaggggggggcctaatgaccgttttcctttccgacctagcagagggcggcccactgacggaagactcagtttcatgtag

SEQ ID NO: 187659 - DNA, 1332 bp, synthetic construct
  misc_feature 1..1332: note = Description of Artificial Sequence: Synthetic coding sequence
  source 1..1332: mol_type = other DNA
atggcccggccccccggcggcagcggccccctgctggacagcgagcattcctctcttcagaacaacgaacagccaagcctcgcgacctcgtcaaaccaaactagcatgcaggatgaacagccgtctgacagttttcaggggcaggcagcccaatctggagtctggaatgatgactcaatgctgggtccgagtcagaactttgaggctgagtccattcaggataacgcccatatggcagagggaacgggcttttacccttctgaaccgatgttatgttcagaatcagtggagggtcaggtgccacactccctcgaaactctctatcaatccgcagattgttctgatgccaacgatgccctcattgttctcattcacctgctgatgttggagagcgggtacatcccccaaggcacagaggccaaagcactgagcatgcctgagaagtggaaattgtcgggagtgtacaaactacaatatatgcacccactgtgcgagggcagtagtgccacgctgacgtgcgttccattgggaaaccttatagtggtgaacgccacgctcaaaattaataacgaaataaggtctgtcaagcgactccaattgctacctgagtcattcatttgtaaagagaaactaggcgagaatgtcgcaaatatctataaggacctacagaagttgagcaggctctttaaggaccaactcgtgtatccactgctagcctttaccaggcaagctctcaacctgcctgatgtcttcgggctcgtcgtgctcccattggagctgaagttgagaattttcagactgctggatgtgcgctctgtgctgtctctgtctgccgtttgtcgcgatttgtttacggccagtaatgatccgctgctgtggcgcttcctgtatctgcgagactttagggacaacactgtccgggtccaggatactgactggaaggaactgtaccgaaagcgccatatccagagaaaggagtcccctaagggcagattcgtaatgctgctgccatccagcacacatacaatccctttctacccaaatcctctgcaccctcggccattccctagctctcgcttaccccctggaattattgggggggagtatgaccaaaggccaacactcccctacgtcggcgaccccatctcgagtctgattcctgggccaggggagaccccatcacagtttcctcccctccggcctcggtttgaccccgtgggtccccttccaggccctaacccgattttacccggacgtgggggacctaacgaccgcttccctttcagaccatcccggggtcggccaacagacgggagactgtccttcatgtag

SEQ ID NO: 187660 - DNA, 1227 bp, synthetic construct
  misc_feature 1..1227: note = Description of Artificial Sequence: Synthetic coding sequence
  source 1..1227: mol_type = other DNA
atgcaggacgagcagcccagcgacagcttccagggccaggccgcccaatccggggtatggaacgatgattcaatgcttggcccttcccagaactttgaagctgaatccattcaagacaacgcgcacatggccgagggtactggattctaccccagtgaacctatgctctgctctgagtctgttgaaggccaggtccctcatagcctggagaccctgtaccagagtgccgactgttccgacgccaacgacgccctgatagtcctcatccaccttctcatgctggagtcaggctatattccccaggggacagaggctaaagccctgtcaatgccagaaaagtggaagctgtctggcgtgtacaaactccaatatatgcatcccctgtgtgaaggaagcagcgcgactctcacatgtgtcccgctcgggaatttgattgtcgtgaacgctaccttgaaaatcaataatgagatacggagcgtgaagcgattgcagttactgcctgagagtttcatttgtaaggagaagctgggggaaaatgtggctaatatttacaaggacctccaaaagcttagtagactctttaaagaccagctcgtatatcccttgcttgcgttcactaggcaggcccttaatttaccagacgtctttgggctggtcgtgctcccattggagcttaagctgaggatcttcagactcctggacgtaaggtccgttcttagcctctcagctgtttgtcgggatctgttcaccgcctccaatgacccacttttatggcggtttctgtatctcagagattttcgcgacaacaccgtgcgggtacaagatacagattggaaggagctctaccgcaagcggcatatccagcggaaagaatcgcccaagggacggttcgtaatgctgttgccatcttctactcataccattccattctacccaaatccgctccatcccagacctttcccttcctctcgtctgccccctggcattatcggtggcgagtatgaccagaggcctacactgccctacgtcggagaccccatttcatctctgattccgggacctggagagacaccttctcaattccctccattgcgacctcgcttcgatcctgttggtcccttgccaggtcctaacccaatactgcccggcagaggcggccctaacgatagatttcccttccgtcctagccgcggacgcccaacagacggccggttgagcttcatgtag

SEQ ID NO: 187661 - DNA, 699 bp, synthetic construct
  misc_feature 1..699: note = Description of Artificial Sequence: Synthetic coding sequence
  source 1..699: mol_type = other DNA
atgcagctgaccttcgcctggctgcacgtgttcggccggaccctgagaatgatgaatttttctggaaaaggatgcgctaatccttggggccattgttctatttacaataagaaccccccactgggtttctcctttcgcaagctttatatgcagctggatgagggatctcttacgttcaatgctaatcctgatgaaggggtaaattactttatgtccaaaggaatcttagatgactcacctaaagagatagcaaaatttatcttttgcacccggactttaaattggaaaaagctgcgtatttatctggacgagcggcgcgacgtgctggacgatctcgtgaccctccataacttccggaaccaattcctccccaacgcactgcgggaattctttaggcacatacacgctcctgaagaaaggggtgaatatctggagaccctgatcaccaaattcagtcataggttctgtgcgtgtaacccggatctgatgagggagttaggtcttagcccagacgctgtctacgtcctctgctattcgctcatattgctcagcatcgatctgacatccccccatgtgaagaataagatgtccaaaagggagtttattcgtaacacccgaagggctgcccagaacatctccgaggattttgtgggccacctctatgataacatctacctgatcggccacgtggctgcatag

SEQ ID NO: 187662 - DNA, 960 bp, synthetic construct
  misc_feature 1..960: note = Description of Artificial Sequence: Synthetic coding sequence
  source 1..960: mol_type = other DNA
atgggccagggcctgtggcgggtggtgcggaaccagcagctgcagcaagaaggctacagcgaacaggggtatttgacaagggagcaatccaggcggatggctgctagcaatatatctaacacaaaccacaggaagcaggttcagggagggatcgacatctatcatttactgaaggctaggaagtctaaggagcaagagggtttcatcaatctcgaaatgctgcccccagagctcagtttcacgattctgtcatatctgaatgctacagatttgtgtctggcctcctgcgtttggcaggaccttgccaatgacgagctgctgtggcaaggcctgtgtaagtcaacttggggacattgcagcatctataataagaatccgcctttaggcttctccttcagaaagctctatatgcagctggatgagggtagcctcacattcaacgccaacccggatgaaggagttaattattttatgtcaaagggcatactcgatgattctccgaaggaaatcgctaagttcatattttgcactcgaaccctcaactggaaaaaactgaggatatacctcgacgagaggagggatgtacttgacgacctggtgacccttcacaatttcagaaaccagttcttgccaaacgctctgcgagaattcttccgacacatacatgcccctgaagaaagaggagagtacctggaaacactgattaccaagttttcccatcgtttttgtgcttgcaatcccgatttaatgcgtgaactgggactatcgcccgatgccgtgtacgttctatgttattccttgattctactgtctatagatctcacctctccgcacgtgaaaaacaaaatgtccaagcgcgagttcattagaaatactcgcagagcagctcagaatatttccgaggacttcgtgggccatctgtacgacaatatctatcttatcggacacgtcgcagcctag

SEQ ID NO: 187663 - DNA, 555 bp, synthetic construct
  misc_feature 1..555: note = Description of Artificial Sequence: Synthetic coding sequence
  source 1..555: mol_type = other DNA
atgggccagggcctgtggcgggtggtgcggaaccagcagctgcagcaggagggatattcagaacaggggtacctgacccgggagcaaagtagacgcatggcggccagtaacatttcaaacaccaatcaccgcaaacaggtgcagggtggtatagatatataccatcttctgaaggcccggaaatcaaaggagcaggaaggcttcattaatttggagatgctaccaccagagctgtcctttacaattctgtcttatctgaacgcgacagacttgtgcctggcatcttgcgtgtggcaggatttagccaatgacgagctcctgtggcagggcctgtgcaaatccacttggggccattgcagcatctacaacaaaaatcccccactgggattctcttttagaaagttgtatatgcagctggatgaaggttccctgaccttcaatgcgaacccagatgaaggtgttaactatttcatgtccaaaggaatattggacgactccccgaaagagatcgctaaattcatattttgtactagaaccctgaattggaagaaatag

SEQ ID NO: 187664 - DNA, 1344 bp, synthetic construct
  misc_feature 1..1344: note = Description of Artificial Sequence: Synthetic coding sequence
  source 1..1344: mol_type = other DNA
atgcccgacatcatctgggtgttccccccccaggccgaggccgaggaggactgccacagcgatacggtcagggccgacgatgatgaggagaacgagtcaccggccgagaccgatcttcaagcacagctgcagatgtttcgggcccagtggatgtttgagttagcccccggggtgagctcatccaatctggagaatagaccatgccgggcagcccgggggtccctgcagaagacttctgccgatactaaaggtaagcaggaacaggccaaggaagaaaaggctcgagaactctttttgaaagctgtagaggaggagcagaacggcgctctctacgaggccattaaattctatcgaagagccatgcagttggtccccgacattgagtttaagataacctacactcgtagcccggatggggacggtgtcgggaatagctatatagaagataatgatgatgattctaagatggctgacctgctgtcctacttccagcagcagctcactttccaggagagtgtgcttaagctttgccagcccgagttagaaagtagtcaaattcatatttccgttctgcccatggaagttctgatgtacattttccgctgggttgtctcatctgacctggacctgaggtcactcgagcagctcagcctagtatgcaggggtttctacatatgcgctcgggatcccgaaatctggaggttagcctgcctgaaggtgtggggacggagttgcatcaagttggtaccgtacacaagttggagggaaatgtttctcgaaaggcctagggtgcgcttcgatggcgtgtacatttccaagactacctatattcggcagggagagcagagcctggacgggttctaccgggcctggcaccaggtggaatactataggtatatcagattttttcccgacggccatgtgatgatgctgaccacaccggaagaaccgcagagtatcgtgcctcgacttagaactcgcaacaccagaaccgacgccatcttgctaggccattatagactgtcccaggacacagacaaccagacaaaagtctttgcagtgatcacaaagaagaaggaagaaaagccactggactataaatatagatactttcggcgggttcccgtgcaggaggccgatcagtcatttcacgtgggactgcagctgtgttcgagcggccaccaacggtttaacaagctgatctggatacatcatagttgccatattacgtataaatcaactggtgagactgctgtatcagctttcgagatagacaagatgtacacgcccttgttcttcgcaagggttcgctcgtacacagcattctctgagaggcccctgtag

SEQ ID NO: 187665 - DNA, 1314 bp, synthetic construct
  misc_feature 1..1314: note = Description of Artificial Sequence: Synthetic coding sequence
  source 1..1314: mol_type = other DNA
atggccgaggccgaggaggactgccacagcgacaccgtgcgggccgatgatgatgaagaaaatgagtctccagcggaaaccgacttgcaagcccagctacaaatgtttagagcgcagtggatgttcgaactcgcgcccggagtgtcatcctccaatcttgaaaatcgcccgtgccgagccgcgcgaggatctttacagaaaacatcagctgataccaagggaaagcaagagcaagcaaaggaggaaaaggctcgcgagctgtttttgaaagcagttgaagaggaacaaaacggcgcactgtacgaggcaatcaagttctatagaagggctatgcagcttgtgccagacattgaattcaagatcacctatactcggtccccggacggcgatggagtaggcaattcctacatcgaagacaacgatgatgattcaaagatggccgacttgcttagctactttcagcaacagttgacatttcaggagtctgtgttgaagctgtgtcagccagagctcgaatctagccaaatccacattagtgtcctaccaatggaagtcctcatgtacatctttcgctgggtggtttccagcgatctggacttacgaagtctcgagcagctgtctcttgtgtgccgaggtttctatatctgcgcacgcgatcccgaaatttggcgcctggcctgcctgaaggtatggggacgaagttgcataaagctagttccatacaccagttggagggagatgttcttggagcgcccaagggtaaggtttgacggagtgtacattagcaaaactacttacattagacagggtgaacaatcattggacggcttttacagggcatggcaccaggtggagtactatcgttatattcggtttttcccagacggtcacgtgatgatgctcactacccctgaggagcctcagtccatagttcctcgccttcgtacacgtaacacccgtactgacgctatcctgctgggccactacagactgtctcaggatactgataatcaaacgaaggttttcgccgtcattaccaaaaagaaagaagagaagcccttggactataagtaccggtacttcagacgcgttcccgttcaggaagcagaccagtcattccacgtcggtctgcagctgtgtagctcaggccatcaacgtttcaataagctgatatggattcaccatagctgccacataacctacaaatcgactggggagacagctgtgtccgctttcgagattgacaaaatgtacactcctctcttctttgcacgggtccggtcttatacggcattttctgagcgtcctctgtag

SEQ ID NO: 187666 - DNA, 1212 bp, synthetic construct
  misc_feature 1..1212: note = Description of Artificial Sequence: Synthetic coding sequence
  source 1..1212: mol_type = other DNA
atgttccgggcccagtggatgttcgagctggcccccggcgtgagctccagcaatttagagaatagaccctgccgggccgcacgagggagcctgcagaagactagcgccgacactaaagggaagcaagagcaggccaaagaggagaaagctcgtgagctcttcttaaaggcagtggaggaagaacagaatggagccctctatgaggctattaagttttatcgcagagctatgcagctcgtcccagatatcgaatttaagatcacatatactagaagtccagacggcgatggtgttgggaactcatatatcgaggacaatgatgacgacagcaaaatggccgacctcctatcatatttccagcagcagttgacattccaagagtcagtgctaaagctgtgccagcccgagcttgagagctcacaaatacacatttccgtgttgccaatggaggtgcttatgtacatcttcaggtgggttgtgtctagtgatctggatcttcgctctctagagcaactgtcgttggtttgtagggggttctacatttgtgcacgcgaccctgaaatttggagacttgcatgcctgaaagtgtggggacgatcctgcatcaaactggtgccctatacgtcttggcgggagatgttcctcgaacgacctcgggtgcgtttcgacggagtctatatttctaaaacaacatatatccgacagggtgaacagagcttggacggtttctatcgtgcctggcatcaggttgagtactacagatatattcgctttttcccggatggccatgtgatgatgctgacaacccctgaggaacctcagtccattgtgcctcgtctacggactcggaatacacgtaccgatgcgatactactcggacattacagactttcccaggatactgacaatcagacaaaggtgtttgcagtgatcacaaaaaaaaaggaagaaaagcctttggactataaataccgttacttccgtagagtgcctgtgcaggaggccgatcagagctttcatgtgggccttcagctttgcagttctggtcaccaacgctttaacaagctcatatggatccatcactcatgccacattacttataagtctacaggtgaaacggccgttagtgctttcgagatcgataagatgtatacacccttgttttttgcccgggtgcggtcatacacagcctttagcgagagacccctatag

SEQ ID NO: 187667 - DNA, 147 bp, synthetic construct
  misc_feature 1..147: note = Description of Artificial Sequence: Synthetic coding sequence
  source 1..147: mol_type = other DNA
atgttccgggcccagtggatgttcgagctggcccccggcgtgagcagctccaacctagaaaacagaccatgcagggccgctcgcggctcgttgcaaaagacttctgccgacaccaaaggaaaacaggagcaggctaaggaggaatag

SEQ ID NO: 187668 - DNA, 357 bp, synthetic construct
  misc_feature 1..357: note = Description of Artificial Sequence: Synthetic coding sequence
  source 1..357: mol_type = other DNA
atgttccgggcccagtggatgttcgagctggcccccggcgtgagcagctctaatttggagaatcgaccttgtcgagctgccagaggttctttacagaagaccagcgccgacactaagggaaaacaggagcaggctaaagaggagaaggctagggaactctttctgaaagcagtggaagaggagcagaacggtgcactgtacgaagcaataaaattctatagacgagctatgcagctagtgcctgacatagaattcaaaatcacttatacaaggtcacctgacggggacggagtgggaaatagttacatagaagacaacgacgacgatagcaaaatggccgacctcctttcatactag

SEQ ID NO: 187669 - DNA, 438 bp, synthetic construct
  misc_feature 1..438: note = Description of Artificial Sequence: Synthetic coding sequence
  source 1..438: mol_type = other DNA
atgttccgggcccagtggatgttcgagctggcccccggcgtgagcagctccaacctggaaaatcgcccctgcagggccgccagggggtcgctacaaaaaacttccgcagatactaaagggaaacaagagcaggccaaggaagaaaaggcaagggaactctttttaaaggctgtcgaagaagaacagaacggtgctctttacgaggctattaagttttatcggcgggctatgcagcttgtgcccgatatagaattcaagattacttacacgaggtctccagacggtgacggggttgggaacagctatatagaagacaacgacgatgacagcaaaatggctgacttgctgtcctactttcagcagcagttgaccttccaagaatccgtgctgaagctatgccaacccgaactggaatcatcgcagattcatatttcttag

SEQ ID NO: 187670 - DNA, 3132 bp, synthetic construct
  misc_feature 1..3132: note = Description of Artificial Sequence: Synthetic coding sequence
  source 1..3132: mol_type = other DNA
atgcggcggttcaagcggaagcacctgaccgccatcgactgccagcacctagccaggagccacctagctgtcactcaaccttttggacagagatggacgaatagggatcccaaccacggactctaccccaaacctaggaccaaaaggggctctaggggccagggctcccagcgttgtattccagagtttttcctggccggcaagcagccgtgtacgaatgacatggccaagagtaattcagtcgggcaggattcctgtcaagactccgaaggagacatgatctttcctgctgaatcctcctgtgcgcttcctcaggagggctcagctggaccggggtcccctggatccgcgcccccaagccgaaagaggtcctggagtagcgaggaggagtctaatcaggctaccggaactagtaggtgggatggagtgtccaaaaaggccccacggcaccacctgtccgtaccatgtactagacccagagaggcacggcaggaagccgaagattcaacctctagactctcagctgaaagcggtgaaaccgatcaagacgccggggacgtgggcccggacccgatacctgattcctactacgggcttctcggtacccttccctgccaagaggccttatcccacatctgtagccttccatcagaggtgctcagacacgtgtttgcgtttctgcccgtggaagacttgtattggaatctgagcctcgtctgccatctctggcgggagattattagtgaccccctgtttattccttggaagaagctgtaccaccgctacctgatgaacgaagaacaagcagtcagcaaagtggacggcatcctgagcaattgcggcattgagaaagagtccgacctgtgcgtgttgaatctcattagatacaccgcgaccacaaagtgcagtccgtccgtggatccggaaagagtgctctggtccctgcgggaccatcctcttctcccagaagccgaggcctgtgtgaggcagcatctgccggacctctatgccgcagccgggggcgtcaatatttgggcactagtggccgctgtggtccttctcagttcaagcgtaaacgatattcagcgccttttgttctgcctgagacgcccttcatccaccgttaccatgccagacgttaccgagaccctgtattgtatcgccgtgcttctctacgctatgcgggaaaagggaattaatatcagcaacaggatccattacaatattttctactgcctttatctgcaggagaatagctgcacgcaagcgactaaggttaaagaagagccctctgtatggcccggaaagaaaacgatccagctaacgcacgaacaacaactcatattgaaccacaagatggaacctctccaggtagtcaagataatggcctttgccggaacagggaagacatctacactggtgaagtacgccgaaaaatggtcgcaatcccgatttctctacgtcacctttaacaagtcaattgccaaacaggccgagagagtatttccttcaaacgtgatctgtaagacttttcattcaatggcctacggccacattgggcggaagtaccagagcaagaaaaagttaaacctgttcaagctgaccccattcatggtgaacagtgttctggctgaaggcaaaggaggattcataagggctaaactggtctgtaagacgcttgagaacttctttgcctcagcagatgaagaactgacaatagatcacgtaccgatctggtgcaaaaactcacaggggcagagggtgatggtagaacagtcagaaaagctgaatggcgttctggaggctagccggctctgggacaatatgcggaagctgggagagtgtacagaagaagcgcaccagatgacgcatgacgggtacctcaaactttggcagctttccaagcctagtctcgcctctttcgacgcaattttcgtcgacgaggcacaggactgtacaccagctataatgaatattgttctcagccagccctgtggcaagatctttgtgggagacccacaccagcagatatataccttccggggcgcggtgaacgccctattcaccgttccacacactcacgtgttctacctgacccaatcattcaggtttggggttgagatagcatatgtgggagctaccatcctggatgtctgtaagcgcgtgagaaagaagaccctcgtggggggaaaccaccagagcggcattcggggagatgccaaagggcaggtcgcactgttaagccgcacgaacgccaacgtgttcgatgaagctgttcgcgtcacggaaggcgagttcccttctagaatacacttgataggaggcatcaaatcattcggcctggatcgaatcattgatatctggattctgttgcagccagaagaggaaaggagaaaacagaatctcgtgatcaaggataaattcatcagaaggtgggtccataaggaaggcttctccggattcaagcgttacgtgaccgctgccgaagataaagaactcgaagccaagatagcagtagtggaaaagtataatatccggatcccggagcttgtccagagaatagagaaatgccacattgaggaccttgattttgcagagtacatccttggcacagtgcacaaggcgaagggacttgaattcgatacggtgcatgtgctggacgattttgtgaaggtgccttgcgcaaggcacaacttgccccagttgccacactttcgcgtggaatcgttctccgaagatgaatggaacctgctatacgtggccgtcacacgcgccaagaagaggctcattatgacgaagtcattagagaacattctgacgctggcgggagaatacttcttgcaagcggagctcacatccaatgtcttgaagacaggggtcgtccgttgctgcgtgggccaatgtaacaacgcaatccctgtggatactgtgctaacaatgaagaaacttcctattacgtactccaacaggaaggagaacaagggcggctatctatgccacagttgtgccgagcagagaatcggccccctggcctttttgactgcttctccagaacaggtgcgggcaatggaacgcactgtggaaaatattgttttgcctaggcacgaggctctgctgttcctcgtattttag

SEQ ID NO: 187671 - DNA, 1215 bp, synthetic construct
  misc_feature 1..1215: note = Description of Artificial Sequence: Synthetic coding sequence
  source 1..1215: mol_type = other DNA
atgaacgaggagcaggccgtgagcaaggtggacggcatcctgagcaactgcggaattgagaaggaatcggatctttgtgttctcaaccttattagatacacagccacaactaagtgttccccctcggtggaccccgagcgtgtgctttggtcccttagggaccacccactgctccctgaggccgaggcctgcgtgcgtcagcacctgcctgacctgtatgcagcggctggcggtgtgaacatttgggcactggttgcagcggttgtactgctatcctcttcggtgaacgatatccaaaggttgctattttgcttgaggcggccatccagcacagttaccatgcccgacgttacagagactctgtattgtatcgctgtactgctgtacgctatgagagagaaggggatcaacatcagcaatcgcattcactacaacattttctattgtctgtacctgcaggaaaattcgtgtacacaggcaaccaaggtgaaggaagagccatccgtgtggcccggcaagaaaaccatacagttgacgcatgagcagcagctcatcttaaaccacaaaatggaacccttgcaggttgtcaaaatcatggcctttgccggcacaggcaagaccagcaccctcgtgaagtacgctgaaaaatggtcacagtctaggttcttgtatgtgacctttaacaagtcgatcgcgaagcaagctgaacgggtattcccatccaacgtaatctgcaagacttttcattctatggcttacggtcacattggtaggaagtaccagtccaaaaaaaagttgaacctttttaagctaacaccctttatggtaaattcagtcctggccgagggcaagggtgggtttatacgagccaaactcgtgtgcaagacattggagaatttcttcgcatccgccgacgaagagcttaccatagatcatgtaccgatctggtgtaaaaattctcagggccagcgcgtcatggtggagcagtccgagaaattaaacggagttctggaggcgtcccgcctgtgggataatatgagaaagttgggagagtgcaccgaggaggctcaccagatgacccacgacggatacctgaaattgtggcagctgagtaagccgagtttggcaagtttcgacgctatcttcgtagacgaggcgcaagccggtgctcgacatggcgcccactgtggtgagcatagaaccgctcccgcatag

SEQ ID NO: 187672 - DNA, 3285 bp, synthetic construct
  misc_feature 1..3285: note = Description of Artificial Sequence: Synthetic coding sequence
  source 1..3285: mol_type = other DNA
atgagctacgaggtgaccagcggctgccactggacctgccaggtgcctgaatcttgtgataacggcctacattgtgctgggcctctgggtcatttacacaggcgctgtcagagaacctctgctcatttacttgtatttactgaacatgcagagatgaggaggtttaaacgaaagcacctgacagctatcgactgccagcacctcgcgcggagccacctggctgtgacacaaccattcgggcagagatggaccaatcgcgaccccaaccacgggctctacccgaagccccgcaccaagcgtggctcccggggccaaggctcacagcggtgtatccccgagttctttttggcaggcaaacagccatgcaccaacgacatggcaaaaagtaacagtgtgggccaggatagctgtcaagattccgaaggcgatatgatctttccagccgagagctcatgcgctctaccccaggagggcagtgccgggcccggctctccaggatccgctccaccatcccgtaaacgatcgtggtcctccgaagaagagtccaaccaggccactggtacaagtcgatgggatggcgtgtccaaaaaagctcccagacaccatttgagcgtgccatgtacacgcccacgagaagcacggcaggaagccgaagattctacctcccgtctttccgccgagtccggcgagaccgatcaggatgctggggacgtgggcccagacccgattcccgacagttactatggtctgctgggtactttaccgtgtcaggaagccctgagtcatatctgctccctaccttctgaggtgctccggcacgtattcgcattcctgccagttgaagatctgtactggaacctctctcttgtgtgtcacctttggcgagaaatcatttccgaccctctgttcatcccctggaagaagctatatcataggtatctgatgaatgaagaacaggctgtctcgaaggttgacggcatacttagtaactgtggcatcgagaaagaatccgatttgtgcgtcttgaatttgatacggtatacggcaaccaccaagtgctcccctagcgttgatccagagagggtactttggtccctacgcgatcacccattgctccctgaagcagaggcatgcgtacgccagcacctgccggatctgtatgcagctgcaggcggagttaatatatgggcgttggtagcggctgtggtcttgctgtcatcctccgttaacgatatacaacgcctacttttttgcctgagaaggccaagtagcaccgtgacgatgccagatgtgactgaaaccctgtactgtatcgcagtgctactgtacgctatgcgcgaaaaaggcattaacatctccaataggatccattataatattttctactgtctgtatcttcaagaaaatagttgtactcaagccacaaaagtgaaagaagaaccttccgtgtggccgggtaaaaaaactatccaactcacccatgagcagcagctgattctgaaccacaaaatggagccgctccaggtcgttaaaataatggcgtttgccggtactggtaagacctccacactggtcaagtatgcggagaaatggtcccaatcgcgcttcctgtacgttacctttaataaaagcatcgcaaaacaggccgagcgagtctttcctagcaacgtgatctgtaaaaccttccatagtatggcatatgggcacatcggcagaaagtaccagtctaagaaaaaattaaacttgttcaagctcacgcctttcatggtgaattctgtccttgcagaaggaaaaggaggtttcatcagagccaaactggtctgtaagactttggagaatttctttgcatctgctgacgaggagctcactatcgatcatgtgcctatttggtgtaagaacagtcagggacagcgggtcatggttgaacagtcggaaaaactgaatggagttctcgaagcatctaggttgtgggacaacatgcggaagttgggtgaatgcaccgaggaagctcatcagatgactcatgatggttatctgaaactttggcagctgagtaaaccctccttggcctcctttgatgctatcttcgtagatgaggcacaggactgcacccctgccataatgaatatcgtcctgagtcagccttgcggcaaaattttcgtcggggacccccaccagcaaatctacacctttcggggcgccgtgaatgccttgttcacagtcccacatacacatgtgttctacttgacccagtcatttcgcttcggggtcgaaattgcatacgttggggctaccatcctagatgtgtgtaagagagtgcgaaaaaagaccctcgttggggggaatcaccagtccggcattcggggagacgccaagggccaggtggctctcctgagcagaaccaatgctaatgtgttcgacgaggccgttcgagtaaccgagggggagttccctagtcgtatccacttgattgggggcatcaaaagctttggattggacaggatcatcgacatctggattttgttgcaacctgaggaagagcggagaaagcagaacctggtgatcaaagataagttcattagaagatgggtccataaagagggctttagtggattcaaaagatacgtcacggccgctgaggacaaggagctcgaagctaaaattgcggtggtcgaaaaatacaacatccgtattcccgaactcgttcagaggattgagaagtgtcacattgaggacttggatttcgccgaatacatcctgggaaccgtacataaggcgaaggggcttgagtttgatacggtgcacgtcctggacgacttcgtcaaggtcccttgcgcaagacacaatttgccacagctgccccacttccgggtcgagagttttagtgaggatgagtggaatctgctctatgtggccgtcaccagggccaagaaacggcttattatgaccaagtcattggaaaacattttaactctcgccggtgagtattttctgcaggccgagcttacctcaaatgtgctgaagacaggggtggtcagatgctgcgttggccaatgcaacaacgctatacctgttgacaccgtactgactatgaaaaaactgcctatcacctattcgaacagaaaagagaataaagggggctatctgtgccactcctgcgccgagcagagaatcggacctttagctttcctgacagcttcgccagagcaggtcagagccatggaacggactgttgagaacattgttctgccacggcacgaagcgttactttttctcgtgttctag

SEQ ID NO: 187673 - DNA, 1644 bp, synthetic construct
  misc_feature 1..1644: note = Description of Artificial Sequence: Synthetic coding sequence
  source 1..1644: mol_type = other DNA
atggcctacggccacatcggccggaagtaccagagcaagaagaagttgaacttgtttaagctgacccctttcatggtgaattcagttctcgctgaagggaagggcggatttatccgcgccaagctggtgtgcaaaaccctggagaactttttcgccagcgctgacgaggaactgactatcgaccacgtcccaatctggtgcaagaattctcagggccagagagttatggtcgaacagagcgagaagttgaacggtgtcttggaagcctcacggttatgggacaatatgaggaaattgggtgagtgcacagaggaagcccaccaaatgacacatgatgggtatcttaaactctggcagctgtccaaaccctcactggcatcctttgacgccatttttgtggacgaggcacaggattgtacaccagccattatgaacatcgtcctctcgcagccctgtggcaaaatttttgtgggagacccacatcagcagatctacacattccgcggcgccgtgaacgctttatttaccgtgccacacacccacgtcttttatctaacccaatcatttcgattcggcgttgagatagcttacgtaggggccaccatcctggatgtatgtaaaagggtccgcaaaaagacgcttgttggggggaaccatcagtctgggattcgcggcgacgcaaaagggcaagtcgctttgctgtccagaaccaatgcaaacgtgtttgacgaagctgtgcgagttacggagggagaatttccctctcgcattcacctcataggcgggatcaagagttttggactagacaggatcatcgacatatggatacttctccagccagaggaggaaaggagaaagcaaaacctggtcatcaaggataaattcattcggcgttgggtccacaaggaaggtttcagtggattcaagcggtatgttacggctgccgaagataaagagttggaagctaagatagctgttgtagaaaagtacaacatccgcatccctgaactcgtgcaacgcatagagaaatgtcacatcgaagacctggacttcgccgaaatggagagccatcatgtaggccaggctggactggaacttcccaccagcgaatacatcctggggaccgtccacaaagcaaaggggctggagtttgataccgtgcacgttttggacgacttcgtgaaagtcccttgtgcacgacacaacttgccacagctcccacacttcagagtagagtcattttcagaagatgagtggaatctactctatgtggccgtgaccagagcgaaaaagcgtctgatcatgactaaaagcctggagaacatcctcactctggcaggggagtactttctgcaggcagaattgactagtaatgttcttaagaccggtgtggtgcggtgttgcgttggccaatgcaacaatgctatccctgtggacaccgtgttgaccatgaagaaactcccaatcacttactccaaccgcaaagagaacaagggaggctacctctgccattcttgtgccgaacaacgaattggcccgctggctttcctgacggcatcaccggaacaggtgagagcaatggaacgtacagtcgaaaacatcgtactcccgagacacgaggctctgcttttcctggtgttttag

SEQ ID NO: 187674 - DNA, 1215 bp, synthetic construct
  misc_feature 1..1215: note = Description of Artificial Sequence: Synthetic coding sequence
  source 1..1215: mol_type = other DNA
atgaacgaggagcaggccgtgagcaaggtggacggcatcctgagcaactgtggcattgagaaggagtcagatttatgtgtgttaaatctcatcagatatactgccactacaaaatgtagcccaagcgtcgacccagaacgtgtcctttggagccttagagaccatccacttttgcccgaagccgaagcctgtgtgcggcagcacctacccgacctgtacgcagctgcaggcggcgttaacatctgggccttggtggctgcagtggtgctcctgtctagcagcgttaatgacatccaacggctgctgttctgcctccggaggccatcaagcacggtaacgatgcccgacgttactgagacactatattgcatagcggtcctgctgtatgccatgagggaaaaggggatcaacatatctaacagaatacattataacattttctactgtctctacctccaggagaattcttgcacccaggccactaaagtcaaagaggaaccctccgtgtggccaggaaagaagacaatccagcttacccatgagcagcagctgattctgaaccacaaaatggaaccactacaggtagtgaaaataatggcttttgcgggtactgggaagactagcacactcgtcaagtacgccgaaaagtggagtcagagccgctttctctacgtcacctttaacaaatcgatcgccaagcaggcggaacgagtgttcccctcgaacgtgatatgcaagacgtttcactctatggcgtacgggcatattgggcgaaagtaccagtcgaaaaagaaactgaacttgttcaagttgactcccttcatggtcaattctgtgcttgccgaaggtaagggcggatttatacgtgccaaactggtttgtaagactctagagaatttttttgcttctgccgatgaggaactcaccattgaccacgtgcctatctggtgcaaaaatagccaggggcaaagagtgatggtcgagcagagcgaaaagctcaacggggtgttggaagcttctaggctgtgggataatatgaggaagctgggagagtgcacggaggaggcgcatcagatgactcatgacggttatctcaagctgtggcagttgagcaaaccctccctggcctcatttgacgctatctttgtcgatgaagcccaggccggcgcccgacacggggctcactgtggcgaacacaggaccgccccggcctag

SEQ ID NO: 187675 - DNA, 576 bp, synthetic construct
  misc_feature 1..576: note = Description of Artificial Sequence: Synthetic coding sequence
  source 1..576: mol_type = other DNA
atggaccccaagcagaccaccctgctgtgcctggtgctgtgcctgggccagcggatccaggcacaggagggagacttccctatgccattcatctcagccaaaagcagccccgttatccctctcgatgggtccgtcaagatacagtgtcaagcaatacgagaagcctacctaacgcagctcatgatcatcaagaatagcacatatcgagaaattggcaggcgcctcaaattttggaacgagactgatcctgaatttgtgatcgaccatatggacgccaacaaggccggacgataccagtgtcagtatcgcattgggcattaccgtttcaggtattccgataccctcgagctcgttgtgactgactctattcaccaggactacacaactcagaatctgataaggatggctgtcgccggccttgtgctggtggcgctactcgcaatcctggtcgagaattggcattcacacaccgcccttaacaaggaggcttccgctgacgtagccgaacccagttggtcccagcagatgtgtcagccagggttgacattcgcacgcacccccagcgtgtgtaaatag

SEQ ID NO: 187676 - DNA, 537 bp, synthetic construct
  misc_feature 1..537: note = Description of Artificial Sequence: Synthetic coding sequence
  source 1..537: mol_type = other DNA
atggaccccaagcagaccaccctgctgtgcctgggcctgtacggcaagccttttctctcggccgaccggggcctggttttgatgcctggggaaaacataagtctcacctgcagcagcgcacacattccttttgatcgcttctcccttgctaaggagggggagctcagccttccccagcaccagtcaggggaacatcctgccaatttctcccttggacctgtagatttaaatgtgtcaggcatctacaggtgctacggatggtacaatagaagcccttatctatggagttttccatccaacgcgctggaattggtcgtgaccgacagtattcaccaggattacactacccagaacctgataaggatggcagtcgccggtcttgtgctggttgctcttctggcgatcctggttgaaaattggcactcccataccgctctgaacaaggaggccagcgcagatgtcgctgagccatcctggagtcagcaaatgtgtcagccggggttgaccttcgctcgcactcctagtgtgtgtaagtag

SEQ ID NO: 187677 - DNA, 864 bp, synthetic construct
  misc_feature 1..864: note = Description of Artificial Sequence: Synthetic coding sequence
  source 1..864: mol_type = other DNA
atggaccccaagcagaccaccctgctgtgcctggtgctgtgcctgggtcaacgcattcaggcccaagaaggggactttccgatgccctttatctcagccaaatccagcccagttatcccgttagacggctctgtcaaaattcaatgccaggcaatccgggaagcttacttaacacagctcatgatcatcaagaactctacctatcgggaaattgggcggcgattaaagttctggaatgagacggatcctgaatttgtcatcgaccacatggatgcaaacaaggccggcaggtaccagtgccagtaccgcatcggccattatcgtttcaggtatagcgacacactggaattggtggtcacaggtttgtacggcaaacctttcctttctgcggatagagggttggtgctaatgcccggcgaaaacatctctcttacctgctcgagcgctcatatcccctttgatcggttcagtctggccaaggaaggcgaactcagcctgccccagcaccagtccggcgagcatcccgcaaatttcagcttgggacctgtagaccttaacgtaagtgggatctaccggtgctatgggtggtacaataggagcccttatctgtggtctttcccaagtaacgccctggagcttgtcgtgaccgacagcatacaccaagactatactacacaaaacctgatcagaatggctgtggcaggactggtcctggtggcactgctcgccatacttgtagaaaattggcatagtcacacagccctgaataaagaagcttccgccgatgtcgctgagccctcttggagccagcaaatgtgccagcctggactgacttttgcacgcaccccttcagtgtgtaaatag

SEQ ID NO: 187678 - DNA, 828 bp, synthetic construct
  misc_feature 1..828: note = Description of Artificial Sequence: Synthetic coding sequence
  source 1..828: mol_type = other DNA
atggaccccaagcagaccaccctgctgtgcctgggcgacttccccatgccatttatcagcgccaagtcttccccggtgatacctttggacgggtctgtcaagatccaatgtcaagccattagggaagcataccttactcagttgatgattattaaaaacagtacttatcgagagattggacggcggctaaagttttggaacgaaaccgatccagagttcgtgattgaccacatggatgcaaacaaggcaggaaggtatcagtgccagtaccgcataggtcactaccgatttcggtattcagatacactcgagctcgttgtgacgggcctctatggtaaaccatttctctctgccgaccgcgggcttgtgctgatgcccggagagaacatttctctgacatgtagctcagcacatattccctttgaccgctttagcctggccaaagagggggagctcagcctgccacaacatcagagcggcgaacacccagccaatttctccctggggcccgtcgacctgaacgtctcaggcatttacagatgttacggatggtacaaccgcagcccatatttatggagcttcccatccaatgctctggagctcgtagttaccgactccattcatcaggattacactacccagaatctgatccgaatggcggtggcaggcctagtgctagtagctctactggctattcttgtggagaattggcatagtcacacagctctgaacaaggaggccagcgcagatgtagccgagccttcatggtctcaacagatgtgccagccaggtctgacctttgcgcggactccctccgtgtgcaagtag

SEQ ID NO: 187679 - DNA, 630 bp, synthetic construct
  misc_feature 1..630: note = Description of Artificial Sequence: Synthetic coding sequence
  source 1..630: mol_type = other DNA
atggaccccaagcagaccaccctgctgtgcctgggcgacttccccatgcccttcatctccgcaaagagctcccctgtcatcccacttgacggatccgtgaagatacaatgtcaggcaatccgcgaggcctatctgacacagctgatgatcattaagaattctacatatagagaaatcggtcggaggttgaagttttggaacgaaaccgaccccgagttcgtaatcgatcacatggacgctaataaagctgggaggtatcagtgtcagtatcgcattggacactaccggttcaggtattcggacacactggaactggtagtgaccggtctgtatggcaaaccctttctatctgcagaccgaggtctggtgctgatgcctggggaaaatatctcccttacctgtagcagtgcccacattcccttcgaccgattctccttggcaaaggagggagaactctccctgcctcagcaccaaagcggagagcacccagcaaacttttccctaggccctgttgacttgaacgtctcaggtatctatagactccacccgccccgactccacgatgccgagctcgaccctcacgggaggggaagaaccgggcctagaggatcactggggcatacagggtag

SEQ ID NO: 187680 - DNA, 762 bp, synthetic construct
  misc_feature 1..762: note = Description of Artificial Sequence: Synthetic coding sequence
  source 1..762: mol_type = other DNA
atggaccccaagcagaccaccctgctgtgcctgggcgacttccccatgccttttataagcgccaagtccagtcctgtgattcccctcgatggctctgtcaagattcagtgtcaggcaattcgcgaggcttatctaacacagttaatgataatcaagaacagcacctacagagaaattgggagacgactcaagttttggaacgagactgaccctgaatttgtgatcgatcatatggacgctaataaggcggggaggtaccagtgtcaatatagaattggacactacagattccgctacagtgacaccttggagttggtggtgactggcctgtatggaaagcccttcctctccgccgatagaggcctggtgctcatgccgggcgagaacatcagcctgacttgtagcagtgcccatatcccttttgatagattttccctggcgaaagaaggggagctttcgttacctcagcatcagtctggcgagcatcccgccaacttcagcctgggccctgtggatttgaacgtgtcaggtatttacaggtgttacgacagtatccatcaggactatacaactcagaacctgatacgcatggctgtggccgggttagtcctggtggcacttctggcgatcctggtggagaactggcattctcacacagctcttaacaaggaagctagcgctgatgtggcagagcctagctggtcccaacagatgtgccagcctgggttgacattcgccagaacaccttccgtgtgcaagtag

SEQ ID NO: 187681 - DNA, 798 bp, synthetic construct
  misc_feature 1..798: note = Description of Artificial Sequence: Synthetic coding sequence
  source 1..798: mol_type = other DNA
atggaccccaagcagaccaccctgctgtgcctggtgctgtgcctgggccagagaattcaggctcaagaaggcgactttcctatgccatttatttccgcaaagtcatcccctgtcataccactggatggctctgtgaaaatccagtgccaagctattagagaagcctaccttacacagcttatgatcattaagaacagtacctaccgtgagatcggtcgacgcctcaagttctggaatgaaaccgaccccgagtttgtaattgaccacatggatgcgaacaaagcagggcgctaccagtgtcagtaccgcatagggcattatagatttcggtattccgacactctggaactggtcgttaccgggctgtacggcaaaccgtttctgtccgcagaccgagggttggtgttgatgccgggggagaacattagcctcacctgctcatccgcccatatcccttttgataggttcagtctggctaaagagggtgaactgtcactgccccagcaccagagcggcgaacacccagcgaacttctctctcggtcccgtcgacctcaacgtgtctggcatttatcgctgctatgattcaatccatcaggattacaccacacaaaacctgatcagaatggccgtcgccgggctggttctggttgcactcctagcaattctcgtagaaaactggcactcacacactgccctcaacaaagaagcttctgctgacgtagcagaaccgagctggtcccagcagatgtgccagcctgggttgacatttgctcgaaccccttctgtctgcaagtag

SEQ ID NO: 187682 - DNA, 540 bp, synthetic construct
  misc_feature 1..540: note = Description of Artificial Sequence: Synthetic coding sequence
  source 1..540: mol_type = other DNA
atggaccccaagcagaccaccctgctgtgcctgggcgacttccccatgccctttataagcgcaaaatcctcgcctgtgatcccactggatggctccgttaagatccaatgccaagctatcagagaggcatatctcacacagttaatgatcataaaaaacagcacctaccgggagatcgggaggcggctcaaattttggaacgagaccgatccagagtttgtgattgaccatatggatgccaacaaggccgggcgctaccagtgtcaataccgtattggccattaccggtttaggtactcagatacattggagcttgtggtcactgattcaatccatcaagattacacaacccagaatctgattaggatggccgtcgcgggtctggtcttggtggctctgcttgccatccttgtggaaaattggcacagtcacacggctctgaataaggaagcaagtgccgatgtcgcagagccttcctggtcacagcagatgtgccagcccgggctcacctttgcaagaaccccttctgtgtgcaaatag

SEQ ID NO: 187683 - DNA, 720 bp, synthetic construct
  misc_feature 1..720: note = Description of Artificial Sequence: Synthetic coding sequence
  source 1..720: mol_type = other DNA
atggaccccaagcagaccaccctgctgtgcctggtgctgtgcctgggtcaacgcattcaggcacaggagggggacttccctatgcctttcatttcagctaagtcttctcccgttattcctctggacggaagcgtgaagatacagtgccaggctattagagaagcctacctaacgcagctgatgattattaagaacagtacataccgcgagataggaaggcgcctgaaattctggaacgagactgatccagagtttgtcattgaccacatggacgccaacaaggctggaaggtaccagtgccaatatcggatcggtcattataggtttcgctattctgataccctggagttggtcgtgacaggactgtatggaaagccattcctatctgccgaccgggggttggtactgatgccaggcgagaacatcagcctaacttgcagtagcgctcacatcccttttgatcgattttccctggccaaagagggagaattatccttgccccagcaccaaagcggcgaacacccagccaacttctctttaggacctgtagacctgaatgtgtccggcatctaccggtgctatggctggtacaaccggtctccatacctgtggtcttttcctagtaacgcgctcgaactggtcgtgacaggtagatatagaccagtgcagccgtgcgtgtgggtgggatgtccaggcccctgtcaccgagccggaatctag

SEQ ID NO: 187684 - DNA, 774 bp, synthetic construct
  misc_feature 1..774: note = Description of Artificial Sequence: Synthetic coding sequence
  source 1..774: mol_type = other DNA
atggcccccgccatggagagccccaccctgctgtgcgtggccctgctgttttttgctcctgacggcgtactcgcagtgcctcagaaaccaaaggtgtcacttaaccctccctggaatagaatatttaagggcgagaacgtgacactgacttgtaacgggaataacttcttcgaggtgagctcaacaaagtggttccacaatggatctcttagcgaggagacgaacagtagcctgaatatcgtgaatgccaaattcgaggactccggcgagtacaaatgccagcatcagcaggtgaacgagtctgaaccagtctacctggaggtgttttccgactggctgttgctgcaggcttctgccgaagtggtcatggagggccagcccctgtttctgcggtgtcacggttggaggaactgggacgtgtataaagttatatattacaaggacggcgaggcccttaaatattggtacgaaaatcacaatattagtattaccaatgccacagtggaggacagcggaacctattactgcaccggaaaggtatggcaactggattatgagagtgagccactcaacataaccgtcatcaaggccccaagggagaagtattggcttcaattttttatccccttattggtcgtcatactgtttgccgtggatactggcctgttcatttcgactcaacagcaggtgacatttctgttaaagattaagaggaccagaaagggattccgcttgctaaatcctcatcccaaacctaatccaaaaaataattag

SEQ ID NO: 187685 - DNA, 261 bp, synthetic construct
  misc_feature 1..261: note = Description of Artificial Sequence: Synthetic coding sequence
  source 1..261: mol_type = other DNA
atgatccccgccgtggtgctgctgctgctgctgctggtggagcaggcggccgccctaggagaacctcaattgtgctacatcttagacgccatccttttcctgtacggcatcgtgctcactttgctctattgccgcctgaaaatacaggtccgaaaggctgccatcacctcatacgagaaatccgacggcgtctatactggcctgagcacacgaaaccaagagacctatgaaactctgaagcatgaaaaaccaccccagtag

SEQ ID NO: 187686 - DNA, 339 bp, synthetic construct
  misc_feature 1..339: note = Description of Artificial Sequence: Synthetic coding sequence
  source 1..339: mol_type = other DNA
atgatccccgccgtggtgctgctgctgctgctgctggtggagcaggccgccgcattgggcgagccccagctctgttacatcctcgacgccatcctgttcctatatggcatcgtgctgacacttctctactgtcgcctcaagatccaagtgcgaaaggcagctatcacctcctacgaaaaatctgatggagtgtatactatggagtcgcctagcataacacgactggagtgttctggcatgatctgggcccactgtaatttgtgtctcttgggctctcgcgatagtagagcctcccctagtcgggtcgccaaaacaacgggcaccaccatgccgagttag

SEQ ID NO: 187687 - DNA, 792 bp, synthetic construct
  misc_feature 1..792: note = Description of Artificial Sequence: Synthetic coding sequence
  source 1..792: mol_type = other DNA
tgatgcagcttcggcgtgcagctgatgggcaagtgggtgccctgggtctcggtgttccaagaagagacggtgaccctgcattgtgaagtgctgcacctgcccggatcaagctccactcaatggttcctaaatggcacggcgacacagacctctacccccagttaccgtataactagtgctagcgttaacgattccggggagtatcgctgccagagaggcctctccggtaggagtgaccccatccagctggaaatccaccgtgggtggcttttacttcaggtgtcctcccgggtgttcatggagggtgagccacttgcactgaggtgccacgcctggaaggataagcttgtgtacaatgtcctctactatagaaatggcaaggccttcaagttcttccattggaactccaacctgacgatccttaaaaccaacatatcccacaacggcacttatcactgcagtggtatggggaaacatcgatatactagtgccggtatctcccagtataccgtgaaaggcttacagctccctacgcctgtttggttccatgtccttttctatctggcagtgggcattatgtttttggtgaacaccgtgttgtgggtcacaatccggaaggagctgaagcgcaaaaaaaagtggaaccttgaaattagcttggactcaggacacgagaagaaggtgatcagtagtctccaggaggatcgtcacttggaggaggaactgaagtgccaggaacagaaagaggaacagcttcaagaaggtgtgcatcggaaggaaccccagggatag

SEQ ID NO: 187688 - DNA, 567 bp, synthetic construct
  misc_feature 1..567: note = Description of Artificial Sequence: Synthetic coding sequence
  source 1..567: mol_type = other DNA
atgtggttcctgaccaccctgctgctgtggggctggctgctgctgcaggtctctagtcgggtttttatggagggcgagccacttgccctgagatgccatgcctggaaggacaagctggtgtataacgtgctctactaccgtaatggaaaggcattcaaatttttccactggaacagtaaccttacaatccttaagactaatatttctcacaatggcacttaccattgttcagggatggggaagcaccgatacacctcggcgggcatatctcagtatacagtgaagggactacagctgcctacccctgtctggtttcatgtgttattctacctcgctgtcggtattatgttcctggtgaatacagttctttgggtgaccatccgcaaagagctgaaacgcaagaagaaatggaatcttgagatttccctggacagcggacacgaaaagaaagttatttcctccctgcaggaggaccggcatttagaagaagagctgaaatgccaagagcagaaggaagagcagctgcaagaaggagtgcacagaaaagaacctcaaggcgcaacatag

SEQ ID NO: 187689 - DNA, 843 bp, synthetic construct
  misc_feature 1..843: note = Description of Artificial Sequence: Synthetic coding sequence
  source 1..843: mol_type = other DNA
atgtggttcctgaccaccctgctgctgtgggtgcccgtggacggccaagtggatactactaaagctgtgatcaccctgcagcctccatgggtttctgtgttccaggaagagaccgttaccctgcactgcgaggtccttcacctgccaggctccagctcaacacagtggttcctgaacggaactgctacccaaacgtcgacacccagctatcggattactagcgcctcggtgaacgactcaggtgaatacaggtgtcagagaggcctgagcggtaggagcgatcccatacagctcgagatacacagagggtggttgctgctccaggtctcttccagagtttttatggagggagagcctctcgctcttcggtgccatgcctggaaggacaagctggtgtataacgtcctttactacaggaacggcaaggcattcaaattcttccactggaacagcaacctcacaatccttaagactaatatctctcacaatgggacttaccattgcagcgggatgggtaagcacaggtacacaagcgccggaatctcccagtataccgtgaagggattacagcttcccaccccagtgtggttccacgtgctgttctatctggcggtgggcatcatgttcctggtgaataccgttctgtgggtcaccatacggaaagaactaaagagaaaaaagaaatggaacctcgagatcagcttggatagcggccacgagaaaaaggtgataagttcactccaggaggacagacatctcgaagaggagttgaaatgccaagagcaaaaagaggagcagctccaagagggggtgcacagaaaagagccacaaggcgcgacgtag

SEQ ID NO: 187690 - DNA, 954 bp, synthetic construct
  misc_feature 1..954: note = Description of Artificial Sequence: Synthetic coding sequence
  source 1..954: mol_type = other DNA
atgaccatggagacccagatgagccagaacgtgtgcccccggaacctgtggctcctccaacctctgacagtgttgctcctgcttgcatctgccgattctcaggcagcagctccaccgaaagctgtgctgaagcttgagcccccttggataaatgtgctgcaggaggactcagtaaccctgacttgccagggtgccaggagtcccgaatcagattctatccaatggtttcacaatgggaatttaatacccacccatacccaaccttcctatcggttcaaggccaataataatgatagcggagagtacacctgtcagacaggccagacgagtctgtcagatcctgtgcacctgaccgtcttgtctgagtggctggttctgcaaacgccacatttggaatttcaggagggagaaacaatcatgctgcggtgtcacagttggaaggataagcccctcgttaaggtcactttttttcagaatggtaaaagccaaaaattcagtcatttagatcctaccttttctattccacaggcaaatcattcacattcgggagattatcattgtactgggaacatcggctacacattgtttagcagcaaaccagtgactatcacagtgcaagtccccagcatgggatcgtcttccccaatgggtattatcgtggctgtggtgatagccacagctgtagctgctattgttgccgccgtggtagccctgatctactgtcgaaagaagcgaatctccgcaaatagcaccgaccccgtcaaggctgctcagtttgagcctcctggccgtcagatgatcgctatccgcaaacgccaactagaagaaaccaataatgattatgagactgccgatggaggttacatgacgcttaatccgagagcaccaactgatgatgataaaaacatctatcttacgttgcctcccaacgatcatgtcaacagcaacaactag

SEQ ID NO: 187691 - DNA, 951 bp, synthetic construct
  misc_feature 1..951: note = Description of Artificial Sequence: Synthetic coding sequence
  source 1..951: mol_type = other DNA
atgaccatggagacccagatgagccagaacgtgtgcccccggaacttatggctcctgcagcctcttacagtattgctcctgctggcttcagccgactctcaggcagctcccccaaaggcagtcttgaagctggagccaccatggattaatgtcttacaggaggactctgtaacactaacatgtcaaggagcaagatcaccagagagtgacagcatccaatggttccataatggtaacttaatcccaacccatactcagcctagctaccgcttcaaagcgaacaataacgatagcggggaatacacatgccagactggacagacatcccttagcgacccagtgcatctcacggtgctctccgaatggcttgtgctccagacaccacacctggaattccaggagggcgaaacaattatgcttcgctgtcactcttggaaagacaaacccctggtgaaggtgacgttcttccaaaatggcaagtcccagaagtttagccacctcgaccccacgttttccattcctcaggctaatcatagtcacagtggtgattatcattgtaccggcaacattgggtacaccctctttagttcaaagcccgttaccatcacagttcaggtaccctccatgggtagttcatctcccatgggaataatagtggccgtggtgattgccacagcggtagcggctatcgtggccgcggtggtagctctgatttactgccgaaagaaaagaatttcagcaaatagcactgatcccgtgaaagcagctcagttcgaaccacccgggagacagatgatcgccatcagaaaacgccagctggaagagacaaataatgattatgagaccgcagatgggggttacatgactttaaatcctcgggccccaacagatgacgataagaacatctatctgaccctccccccgaacgatcacgtgaatagcaacaattag

SEQ ID NO: 187692 - DNA, 876 bp, synthetic construct
  misc_feature 1..876: note = Description of Artificial Sequence: Synthetic coding sequence
  source 1..876: mol_type = other DNA
atgggcatcctgagcttcctgcccgtgctggccaccgagagcgactgggccgactgtaagtcaccccagccctggggccatatgcttctgtggaccgcagtgctcttcctggcgcccgtagcaggaacacccgctgcacccccaaaggccgtgctcaaactggagccgcagtggatcaatgtcctgcaagaagactccgtgactctgacctgtagagggactcactcaccagagagtgattctattcagtggtttcacaacggcaacctgattccaactcacacacagccatcttatcgcttcaaggcaaacaacaacgatagcggcgagtatacgtgccaaaccggacagacgagtctcagcgacccggtgcacttgaccgtgctgtccgagtggttggtgctgcaaaccccacacttggagtttcaggagggagagaccatcgtgttgcggtgccacagctggaaggacaaaccgctagtcaaggtgactttcttccagaacgggaaaagcaagaagttttcccggtctgatccaaacttcagcattccccaagctaatcactcccattcgggcgattatcactgtacaggcaatatcgggtacacgctgtacagtagcaaaccagtcactatcacagtgcaagccccgtccagctcaccgatgggcatcattgtagctgtcgtgactggcattgccgtggctgcaatcgtggccgccgtcgtggctttgatctactgcaggaaaaagcgcatctctgcaaaccccacaaacccagatgaagcagataaagtgggtgcagagaacacaattacatattctcttctgatgcatcccgacgcgctggaggaaccagacgaccagaaccggatctag

SEQ ID NO: 187693 - DNA, 933 bp, synthetic construct
  misc_feature 1..933: note = Description of Artificial Sequence: Synthetic coding sequence
  source 1..933: mol_type = other DNA
atgggcatcctgagcttcctgcccgtgctggccaccgagagcgactgggctgattgtaaatcaccccagccctggggacacatgctcctatggactgcggtgctcttcctggccccagtggcaggtacccctgccgcgccaccaaaggccgtgcttaaactcgaaccgcagtggatcaacgtactccaggaagacagcgtcaccctgacatgcaggggcacccatagtccagaatccgactcaattcagtggttccacaatggaaatctcattcctacacatactcagccttcctacaggttcaaggctaataataatgattctggcgagtacacgtgccagaccgggcaaacctccctgtccgatcctgtacacctcaccgtgctgagcgagtggctagtcctgcagacacctcatttggaattccaagagggagagactattgtcctgaggtgtcattcgtggaaagacaaacccctggtgaaggtcactttctttcaaaacggcaagtcaaagaaattttctcggagcgatcccaacttttccattcctcaggctaatcattcgcattcaggtgactatcattgcacaggaaacattggatatacactgtattcctccaaaccggttaccatcactgtacaggcaccgagctcttctcctatgggaatcattgtggctgtcgtcaccggcattgcagtggctgccattgtggcggccgtggtcgcacttatctactgcagaaagaagagaatcagcgccctgcctggctaccctgagtgcagagagatgggggagaccctcccggagaagcccgccaatccaacaaatcccgatgaggccgataaagttggagcggagaacaccattacttattccctgctgatgcatccagatgccctcgaagagcctgacgaccagaaccgcatctag

SEQ ID NO: 187694 - DNA, 912 bp, synthetic construct
  misc_feature 1..912: note = Description of Artificial Sequence: Synthetic coding sequence
  source 1..912: mol_type = other DNA
atgggcatcctgagcttcctgcccgtgctggccaccgagagcgactgggcagattgtaaaagtccacagccctggggacatatgttgctgtggacagccgtgcttttcctggccgctccccccaaggcagttctaaaactagagccccagtggatcaacgtgctccaggaggacagtgtgactctgacatgtcgtggaacgcactcacccgaatccgattctatccagtggtttcataacggaaacctgataccaacccacactcagcctagctatcgttttaaggcgaacaacaatgacagcggcgaatatacgtgtcagaccggtcaaacctctctcagtgatcccgtgcatttaactgtcctgagcgaatggctggtcctgcaaaccccgcatctggagttccaagagggggaaactatagtcctacgctgtcacagctggaaggataaaccattggttaaagtgaccttcttccagaacggaaaatctaaaaaattttccagatccgacccaaatttctccattccacaggctaatcactctcactcgggagactaccactgcaccggtaacattggttacacgctctactcatccaaacccgtgaccatcacggtacaggctccatcttcttccccaatgggcattatcgtcgctgtcgtgaccgggatcgctgtcgccgccatcgttgctgcagttgtggcccttatttattgccggaagaaaaggattagcgcactgcctgggtaccctgaatgcagggaaatgggtgagacactgccagaaaaaccggccaatcctaccaatccggacgaggctgataaggtcggtgcagagaatacgattacctactcccttctgatgcacccggacgccctcgaggaacctgatgaccagaatcggatatag

SEQ ID NO: 187695 - DNA, 912 bp, synthetic construct
  misc_feature 1..912: note = Description of Artificial Sequence: Synthetic coding sequence
  source 1..912: mol_type = other DNA
atgggcatcctgagcttcctgcccgtgctggccaccgagagcgactgggctgactgcaaaagtccccagccgtggggccacatgctcctgtggacggccgtcctgttcctggccgcccctcctaaagctgtgctgaagctggagccccagtggatcaacgtgctgcaggaagatagcgttaccctcacatgtaggggaacacacagtcctgagtcagacagcattcagtggttccacaatggaaatctgattccaactcatactcagccctcttataggttcaaggctaacaataacgatagcggcgaatacacttgtcagacgggacaaacttccctgagcgatcccgtgcacctgaccgtgctgtccgaatggctggtgctgcaaaccccccacctggaattccaggagggcgagaccattgtcctaagatgtcacagttggaaagacaagcccttagtaaaagtgaccttttttcagaatgggaagagcaaaaagttctcaagatctgaccccaactttagtattccccaagcgaaccacagccatagtggggactaccactgtaccggcaacatcggatatacactttattcctctaaacccgtgacaatcactgtacaggcaccaagcagctctcccatgggaataattgttgccgtggttaccggcatagctgtcgccgctattgttgccgccgtggtggctctgatttattgcagaaagaagaggatcagtgccctgccgggttacccagaatgtcgggagatgggggaaaccctgccagagaaaccagctaatcccacgaatcccgatgaggccgacaaggtcggagctgaaaacacaatcacgtattctttactgatgcacccagatgccctggaagagccagatgatcagaatagaatctag

SEQ ID NO: 187696 - DNA, 933 bp, synthetic construct
  misc_feature 1..933: note = Description of Artificial Sequence: Synthetic coding sequence
  source 1..933: mol_type = other DNA
atgggcatcctgagcttcctgcccgtgctggccaccgagagcgactgggctgactgcaagtccccgcagccttggggccacatgctcctctggaccgcagtccttttcctggccccagtcgcagggaccccagcagcgcccccgaaagcagtacttaaattggagcctcagtggattaacgtgcttcaggaagacagcgtgaccctgacatgccgaggaacacatagtcctgagtccgactccattcaatggttccataacggaaatctaattcccactcacacccagccatcgtaccgatttaaggcgaataacaacgactctggtgaatacacttgccagaccggacagactagtctctccgacccagtgcacctgacagttctgagcgaatggcttgtgctccagacccctcacttagaattccaggagggcgaaaccatagtgctgcgctgccatagctggaaggataaacctttggttaaggtcacattcttccagaacggtaagagtaagaaattctcaaggtcagacccaaatttctcaatccctcaggctaatcactctcatagtggcgattaccactgtactggtaatataggatacacgctgtacagctccaagcctgtgaccatcacagtacaagcccccagtagttcgccaatgggaattatagtagctgtcgtgaccggcattgctgtggcagctatcgttgccgctgtggtagctctgatctattgcaggaaaaagagaatctccgcactgcccggataccctgaatgccgtgagatgggcgaaaccctgccagagaaaccagcaaatcccacaaacccagatgaggctgataaggtgggcgccgaaaatacaataacatactccctgttgatgcatcccgatgctcttgaagagccagacgatcagaacaggatctag

SEQ ID NO: 187697 - DNA, 876 bp, synthetic construct
  misc_feature 1..876: note = Description of Artificial Sequence: Synthetic coding sequence
  source 1..876: mol_type = other DNA
atgggcatcctgagcttcctgcccgtgctggccaccgagagcgactgggcagactgcaagagcccccagccgtggggccacatgctgctctggacggcggtgctctttctggctcctgttgccggaacacccgcggcgcctccgaaagccgtgctcaaattggaaccccaatggattaacgtgctgcaggaggactccgtgacgctcacttgtcgcggtacgcactcccccgaatctgatagtatacagtggtttcataacggaaatctgatcccaacccatacccaaccatcttatcgatttaaggctaacaacaacgattctggggagtacacttgccaaactggccagacatccctgagcgatcccgtgcacctcaccgtgttatccgagtggctcgtgctgcaaaccccccacctcgagttccaggagggtgaaacgatagttctgcgctgtcactcctggaaagataaaccactggtgaaagtcaccttcttccagaacggcaagtcgaaaaagttcagcagaagtgacccaaacttttccattcctcaggcaaaccactcacactcaggggactaccactgtaccggaaatataggttatacgctgtatagttcgaaacccgtcaccataactgtccaggctccctcgagtagccccatgggaattattgtggccgttgtgacagggatagctgtagccgccatcgtagcagccgtggttgcgcttatttactgtcgcaagaagcgcatcagcgccaatccaacaaaccccgacgaggccgacaaagttggcgctgaaaacacaatcacatacagtctcctcatgcacccagatgcattagaggagccagacgaccagaatcggatatag

SEQ ID NO: 187698 - DNA, 705 bp, synthetic construct
  misc_feature 1..705: note = Description of Artificial Sequence: Synthetic coding sequence
  source 1..705: mol_type = other DNA
atgggcatcctgagcttcctgcccgtgctggccaccgagagcgactgggccgactgtaagtcaccgcagccttggggacacatgcttctgtggacagcggtactgttcctggcaccagttgctggtactcccgccgccccacccaaggcagtgttgaaactcgaacctcagtggataaacgtactccaagaggactctgtcacactgacctgtcgtggaacccactcacccgaaagcgattccattcagtggttccacaatgggaatctgatcccgacccacacacagccctcatataggttcaaagccaacaataatgactccggagaatatacctgtcagacaggtcagacatcactatcagatcctgtgcatctgaccgtgctctcggaatggctcgtactacagacaccacacctcgagtttcaggagggtgaaacgatagttctgcgctgtcatagttggaaagacaagcccctagtgaaagtgacattcttccagaacggaaagtccaagaaattcagtaggtctgacccaaactttagcataccccaggccaaccattcccactcgggggattatcactgcacaggcaacattgggtatactctctactccagcaaaccagtgacaattactgtacagggtccaaggctgcgaactgcggccaaacagagctctctcgtcggcgcagaggttccatag

SEQ ID NO: 187699 - DNA, 771 bp, synthetic construct
  misc_feature 1..771: note = Description of Artificial Sequence: Synthetic coding sequence
  source 1..771: mol_type = other DNA
atgggcatcctgagcttcctgcccgtgctggccaccgagagcgactgggccgattgcaaaagccctcagccgtgggggcatatgttgctgtggacagccgttctgttcctgggagagtctgggccccctgccgcccctcccaaagccgtgctgaagctggagcctcagtggatcaatgtactgcaggaagacagtgtgaccctgacctgtcggggcacccacagcccggaatccgactctattcagtggtttcacaatggtaatctcatcccgacccatacacagccgtcttatcgtttcaaagccaataacaatgattcgggggaatacacctgccaaactgggcagacctcactctcagatcccgttcacttgacagtgctgagcgagtggctggtgctgcagaccccgcaccttgagttccaggaaggcgagaccatcgtactgaggtgccactcctggaaggacaagcccttggtgaaggttactttttttcagaacgggaagtccaaaaaattctcccggagtgacccaaacttttccattccccaggccaatcattcacatagtggtgattaccattgcaccgggaatattggatacaccctgtattctagtaaaccagtaaccatcaccgttcaggctccttcctcttccccgatggggattatcgtggcagtagtgaccggcatcgccgttgctgccattgtcgctgcggtcgttgctctgatttactgcaggaaaaagcgcatcagcgtttcaacttggtag

SEQ ID NO: 187700 - DNA, 765 bp, synthetic construct
  misc_feature 1..765: note = Description of Artificial Sequence: Synthetic coding sequence
  source 1..765: mol_type = other DNA
atgtggcagctgctgctgcccaccgccctgctgctgctggtgagcgcagggatgcggactgaggacttacctaaagctgtcgtgttcctggagccccaatggtaccgggtgctggagaaggactcagtgaccctgaagtgccagggtgcatatagccctgaggacaacagtactcagtggtttcataatgagagcttgatctccagccaggctagctcatatttcatcgatgctgccacagtggatgactcaggcgagtatagatgccagacaaaccttagtaccctgagtgaccccgttcaattagaggttcatataggctggctactcctccaggcccctaggtgggtttttaaggaggaggaccctatccacctccggtgtcatagctggaaaaatacagccctgcacaaagtgacatacctacagaacgggaaagggcgcaagtacttccaccataactctgatttttatatcccaaaagcaactctcaaagactctggctcctacttttgtcggggactgtttggaagcaaaaacgtctcaagcgaaactgtcaatatcacaataactcagggcctggctgtgtctactatcagcagtttcttcccccctgggtatcaggtgtccttttgtcttgtcatggtacttttgttcgctgtggacacagggctttatttttccgttaaaaccaacattcggtctagcacaagggattggaaggaccacaaatttaagtggcgtaaggatccccaggacaaatag

SEQ ID NO: 187701 - DNA, 873 bp, synthetic construct
  misc_feature 1..873: note = Description of Artificial Sequence: Synthetic coding sequence
  source 1..873: mol_type = other DNA
atgggcggcggcgccggcgagcggctgttcaccagcagctgcctggtgggactggtgccgctcgggcttaggatctctcttgttacttgcccgcttcaatgtggtattatgtggcagctgctcctgcctacagccttgcttcttttggtctccgccggaatgagaacagaagacctacccaaggccgtcgtgtttcttgaaccccagtggtatcgcgtcttggagaaagatagcgtaactctgaaatgtcagggcgcatactcccctgaagacaactccacacagtggttccataatgaatccctgatatcttctcaggctagtagctacttcatagatgctgcgaccgtggatgacagcggtgaatatcgttgccagaccaatctgagtactctgagcgatcccgtgcaacttgaagtacacattggctggctcctattgcaagccccaagatgggtgttcaaggaagaagatcccatccatctcaggtgccatagctggaagaataccgctttgcataaagtcacatacctgcagaacggcaaaggccgaaagtattttcaccataactctgacttttacatcccaaaggccacactgaaagattctggctcatacttttgccgcggactattcggaagtaagaacgtgtcttcagagactgtcaacatcaccatcacacagggcttggccgtgtccaccatctcgagcttcttcccccccggctatcaagtctcgttttgcctcgtgatggtactcctgttcgcagttgacaccggactgtatttctccgtgaagaccaacatcaggtcttctaccagagactggaaggaccataaatttaaatggcgaaaggacccgcaggataagtag

SEQ ID NO: 187702 - DNA, 816 bp, synthetic construct
  misc_feature 1..816: note = Description of Artificial Sequence: Synthetic coding sequence
  source 1..816: mol_type = other DNA
tgacccctgggcctgcggatcagcctggtgacctgccccctgcagtgcggcataatgtggcaattgttactgccgactgcacttctgctgcttgtatccgcgggcatgcgcactgatctgcctaaggcagtcgtgtttctcgaaccccagtggtatagagtactggagaaggacagcgtaacacttaagtgccagggtgcatattctcctgaagacaattctactcagtggttccataacgagtctttaatttcctcccaggcctctagctacttcattgatgcggctacggtcgacgactctggggaatatcgatgtcagactaacctgagtaccctgtcggaccccgtacagctagaggtccacattggctggctgttgcttcaagcgccccgttgggtttttaaggaagaagacccaatccaccttagatgccacagttggaaaaacactgccctccataaagtaacctaccttcagaacggcaaaggacgaaagtacttccatcacaacagtgatttttacattcctaaagctactctgaaggattccggatcctatttttgtaggggcctgttcggttcaaaaaacgtctcttccgagacagtgaatataactattactcagggcttggccgtgagtacaatctcctcgttcttcccgccagggtaccaagtcagtttctgtctcgtgatggttctcctgttcgctgtggacactgggctttattttagtgtgaagaccaacatacggtcctcgaccagagactggaaggaccataaatttaagtggcggaaggatccgcaagataaatag

SEQ ID NO: 187703 - DNA, 765 bp, synthetic construct
  misc_feature 1..765: note = Description of Artificial Sequence: Synthetic coding sequence
  source 1..765: mol_type = other DNA
atgtggcagctgctgctgcccaccgccctgctgctgctggtgagcgccgggatgagaactgaggacctgcctaaagccgttgtgttcctagagcctcaatggtacagagtactggagaaggactcagtcactctgaaatgccagggtgcctatagcccggaggataactccacccaatggtttcataacgaaagcttaatatccagtcaggcctcttcctatttcattgacgctgcaacggtagacgacagcggcgaatatagatgccagactaatttgagtactctttctgaccccgtgcagcttgaagtccacataggctggttactattgcaagccccgcgctgggtctttaaagaggaagaccctattcacctgagatgccattcttggaagaacacagctctgcacaaggtcacatatcttcagaacggcaaaggtaggaagtatttccatcataattcggatttttacatccctaaggctaccttgaaggacagcggttcttacttctgccgggggctgtttgggagcaagaacgtttcaagcgaaactgtgaacatcacaatcacacagggccttgccgttagtacgattagctccttcttcccccctggttatcaggtgtctttttgcctggttatggtcctcctgtttgccgtggacaccgggctttatttctccgtgaagacaaacatcaggagtagcacgcgcgattggaaggatcacaagttcaagtggaggaaagatccacaggataagtag

SEQ ID NO: 187704 - DNA, 318 bp, synthetic construct
  misc_feature 1..318: note = Description of Artificial Sequence: Synthetic coding sequence
  source 1..318: mol_type = other DNA
atgtggcagctgctgctgcccaccgccctgctgctgctggtgagcgctggaatgcgtactgacctgccgaaggcagtcgtcttcctggagccacagtggtacagggtgctggagaaggatagtgtcacactcaaatgtcagggggcgtactctcctgaggacaatagcactcagtggtttcacaatgaaagtctgatatctagccaagcctcatcgtactttattgatgccgccacggtcgacgatagtggtgagtatagatgccaaaccaacttgagcactctgagcgacccagtccagctcgaagtccacatatag

SEQ ID NO: 187705 - DNA, 870 bp, synthetic construct
  misc_feature 1..870: note = Description of Artificial Sequence: Synthetic coding sequence
  source 1..870: mol_type = other DNA
atgggcggcggcgccggcgagcggctgttcaccagcagctgcctggtcgggctggtgcccctggggttgcgcattagccttgttacttgccctctgcagtgtgggataatgtggcaactactccttcccaccgctctgctgctgctggtaagtgccggtatgcgaaccgatctgccgaaagcagtggtgtttctggagccacaatggtacagggttctggaaaaggacagtgtgactttaaagtgtcagggtgcttacagccccgaggacaactccacacagtggttccacaatgaatccctgatatccagtcaagcgagtagctatttcattgatgctgccacagtggatgactccggagaatatagatgtcagacgaacctcagtaccctctcagatcccgtgcagctggaggtccatatcggctggctcctcctgcaagcgccgcgatgggtcttcaaagaggaggaccctatccacctccggtgccactcctggaagaatacagccctgcacaaggtgacttacctgcaaaatgggaaaggccgcaagtactttcatcataattctgatttctatattccaaaagccacattaaaggattctgggtcctacttctgccggggcctcttcggttcgaaaaacgttagctccgaaaccgtgaatatcaccatcacacagggcctcgccgtctcaacgatctcttccttcttcccgcctggctatcaggtgtcattctgcctggtaatggtactgctcttcgccgtggacaccggcctgtactttagtgttaaaactaacattagatcctccacccgggactggaaagaccacaagtttaagtggcgcaaggacccccaggacaaatag

SEQ ID NO: 187706 - DNA, 765 bp, synthetic construct
  misc_feature 1..765: note = Description of Artificial Sequence: Synthetic coding sequence
  source 1..765: mol_type = other DNA
atgtggcagctgctgctgcccaccgccctgctgctgctggtgagcgcaggcatgagaacagaagatctccctaaagcagttgtttttctggaaccgcagtggtatcgcgtcctggagaaggatagcgttacattaaaatgccagggggcatattcccctgaagacaattcaacccagtggtttcacaacgaaagcctgatctcctcccaggcaagctcatactttattgatgcggccacggtggacgacagcggcgagtacagatgtcagacaaatctgtccactcttagcgaccccgtgcagttggaagtccatatcggctggttgctgctgcaggcgccccggtgggttttcaaggaggaagaccccatccatttacgttgtcactcgtggaagaacaccgccctgcacaaggttacctacctacagaatggcaaaggtagaaaatattttcatcacaactccgatttttacatacctaaggccacactcaaggacagcggatcatacttctgtcgcggcctgttcggaagtaagaacgtttccagcgaaacggtgaatattactattacgcaggggctggctgtctccaccatctcatcattttttccacccggataccaggtctcattttgtctcgtgatggtactcctgttcgccgtggacaccggcctctacttttctgtgaagactaacatcagatctagtactcgtgattggaaagatcacaagttcaagtggaggaaggacccccaggataagtag

SEQ ID NO: 187707 - DNA, 702 bp, synthetic construct
  misc_feature 1..702: note = Description of Artificial Sequence: Synthetic coding sequence
  source 1..702: mol_type = other DNA
atgtggcagctgctgctgcccaccgccctgctgctgctggtgagcgccggaatgaggaccgaagatctgcccaaggcggtggtgttccttgagccccagtggtatagcgttcttgaaaaggatagcgtgaccctgaagtgtcagggagcatatagccccgaggacaattctacacagtggtttcataacgagaatctgatctccagtcaagcctcctcgtactttatagatgccgctactgtgaatgattcaggagagtaccgatgtcagaccaatctctccaccctcagcgacccagtgcaactggaggtccatatcggctggttgttactgcaagcacccagatgggtttttaaggaggaggaccccattcacctgagatgccattcgtggaaaaacaccgctctgcataaggtcacatatctccagaatggcaaagatcggaaatactttcaccataatagcgacttccacatccccaaagcaaccctgaaggattccggctcatacttttgcagaggcctggtcggcagtaaaaatgtaagttccgagactgtcaacattaccataactcaaggacttgcggttagcaccatctccagcttctcgccccctggttatcaggtgagtttttgcctcgtgatggtgctattattcgccgttgacacgggtttgtatttttccgtgaagactaatatctag

SEQ ID NO: 187708 - DNA, 702 bp, synthetic construct
  misc_feature 1..702: note = Description of Artificial Sequence: Synthetic coding sequence
  source 1..702: mol_type = other DNA
atgtggcagctgctgctgcccaccgccctgctgctgctggtgagcgccgggatgagaactgaagacttacccaaggccgtggtgtttctggaacctcagtggtatagtgttctagaaaaagattccgtgaccttgaagtgtcagggagcctactctccagaggacaactccactcagtggttccacaacgaaaatctcattagttctcaggcatcctcatattttatcgacgcagctacagtgaatgacagcggcgaataccgctgccagaccaacctgtccacactgtccgaccccgtgcagttggaggtgcacattggttggttactcctgcaggcccccaggtgggtcttcaaggaagaagacccaatacatctccggtgccattcctggaaaaacaccgcactccacaaggtcacatacttgcagaacggcaaggaccggaaatactttcatcacaattcagactttcacatccccaaagctaccttgaaagattccgggagctatttctgcaggggactggtgggctcaaagaacgtgtcttcggagacagtgaacatcaccatcacccagggcctggctgtgagcacaattagctccttttcccctcctggctaccaggtctccttttgcctggtaatggtgttgctattcgccgtagacactggactctacttctccgtgaagacgaacatatag

SEQ ID NO: 187709 - DNA, 2076 bp, synthetic construct
  misc_feature 1..2076: note = Description of Artificial Sequence: Synthetic coding sequence
  source 1..2076: mol_type = other DNA
atggagatcgccccccaggaggccccccccgtgcccggcgccgacggtgatattgaggaagccccggccgaagcgggctccccgtctccggcctcgccccctgccgatgggcggttgaaagcggcagcaaagcgggttacattcccctccgacgaagatatagtcagtggcgctgtagagccaaaagacccctggcgccacgcccagaatgtgacggtagacgaggtgataggcgcctataagcaggcttgtcaaaaactgaactgtaggcaaattcccaagcttctccgacagcttcaggagtttacggatctagggcacagactcgactgcctggatctcaaaggcgaaaagttagattataagacatgcgaagccctggaggaagtcttcaagcgcctgcagtttaaggtcgtggatctggaacaaaccaacctggatgaagacggcgcctcagccctctttgatatgatagaatattatgagagtgctacccatctgaacatcagcttcaataaacacattgggactcgtgggtggcaggccgccgctcacatgatgaggaagacctcctgtctgcagtatctggatgcgagaaatactcccctcctggaccacagtgcccccttcgtggctcgggcactgagaattaggtcaagtctggccgttttgcacctcgagaatgccagccttagcggaagacccctgatgttgctcgctaccgctttgaaaatgaacatgaacctgagagaactgtacctggccgataacaaactgaacggtttgcaggactctgctcagctgggcaacttgctgaagttcaactgttctttgcagattcttgatctcaggaataatcacgtgctggatagcggtttagcctacatatgcgagggtttaaaagagcagcgcaaggggcttgttactttagtattgtggaacaaccagctaacccatactgggatggctttccttggcatgaccctgccacacacccaaagcctggaaaccctcaatctaggacacaaccccatcgggaacgaaggcgtgagacaccttaaaaatgggttaatcagcaatagaagtgtcctaagactcggcctggctagtactaagcttacatgtgagggcgccgtagcggtcgcggagttcatcgcggagtccccccgcttgttgagactcgatctgagggagaatgagatcaaaaccgggggcttgatggcgctgtcactggctctcaaggtgaaccactctctgttgaggctggacctcgaccgtgagcccaagaaggaggccgtgaaatccttcattgaaacgcagaaagccttgctggctgaaattcagaatggttgcaaacgcaatctcgtgctcgcacgagaacgagaagaaaaggaacaacccccccaacttagcgcctctatgcctgagactacagcgacagaacctcaaccagacgacgaacctgctgccggcgtccagaatggggcgccctccccagccccatcccccgacagcgattctgattctgattccgacggcgaggaggaagaggaggaggaaggagagagagatgagactccatgtccagctcttgtgcccccaacagactcactgggccccggcgatcgcagtccgcctggtagtccttctacccctaccgagcagcgcatctctgtaagcagccctggtaggggacacaaagttttcgtggtgacgagggtcgaaagtcccccggaaagagccgaacctccggcctcaccgacgcccccaagccctcccccgccccccagtcctccagcgagcccctccctgcctccggctggagccatagacacccgggacacaggttcatcggagccacaaccccctccagagccacccaggtcaggcccacctctgcctaacggcctcaagcccgagttcgctctcgcattgccacccgagccaccccctgggcctgaggtcaaagggggatcctgcggtcttgagcacgagctcagctgtagcaagaacgagaaagaactggaggagctcctgctggaggccagtcaggaaagcggacaagagactctgtag

SEQ ID NO: 187710 - DNA, 459 bp, synthetic construct
  misc_feature 1..459: note = Description of Artificial Sequence: Synthetic coding sequence
  source 1..459: mol_type = other DNA
atgggcgtgccccggccccagccctgggccctgggcctgctgctgttccttctcccgggaagcctgggagccgaatcacacctatccctcctctatcatttaaccgcggtaagcagtccagcacctggaacccccgcgttttgggtctccggatggttaggcccacagcagtacttaagctacaactccctccgtggcgaggctgaaccctgtggggcctgggtctgggaaaatcaggtgagttggtattgggagaaagagactacggatctcagaatcaaagagaaactgttcttggaggcatttaaggccctcgggggaaaggggccttacacattacagggccttctcgggtgtgagctgggccctgacaatacttcggtccccactgcgtgcggtagcacttggcgaggcgccgcagagacctggtccgggagatctccacctccgtgcgcctag

SEQ ID NO: 187711 - DNA, 1098 bp, synthetic construct
  misc_feature 1..1098: note = Description of Artificial Sequence: Synthetic coding sequence
  source 1..1098: mol_type = other DNA
atgggcgtgccccggccccagccctgggccctgggcctgctgctgttcctgttaccaggaagtttgggcgccgagagtcacctgagcttgctttaccacctgaccgcggtatcatcaccagcccccggcactccggcattctgggtatccgggtggctggggccacagcagtacttgtcctataactcattgcggggcgaagctgagccctgcggcgcttgggtgtgggagaaccaagtgagctggtactgggaaaaggagactaccgatctgcggataaaggaaaagctttttctggaggcctttaaagctcttgggggaaaggggccatataccctgcagggcctcctcggctgtgaacttggaccagacaatacatccgttcccactgctaaatttgcactgaatggtgaggagtttatgaactttgatttaaaacagggcacttggggcggggattggcctgaagccctggcaattagccagaggtggcagcagcaggataaagctgcaaataaagagctgacatttctcctgttttcttgccctcacaggctgcgagaacacttagagcgaggacgtggcaacttagaatggaaggagcctccatccatgagacttaaagcaaggcctagttctcctgggtttagcgtgctgacgtgttcggcattctccttttatccgcccgagctgcaattacggtttctacgcaacggcttggctgccggaactggtcagggtgattttggaccgaacagcgacggttcgttccatgcatcgtccagtttgactgtgaaaagcggggacgaacatcactattgctgcatcgtccagcatgcagggctagcccagcccttaagggtggagctggaatcacctgcaaagagttccgtgctggtggtgggaatcgtgatcggagtattgctgctaacggcagcagccgtcggcggagcactgctatggaggaggatgcgctctggtctccccgcaccatggatatcactcagaggggacgacacaggcgtcttgttacccacccctggtgaggctcaggatgcggatctcaaggatgtgaacgtcatacccgccacagcctag

SEQ ID NO: 187712 - DNA, 708 bp, synthetic construct
  misc_feature 1..708: note = Description of Artificial Sequence: Synthetic coding sequence
  source 1..708: mol_type = other DNA
atgggcgtgccccggccccagccctgggccctgggcctgctgctgtttctgctgccgggaagcctgggtgctgaatcccatttatccctgttgtatcacctcaccgcagttagcagccctgctccagggacaccagcattttgggtcagtgggtggctggggcctcagcagtatctatcatacaacagtctgcggggtgaggcggagccatgcggtgcttgggtatgggagaatcaggtcagttggtactgggaaaaagagaccaccgacctccgaataaaggagaagctgttcctcgaggccttcaaagcattggggggaaagggcccttatactctccagggcctcttaggttgtgagctcggccctgataatacctctgtgcctacggccaagttcgccctgaatggcgaggaatttatgaattttgacctcaagcaagggacatggggaggggattggcccgaggccctggccataagtcagcgatggcaacagcaggacaaggctgcaaataaagaacttacattcctgctcttttcatgcccacatcgcctaagggaacatttagagagaggcaggggaaatctggaatggaaaggctgctggactaagatagataccagttggggatgcgcccagatcttcataccttcagctacaaaggagaagctaaggctgaaccagtctcctcctccctgcgcctag

SEQ ID NO: 187713 - DNA, 1734 bp, synthetic construct
  misc_feature 1..1734: note = Description of Artificial Sequence: Synthetic coding sequence
  source 1..1734: mol_type = other DNA
atggacggcgaggccaccgtgaagcccggcgagcagaaggaggtggtgcgccggggccgggaggtcgattatagtaggctgatcgctgggacattaccgcagtcccacgtgacctctcgacgcgcaggctggaagatgcccctgtttttaatactgtgcctgctccagggtagcagttttgcactcccccaaaagcgaccccatccacgatggctttgggagggctctctcccatccagaactcaccttagagccatggggacattacgtccttctagccctctgtgttggagagaggaatcctccttcgctgctcctaattctctcaaggggtcccggttggtgagtggcgagcctgggggagcggtcacgattcagtgccattatgcacccagttcagtgaaccggcaccagcggaaatattggtgccggcttggacccccaaggtggatctgtcagaccattgtgagtacaaaccagtatacccatcatcgatatcgggatagggtagcattaaccgatttcccacagaggggtctcttcgtggtcagacttagccagctgagtccggatgatattggttgttacctttgcggaatcggcagcgaaaataatatgcttttcctgtccatgaacctcactatctcagctgggcctgcttcaacactgcccacagctacgcccgctgcaggcgagctaacgatgcgtagctacggtaccgcctcacccgtcgcaaacaggtggactccagggaccactcagacactcgggcaaggaaccgcctgggacaccgtggctagtactcctggtacgagcaagaccactgcaagcgctgagggacggaggacacccggagccacaaggcctgccgcccctggaactggaagctgggccgagggttccgtgaaggctcccgcacctatccctgagtcccctccgtcaaaatctcggagcatgagcaatacgactgagggggtctgggaagggaccagaagtagcgtgaccaatcgagctcgggcgagcaaggacagacgggaaatgactacgacgaaggccgaccggccccgggaagacatcgagggtgtgaggatcgctcttgacgctgctaagaaagtattggggacaatcggtcctcctgctctagttagcgaaactctcgcgtgggaaattctgcctcaggccacgcccgtgagcaagcagcagagtcaggggagcataggagagactaccccagccgcaggtatgtggaccctcggcactcccgcagcagacgtgtggattctggggacccccgctgctgatgtctggacctccatggaggcggcttccggcgaaggctccgccgctggggacctcgatgcagctacaggagaccgcggcccccaagcaacgctatctcagacaccagccgtggggccctggggcccccctgggaaggagtccagcgtcaaacgcacctttcctgaggacgagtcaagttcgaggacactggcgccggtctctacaatgctggcccttttcatgctgatggctctcgtcctgctccaaaggaagctatggcgtaggagaaccagccaggaggcagagcgcgtaacccttattcagatgacacacttcctggaggtgaatccacaggccgaccagttgccccatgtcgagcgcaagatgctccaggatgatagcctgcctgctggggcgtccttgacggcccccgaacggaatccaggcccctag

SEQ ID NO: 187714 - DNA, 1608 bp, synthetic construct
  misc_feature 1..1608: note = Description of Artificial Sequence: Synthetic coding sequence
  source 1..1608: mol_type = other DNA
atggacggcgaggccaccgtgaagcccggcgagcagaaggtgcccctctggacccacggatggccgcctgacgatccatccccgtcattcgctgcgggatccagttttgctcttccacaaaagcgaccccacccacggtggctttgggagggtagtctgccaagcagaacacacctaagagccatgggcaccctgcgaccgtcatcccccctgtgctggcgggaggagtccagcttcgctgcccccaacagtctgaaaggttctcggctggtgtccggcgagcctggaggggcagtaactatccaatgtcactacgcaccatcaagtgtcaatagacaccagcgcaaatactggtgcaggctggggccacctagatggatctgtcaaacaatcgtttctactaaccagtatacccaccaccgatacagggaccgcgtggcccttacagacttcccacagagaggactgttcgtcgtgcggttgtctcagctatctcccgacgacatcgggtgctatctctgcggcatcggaagtgaaaacaatatgttgtttctgtctatgaacctgactatctcagctggacctgcctccaccctgccaaccgcaacacctgccgccggagaattaaccatgaggtcgtacgggaccgcatcacctgtggccaatagatggacaccagggacaactcaaaccctcggccagggaaccgcatgggacacggttgcctccactcccgggacctcaaaaacaacagcctctgctgagggccggagaacccctggcgccactaggccagccgcgcctgggacagggtcatgggctgaggggtccgtaaaagccccggcccctatcccagaatctcccccatctaagtctaggagtatgtcaaacactaccgaaggcgtgtgggagggaaccagatcttctgttacaaatcgcgcacgtgcttccaaggatcggagggaaatgaccactaccaaagccgaccgcccacgcgaggatatcgagggagtgcgcatagccctcgatgccgcgaagaaggtcctaggaacaatcggcccacctgcattggttagcgagacactcgcatgggagattctcccccaagctacacctgtttccaagcagcagagccaggggtccattggcgagaccacaccagcagcagggatgtggactctgggaacacccgccgccgatgtctggattaccagcatggaggccgcgtccggcgagggctccgccgcgggcgaccttgatgcagccacaggtgacagaggaccgcaggcgaccctgtcccaaactcctgccgtgggcccctggggccctcccgggaaagaatcaagcgtgaagcgcgctacttgtccgggattaagcactcttaaggagatcaaggttagcgcggtcttgactcagaacccccatagcctcctgtgtgtgtcagctgctcaagaagcggagagagtgacactaattcagatgactcacttcctggaggtgaacccccaggcagaccagctcccgcacgtcgagagaaaaatgttgcaggacgactctctccctgccggtgccagtctgaccgctcctgaacgcaatcctggaccctag

SEQ ID NO: 187715 - DNA, 798 bp, synthetic construct
  misc_feature 1..798: note = Description of Artificial Sequence: Synthetic coding sequence
  source 1..798: mol_type = other DNA
atggacggcgaggccaccgtgaagcccggcgagcagaaggaggtggtgaggcgaggacgcgaagtagactattcgcgactgatcgccgggaccctgccacaaagccacgtgacttctcgaagagccggctggaagatgccccttttcctaatcctgtgtttgctgcaggggagcagctttgcgcttccccagaagagaccacacccccgatggctgtgggagggttccctcccaagccggactcacctgcgtgcaatggggacgcttcgcccctcgagccctctttgttggagggaagagagctcatttgctgccccaaacagcctgaaaggaagccggctggtgtcgggtgagccaggtggcgcagtaacaatccagtgccattacgcaccttcttcagtgaatagacaccagcgcaagtattggtgtcggctgggtccacctcgctggatatgtcagacgatcgtgagcaccaaccagtacacacatcaccgatatagagatcgggtggctctcacggactttccacagcgagggctctttgtggtgcggctcagtcagctttccccagatgatattggctgctacctctgcggtattggttctgaaaataatatgctgtttctttctatgaacctcaccatcagtgccgtgctctttcaaaaaatgaaggctgccctggggccatggctgttgtctctgccctgctggccctgtctgtgtctctggctgtggttctattgtaaaggatccagcggggaagggggccccttgcgcaggcagaaaggcagcccctag

SEQ ID NO: 187716 - DNA, 798 bp, synthetic construct
  misc_feature 1..798: note = Description of Artificial Sequence: Synthetic coding sequence
  source 1..798: mol_type = other DNA
atggacggcgaggccaccgtgaagcccggcgagcagaaggaggtggtcagaagaggccgggaagtagactacagtaggctgatcgcaggaaccttaccacagtcacacgtcacctctcgccgagccgggtggaagatgcccctctttctgattctttgccttctccaggggagcagcttcgcgctacctcagaagcgtccgcaccccagatggctgtgggaaggttccctcccctcacgcactcatctgcgggccatgggtacgctccgcccaagctcacccctgtgctggagggaggagtcctcatttgccgctccgaattctctgaagggatccaggctggtgagcggcgagccaggcggagcagtgacgattcagtgccattatgccccttctagtgtgaaccgccaccagagaaaatattggtgtagactggggcctcctaggtggatttgccagaccatagtttccacaaaccagtatactcaccatcgatatcgcgacagggtggccctgactgacttccctcagcggggcctgttcgtcgtgcgcctgtctcagttatccccagacgatattggctgctatctttgtggtataggctctgagaacaacatgctctttttgtccatgaatctaactatctcagcggtgctgttccagaaaatgaaagccgccctcgggccgtggctgctctccctgccctgttggccctgtctgtgtctatggctgtggttctactgtaaaggctcatcaggcgaaggtggacccctccggcgccagaaagggtccccctag

SEQ ID NO: 187717 - DNA, 1101 bp, synthetic construct
  misc_feature 1..1101: note = Description of Artificial Sequence: Synthetic coding sequence
  source 1..1101: mol_type = other DNA
atgctgccccggctgctgctgctgatctgcgcccccctgtgcgagcctgccgagctgtttctgatagcctctccctcacaccccactgaaggcagccctgtcaccctcacctgtaagatgccttttctccagtcgtcggacgcgcaattccaattttgcttttttcgagacactcgcgctcttggccctggctggtccagttctccgaagctgcagatcgcggctatgtggaaagaagacacaggttcgtattggtgcgaggctcagaccatggcttcaaaggtgctgcggtcacgccggtcgcagattaatgttcaccgcgttccagtcgctgatgtatcactcgaaacgcaacctcctggtggccaggtcatggagggtgaccgtctggtcttgatttgttcagtcgccatgggcactggagacatcacatttctgtggtataagggtgctgttggcttgaacctacaatccaaaacccagagaagcctaaccgccgaatacgagattccaagcgtccgtgagtctgacgctgaacagtattactgcgtggccgaaaatggatatgggcccagtccctcaggtctggtctccatcacagtccgtattcctgtaagcaggcccatcctgatgttgagggcgccccgagcgcaagccgcagtcgaggacgtcctcgagctgcactgtgaggccctacgagggagcccacccatactctactggttttatcacgaagatatcaccctcggctcccggtcagccccttccggcggaggtgccagttttaatctttctcttacagaggaacactcagggaattactcatgtgaagcaaataacgggttgggcgcacagagatccgaggccgttacccttaactttacgggcaggagatccgcccgggacccccttagaagtcttccctcgcccctgccacaggagtttacatatctgaactccccaacccctggtcagctacaaccgatctatgagaatgagccccgcgagcagagcgtagctgtacatgggcgacaacagcactccagcgagcaaaaggctcagaagccatggggacacatatggcgaacccgtttcccttag

SEQ ID NO: 187718 - DNA, 1290 bp, synthetic construct
  misc_feature 1..1290: note = Description of Artificial Sequence: Synthetic coding sequence
  source 1..1290: mol_type = other DNA
atgctgccccggctgctgctgctgatctgcgcccccctgtgcgagcccgccgagctgttcctaatcgcaagccccagccacccgaccgaaggctctcctgtaaccctcacttgtaaaatgccttttttacaaagtagcgatgcccagttccagttttgtttctttagagacactagggccctgggtcctggctggtccagcagccctaagttacagatcgccgccatgtggaaagaagacactggaagctactggtgtgaggcccagaccatggcaagcaaggtgttgcgcagtaggagaagccaaatcaatgtacaccgtgtgccagtggccgatgtctcactggagacacagcctcccgggggccaggttatggaaggtgaccgcctggtgcttatctgctccgtggccatgggcactggggatatcaccttcctgtggtataaaggggccgtcgggctgaatctgcaatctaagacacagagatccctgacagccgagtatgaaattccctctgtgagagaaagcgatgctgaacagtactactgcgtggctgagaatgggtacggtccgagccccagtggcctggtgagtatcactgtgcggataccagttagccggccgattcttatgttgagagcccctagggcccaggcagctgtggaagatgtccttgaacttcactgcgaggccttgcgcggcagccccccaatactttactggttctaccatgaggacattactctgggctcaagatcggctcccagcggaggtggcgccagttttaacctgagtctgacagaagagcattctggcaattattcctgcgaagctaataatggacttggcgcccaacgctcagaggccgtgactttgaacttcacggtgccaaccggagctcggtccaaccacctcactagtggcgtgatagagggcctactctccacccttggccccgcaacagtcgcactcctattttgctacggtctcaaaagaaagatcggaaggcggtccgcgcgggaccctctgaggtctcttcccagtcccctgccgcaggagttcacttacctgaactcaccgaccccagggcagttgcaacctatctacgagaatgtgaatgtggtgagtggcgatgaagtgtattccctcgcatattacaatcagccggagcaagagtccgttgccgctgagacacttggtacccacatggaagacaaagtgtccctggacatctatagtcgccttcggaaggctaacatcactgacgtggactatgaggatgctatgtag

SEQ ID NO: 187719 - DNA, 1287 bp, synthetic construct
  misc_feature 1..1287: note = Description of Artificial Sequence: Synthetic coding sequence
  source 1..1287: mol_type = other DNA
atgctgccccggctgctgctgctgatctgcgcccccctgtgcgagcccgctgagctcttcctcattgcctctccttcccacccaaccgaaggcagccctgtgacactgacgtgcaaaatgccgttcttgcagtcatccgacgcccaatttcaattctgcttcttcagagacactagagcactcgggcctggttggtcttcatcccctaaactgcagattgctgcaatgtggaaggaagacactggaagttactggtgcgaagctcagaccatggcatccaaagtgctacgttccaggcgctcccagattaacgtgcatcgcgtgcccgtcgccgacgtctccttagagactcagcccccagggggacaagttatggaaggcgacaggcttgtcctgatctgctcggttgccatgggaactggcgacataacatttctgtggtacaaaggcgcagtgggcctaaaccttcagtcaaaaactcagaggtccttgactgccgagtatgagatcccatctgtccgagaaagtgatgccgaacaatactactgtgttgctgagaacggctacggaccctccccaagtggtttggtgtctatcacggttcggatcccggtaagtaggccaattcttatgttacgtgcacccagagcccaggcagccgtcgaagacgtgttggagctccactgtgaagctctgaggggaagtccgcccattctgtactggttctaccatgaggacatcaccttaggctctaggagcgcacccagtggtggcggggctagcttcaacctgtcgttgacagaagaacatagcggtaattattcctgtgaagctaataacggcttgggggctcagcggagtgaggcggtgactctcaacttcactgtcccaactggagccaggagtaaccacctgacctctggcgtcattgagggcctgctcagtaccctcggacctgcgacagttgctcttctcttttgctacggcctaaagcgcaagatagggagaaggagcgcgagagaccctttacgatcattgccaagtcccctcccgcaggaattcacctacctgaactctcccacaccaggccaactgcaacccatctatgagaacgtgaatgtcgtctccggtgacgaagtgtattctctggcctactacaaccagcccgagcaagaatcagtggccgaaaccttaggcactcatatggaagacaaagtatctctggatatctattcccgactgcgaaaagccaacatcacagatgttgattacgaagacgccatgtag

SEQ ID NO: 187720 - DNA, 2670 bp, synthetic construct
  misc_feature 1..2670: note = Description of Artificial Sequence: Synthetic coding sequence
  source 1..2670: mol_type = other DNA
atgagctacttcggcgagcacttctggggcgagaagaaccacggctttgaagtgctctatcacagtgtcaaacaagggcccatctctacgaaggaactggcagattttattcgtgagagagccacaattgaggagacttacagcaaggcaatggctaaactctctaagctagcgagcaacgggacaccaatgggaaccttcgctccgctctgggaggtgttccgagtatcctcagataaactggcactgtgtcacctcgagttgaccagaaagcttcaggacctgataaaagacgttctgaggtatggagaggaacagcttaaaacccataagaagtgtaaagaggaagtggtgtccacactggatgccgtgcaggtgctgagcggggtgagccagctgctgcccaagtccagagagaactacttgaaccgctgtatggaccaggaaaggttacggcgtgagtccacgagccagaaggagatggacaaagccgagaccaagacaaagaaagctgcagagtctttgcggcgcagtgtcgagaaatacaactccgcgcgggcggactttgagcaaaaaatgctggacagcgcattgaggtttcaggcaatggaggagacacatttgagacacatgaaagccctcctgggcagctacgctcactcagtcgaagacactcatgtacagatcggccaggtccatgaagaattcaaacagaacattgaaaatgtctccgtcgaaatgttactgcggaagtttgcggagtccaaggggacgggcagagaaaaacccggcccccttgattttgaggcttattcagcggccgcactccaagaagccatgaaacgcctgcggggcgcaaaggcatttaggctgccaggtctcagtagacgtgagagggagcccgaacccccagctgccgtggactttctcgaacccgactctggaacttgccctgaagtggatgaagagggcttcacagttcgtcccgacgtaacccagaactctacagctgagccttccaggttctcctcaagtgacagtgacttcgacgacgaagaaccgagaaagttttacgtccatattaagcctgctcccgcaagagccccagcttgttcccctgaggccgccgccgctcagttaagggctaccgccggcagcctgatcttgccccccggtccaggtgggaccatgaagcggcactcaagcagagacgccgccggcaagccccaacgaccccgaagcgctccacgaacatcatcctgcgcagaacggctgcaaagcgaggaacaggttagcaagaacctttttggccctccactggagtctgcgttcgaccacgaagactttaccgggagtagtagtctgggattcacatcttcgccctcacccttttcaagttccagcccagagaatgtcgaggatagcggtctggacagtccgtcgcacgctgcaccaggcccaagccccgatagctgggtccctcggcctggaaccccccagtcaccgccgtcctgtagggctcccccccctgaagctagggggatacgtgctccacccttaccggactctccacagcccctggctagcagtcccgggccctggggcctggaagccctggcaggcggggatctgatgccagccccagccgaccccaccgcccgcgaaggtttagccgcccccccccggcggttacgttcgaggaaggtttcttgcccacttaccagatctaatggcgatttgtcacggtctttaagtccgtcaccccttggttcaagtgcggctagcactgcactggagaggccatcattcctgagccaaactgggcacggtgtcagtagaggaccatcccctgtagtattaggaagccaagacgctctgccgatcgctaccgcatttaccgagtacgttcacgcatactttcgcggccactccccttcctgcctcgcccgcgtcactggcgaactgacgatgacgtttccagcaggaatagttcgggtattcagcggcacacccccccctcccgtcctcagctttaggcttgtccatacaacagctatcgagcatttccagccgaacgctgatttgttattcagtgatccatctcagtcagacccagagacaaaagatttttggcttaatatggccgccctgactgaggccttgcagcggcaggccgagcagaaccccacagcgtcatattacaatgtagtgttactgcggtaccagtttagtcgcccaggcccccagtcagttcctttgcaactcagcgcacactggcagtgcggagctacacttacacaggtctccgtggaatacgggtaccgtcccggcgctacagcagtgccaacgcctctaaccaatgtacagatcctgttgcctgtcggggaacccgtcacaaacgtacgtctgcagccagccgccacttggaatctggaagagaaacggctgacttggaggctgcctgacgtctccgaggcaggcgggtctgggagattgtccgcatcttgggagccgctaagtggaccatccaccccaagtcctgttgccgcacagtttacatcggaaggcacaactctcagtggcgtcgatctggagttagttggatcaggctacaggatgtccttagtgaagagaagattcgctacaggcatgtatttggtcagctgctag

SEQ ID NO: 187721 - DNA, 2670 bp, synthetic construct
  misc_feature 1..2670: note = Description of Artificial Sequence: Synthetic coding sequence
  source 1..2670: mol_type = other DNA
atgagctacttcggcgagcacttctggggcgagaagaaccacggcttcgaggttctgtaccatagtgtgaaacaagggcccatcagtactaaagaacttgccgactttataagggagagagccacaatcgaggagacatattcaaaagctatggccaagctctccaaactggccagcaacggaaccccaatgggtacatttgcgccgttgtgggaggtcttcagagttagcagcgacaagcttgccctgtgtcacttagagctcacccggaagctgcaggacctgattaaggacgtcctgaggtatggtgaggagcagttaaaaacacacaagaaatgcaaagaggaggtggtctccaccctggatgccgttcaggttcttagcggggtgagccagctgttacccaaatcacgcgagaactatctgaaccgatgtatggatcaggagaggctccgccgcgaaagcacttctcagaaggagatggataaagccgagacgaagactaaaaaggcggcagagtctctgcgacggagcgtcgaaaagtacaacagtgccagggctgacttcgagcagaaaatgctcgattctgccctgaggttccaagcgatggaagagacccacttgcggcacatgaaggctttgctgggtagctacgctcattcggtggaagatacacacgttcagatcggccaagtccacgaagaatttaagcaaaatatcgaaaacgtatccgtggaaatgttattaagaaagttcgcggagagcaaggggaccggtagagaaaaaccgggcccgctggattttgaagcctattctgcggctgccctgcaggaagccatgaaaagacttcgtggagcaaaggcatttcgactaccaggcctgagtcgtagagagagggaaccggagccccctgccgccgtggatttcctagaaccagattctgggacttgccctgaggtcgacgaggaagggttcacagtgagacccgatgtgacccagaattcgacagcggaaccctcaaggttctctagcagtgattctgacttcgatgacgaagaacccagaaagttttatgtccacattaagcccgctccagccagggctcccgcctgcagtcccgaagccgcggcagctcaacttagagccaccgcgggatccctgatcctgccaccagggcctgggggcactatgaaacggcactctagcagagacgccgccggaaagccccagagacctagatcagctcctagaacctcaagctgcgccgaacgcctgcaatccgaagagcaagttagcaagaatctgtttggacctcctctggagagtgcatttgaccacgaagatttcaccgggtcaagttctctgggttttacaagctcgcctagtccattctcctcttcctcccccgaaaatgtcgaggacagcggccttgacagccccagtcacgcggcaccagggccatcacctgactcgtgggtgccccggccaggtacgcctcagtctccccctagctgtcgcgcccctcctccagaagcacgaggcatcagagcgcctcctttgccagactccccgcagcctctcgccagttctccgggcccctggggtttggaggccctggccggcggagatctgatgccagcacccgcagaccctaccgcccgcgaaggactggctgccccccctagacgattgaggtcaagaaaagtctcttgtccgttgaccaggagcaacggtgatctatcacgttctttgagtcccagtccgctgggctccagcgctgcctccaccgccctcgaaaggccaagctttctgagccaaacagggcacggtgtaagcaggggcccctcccctgttgtcttgggatcccaggatgctctgcccattgccaccgctttcacagagtacgtgcatgcatactttaggggccacagcccctcatgtctggcgagggtcacgggggaactaaccatgacattccctgccggcatcgtgagggtgtttagtggaacaccccccccgcctgtgctgagcttcagactcgtccataccacagctatcgaacacttccaaccgaatgcagatctcctgtttagtgacccatcgcaaagcgaccctgagaccaaggatttttggctgaacatggccgccctgaccgaggctctccagcgacaggcagaacaaaatcccactgccagttactataatgtcgtcctgctccgctaccaattttctcggcccggcccccagagcgtccctttgcaactgtccgctcattggcagtgcggtgcgactctcacccaggtttcagtggagtacggctatcgacccggcgctactgcggtacctacacctctcaccaacgtgcagattctcctgccagtaggggagcctgtcacaaacgtccgtctgcagcccgcagctacgtggaatctcgaggagaaacggttgacttggaggcttcctgacgtgtcggaggccgggggctctggccgcctgagcgcatcttgggagcctctgagcggcccatcaactccatcgcccgtggccgctcagttcacttcagaggggacaacactgagtggcgtagatttagagctggtcggaagcgggtaccggatgtccctggtcaagcggcgattcgctacggggatgtaccttgtgtcttgttag

SEQ ID NO: 187722 - DNA, 2670 bp, synthetic construct
  misc_feature 1..2670: note = Description of Artificial Sequence: Synthetic coding sequence
  source 1..2670: mol_type = other DNA
atgagctacttcggcgagcacttctggggcgagaagaaccacggcttcgaggtgctttaccacagcgtgaagcagggaccaatctctacaaaagagctcgctgactttatccgcgaaagggccacaatagaggaaacatacagcaaagctatggccaagctctccaagctcgcaagcaatggcacgccaatgggcacgtttgccccactatgggaagtgtttcgtgtgtcatccgacaagctagcgttatgtcacctcgagctcacaagaaagctccaggacttgatcaaagacgtccttaggtacggagaagagcagttaaaaacacacaagaagtgcaaagaggaagtggtgagcaccctagatgcagtgcaagtgctgtcaggggtcagccagcttctgcctaaatccagagagaattatctgaatcgctgtatggatcaagaaaggctgcggagggagagcacatcacagaaggagatggataaggccgagaccaaaactaaaaaggcggcagagtccttacgccgttctgtggaaaaatacaatagcgcacgggccgactttgagcagaaaatgcttgattccgccctgaggttccaggctatggaggaaacgcatttacgccacatgaaggccctgctcggatcatatgcacattcggtggaggatacacacgtccagataggccaggttcacgaggaattcaagcaaaacattgaaaatgtatcagtcgagatgttgttacgtaaatttgccgaatctaagggtaccggtagggaaaaacccggtccgctagatttcgaagcctacagtgcagccgctctccaggaagctatgaagcggttgcggggagccaaagcctttcgattgcccggactgtctcgacgcgaacgagagccagaacctcctgcagctgtcgacttcctggagccggacagcggcacctgccccgaagtcgacgaagagggctttacggtgcggccggacgtgacccaaaattccaccgctgagccaagccgtttctctagtagcgattctgacttcgacgacgaggagccaaggaaattctacgtccacattaaaccagcccctgcacgggcgcccgcctgcagtcccgaagccgccgccgcacagctcagagcgactgccggttctctgatcctgcctccgggccccggggggaccatgaagcgacactctagccgtgatgccgcaggcaaaccccagagaccgcgttctgccccacgcacgagctcatgcgctgagcgcctccagtccgaggagcaggtatctaagaatctgtttggtcccccacttgaatcagcattcgaccacgaagattttactgggtcctcctcacttgggttcacgagtagtccaagccccttctccagcagctccccagagaatgtggaggattccggtctcgatagtcccagccatgcagcgcctggcccgtccccagatagctgggtcccccgacctggcaccccccagtctcctccctcgtgtcgggctccaccaccagaggctcgcggcattcgtgcgcccccactgccggactcacctcagcccctggcgtcctctccaggaccctggggactggaagccctggccggaggggacctgatgccggcgcctgctgaccccaccgctagggaggggctggctgcccccccacggcggttgcggagtcggaaagtgtcttgccctctgaccagaagcaacggtgacctttcgcgctcactgagcccctccccactggggagttctgcagctagcacagctctggagcgaccttccttcttatcccagaccggccacggcgtcagccgcggaccctctccggttgtcctcggttcccaggatgcactgccaattgctactgccttcacagaatatgtccacgcttactttcgaggccacagcccatcttgcctagccagagtgaccggggaactcactatgacgttccccgcaggaatcgtgcgagtgtttagcggcacgccccctccccctgtgctcagctttcgcctagtgcatacgactgcaatcgaacactttcagcctaacgccgacctgctgttcagtgatcctagccagtccgacccagaaacaaaagatttctggctgaacatggctgccctgaccgaagcgctgcagcgccaggccgagcagaatcctacagcttcgtactacaacgtggttctcttgcgatatcagttcagccgtcctggacctcagtctgttccgctgcaattatctgcgcattggcagtgcggcgccacattgacccaggtgtccgtggaatatggctaccgccccggtgctaccgctgtgcccacccctctgacaaatgtccagatactgttgccagttggggaaccagtaaccaacgtgagattgcagccagccgccacttggaacctcgaggaaaaaaggctgacatggcggctgcccgatgtgtccgaggcaggtggtagcggcagactcagtgctagttgggaacctctatctggaccatctaccccctcaccggtcgcagcacagttcaccagcgaggggacaactctcagcggcgttgatctcgaactcgtgggctcgggctacaggatgtcactggtaaagcgccgattcgcaaccggaatgtacctcgtcagttgctag

SEQ ID NO: 187723 - DNA, 2676 bp, synthetic construct
  misc_feature 1..2676: note = Description of Artificial Sequence: Synthetic coding sequence
  source 1..2676: mol_type = other DNA
atgagctacttcggcgagcacttctggggcgagaagaaccacggctttgaagtcctttatcacagcgtgaagcagggtcctatatcaacaaaagagctagctgattttatcagggaaagagccaccatcgaagagacttattccaaagctatggccaaactgagcaagttagccagcaacgggacccctatggggacattcgcacctctctgggaagtctttcgtgtctcatccgacaagttggccctgtgtcaccttgagctgactcgcaaactgcaggacctgatcaaggacgtcctgaggtacggggaggagcagctcaaaacacacaaaaagtgcaaggaagaagtcgtctcaactttagatgccgtgcaagtgctttcgggagtgtctcagctgttaccaaagagtcgggagaattatctcaacaggtgcatggatcaggagagactgcggcgcgagtccacaagccagaaagaaatggataaggccgaaactaaaaccaagaaggctgcagaatcactgcgtcggtcagtagaaaagtacaactccgctagggcagatttcgagcagaaaatgctggacagcgccctgagatttcaggcaatggaagagacccaccttaggcacatgaaggccctacttgggtcctatgctcattcggtcgaagatacacacgttcagattggccaagtgcacgaggaattcaaacagaacatagaaaacgtgagcgtcgagatgctactccgcaagtttgcagaatccaaaggcactgggcgcgagaaaccaggaccattagattttgaggcttactcagccgccgcccttcaggaggccatgaagcggctcaggggtgccaaggcgtttaggcttccaggactatcacggcgggaacgggagcccgaacctccagcagccgtggattttctggaacccgatagtggcacctgtcccgaggtggatgaggaagggtttactgttcgcccagatgtcacccagaactctacagcagaaccctcccgattcagcagctctgattccgacttcgacgatgaggagccaagaaaattttatgttcatataaaacccgcacctgcacgcgccccagcttgctcccctgaagccgccgccgcgcagctaagagccacggctggaagcctaatcctgcctccaggccctgggggaacaatgaaaagacactcatcgagggacgccgccgggaaacctcaacggcctcgatcagctccccgcacatcaagttgcgcggagagactccagtctgaggagcaagttagtaaaaacctgttcggtccccccctcgagagcgctttcgatcatgaagacttcactggtagtagttctctcggcttcacaagcagtccctctccttttagctcatccagccctgagaatgttgaggatagcggcttggacagccccagccacgccgctccagggccttcccccgattcgtgggtcccacgtcctggcaccccgcaaagtcctccctcttgtagagctcctccccctgaagccaggggtatccgcgcgccacctctgccagactctccccagcctctagctagcagccctggcccttggggactagaggccctagctggtggagaccttatgcccgcccccgccgaccccacagcacgcgagggcctcgctgccccgccccggaggcttagatctaggaaagtgtcatgtcccctgactagaagtaatggggacttaagccgatccctgagtccctcacctctggggtcctccgccgcgtctactgcccttgaacggccgtcattcctgagccagaccggacatggagtcagccgcggcccttcgcctgtcgttcttggaagccaggatgccctgcccattgccacagcatttaccgagtacgtacacgcctacttcaggggacacagtccctcatgcctcgctcgcgtgacaggggaactgacaatgaccttcccagccggcatcgttagggtattcagcggcacaccaccccctcccgtcctctcatttcgtctcgtgcacacaaccgcaattgagcacttccagccaaatgccgacctgcttttctccgatccatcccaatccgacccggagacaaaagatttctggctcaacatggccgcccttaccgaggctttacagaggcaggccgaacagaatccaactgcatcctactataatgtagtcctgcttcgctaccagttctcacggccgggccctcagtccgtgccgttgcagctttctgctcattggcagtgcggggcaacactcactcaggtgtctgttgagtatggatacaggcccggggccaccgccgtacctactccactgaccaacgtgcagatcctgttacccgttggggaacctgtgacgaatgtcagacttcagccagcggccacgtggaatttagaggagaagcgcctgacgtggcggctgcccgacgtcagcgaagcaggtggtagtggaaggttatcggccagctgggagcctctgagtggcccatcaacaccgagccctgtggccgcccagtttacaagcgaaggcacaactctaagtggtgtggatttggagttggttgggagcgggtacagaatgtccctggttaaaaggcgattcgccacagctgctccgccacagggatgtacatggtag

SEQ ID NO: 187724 - DNA, 2520 bp, synthetic construct
  misc_feature 1..2520: note = Description of Artificial Sequence: Synthetic coding sequence
  source 1..2520: mol_type = other DNA
atggccaagctgagcaagctggccagcaacggcacccccatgggcacattcgccccactgtgggaggttttccgcgtgtctagtgacaaacttgcactttgccatttagagctgactagaaaacttcaagatctgatcaaagacgtactgcgatacggagaggagcagctcaagacccacaaaaagtgtaaggaggaggtggtatctacactcgatgccgtgcaggttctcagtggagtgagccaactgttgcccaagagcagggaaaactatctgaacaggtgtatggatcaggagcgacttaggagagaaagtacatcccaaaaagagatggataaagcagagactaagacaaaaaaggctgctgagtcactgcgtcggtccgtcgaaaagtacaatagtgcaagagccgactttgaacaaaagatgcttgattccgctttgcggttccaggcgatggaagaaacccaccttaggcacatgaaagccctgctgggctcttatgcacatagcgtggaggacactcacgtgcaaattggccaggttcacgaggaattcaaacagaacattgaaaatgtgagcgtagagatgttgctgagaaagtttgccgagagcaaagggacaggacgcgagaagccgggacctctggacttcgaggcatattcagcggctgccttgcaggaggccatgaagcggctgcgtggtgctaaggcctttaggctgcctggcttgtctcggcgggaacgcgagccagagcctcctgccgcagtggatttcctcgagcctgacagcggcacctgccccgaagtagatgaggagggattcacagtcaggccggacgtaactcagaacagcactgccgagccctcacgcttcagctcaagcgacagtgattttgacgatgaggagccgcggaagttctatgtgcatataaagccggcaccggctcgtgctcccgcctgttctcctgaagcggccgcggcccagctgagagcaaccgcaggctccctgatcctgccccctggccctggcggtactatgaagcgccactcctcccgcgatgccgcaggcaaaccgcagagacctcgctccgcccctcgcacgagcagctgcgctgaaaggttacagtcagaggagcaggttagtaaaaacctatttggcccacctctggagagcgcttttgaccatgaggattttactggttcttccagcctcggctttaccagttctccttctcccttttcttcctcaagtcccgagaatgtggaagactcaggccttgatagtccttcacacgctgctcctggaccgagccctgatagctgggtgcctaggcccggtacgccacagtcacctccttcctgtcgcgccccaccacctgaagctcgtgggatccgcgcccctcccctgcccgactctcctcagccactggcgtcttcccccggcccttggggcctggaagcactggcaggaggtgacttaatgcccgccccggcagacccgactgctcgcgagggcctggccgcccctcctagacgcctgcgcagccgcaaagtgtcgtgtccattaacgagaagcaatggcgacctcagccgcagcctcagtccaagccccttgggcagctcagcggcatccactgccttagagcgaccctcatttctgagccagaccgggcacggggtcagccgcggccccagtcctgtagtccttgggtctcaggacgcactccccattgccactgcattcactgaatatgtacatgcctatttccgcggacatagtccttcctgcttagccagggttacaggagagcttacaatgaccttcccagctggaatagtaagggtcttctctgggactcctccaccccctgtcctgagttttcgactggttcatactacggctatcgagcattttcagcccaacgccgatttgctgttcagtgacccgtctcagtccgaccccgagactaaagatttctggcttaacatggccgctttaaccgaagccctacagaggcaggccgaacagaatccaaccgcttcttattataatgtggtactacttagatatcagttttctaggccgggcccacagtctgtgcccctacaactgtcagcacattggcaatgtggagcaactctgacgcaggtcagtgtggaatatggatatagaccaggagctaccgcagtaccaacaccgctgacgaatgtgcaaatcctcctgccggtgggcgagcctgtcacaaacgtccgcctacaacccgctgccacctggaacctcgaagaaaagcgactgacatggagactgcctgacgtttctgaggctggtggcagcggacgtctgtctgcttcatgggagcctctgagtggaccgagcacaccatcacccgttgctgcacagtttacaagtgagggcacgaccctctcaggcgtagatttagaactcgtcggctcaggatacaggatgagtttggtcaagcgaaggttcgccacagggatgtacctggtgtcctgctag

SEQ ID NO: 187725 - DNA, 2670 bp, synthetic construct
  misc_feature 1..2670: note = Description of Artificial Sequence: Synthetic coding sequence
  source 1..2670: mol_type = other DNA
atgagctacttcggcgagcacttctggggcgagaagaaccacggctttgaagtgctttaccattctgtcaaacaaggtcctatcagcacaaaggagcttgcagactttattagggagcgggccactatcgaggaaacctactccaaagccatggccaagctttctaagcttgcttctaatgggacacctatgggcacctttgctcccctatgggaagtgttccgggtgtccagtgacaagcttgccctgtgccatctcgagctcactagaaaactccaggatctgattaaggatgtgctcagatatggggaagaacagctcaagacacacaagaagtgcaaagaggaggtcgtttccaccctggatgctgtgcaagtcctgagtggggtctctcagttgttgcccaagagtagagaaaattacctgaacaggtgtatggatcaggagagactgagacgtgaatcaactagtcagaaggagatggacaaggccgagactaagactaagaaggctgctgaaagcctgaggagaagcgtggagaagtataattccgcgagagccgacttcgagcagaaaatgttggactccgccctgcggttccaggcaatggaagagactcacttacggcacatgaaggcactcctgggcagttacgcacactcagtggaagatacccacgtgcagattggtcaggtgcacgaagaatttaagcagaacatagagaacgtctctgtggaaatgctcctgaggaaatttgccgaaagtaagggaactggaagggagaaacccgggcccttggactttgaagcctattctgcagctgcattgcaggaagcgatgaaaagactgcggggagcgaaagcattccgattacccggactctctaggagagagagagaaccagagccaccagctgctgtggatttcttagagccagacagcggcacttgccccgaggtggacgaggaaggctttacagttcggccagatgtgacccagaattctactgcagagcccagcaggtttagtagcagtgactctgactttgatgatgaagaaccgcgcaagttttatgtgcatattaagcctgctcccgctcgcgctccagcttgcagccccgaagccgccgccgcccagctcagagctacagccggcagtcttatactcccacctggcccaggtgggaccatgaagcgccattcttctagggacgccgcagggaagccgcagcggccccgcagcgctcctcgtacaagttcttgcgccgaaagactacagtcggaggaacaggtgtctaaaaacctgttcggcccacctctcgaatctgccttcgatcatgaggactttacgggttctagtagtctgggatttacgagcagcccatcacccttttctagctccagtcctgaaaacgttgaagatagtggactggatagcccttcccacgcggcgcccggtccatcgccggactcttgggttcctaggccgggaactccgcagtctcccccctcttgtagagcgcccccccctgaagctagagggatccgggccccccctttgcccgactcgcctcaacctctagcttcctcaccaggaccttgggggctggaggcacttgctggcggggacctgatgcctgcccctgccgacccaacagctcgagagggcctggccgctcctcccaggcgtctccgaagtcggaaggtgtcctgcccattgacacgatctaacggggacctcagcaggagccttagcccttccccacttggtagcagtgccgctagcaccgcgctcgagcggccttcattcttgagccaaactgggcacggcgtatcccggggaccctcccctgtggtcttggggtctcaggatgccttgcccatcgccaccgccttcacagaatatgtccacgcatacttccgtgggcacagcccctcttgtctggctagagtaactggtgaacttaccatgacattcccggccggcatagtccgcgtgttctctggcacccctcccccacccgttctgtcctttaggctcgttcatactaccgccatcgagcactttcaaccaaacgctgacctcttgttttccgatcctagccagagcgacccagagactaaggacttttggttgaatatggctgcgctgaccgaggctctccaacgtcaggccgaacaaaatccaacagcctcctattataatgtggtgcttctgcgatatcagttttctagacccgggccgcagtcggtgcccctccagctgtcagcacattggcagtgcggcgcaacattgacgcaggtgagtgtagaatatggatatagacccggagctactgctgtccctaccccgttaacaaatgtccagattttgctgcccgtgggagagccagtcaccaacgtgaggctgcagcccgccgcaacttggaacctggaagagaagagacttacatggcgtctgcctgacgtttctgaggccggagggagtgggcggctgtctgcatcctgggagccactttccggaccaagtacaccatcacccgtagctgcacagtttacatccgaagggaccactctcagcggggtcgacctggaactggtcgggtctggctatcgcatgtccctcgtcaagagaaggttcgcaacaggcatgtacctcgtctcctgttag

SEQ ID NO: 187726 - DNA, 2670 bp, synthetic construct
  misc_feature 1..2670: note = Description of Artificial Sequence: Synthetic coding sequence
  source 1..2670: mol_type = other DNA
atgagctacttcggcgagcacttctggggcgagaagaaccacggcttcgaggtcttataccattccgtgaaacagggaccaatttctacaaaggagctggccgactttattagggaacgcgccacgatagaggaaacatacagcaaagccatggccaaactctccaagctggcctccaacggtacccctatgggcacatttgctccactgtgggaggtgtttcgcgtcagttctgataaactggccctgtgtcacttagagctcactaggaagctacaggacttgattaaggacgtactcaggtatggggaagagcagctaaaaacacacaagaagtgtaaggaagaagtggtttccaccctcgacgcagtacaggtgctctccggggtttcacagctgctgcccaaatcacgagaaaactacctcaaccgctgcatggatcaagaaaggttgcgacgtgagagtaccagtcaaaaagagatggataaggcagaaacgaagacaaaaaaagcggcagagtccctacggcgctcagttgagaagtacaattcagctcgcgctgactttgaacagaaaatgctggattccgctttgaggtttcaagcgatggaggagactcacttacgccatatgaaagcactgctggggtcatatgcccactccgttgaggatacccatgtgcagatcggtcaggtgcacgaggagttcaaacagaacattgaaaatgtgagtgttgaaatgctactgcgaaaattcgcagagtccaagggcacagggagggagaaaccaggccctctcgatttcgaggcttattccgcggctgctctgcaggaggcaatgaagagactgcgcggcgctaaggcctttcggttgccagggcttagccgcagggagcgagaaccagagccgccagctgccgtggatttcctggaacccgacagtggcacctgtcccgaggtcgatgaggagggctttacagttcgacccgacgttacgcagaattccaccgcagagcctagtaggttctccagttctgattccgattttgacgacgaggaaccacgaaaattctacgtgcatataaagccagcccccgcccgagcaccggcctgttccccagaagctgccgcggcgcagcttcgggccactgccggcagcctgatactgccacccggccctggagggaccatgaaacgccatagctcccgggacgcggcagggaaaccccagaggccgcgatccgcccctaggacgagttcatgcgcggaacggctccaatcagaggagcaagtgagcaagaacctatttggccccccactggaaagcgcatttgaccacgaggacttcaccggatcctcatccctcggatttacctccagcccttccccctttagcagttctagccccgagaatgtggaggactccggccttgacagccctagccatgccgcccctggtccttctcctgatagctgggtgcctcgcccaggcaccccacagtctcctcccagttgcagggctccacccccagaagctaggggcatcagagcccccccgctgcccgatagtcctcaaccactcgctagtagccctggaccatggggcctggaggctttggctggtggagaccttatgcccgcaccggcagaccccacggcaagggagggactcgccgcacctccgcggaggttacgctccaggaaggtgagttgtcccctgaccagaagcaatggggaccttagtcggagcctctcaccaagccctctcggtagtagtgcagcctctactgcactggaacgcccgtcatttcttagtcagactggccacggagtatcccgcggaccctcaccagtggtgctcgggtcacaagacgccctgcccatcgctaccgccttcacagaatatgtgcatgcatatttccggggacactctccatcatgcctggctagggtgacaggcgaactcaccatgacatttccagctggcatcgtccgcgtgttctcaggaactcctcctcctccagtgcttagttttagactagtgcacacgaccgctatagaacacttccagcccaatgcggatctgttgttctctgatccctcccagtccgaccctgagaccaaggacttctggttaaacatggccgctttaactgaagctctccagcgtcaggccgagcagaacccgactgccagttactacaatgttgtgttactccggtaccagttcagcaggccaggaccccagtcggttccactccaactgtcggcccattggcagtgtggcgctacacttactcaggttagcgtcgagtatgggtatagacccggggcgactgccgtccctaccccactcaccaacgtacagatcctcctgcccgtgggcgagccggttaccaacgtacgcctacaacctgcagcaacctggaatctggaggaaaagcgtttaacctggcgactgcctgacgtgagtgaggctggcggctcaggtcgcctgtccgccagttgggaacccctttccggcccctcaactccatcaccagtggcggcccagttcacttccgagggaaccaccctctccggggtggaccttgaactcgttgggagcggataccgtatgtccttggtcaaacgcaggtttgcaaccggcatgtacttggtgagctgctag

SEQ ID NO: 187727 - DNA, 1137 bp, synthetic construct
  misc_feature 1..1137: note = Description of Artificial Sequence: Synthetic coding sequence
  source 1..1137: mol_type = other DNA
atggtgatggcctacttcgtggagaacttctggggcgagaagaactccggctttgatgtgctgtatcacaacatgaagcacgggcagattagtactaaagagctggccgacttcgtgcgagaaagggcgaccatagaggaagcatatagcaggtccatgactaagctcgctaaatcggcttctaattactcacagctaggcacatttgcgccagtctgggatgtctttaagacatctaccgaaaagttagccaactgtcaccttgatctggtgcgcaaactgcaggagctaattaaagaagtccagaagtatggtgaggagcaggttaagtcacataaaaagaccaaagaggaggttgccggaaccctggaagccgttcagactatacagtccataacccaggctctgcagaaatctaaggagaattataacgccaaatgtgtggaacaagaaaggttgaagaaggaaggtgccacacagcgggagatcgaaaaggccgccgtgaagtccaaaaaggccaccgacacgtacaaattgtacgtcgagaagtatgccctggccaaggctgacttcgaacagaagatgaccgagactgctcagaagttccaggatattgaagagactcacctgattcacattaaagaaatcattgggagcttgagtaacgccattaaggaaatacacctccagattggacaggtccatgaggaattcatcaataatatggctaacaccactgttgagtcgctgatccagaagttcgccgagtcaaagggtaccggaaaagagcgccctggtctgatcgaattcgaggaatgcgatacagcctctgcagtggagggcataaaaccacgcaagcgcaaaactttcgctctcccgggtattataaaaaaggagaaggacgccgaaagcgtgtggtctttcactgtggtggcccaagtgggaatgcagtggcgcgacctgggcctgctgcatagtcctccccccaggttcaagcgttttagttcctacctgtccttaccgagtagctggaattatggggcacatcaccacatctggcttatcttttgcatattcagccgagacagagtgagcccttactggccaggttggtctcgcactcccgacctgcgatag

SEQ ID NO: 187728 - DNA, 2433 bp, synthetic construct
  misc_feature 1..2433: note = Description of Artificial Sequence: Synthetic coding sequence
  source 1..2433: mol_type = other DNA
atggtgatggcctacttcgtggagaacttctggggcgagaagaacagtgggttcgatgtgctctaccataatatgaaacacggtcagattagtactaaagaattagcagactttgtgagggagagagcaacaatcgaagaagcttactcccgatctatgaccaagctggcgaaatctgcatccaactatagccagctcggcaccttcgctcctgtgtgggatgtgttcaagacaagtaccgagaaactcgccaattgccacctggacctggtcagaaaactacaggagctcatcaaggaggtccagaagtatggggaagagcaagttaagagtcacaagaagacaaaagaagaagtggccggaactctggaagcagtgcaaaccatccagagcatcacccaagcgctccagaagagcaaggagaactataatgcaaagtgtgtggaacaggaaaggctcaagaaggagggagccacccagagagaaattgaaaaggccgccgttaagtcaaagaaggccaccgatacatacaagctctatgtcgaaaaatacgctctggctaaggccgacttcgagcagaagatgaccgagacagcgcagaaattccaggatatagaagagacacacttaatccacattaaagagatcatcggtagcctgtcaaacgcaatcaaggagatccatctgcagatcgggcaagtgcacgaagagtttattaataatatggcgaacacaaccgtggagagccttatccagaagttcgccgagagcaagggtactgggaaggaacgccctggactgattgagtttgaggagtgtgacacagcctctgcagtggaggggataaaacctcggaaaagaaaaacctttgcccttcccggtatcataaaaaaagagaaagacgccgagagtgtggagtgtcccgacgctgacagcctgaacattcctgacgtcgacgaagaagggtatagcatcaaacccgagacgaaccagaacgacacaaaggaaaaccacttttactctagcagcgatagcgattcggaagacgaggagccaaaaaaatacaggatcgaaattaaacccatgcatccgaacaactcacatcacacaatggcttcactggatgagctgaaggtcagtatcgggaatattaccctgagccctgccatcagcgtcagtaccaatacccgcctcaataggaattttaacgacgaagaattgaccaaaagcaagccatccgccccgcccaacgaaaagggcacatcggacctcctagcctgggatccactgttcgggccctcgctggatagctctagctcctctagtctgaccagttcttctagcgcacgccccacaaccccactgagcgtgggaacgatagtgcctccccccaggcctgcctctagacccaaacttacgagcggcaagctgagcggcataaatgagatccctcgtcccttcagtccaccagtcaccagtaacacgtctccaccacctgccgcccctctggcacgggctgaatcctcatcctctatttctagctccgctagcttgagtgccgccaatactccgaccgtgggggtgagtcgtggtccatcccccgtttcactgggtaaccaggatacactgcccgtcgctgtggctttgaccgagagtgtgaatgcctacttcaagggggccgacccaacgaagtgtatcgtaaaaattaccggtgatatgactatgagcttcccttcaggcatcataaaagtgttcacaagtaatcctacacctgcggtcttatgtttcagggtgaaaaacatcagcagactggagcagatcctgcctaacgctcagctcgtgttctccgacccttctcagtgcgacagcaacacgaaggacttttggatgaacatgcaagcggttaccgtgtacctgaaaaaactctcggagcagaatcccgcagcatcctattacaatgttgacgtgcttaagtatcaagtctctagcaatgggattcagtccacacctttaaacctggccacctattggaagtgtagtgctagcaccactgacctgcgtgttgattacaagtataatccagaagccatggtggccccttcagtgctgtcaaatatccaggtggtggtccccgttgacggaggcgtgacaaacatgcagtcactgccccccgctatttggaatgctgaacagatgaaggcattctggaagttatcaagtatctctgagaagagcgagaacgggggctcagggagcttaagagcaaagttcgatctgagcgaggggccatccaaaccaactacactcgccgttcagttcctgtcagaaggatcaactctgtctggagtggacttcgaacttgtgggaaccgggtaccggctgtctttaatcaaaaaacgttttgccacgggcaggtatcttgctgattgttag

SEQ ID NO: 187729 - DNA, 2433 bp, synthetic construct
  misc_feature 1..2433: note = Description of Artificial Sequence: Synthetic coding sequence
  source 1..2433: mol_type = other DNA
atggtgatggcctacttcgtggagaacttctggggcgagaagaactccgggtttgacgtcctctatcacaacatgaaacatggacagatttctactaaggagctggccgatttcgtccgggaacgcgctaccattgaggaggcgtactcccggagcatgactaagctggccaagagcgcctcaaactattctcagctgggtacctttgcccccgtgtgggacgtatttaagacttcaacagagaaactcgcaaactgccatctcgacttagttcgaaaacttcaggaattgatcaaggaggtccaaaaatatggcgaggagcaggttaagtcgcataaaaaaactaaagaagaggtcgctggtaccctggaggcagtccagaccatccagtcaatcacacaagctctgcagaagtctaaggagaattataacgccaagtgcgtcgagcaggagcgactgaagaaagaaggcgccacgcagcgagagatagaaaaggccgctgtgaagagtaagaaggctacagatacatacaaactgtatgtggagaaatacgcgctggctaaagccgattttgagcagaaaatgaccgaaaccgcccagaaattccaggacatcgaggagactcacctgatccacatcaaagaaattattggttccctgtctaatgccataaaggaaattcacctgcagataggacaggtccacgaagagttcatcaataatatggctaacaccacagtggaaagcttaattcagaaattcgctgagtctaagggcacaggaaaggaaagacccggcctgatcgaattcgaagagtgtgacacagccagcgcagtggaaggcattaagcctcgcaaaaggaagacgttcgctctcccaggtataattaagaaagaaaaggacgctgaaagcgtcgaatgtccagatgcggattcactcaatattcctgatgtggatgaggagggttacagcattaaaccagagactaatcaaaatgacacaaaagaaaaccatttttactcctccagcgacagtgactcagaagatgaagaacccaagaagtaccgaattgagatcaagcctatgcacccaaataactctcaccataccatggcctccctagatgagcttaaggttagcataggtaatatcacgttgtctccagctatttcacgtcactcacccgtccaaatgaaccgaaacctctccaatgaagagctgaccaagagcaaaccttccgcccctcctaacgagaaggggacaagcgatctgttggcttgggatccactattcggcccgtccctggacagtagctcatcaagctctctgactagttcaagctctgctcgccccactactccactctctgtgggcacgatcgttcccccaccacggcccgcttctaggcctaaactgacttcaggcaagctttccgggattaacgagatcccgcgccctttcagtcctcctgttacctctaacacgagccctccccccgccgcccctttagcccgcgcggagtcatcttcttccatcagtagttcagctagcctcagcgcagctaacactcccacggtcggagtcagccgtggccccagtccagtctcattaggcaaccaggacaccttgcccgtcgctgtcgctctaacagaaagtgtgaatgcctactttaaaggcgctgacccaaccaaatgtatcgtgaagatcaccggagacatgaccatgtcttttccgtctgggatcatcaaggtgtttacaagtaacccaacacccgccgtactgtgctttagggtcaagaacatttccagactggagcaaatcttgcccaacgcgcagctggttttcagcgacccctcccagtgcgatagcaataccaaggacttctggatgaacatgcaggctgtgaccgtttacttgaagaagctgtctgagcagaacccggcagcaagctactataatgtggatgtactgaagtaccaggtctcttccaacggcattcagagcaccccgctgaatttggctacgtactggaagtgttctgcatccaccacagacctgagggtcgactacaaatacaatccggaggctatggtcgctccctccgtcctatcaaacatccaggtggtagttccagtcgacggaggagtcacaaacatgcaatctctgccaccggctatatggaacgcagagcagatgaaagccttctggaaacttagcagcattagcgaaaagtctgaaaatgggggctctgggtcactgagagctaagttcgacctgtcagaggggccaagcaagcctaccaccctggctgtgcagtttctgtcagagggaagcaccttgagtggagttgatttcgaactagttggcaccggttataggctatctttaatcaagaaacgctttgccactgggcgttatttggcggactgttag

SEQ ID NO: 187730 - DNA, 2334 bp, synthetic construct
  misc_feature 1..2334: note = Description of Artificial Sequence: Synthetic coding sequence
  source 1..2334: mol_type = other DNA
atggtgatggcctacttcgtggagaacttctggggcgagaagaactccggattcgatgttctgtaccacaatatgaagcacggtcagatttccacgaaagaactagctgacttcgtgagggaaagggctactatcgaagaggcttatagccggtcaatgacaaagctcgctaaatccgccagcaattacagtcaactcggcacattcgcgcctgtgtgggacgtgttcaagacatccacagagaagctggccaattgccacctggacttagtaaggaagttacaggagttaatcaaggaagtacagaaatacggagaggaacaagtgaaaagccataagaaaacaaaggaagaggtagctgggacattggaagctgttcagactatccaatctatcacccaagctctgcagaaaagcaaggaaaactacaatgcaaagtgtgttgagcaggaaaggctcaaaaaggagggggctacccagagagagatagagaaagctgcggtgaagtccaagaaagcgacggacacttacaagttatacgtggagaagtatgcccttgctaaagccgacttcgagcagaagatgacagagaccgctcaggttcatgaggagttcattaacaatatggctaatactacagtggaatcactgatccagaagttcgctgaatcgaaaggaactgggaaggagcgccctggcctgattgaattcgaggagtgtgacaccgcttctgccgttgagggcatcaaacccagaaagcggaagaccttcgcactgcctgggatcatcaagaaggagaaggatgccgagagcgtcgaatgtccggatgctgattcactgaatatacccgacgttgacgaggaaggttactctattaagccagagacgaaccaaaacgacacgaaggagaaccacttctattcgagctctgattccgacagcgaggatgaggagccaaagaaatatcgcattgaaatcaaaccgatgcatcctaacaactcccatcacacaatggcctccctggatgagctgaaggttagcattggtaacatcaccctgtccccggccatctccagacacagccccgttcagatgaataggaacctttctaacgaggagttgacgaagagtaagccaagcgctccacctaatgagaagggtacctcagacctactggcctgggaccccctgttcgggcctagtctcgacagcagcagcagtagctcactgacaagttccagctctgccagacctaccacacccctatcagttggtacgattgtgcctcctccacggccagctagcagacccaagcttacaagtggaaaactgtctgggattaatgagatacctagacccttctcaccacccgtaacctccaatacatcccccccaccggctgccccgctcgctagggcagaatcatccagcagtatcagcagttcagcctccctttctgctgccaatacacccacagttggcgtctcaagagggcccagcccggtctccctcggtaaccaggatacattgcctgtggctgttgccctaacagaatctgtgaatgcatacttcaaaggagccgaccctaccaagtgtattgttaagatcacaggagatatgaccatgtccttccccagcggaatcattaaagtatttacatctaaccccacacccgccgtactctgtttccgggtcaagaatatttcaagacttgagcagatactgcccaacgcacaactcgtttttagcgacccttcccagtgtgacagtaacacgaaagacttttggatgaacatgcaagcagtcacagtctacctcaaaaagctttctgaacagaacccggccgctagttactataacgtagatgttctcaaatatcaagtgtcctcaaatggcatccaatccacaccccttaatctggctacatattggaaatgtagtgcctctaccacagacttacgagtagattacaagtataaccctgaggcaatggtggccccaagcgtcctctcaaatatccaggtcgtcgttcctgtggacggcggggttaccaacatgcagagtctgccccctgctatttggaatgccgaacagatgaaggcgttttggaaattgtcttcaatctcggaaaagagcgaaaacggcgggagcggcagtttaagagctaagtttgacctctctgagggccccagcaagcccaccacccttgccgtgcagtttctgtcagaaggcagtacactgtcaggtgtcgactttgagctggtgggcactggatatcgcctctctctcatcaaaaaacggttcgccacgggccgctatctagccgactgctag

SEQ ID NO: 187731 - DNA, 1668 bp, synthetic construct
  misc_feature 1..1668: note = Description of Artificial Sequence: Synthetic coding sequence
  source 1..1668: mol_type = other DNA
atggcccggcccgacgacgaggagggcgccgccgtggcccccggccatccactggctaagggatacctgcctctgccgaggggggcccctgtagggaaagaatcggtggaattacaaaatgggcctaaagctggcacgttcccggttaatggtgccccccgtgatagcctggcagctgcaagcggcgtcctcgggggcccacagactccactggctcccgaggaagagacccaggccaggctcctgccagcgggagctggtgctgagacccccggggccgaaagctcccccctgccgctaacagccctttctccgcgccgctttgtggtgttgcttattttttcactttattcactggtcaatgcattccagtggatccagtatagcattatatcaaacgtgtttgagggcttttacggcgtcactctgctgcacattgactggttgagcatggtttacatgctggcctacgtgccgttgatctttcctgcaacttggctgttggatacccgtgggctccgcctcacagcccttctggggagcggactgaattgcctgggtgcctggatcaaatgtggttcagtacagcagcatttgttctgggtaaccatgttggggcagtgcctttgctctgtggcacaggtttttatacttggactcccctctcgaattgccagtgtctggttcggccctaaggaagtgagcacagcctgtgctacagctgtcttgggcaatcagctcggaaccgcagtgggctttctgcttcctccagttctggtgcctaatacgcagaacgacacaaatctgctggcctgtaatataagcactatgttctacggtacgtctgctgtagccactttactcttcatcctcactgctatagcatttaaggagaaaccacggtatcctcccagtcaggcccaagcagccctccaggattcaccaccagaggaatactcttataagaagagcatcaggaacctgttcaagaacatcccctttgtgctgcttcttattacctacgggatcatgacgggtgccttctattccgtgtccactctgctgaaccagatgatccttacctactatgagggagaggaggtcaatgctggacgaatcggcttgaccctagtggtcgcgggcatggtcgggtccattctgtgtggcctatggctggattacacaaagacctacaagcagacaactttgatcgtctacatattgagttttatcgggatggtgatcttcacgttcacactggatctgaggtacatcataatagtttttgttacaggtggtgtcctgggatttttcatgaccggttatttgcctttagggttcgagtttgcagtagagattacgtatcccgaaagcgaggggactagttctggactgctgaacgccagtgcacagatcttcggcatactgtttacactggcccagggaaagctgacttccgattacgggcctaaggctggaaacattttcctgtgcgtatggatgttcattggcattattctgacagcattgattaaatctgatctgcgccgccacaatatcaacatagggatcaccaatgttgacgtgaaagctattcccgcggattcccccactgaccaggagcctaagactgtgatgctcagcaaacagtcagagagtgcgatatag

SEQ ID NO: 187732 - DNA, 2469 bp, synthetic construct
  misc_feature 1..2469: note = Description of Artificial Sequence: Synthetic coding sequence
  source 1..2469: mol_type = other DNA
atgggcttcggcagcgacctgaagaacagccacgaggccgtgctgaagctgcaggattgggagctccgtctgctcgaaacagttaaaaagttcatggccctgagaattaagagcgacaaagagtatgcctccacgctacaaaacttgtgcaatcaagtagacaaggaaagtacagtgcagatgaactacgtgtccaatgtgtcgaaaagctggttgctgatgatccaacaaactgagcagctgagccgaattatgaaaacccacgctgaggacctgaattctggaccccttcaccggttgaccatgatgattaaggacaaacagcaggtgaagaaaagctatataggggtccatcagcaaatagaagccgagatgatcaaggttactaaaacagagctggaaaaactgaagtgtagctatcggcaattaattaaagaaatgaactcagctaaggagaaatacaaggaggcacttgccaaggggaaagagacggaaaaagcaaaggagcgatacgataaggccactatgaagcttcatatgctgcataatcagtatgtcctggccttgaaaggggcacaattacaccagaaccaatactacgacattaccctcccactgctgctggacagtctgcaaaaaatgcaggaggaaatgatcaaggcactgaaagggatatttgacgaatattctcagatcaccagtctggttaccgaggagattgtcaatgttcataaggagattcagatgtctgtggagcagatcgaccccagcactgaatacaacaattttatcgatgtccatcgaacaaccgccgccaaggagcaggaaattgaatttgacacctcgcttctggaagagaatgagaacttgcaggcaaacgagatcatgtggaacaatctcaccgccgaaagccttcaggttatgctgaagacgttggccgaagaactaatgcaaacacagcaaatgttgcttaataaggaagaagcggtattagagctggagaagcggatcgaagaaagcagtgagacatgtgagaagaagtctgacattgttctgctgctatctcagaagcaagcactagaggaactgaagcaaagcgtccagcagctcagatgtaccgaagcaaagtttagcgcccaaaaggagttattagaacagaaggttcaggagaatgatggcaaagaacccccacctgtggtcaattatgaggaggacgcgcgttctgttaccagtatggaaaggaaagagcggctatcgaaatttgagagtattaggcactccattgctggaattatcagaagccctaagtccgctcttggatcttctgccctatcggatatgatttccatctcggagaagccactcgctgagcaggactggtatcacggggctataccccgtatcgaggcacaggaactcctcaaaaagcagggggatttccttgtacgcgagtctcatggaaaaccaggagaatacgtccttagtgtttattctgatggccagcgcaggcacttcattattcaatacgttgacaacatgtacagattcgaagggaccggtttctctaatatcccacagctgatcgaccaccactatacaaccaaacaagtgatcactaagaagtcgggcgtggtcctgttgaaccccatcccaaaagacaaaaagtggatcctgtcccacgaagatgtcatcctgggggagcttctcggtaagggcaactttggggaagtgtataaagggaccttgaaagataagacatctgtagcagtgaaaacttgcaaagaagacttgcctcaagagctgaaaatcaaatttctgcaggaggccaagatacttaaacagtacgaccaccccaacatcgtgaagctgattggagtctgtacacagaggcagccagtttacattatcatggaacttgtctcaggcggcgatttcctgacatttctgagacgaaagaaagatgagttgaaactgaaacagttggtgaagttctctctggacgccgctgccggtatgctgtacctggagagcaaaaactgcatccacagagaccttgccgctcgcaattgtctcgttggcgagaacaatgttttaaaaattagtgacttcggaatgagccgtcaggaggacggcggagtttattcctcatctggcctgaaacagatcccgatcaaatggaccgccccggaagcattgaactacggcagatactcaagcgagtctgatgtctggtcctttggcatcctcttatgggaaactttttctctaggcgtctgcccatacccaggcatgacgaaccagcaggccagggagcaggtggaacgagggtaccgcatgtccgcaccccagcactgtcctgaagatatcagcaagatcatgatgaaatgttgggattataagccagaaaatcgtccaaagttctcagagcttcagaaagagcttaccattatcaagcgtaaactgacttag

SEQ ID NO: 187733 - DNA, 1944 bp, synthetic construct
  misc_feature 1..1944: note = Description of Artificial Sequence: Synthetic coding sequence
  source 1..1944: mol_type = other DNA
atgaagctgcacatgctgcacaaccagtacgtgctggccctgaagggtgctcagcttcaccagaaccagtactacgacatcaccctgcctctactgctggattcccttcagaaaatgcaggaggagatgatcaaggcactgaaaggaattttcgatgaatacagtcagattacgagtcttgtaacggaagagatagtcaatgtgcacaaggagatccagatgtcagttgagcagatcgatccatctacggaatacaacaattttatcgacgtccataggacaacagccgctaaagaacaggaaatcgaattcgatacctcactgctggaagaaaatgaaaacctgcaggccaacgagattatgtggaataacttgaccgccgaaagtctgcaggtcatgcttaagacgctggctgaagagctcatgcagacccagcaaatgctcctgaacaaagaagaggcagtactggagttagagaagcgaatagaggagtcatctgaaacctgcgagaaaaaatccgatatcgtactgctgttgtcacaaaagcaggccctggaagaactgaagcagagtgttcagcaactcagatgcacagaagccaaatttagtgctcagaaagaactgttggagcagaaggtgcaggaaaacgatggaaaagagcccccgcctgtcgttaactacgaagaggacgccagatcagtgaccagtatggagaggaaggaacgtctaagcaagttcgagtccatacgccactcgatcgccggcattatccggtcccctaaaagcgcactcggctccagcgctcttagtgacatgatctccattagcgaaaagcctttagccgagcaagactggtaccatggcgcaattccccgcatcgaagcacaggaactcctcaaaaaacagggggatttcctggtaagggaaagccacggcaaacctggtgagtacgtactgtcagtgtattccgacggacagcgccgccattttatcatacagtacgtggacaatatgtatcgctttgagggcactggtttctccaacatacctcagcttatcgaccatcattacacaacaaagcaagtcatcaccaagaaatctggagtggtgctgttaaatcccattcccaaagataaaaagtggatcctgagccacgaagacgtgatattaggcgagctactgggaaagggcaattttggagaagtgtacaaagggactcttaaggacaaaaccagcgtcgcagttaaaacctgcaaggaagacttgcctcaggaactaaagataaagttcctgcaggaagcaaagatcctgaaacagtacgatcatcctaatatcgttaagttgattggcgtatgcacccagcgacaaccagtgtacatcatcatggagctggtttctggcggagactttctcacctttttgcggcggaaaaaggatgaattaaagctcaagcaactggtcaagttcagcctcgatgccgcggccggaatgctatacttggagtccaaaaactgtatacacagagacttggccgcacgaaattgtctggtgggggagaacaacgtcttgaaaatctcggactttggtatgtctagacaggaagacggcggtgtgtattctagtagcgggttgaaacagatccccattaaatggacagcgcccgaggctctaaactacggacgatactcatcagaaagtgatgtgtggtcttttgggatcctgctgtgggaaactttctctctgggggtgtgtccatatccaggaatgaccaatcagcaggctagagaacaggtggagcgaggctataggatgtccgctcctcagcattgcccagaggatatcagcaagattatgatgaaatgctgggactacaaacccgagaaccgacctaagttctctgaactccagaaggaactaaccattatcaagagaaaattgacctag

SEQ ID NO: 187734 - DNA, 981 bp, synthetic construct
  misc_feature 1..981: note = Description of Artificial Sequence: Synthetic coding sequence
  source 1..981: mol_type = other DNA
atgggcttcggcagcgacctgaagaacagccacgaggccgtgctgaagctgcaagattgggagctccgcttactggagactgtgaagaagtttatggccctgagaatcaagagcgataaagaatacgccagtaccctgcagaatctttgtaatcaagtggataaggaatccactgttcagatgaactatgtctccaatgttagcaagagttggctacttatgatccaacaaactgagcagctcagtcgcatcatgaaaactcatgccgaggatctcaactcgggtcctctccatcgactcacgatgatgatcaaggataaacaacaagtgaaaaagtcctatataggggttcatcagcagatcgaagcagagatgattaaagtgacgaagactgaactcgagaagctgaagtgcagctaccgccagctgattaaagaaatgaacagtgctaaggagaagtataaggaagctctggccaagggaaaagaaaccgagaaggcaaaggagagatatgataaggcaacaatgaaactgcatatgttacacaatcaatacgttctggcactcaagggggcacaattacaccagaaccaatattacgatatcacgctgcctctgcttctcgattctctgcaaaaaatgcaagaagagatgattaaagctctgaaaggcatctttgacgagtattctcagattaccagcttagtaacagaggaaattgtcaatgtccacaaagagatacagatgtcagttgagcaaattgatccttccaccgagtataataacttcattgatgttcacagaactacagccgcaaaagaacaggagatagaatttgataccagtctgctcgaagaaaatgaaaatctccaggccaacgagataatgtggaataacttaacggctgaatctttgcaagtcatgaaagagcgccgcgggtatccgaatctgaatttattcgtgatacagctcctggaatag

SEQ ID NO: 187735 - DNA, 3855 bp, synthetic construct
  misc_feature 1..3855: note = Description of Artificial Sequence: Synthetic coding sequence
  source 1..3855: mol_type = other DNA
atgcacgtgttcatcgtgggcatgagcctgagcagcgtgaccctggcctctgcccttcaggttaggggggaggctctgtcagaggaggaaatctggtctctgctctttctcgccgctgaacagctgctcgaagacctgagaaatgactcaagcgactacgtagtctgtccttggagcgctttattgagcgctgcaggatccctctcattccagggccgagtttcacatatcgaggcagctccattcaaagcacctgagctcttgcaaggccagtctgaggacgagcagcctgacgcttcgcaaccactgcagctgtgtgaacctctacatagtatccttctaacaatgtgcgaggaccagccccaccgacgatgcaccctccagtcggttctagaggcttgccgggtacacgaaaaagaagtgtcggtttaccccgcccccgctggacttcacattaggaggttggtgggcctcgtcctggggaccatttccgaagtcgaaaagagggtggtggaagagtcatctagtgtccagcagaacaggtcatatctcttacgtaagcgattgcgcggcactagtagtgaaagtcccgcggcccaggcaccagaatgtctgcacccatgccgcgtgagcgaaaggtctacagagacccagtcttctcccgagccacattggagcacattaacacacagccactgctcactgcttgtgaaccgtgccctgcccggggccgatcctcaggatcagcaggcaggacgacgcctaagttctggctccgtccacagcgccgccgattccagttggccaacgacaccttcacagcgggggttcctccaacgaaggagcaagttctctagacctgagtttatactgttagccggggaagctcctatgaccctgcacctcccagggagcgtggtgactaaaaagggcaagagctacctggcactgagagacctgtgtgtggtccttctgaacgggcaacacctcgaagttaaatgtgacgtggaaagcacggtgggagcagtgtttaatgctgtcactagcttcgctaatctggaggagctcacctattttgggttggcctacatgaagtccaaggaattttttttcctggattcagagacgcgcctctgtaagatagccccggagggatggagagagcagcctcagaagaccagtatgaataccttcaccttatttctgcgcattaagttcttcgtttcccactatggcctactacaacacagtttgaccagacatcagttctacctgcaactcaggaaagatattctggaagagagactctattgcaatgaggaaatcttattacaattaggagtgctcgccctccaggcagagttcggcaactacccaaaagaggttgaatccaagccctacttccatgtcgaggactatatccccgcttcacttatagagagaatgaccgcgctaagagtgcaggttgaggtgagcgagatgcacagattatcttctgccctgtggggagaagatgctgaactgaagttcctacgggttactcagcagttgcccgaatacggggtactcgtacatcaggtgttctccgagaagcgacgccccgaagaggagatggcactgggaatatgcgccaagggtgtgatcgtttacgaagttaagaacaattcacggatagccatgctgcgctttcagtggcgggagacaggcaaaatttcaacttatcagaaaaagttcaccatcacatcctcagtgacgggaaaaaagcacacctttgtgacagactccgctaagacttccaaatatctgctggacctttgcagtgcgcagcatggcttcaatgcgcagatgggatctggtcaaccttcccatgtgctctttgaccacgacaagtttgtgcaaatggctaacttatctccagctcatcaggcacgttctaagcccctcatctggattcagagactgagttgctccgaaaacgaacttttcgtgtctagactgcagggggctgccgggggcctgctttccacgtctatggataactttaatgtggatgggtctaaagaggctggcgcagaagggataggccggtctccatgtactgggcgggaacagttgaagagcgcttgcgttatccagaaacccatgacatgggactcactgtctggccctcccgtgcagtctatgcacgccggttcaaagaataaccgcagaaaaagctttatcgctgaaccaggtcgtgagatcgttagggtcacactgaaaagggacccccaccgaggttttgggttcgtgataaacgaaggcgaatactctggccaggccgatccaggcatattcatctcctcaatcattccaggcggacctgccgaaaaggccaaaaccatcaagcctggcggacagatcttggcattgaatcacattagcctggagggattcactttcaacatggcggtccggatgatccagaattctccagataacattgagttaattattagccagtcgaaaggggtgggggggaacaatccagatgaggagaagaatagcactgctaattcaggcgtctcatcaactgatattttgagctttggttaccaggggtcattattgtcccatacacaggaccaggatcggaacaccgaggagctggacatggccggtgttcaatcactggtcccccgcctgagacatcagctgtcattcttgcccttaaagggcgccggatcatcctgccccccttctccgccagaaattagcgccggcgagatctacttcgtggaactcgtgaaagaggacggaacactgggcttctcagtaactggggggattaatacatctgttccctacggaggcatctacgtcaagtcaattgtgcccggaggcccagccgcaaaggaaggacagatattacagggggaccgtctgctgcaagttgatggagttatcctttgcgggctaacccataagcaggccgtccagtgcctcactggacctgggcaagtggccagactggtcctggaacgcagagttccgcggagtacccaacaatgtcccagcgccaatgactcgatgggggatgaaagaacagctgtgagcctcgttaccgcattgcccggcaggcctagcagctgcgtatccgtcactgatgggccgaagttcgaggtaaagttaaaaaagaatgccaatgggctgggtttctccttcgtgcagatggaaaaagagtcctgctcacacctgaagagcgatctcgtccggattaaaagacttttccctgggcagcccgccgaagagaatggcgctatcgccgctggggacatcatcctggccgtcaacgggcgctctaccgaaggacttattttccaggaagtactgcatctgctccgtggcgcaccgcaggaggtgacactgctactctgtcggccaccaccgggcgcgttgccagaactggaacaagagtggcagacgccagagctttccgctgataaggaattcactagagctacttgcaccgattcctgtacctcaccaattctggaccaggaagatagctggagagattccgcttcgcccgacgccggcgaagggctcggactcagaccggagtcttctcaaaaagccatccgcgaggctcagtgggggcaaaaccgcgagagaccttgggcgagttcactcacgcactctcccgagagccatccccatttgtgcaaactccatcaagagcgcgatgaatcgacactggctacctctcttgaaaaggacgtaagacaaaattgttatagtgtttgtgacatcatgcggctaggcagatattctttctcctctcctttgaccagattgagcacagacatcttctag

SEQ ID NO: 187736 - DNA, 3930 bp, synthetic construct
  misc_feature 1..3930: note = Description of Artificial Sequence: Synthetic coding sequence
  source 1..3930: mol_type = other DNA
atgcagcccctgaccaaggacgccggcatgagcctgagcagcgtgacactggctagcgcgctacaggtaagaggggaagccttgtctgaggaagaaatctggagtctcctgtttctcgctgccgaacagctgcttgaagacctcagaaatgattcatccgattacgtggtttgtccatggtctgcactcctgagcgcggcgggaagcctctctttccagggacgagtctcgcatattgaggccgcgccttttaaggctcctgaattactgcaggggcaatccgaggatgagcagcccgatgcatctcagatgcatgtctacagtctcgggatgacactgtactggagcgccggatttcacgtgcccccccaccagccattgcaattatgcgagcccctccactccattctactgactatgtgtgaagaccagccacaccggcgctgcactctgcagtcagttctggaagcatgtcgggtacacgaaaaagaggtttcagtctaccccgcacccgccggcctgcatattagaaggctcgtcggtcttgtgctcggaacaattagcgaagtcgagaagagagtggtggaggagagctcctcagtacagcagaatcgctcctatctgctgcggaaacggctgcggggaacaagtagtgagagtcctgctgctcaggctcctgagtgtctgcacccgtgcagggttagcgaaaggtctactgagacacagagcagccccgaaccccactggtctacactgacgcactctcattgttctctgctggttaatcgtgcacttccaggtgcagaccctcaggatcaacaggcaggaagacggctgagcagcgggtcagtgcactccgccgccgactcctcgtggcctactactcctagtcagcgcggcttccttcagcggaggagtaaattctcccgcccagaattcattctgctggctggagaggcaccaatgaccctccacctcccaggctcagtggtcacaaagaagggcaagagctatctagcccttcgcgatctgtgtgtggtgctgcttaatgggcagcatctagaggttaagtgcgatgttgaaagcacagtgggagccgtgtttaatgcagtcacttccttcgccaacctggaggagctgacctattttggacttgcctacatgaagagtaaggagttttttttcctagactcggagacgcgcctgtgtaagattgccccagagggatggcgcgaacagccccagaagacctccatgaatacctttacactcttcctcagaattaagttctttgttagccactacgggttgctacagcattccctaacaagacatcagttttaccttcagctaaggaaggatatattggaggaaaggctctattgtaatgaggagattctgttgcaattgggagtgttagctctccaagccgagtttggaaactatcctaaagagcaagtggaaagcaagccttacttccacgttgaagactacatacctgcttcacttatcgaaaggatgacagccttgcgcgtgcaggttgaagtctcagagatgcaccggctcagcagcgctctctggggggaagacgccgaactcaagtttctgagggtgacgcagcaactgcccgagtatggcgtgctggtccatcaggtttttagtgagaaacgacggccagaggaagaaatggccctgggcatctgcgcaaaaggagtgatcgtgtacgaagtcaagaataactctcgtatcgcaatgttgcgctttcaatggagagagacgggaaagatttccacttaccaaaaaaagtttacaatcacctcttccgtgacggggaaaaagcacacgtttgtgacagacagcgcaaagacctctaaatacctgcttgatctgtgctctgcgcagcacggcttcaatgctcagatggggtctgggcagccctctcacgtgctgttcgaccacgacaaatttgtgcagatggctaaccttagccccgcccatcaggccagatcgaaaccactcatttggatccagcgtctatcatgtagtgaaaacgagctgttcgtcagcagactgcagggagctgccggggggctgttgtcaacatccatggacaatttcaatgtggatggctcgaaggaagcaggggctgaagggataggcagaagcccgtgcactggacgagaacagttaaagtcagcctgcgtgatccagaagccaatgacatgggatagtctgtctggaccccccgtccagagtatgcatgcaggctcaaagaacaatagacggaaatcttttatagcagagcctggcagggagattgtgcgggtcactctgaagcgtgacccccaccggggtttcggttttgtgattaatgagggcgaatatagtgggcaagccgatccagggatattcatttcttcgatcattcctgggggtccggccgaaaaagccaagacgataaaacctggggggcagatcctagccttaaatcatattagtttggaaggattcactttcaatatggcagtgcggatgatccaaaattcacctgacaatatcgaactcattatcagccagtctaagggggtcggcggtaacaatcctgacgaggagaagaattcaacagcaaactcaggcgtttccagcacggatattctgtcctttggttaccaggggtcccttttgtcacatacccaggatcaggaccggaacacggaggagttggacatggcaggcgtccagtccctggtcccccggctgcgtcatcagctgtcgttcctcccactgaaaggggccggctcatcgtgtcccccgagcccccccgagatctcagctggtgaaatttactttgtagaattagtgaaagaggacgggacactgggcttttccgtcacagggggcattaacacctccgttccctatggaggcatctacgttaaatccatcgtaccaggtgggcccgctgcaaaggagggacagattctccagggcgataggttgctacaggtggatggtgtaatcctctgcggcctcacccacaaacaagcagttcaatgcttgactggccctggccaggtcgctcggctggtgctcgaacgaagggtacctaggtctactcagcagtgcccatcagccaacgattccatgggagacgagagaaccgctgttagcctggtcacagcccttcccgggaggccatcctcttgtgtgagcgtcaccgacggacctaagttcgaggtgaagctgaagaagaacgccaatggcctgggtttttctttcgttcagatggaaaaggagtcctgctcccatttaaaatccgatttggtccgcattaagcggctattccctggccaaccggccgaagaaaatggtgctattgccgccggagacatcatcttagccgttaatggacgcagcaccgagggattgattttccaggaagttctgcacctgcttcgcggcgcccctcaagaggtgactttactcctatgccggccaccacctggagccctccctgagctcgagcaggaatggcaaaccccagaactctcagcagacaaagagttcacccgggccacctgcactgattcctgtacaagccccatcctagaccaggaagacagttggcgcgattcggccagtcccgatgccggggaaggtttggggctgcggccggaatcctctcaaaaagcaattagagaggcacagtgggggcagaatcgcgagcgcccttgggccagttcattgactcattccccggagagtcatccccatctgtgcaaacttcaccaggagcgtgacgagtccacactggctacttccctggagaaggatgtgaggcagaattgctacagcgtgtgtgacataatgcggctggggcggtatagcttcagttcgcctctgacgaggctgtctacagatatcttttag

SEQ ID NO: 187737 - DNA, 3834 bp, synthetic construct
  misc_feature 1..3834: note = Description of Artificial Sequence: Synthetic coding sequence
  source 1..3834: mol_type = other DNA
atgagcctgagcagcgtgaccctggccagcgccctgcaggtgcggggagaggcactgagcgaagaggaaatctggagcctattattcctcgccgccgaacaactgctggaagatctcaggaacgacagttctgactatgttgtatgtccttggagcgcactcctgtccgcagccggttccctctcgtttcaggggagggtgagtcacatcgaggcagctccatttaaggctcccgaactgctgcagggtcagagtgaggacgagcagccggatgcctcacagcctttgcaactgtgcgagcccctgcacagtatactgctgaccatgtgcgaggaccagccacacagacgctgtactttgcagtcagtactcgaagcatgtagggtccatgaaaaggaggtctctgtgtaccccgcacctgccggtctgcatatccgacggctcgttggccttgtgcttggcacgatttcagaggtggagaagcgggttgtggaagagagcagcagcgtgcagcagaacaggagctatttgctccgcaaaagacttaggggcacatcttccgagagtccagccgcgcaggccccagaatgtctccacccttgcagagtatccgaaaggtctaccgagacacagagcagccctgaaccacactggtctacactgacccacagccattgttctctgctggtgaacagagccctgcctggagcggacccccaggaccagcaagccggacgacggctgtcttccggtagcgtgcactctgccgccgattcctcatggcccacaacaccaagccagagggggtttctccagagaagatccaagtttagtcgcccagagtttatactcctggcaggcgaggcccctatgaccctccatcttcccgggtctgtggtgactaaaaaaggcaagagctacctagccctaagggacctctgtgtggtgttattgaacgggcagcatttagaggtgaaatgcgatgtggagagtacagttggagctgtgttcaacgctgtcacgagcttcgcaaaccttgaagaactaacgtattttggtctcgcttacatgaagagcaaggagttttttttcctggatagcgagaccaggttatgcaaaatagctcccgagggatggagggagcagcctcagaaaacttctatgaacaccttcacccttttcctaagaatcaagtttttcgtgtcccactacggtctgttgcagcattccctgacaaggcatcaattctatctgcaactcaggaaggatattctggaggaacgtttatattgtaacgaagaaatcctcttgcagctgggcgttctcgcattacaggccgagtttggaaactaccctaaggaagtggagtctaaaccgtatttccacgtagaagattacatacccgcaagtttgattgaacgcatgaccgctctgagggtgcaggtagaggtctctgagatgcatcgcctctcatccgctttatggggcgaagatgcagagcttaagttcctccgcgtcacacagcagctgccagaatacggtgtgttggtgcaccaggtgttcagcgaaaagcggagacctgaggaagagatggcattagggatttgtgctaaaggtgttattgtgtatgaagtcaagaataatagcagaatagcgatgcttcgcttccaatggagagaaacgggaaagatttccacctaccagaagaagttcaccattacatcttctgtgacaggcaaaaaacatacctttgtgaccgattcagcgaaaacttctaagtacttgctagacctgtgttctgcacagcacggttttaatgcacagatggggtccggacaaccatcccacgtcttgtttgaccatgataagttcgtgcagatggcaaacctgtcacccgcccaccaggcccgttccaagccccttatctggatacagcgtctgagctgtagtgagaatgagctgtttgtatcacgcctgcagggcgcagctgggggcctgctgagcacgagcatggacaattttaatgtagacggcagcaaggaggcaggggcagaaggcatcggaagaagtccatgtaccgggcgggagcagttgaaaagcgcgtgcgttattcagaagccaatgacttgggatagcctgagcggccctcccgttcagtcaatgcacgcaggctctaagaataaccgcagaaaatcctttatcgctgaacccgggagagagattgtgcgtgtcaccctgaagcgggaccctcatcgcggcttcggcttcgtgatcaatgagggcgagtattccggccaggctgatccaggaatatttatttcctcaattatccccggagggccggccgagaaagcaaaaacgattaagcccggcggccagatcctggctcttaaccacatctccctggaggggttcaccttcaacatggcggtgcggatgatccagaacagtcccgacaacatcgaactaattatcagtcaatccaaaggagttggcggcaataaccctgatgaggagaagaactctaccgcaaactccggcgtgagtagcactgatatcttatccttcgggtatcagggtagcctgctttctcatacccaggaccaggaccggaacactgaggagctggatatggccggcgtgcagtcgctcgtgccccgactcagacaccaactatcttttctcccactaaaaggagccggctctagttgccccccaagtcctccagagatcagcgccggcgaaatctacttcgtggaattggttaaagaggacggcacattgggctttagcgtaaccggcggtattaacacctcagttccttatggaggcatctacgtgaagtccatcgtgccaggcggcccagctgctaaggagggccagatcctacagggcgacaggctcctacaagttgacggtgtgatactgtgcggcctgacacataaacaggcggtccaatgcctgactgggcccggacaggtggctcggctagttctggaacgtcgggttccacgatcaacacagcagtgtccatctgccaacgatagcatgggtgacgagaggactgcggtcagcctggtgaccgctctgccaggaaggccttcatcctgcgtttccgtgacagacggacccaagtttgaagtgaagctgaagaagaacgcgaacggactaggcttttctttcgtgcagatggaaaaagagtcgtgcagccacttgaaaagcgatctggtgcggatcaagcgacttttccctggccagccagcagaggaaaatggtgcgatcgcagctggcgacatcattctcgctgtgaatgggaggtctactgagggactaattttccaggaggtgttacacctcttgagaggggctccgcaggaggtgacactactcctctgtcgccccccaccaggagcgcttcccgaacttgaacaggagtggcaaacccctgagttgtcggctgataaagaattcacaagggccacctgcacagactcctgcacctcacccatcttagaccaagaagattcttggcgggactccgcgtcccctgatgcaggcgagggcctaggccttcgaccggagagctctcaaaaggccatcagggaggctcagtggggacaaaaccgagaaagaccctgggcctccagtcttacacactcccccgaaagtcaccctcatctgtgtaaattgcaccaggaaagagacgagtccacattggcaacttccctcgagaaggatgtgagacaaaattgttacagcgtctgtgacatcatgcgccttggccgctacagcttttcaagtccgctgaccagactgagtaccgacatcttctag

SEQ ID NO: 187738 - DNA, 786 bp, synthetic construct
  misc_feature 1..786: note = Description of Artificial Sequence: Synthetic coding sequence
  source 1..786: mol_type = other DNA
atgggcgacgagcggaccgccgtgagcctggtgaccgccctgcccggacgaccaagctcctgcgtgagtgtgacagacggaccaaagttcgaggtgaagctgaagaagaacgccaacggcctcggatttagctttgttcagatggaaaaagaatcttgctcccacctgaagtctgatttagttcgaattaagagactgttccctgggcagcctgccgaagagaatggagccattgccgcaggcgacatcattctggccgtcaacgggcgtagtaccgaaggattaatcttccaagaagtgttacacctcttgcggggcgcgccgcaggaagtgaccctgttactgtgccggcctccccctggggcactccccgaattggagcaggagtggcagactcccgagttgagcgcagacaaggagtttacaagagcgacttgcactgatagctgcacatcccctatccttgaccaagaggacagctggcgagatagtgccagtcccgatgcgggtgagggcttgggtcttcggcctgaatcttcccagaaggccattagagaggcacagtggggccaaaaccgagagaggccctgggctagctccctgacacactcaccagaatcacaccctcacctgtgcaagctccatcaagagagagatgaatcaaccttagctacctccctggaaaaagacgtccgtcagaattgttattcagtatgcgacatcatgagactgggacggtactctttctcttcacctcttactcggctttccactgacatcttttag

SEQ ID NO: 187739 - DNA, 3936 bp, synthetic construct
  misc_feature 1..3936: note = Description of Artificial Sequence: Synthetic coding sequence
  source 1..3936: mol_type = other DNA
ttcagcagccaccggaccaagagcagcggctggcccccccccagcggaacttggggactttcccaggtgccaccttacggatgggaaatgaccgccaaccgagatgggagagactactttattaatcacatgacgcaggcaattccattcgatgaccctagactggaaagttgccaaattattcctccagctccaagaaaagtcgagatgcggagggatccagttctggggtttgggtttgttgctggctccgaaaagcctgtcgtggtgcggtccgtcaccccaggcggtccttctgaaggtaagttgatccccggtgatcagatagtcatgataaacgacgagcccgtcagtgctgccccccgagagcgggtaatcgacctggtaagatcgtgcaaggaaagcatcctcctaacagtcatacaaccctacccgtcccccaaaagtgcgtttatctctgctgccaaaaaagcacgattgaagtcaaatccagtgaaagtacgcttcagcgaagaggttatcatcaacggccaggtctctgagactgtgaaagataatagtttgttattcatgccaaacgtgctgaaggtgtacctagagaacggccagaccaagagctttcggttcgattgctccacctctatcaaggacgtgatcctgacattgcaagaaaagctctccatcaaaggcattgagcacttcagcttaatgcttgagcagcgaactgagggcgccggcacaaaactgctgctactgcatgagcaggaaacattaactcaggttacgcagcgccccagcagccataagatgagatgtctcttccggatcagcttcgtgcccaaggaccccatagacttgcttagaagagacccggtcgcatttgagtatttgtatgtccagtcttgtaacgatgtagtgcaggaaaggttcggccctgaacttaagtacgatattgcactccgacttgccgccctacaaatgtacattgccaccgtcacaaccaaacagacccagaagatctcactgaaatacatcgagaaggagtgggggcttgagacttttctgccttccgctgtcttacagtcaatgaaggaaaagaatatcaaaaaagcgttgtcacacttagtgaaagcaaatcagaatctggttcctcctggaaaaaagctgtctgcactccaggccaaagtgcactacctaaaattcctctctgatttgagactctacggaggtagagtgttcaaagctactttagtgcaggctgaaaagaggtcagaagtgaccctactggtcgggccccggtatgggatctcccatgtgattaacactaaaaccaatttggtggccctcctggcagacttctcccacgtcaatcggatagagatgttcagtgaggaagagtccctggtcagggtagagctgcatgtactcgatgtaaaacctattactctcctgatggaaagctccgacgctatgaatctggcctgccttacagctggctactacagacttttggtggacagcagacgctccatctttaacatggccaacaaaaagaatactgccacccaagaaaccgggccagaaaataaaggtaagcacaacctgttgggacctgactggaattgtatccctcaaatgacaacatttatcggcgagggtgaacaggaagcacagataacctatattgactctaagcagaagactgtggagatcactgattcaaccatgtgtcccaaagaacataggcatctttatattgataacgcatattcatccgatggacttaatcagcagctgtcccaaccgggagaggcaccctgcgaggccgattaccgcagtctggctcagagaagtttactgactctgagtggccctgaaactctgaagaaagctcaggagagcccccgcggagctaaggtttcatttattttcggggacttcgctctggatgacgggatttctcctccaacgcttggatacgagacactactggacgaggggccagagatgctcgaaaaacaaagaaatctgtacatcggtagtgctaatgatatgaaaggactggatctgacgccagaggcagaaggtatccagttcgtggagaatagcgtctatgcgaatataggcgacgtgaagagcttccaagccgctgaggggatcgaggagccgcttcttcacgacatctgctatgccgaaaacactgacgatgccgaggacgaggacgaggtgtcctgtgaggaagacctggtggtgggggagatgaaccaaccagccattctaaacttatcaggcagttctgatgacatcatagaccttaccagcctcccacctcccgaaggggatgacaacgaggatgactttctgctgagatccctgaatatggcaattgcagcccccccaccgggctttagggacagcagtgatgaggaggattcccaatcccaggcagcaagctttcctgaggataaagagaagggatcctccttacagaatgacgaaatacccgtgtccttaattgatgcagtgccaacttccgcagaaggaaaatgcgagaaagggttggacaatgcggtggtctctactcttggagcgctggaagccctctccgtcagcgaggaacagcagacaagcgacaattcaggagtggccatacttcgcgcctactctcccgaaagctcctcagactctggcaacgagaccaattcatctgaaatgactgagagcagcgagctcgcaacggcccaaaagcagagtgagaatctgtctaggatgtttctggcgacccacgaggggtatcatcctcttgctgaggagcagactgagtttcccgcctccaagacccccgcaggcggcctgcctccgaagtccagccatgcacttgccgcccgcccagccaccgaccttccgcccaaagttgtgccaagtaagcaattactgcactctgaccatatggagatggagccggaaactatggaaaccaaatccgtgacggattacttttctaagctgcatatgggctctgtggcgtattcatgcaccagtaaacggaagtccaaactcgcagatggtgaagggaaagcacctccaaacggcaacacgaccgggaagaaacagcagggcacgaagaccgctgaaatggaggaggaagcgtccgggaagtttggaacagtctcatcaagagactctcaacatctgagtacattcaatctggagcggactgctttccgtaaagattcacaaaggtggtacgtcgctaccgaaggcggcatggccgagaagagcggcctggaggcagctactggtaagacattccccagggccagcggtctcggagccagggaagcggaagggaaagaggagggggcccccgatggggaaacaagtgacggaagcggcctcggccagggagatagattcctcaccgacgtgacctgtgcttcgtccgcgaaggacttggacaacccagaggacgctgactcatccacatgtgaccacccaagtaagctgcccgaagccgacgagtccgtggcacgactgtgtgactatcatctggcgaagagaatgagtagcctgcagagtgaggggcacttctccctgcagtcttcacagggcagctccgtggatgccggttgcggtacggggtcttctgggagcgcatgtgcgactccagttgagtcccccttgtgtcccagcttaggtaaacacctcatccctgatgcatctggcaaaggcgtgaactatatcccttctgaggagagagcacccgggttgccaaaccacggggctactttcaaggaattgcatccccaaacagaggggatgtgcccccgtatgacagtgcccgcacttcacaccgcaattaatacagagcccttatttggcactctgagagatggatgccacagactcccgaaaataaaggagactacggtgtag

SEQ ID NO: 187740 - DNA, 3969 bp, synthetic construct
  misc_feature 1..3969: note = Description of Artificial Sequence: Synthetic coding sequence
  source 1..3969: mol_type = other DNA
atggacgtgttcagcttcgtgaagatcgccaagctgagcagccacagaaccaaaagcagtggttggcctccacctagcggtacctgggggctgagccaagtgcccccttacggctgggaaatgactgctaatagagacggacgggattactttatcaaccatatgacacaggcgatcccttttgatgaccctcgacttgagtcgtgtcaaatcattccccccgctccccgtaaagtggaaatgcgacgggatcctgttctcggctttgggtttgtggccggttcagagaagccagttgtagtcagatcagttaccccgggggggccaagtgaaggcaagcttatccccggcgatcagattgtgatgattaatgatgagccagtatccgccgccccccgcgagcgtgtcattgatctcgtcaggagttgtaaggagagcatactgttgacggttatacaaccataccctagccccaagtctgcctttatttcagcggccaagaaagcccgccttaaatccaacccagtcaaggtgaggttctctgaggaggtcattataaacgggcaggtttccgaaactgtaaaagataacagcttactgtttatgcctaacgttctgaaagtctatttggaaaatggccagacaaaaagtttccgtttcgactgcagcacaagtatcaaggatgtaatcctgacactacaggagaagctctccataaaggggatcgaacacttttctctgatgctcgaacagcgcaccgagggcgccggaaccaagctgctcctgctgcacgaacaggagaccctaacccaggtaactcagcgcccttcttctcacaagatgcgctgtctgtttcggattagctttgttccaaaggaccctatcgacttgctgcggcgtgaccctgtggccttcgagtatctgtatgtacagtcctgcaatgatgtggttcaggaacggttcgggcctgaactgaaatatgatatcgcacttcgtctcgcggcccttcagatgtatatcgcaaccgtgacgactaaacagacccagaaaataagtttaaagtacatcgaaaaggaatggggcctggaaacctttctaccttctgcagtgctgcagtcaatgaaagagaagaacatcaagaaggcactgtcgcatctggtgaaggctaaccagaatttggtgccgcctggcaagaaactcagtgctctacaagcaaaggttcattacctcaagtttcttagtgacctgcgcctctatggcggccgcgtgtttaaggcaacattggtgcaggccgaaaagcggtccgaggtgacgctgcttgtcggtccccgatacggaatcagccatgtgattaacactaaaaccaatttggtcgctctgctggcagatttcagccatgtcaaccgtatcgagatgtttagtgaagaggagagtctcgtgagggtggagttgcacgtgttggatgtgaagcccatcacactgctgatggaatcaagtgatgccatgaatcttgcctgtctgactgccggatactaccgtctattagtcgactcccgtaggtcaatcttcaatatggcgaataagaaaaacaccgctactcaggaaactggacctgaaaacaagggaaagcacaatctgctggggccggattggaactgtattcctcaaatgactacttttatcggggaaggggaacaggaagcacagatcacgtacatcgattccaagcagaagactgttgagattaccgattccacgatgtgccccaaagagcaccggcacctgtacatcgataacgcttatagcagcgatggcctgaaccagcaattaagtcagccgggggaggctccttgtgaggctgattacaggagcttagcccagcgctctctgcttacactaagcggccccgagacactaaaaaaagcccaggagtccccacgtggagccaaggtaagtttcatctttggggattttgcgctggatgatggcattagtccccccaccctgggatatgagacactgctggatgagggcccagaaatgctggaaaaacagcgcaatctgtatatcggttcagctaatgacatgaagggcttagacctgacccctgaagcagaaggtatacaattcgtcgagaactccgtgtatgcgaacattggtgatgtgaaaagcttccaagccgccgagggaatagaggagcccctactgcacgatatctgttacgctgagaatacagatgacgcagaggacgaggacgaagtatcttgcgaagaagacttggttgttggggagatgaaccaacctgcaattctgaatcttagtggaagttccgacgacattattgatctaaccagtctgccaccccctgaaggcgacgataatgaagacgactttcttctcaggagcctcaacatggcgattgccgcccccccccctgggtttcgcgactcgtctgacgaagaagacagccaaagccaagccgcctcctttcctgaagacaaagagaaggggtcgtccctacaaaatgacgaaatccccgtgagcctgattgatgcagtgcctacgagtgccgaggggaagtgcgaaaagggtcttgacaacgccgtggtcagcactttaggtgccttagaggcactgtctgtctcagaagaacagcagacctctgataactccggcgtggcaattctccgcgcatatagcccagaatcatccagcgacagtggtaatgagacgaattcctcggagatgacagagagtagcgaactggccaccgcccaaaagcagagcgaaaatctaagcagaatgtttttggctacacacgagggataccacccactggctgaagagcagacagaattccctgctagcaaaaccccagccggaggactccctcccaaaagctctcatgccctggcggcaaggcccgcaactgatctgccccccaaagtggttccctctaaacaactgctacactcagaccatatggagatggagcctgaaactatggagactaaaagcgttacagattattttagcaaactgcatatgggaagtgtggcttatagttgcacatccaagcgcaaaagtaagctggcagacggcgaaggaaaggcacctcctaatggcaacaccaccggcaagaaacagcagggcactaagacagcagaaatggaggaagaggccagcgggaaatttggtaccgtatcaagtcgagatagtcagcatttgtctactttcaacctggagcggacggctttcaggaaagactcccagcgatggtatgttgctaccgagggcggcatggcagaaaagagcggactcgaagccgccactggaaagacattcccccgcgcaagcggcctcggtgcgcgcgaagctgaaggcaaggaggaaggagcccctgatggggagacctcagacggaagtgggctgggccagggagacaggttcctcacagacgtgacctgcgcctcatctgcgaaggacttagacaatccggaggatgccgatagtagcacttgcgatcacccttccaaactgcctgaggccgacgagtctgtggcgcgtctctgtgactaccacctcgccaaacggatgagcagtctgcaaagcgaaggacatttttcactgcagtcctcacagggaagctccgtggacgctggatgtgggacaggctcatccggctcggcctgcgccacccctgtggaatcaccactgtgcccatcactcggaaagcacctgattccagatgcttctgggaaaggggtaaactacatccccagtgaggagcgagcccccggtctacccaatcatggcgcaacctttaaagagcttcatcctcagacagaaggcatgtgcccgaggatgactgtgccagccctccataccgctatcaatacagaaccactgtttggcacactgcgggacggctgccatcgattgccaaagattaaagagactaccgtctag

SEQ ID NO: 187741 - DNA, 3942 bp, synthetic construct
  misc_feature 1..3942: note = Description of Artificial Sequence: Synthetic coding sequence
  source 1..3942: mol_type = other DNA
aagagccacagcccccaccggaccaagagcagcggctggccccccccttctgggacttgggggttgagccaagtgccaccgtacggctgggagatgacagcaaatcgggatgggagggactatttcattaatcacatgacacaagctattcccttcgatgaccctcgactggagagttgccagattattccaccggcacctaggaaagtggagatgaggagggacccagtgcttggatttggctttgtggccggctcggagaaacctgtagtggtccggagtgtcacaccaggcggtccgtcggaaggaaagcttatcccgggggaccagatcgtcatgatcaatgatgagcccgtgtctgctgcccccagggagagggtcattgatctcgtacgaagttgcaaagagagcatcctcctcaccgtgattcagccttatccatctcctaagtccgcctttatctctgctgccaagaaggccagactcaaatccaatcccgttaaggtgagatttagcgaggaagtgattatcaatggacaagtcagtgagaccgtcaaagacaacagcttgctttttatgccaaatgtgctgaaggtgtacctcgagaacgggcaaacaaaaagctttcggtttgattgttccacttcgatcaaggatgtaatccttacactgcaggaaaagctctcaataaaaggaatcgaacacttctccctaatgctcgagcagagaactgagggcgccggaacaaagttactattactccatgaacaggagacactgactcaggtgactcagcgaccgtcatctcacaagatgagatgcctgttccgtatcagctttgttcccaaggatcctatcgatcttctccgcagagatccagtggcatttgaatatctgtacgtacagagctgcaatgatgtggtccaggaaaggttcggcccggaacttaagtacgatattgctctccgcctggccgcgttacaaatgtatatcgctacggtcactactaagcagactcagaagatctccctgaagtacattgaaaaggaatggggcttggagacatttctaccctccgccgtattacagagtatgaaggaaaaaaatattaagaaggccttgagccatctggtgaaagccaaccagaacctggtcccaccaggtaagaagttaagcgcccttcaagcgaaagttcactatttgaagtttctgtctgatcttcgcctgtacggcggacgcgttttcaaagcgacacttgtgcaagccgagaaacgcagcgaggtgactctgctggtcgggccacggtacgggattagccacgttatcaacaccaaaaccaaccttgtggcattgctggcagattttagccacgtcaacaggattgaaatgttctcagaggaggaatctctggttcgtgttgaacttcatgtcctggacgtgaaaccaattacgctactgatggaaagtagtgacgcaatgaacctcgcctgtttaactgcgggctactatcggctgttagtggactcccggaggtcgattttcaacatggctaataagaaaaacacggcgacacaggaaacaggtcccgagaacaaaggaaaacacaatctgctggggccagattggaactgtatcccacagatgactaccttcatcggcgaaggagagcaagaggcgcagattacctacatcgactctaagcagaaaacagtagagattactgatagcacaatgtgtcctaaagaacataggcacctgtacatcgataacgcctactcatccgatggtcttaatcagcaattatcacaaccaggggaggcaccgtgtgaggcggattatcgatctctggctcaacgaagcctcctaacactgtcgggacccgaaactctgaagaaggcccaagagtcccctcgcggtgccaaggtaagctttatctttggagatttcgccttggacgatggtatctccccaccaaccctcggatacgagacgctgctggatgaagggccggagatgttggaaaagcagcgaaacctgtacataggcagcgccaatgatatgaaggggctagatttgacccccgaagctgaagggatacagtttgtggaaaactccgtgtatgcaaacatcggagatgtcaaatccttccaggccgctgaaggcattgaagaacctttactgcatgacatatgttacgccgaaaacacagacgatgccgaagacgaggacgaggtgtcttgcgaggaagacttagtggtgggagagatgaaccaaccagcaatcctcaacctgagcgggtccagcgacgacatcatcgatcttacaagcctacccccccctgaaggagacgacaatgaagatgacttcctcctccgtagtctaaacatggccatcgccgcccccccgcctggctttagagacagctcagacgaggaagattcacagtcccaggccgcatcctttcctgaagacaaggaaaaaggaagcagtctgcaaaatgacgagattcctgtgtcccttatcgatgcagtgcccacaagcgctgagggtaaatgtgaaaaaggacttgataatgctgttgtttcaaccctgggcgctctagaggcattgtccgtcagtgaagaacagcaaacgtccgataacagcggcgtggccatactcagagcctattctccagaatctagctcagatagcggaaacgagactaattcttctgaaatgaccgaatcaagcgaactggccaccgcgcagaaacaaagtgaaaatctctctagaatgttcttggccactcacgagggatatcaccctctggccgaagaacagactgagttccccgctagcaagacacctgccggggggctgccaccgaaatcctctcacgccttagccgctagacctgcgacagaccttcccccgaaggtggtgccaagcaaacaactgctgcatagcgaccatatggaaatggagccagaaaccatggagacaaagtctgtgactgattacttcagtaagctgcacatgggctccgtcgcatacagttgtacttctaaaagaaagtctaagctcgcagatggagaaggtaaggcacctccaaacggaaatacaaccggaaaaaagcaacagggaaccaaaaccgctgaaatggaagaggaggcctcagggaagttcgggacggtgagcagtagggactcacagcatttgtctacctttaatctggagcgcaccgctttccgaaaggatagtcagcggtggtacgttgccacggaggggggcatggccgaaaagtctggacttgaggcagctacaggtaagacttttccccgggcttctggtctcggagcaagggaggccgaggggaaggaggagggtgctcccgacggagagacatcagacgggtccgggctgggccagggagacaggtttctcacggatgtgacctgtgcaagctccgctaaagacctggacaaccctgaagacgcggattctagcacatgtgatcacccttctaagctaccagaggccgatgagagtgtggcacggttgtgcgattatcacctggctaagcgcatgtcgtctctgcagtcggaaggccatttctcactgcagtcatctcagggctcctccgtggatgcagggtgtggaaccggctctagtgggtccgcctgcgctacccccgtagagagcccactgtgccctagtctggggaagcaccttatcccagacgcttcaggaaaaggggtgaattatatcccatcggaggagcgagccccaggcctgcccaatcacggtgctaccttcaaggaattgcacccacagacagagggcatgtgtccacgcatgaccgttccagcattgcacacggctataaatacagagcctcttttcggtactctgagggatggctgccatagactgccgaaaattaaggaaaccacgggctag

SEQ ID NO: 187742 - DNA, 1794 bp, synthetic construct
  misc_feature 1..1794: note = Description of Artificial Sequence: Synthetic coding sequence
  source 1..1794: mol_type = other DNA
atgttcgccagctgccactgcgtgccccggggccggcggaccatgaaaatgattcactttcggagcagcagtgtcaagtctctgtcccaagaaatgagatgtacaatcaggcttctcgacgactccgagatcagttgtcatattcaaagggagaccaaaggtcagttcctgatcgaccacatttgtaattactacagtctgctggaaaaggattactttggcataagatatgtggaccccgagaagcagcgtcattggctagaaccaaacaagagcatctttaaacagatgaagacacatcctccatacaccatgtgtttcagagtcaaattttatccacacgaacctctcaaaatcaaggaagagctcaccagatacctgttatatcttcagatcaagcgagacatctttcacggtcgacttttgtgcagtttcagtgacgcagcataccttggcgcttgtatcgtccaggctgaattaggcgactatgatcctgacgaacaccctgaaaactacatttctgagtttgaaatatttccaaagcagagtcaaaaactggagcgtaaaatagtggaaattcacaaaaacgagctccggggccaatctccaccggtggctgaattcaacctattgctcaaagctcataccttggaaacctacggggtggacccacatccatgtaaagatagcacggggacgaccacattcctcggctttactgccgccggattcgttgtgttccagggcaacaaacgcatccacctgattaaatggcccgacgtctgcaaactcaagttcgagggtaaaacattctatgtgatcggcacccagaaggaaaagaaggcaatgttagccttccatacgagtacgccagccgcctgcaagcacctgtggaaatgcggagtcgagaatcaagcattctataagtacgctaagagctcacaaataaaaacagtgtctagttcaaagattttctttaagggctctagatttaggtatagcggcaaagtagctaaagaggtggtggaggcatcctccaaaatccagcgggagccacccgaggtacatcgagcaaacattactcaatcgaggtccagccactctctgaataaacagctcattattaatatggaaccccttcagccattactgccaagcccaagcgagcaagaagaggaactacctctcggggagggagtacctctgccaaaggaagagaacatatccgcccccctcatcagctccagcccagttaaagccgcgcgtgagtacgaagaccctccatcggaggaagaagataagataaaagaggagccactgaccatatccgagctagtgtacaatcctagtgcttccttgctgccaacgcctgtagacgatgacgagattgacatgttattcgactgccctagtcgcctcgagctggagcgggaagataccgattcatttgaagatttggaagccgatgaaaacgcttttttgatcgctgaagaagaagaactgaaggaggctcgacgggccctctcttggtcgtatgatatactaaccgggcacattcgggtcaatccgctcgtcaagagtttcagtcggttgctggtcgtgggcctcgggctgctattgtttgttttcccacttttgctgctgcttctggagtctggcatagacttatcatttctctgcgagatcagacaaacccccgagtttgaacaatttcactatgagtactactgcccacttaaagaatgggtcgccgggaaagttcatttgatcctgtatatgctcggttgttcttag

SEQ ID NO: 187743 - DNA, 642 bp, synthetic construct
  misc_feature 1..642: note = Description of Artificial Sequence: Synthetic coding sequence
  source 1..642: mol_type = other DNA
atgcaggccgaggagaccaagggcatcggcatcaccagcatggccaagtgcctggttaagatccaaactagacgatctctccaattgcatatggtcaaccactgtaacagtaatgtcttcgtccgtctgctgcggttgggcagtaaagtgaccgcccggaatactggcgtacccctgcccaaggaggaaaacatttcagccccgttgattagttcttctccagtgaaagcagcccgagaatacgaggatcccccaagcgaagaagaggataagataaaagaagaacccctgactatttccgagttagtatataacccttctgcaagcctgcttcccacacccgttgacgatgatgaaatcgatatgctttttgattgcccctctagactcgaattggaacgtgaagacactgactcttttgaggatctggaagctgatgagaacgccttcctaattgccgaagaagaggaactgaaggaggcccgtagagctctgtcgtggtcctacgatattctaacgggacacataagggtaaatccgttggtgaagtccttttccaggctgctagtggtcgggttggggcttcttctttttgtgtttcccctgctcttgctgctgttggaatccgtgtccatgcaatag

SEQ ID NO: 187744 - DNA, 804 bp, synthetic construct
  misc_feature 1..804: note = Description of Artificial Sequence: Synthetic coding sequence
  source 1..804: mol_type = other DNA
atgtgcttccgggtgaagttctacccccacgagcccctgaagatcaaggaggagctgacccgttatctattgtacctgcaaataaaaagagatatatttcacgggaggctcctgtgctccttctctgatgcagcctacctgggcgcctgtattgtccaggcggagctcggggactatgatcccgatgagcacccggaaaattatattagtgagtttgagattttccccaagcagtcccagaaactggagcgcaagatagtggagattcataaaaatgagctgagaggacagagcccgcccgttgcagagttcaacctgctgctgaaggcccacacattggagacctacggggttgatccccatccttgtaaagacagcactggaaccacgacgtttctgggatttacagccgccggattcgttgtcttccaggggaacaaacgaattcacctgattaaatggcccgacgtgtgcaagttgaaatttgagggcaaaaccttctatgtgatcggcacacagaaggagaaaaaagctatgctggccttccatacatcgacacccgctgcctgtaaacatttatggaaatgcggcgtggaaaatcaggccttctataagtatgccaagagctctcagataaaaacggtgtcctcgagtaagatcttcttcaaaggtagtaggtttcggtacagcggaaaagtggctaaagaggtggtggaggcttcctcaaagatccagcgagagccgccagaagtgcatcggtgcgttcaaaagaaaatctgttcatgctttggggttacgtggtag

SEQ ID NO: 187745 - DNA, 1089 bp, synthetic construct
  misc_feature 1..1089: note = Description of Artificial Sequence: Synthetic coding sequence
  source 1..1089: mol_type = other DNA
atggtgttccggcggggccagagcccccccgtggccgagttcaacctgttgctaaaagcccacacgctggagacgtacggtgtggatccccatccctgtaaggattctaccgggactacaaccttcctggggttcacagccgcaggcttcgttgtctttcaggggaacaaacggatccatctgatcaagtggccagatgtctgcaagctcaagtttgagggcaagactttttacgtgatcggtacgcaaaaggagaaaaaggccatgttggcattccacacaagcaccccagccgcctgtaaacatttatggaaatgcggggtggagaatcaggcattctataagtatgccaagtccagtcagataaagacggtgagttctagcaaaatcttctttaagggcagcaggtttaggtacagcggcaaagtcgccaaagaggtggtagaggccagcagtaagatccagcgggagccacctgaagtccatagagccaatattactcagagtcgttcaagccactccctcaataagcagctcatcattaatatggagccactgcagccattgcttccatcgccttccgaacaggaagaagaacttcccctgggtgaaggggtcccattaccgaaggaggagaacatctccgccccactcatcagcagcagccctgtgaaagctgcccgcgagtacgaagaccctccatcggaggaggaggacaagatcaaggaagaaccactgactatttccgagcttgtttataacccttccgctagccttctgccgacaccagtggacgacgacgagatcgatatgctgtttgattgcccttctcgacttgagctagaacgcgaggataccgattctttcgaagatctagaggccgacgagaacgcctttctgatcgccgaggaggaggaattgaaggaagcaagacgggccctcagttggtcttatgatatacttaccggccacatcagagttaatcctttggtcaagagcttttccaggctgctggttgtcgggctgggcctgttattgttcgtgtttcccctgctgttgttgctgctggagtccgtgtcaatgcagtag

SEQ ID NO: 187746 - DNA, 1671 bp, synthetic construct
  misc_feature 1..1671: note = Description of Artificial Sequence: Synthetic coding sequence
  source 1..1671: mol_type = other DNA
atgttcgccagctgccactgcgtgccccggggccggcggaccatgaaaatgatacactttaggtcctcctcagttaaaagccttagccaagagatgaggtgtactattcgcctgctggatgatagtgaaatatcttgccatattcaaagagaaacaaagggccagtttctcattgatcacatttgcaattactatagtttattagaaaaagattattttggaattcggtacgtagatcctgagaaacaaagacactggctcgagcccaataagtctatcttcaagcaaatgaaaacacaccccccctacacaatgtgctttagggtgaagttttatccccatgagcccctcaaaatcaaggaggaactgactcgctatcttttgtacctgcagatcaagcgcgacattttccacggaaggctgctatgtagcttcagcgacgcagcctatctcggtgcttgtattgtgcaggcagagctgggggattacgatcctgatgaacaccccgaaaactacatcagcgagtttgaaatctttcctaagcagtcccaaaagctggagcgcaagatagttgagatccacaagaacgagcttcgagggcagagtcctcccgtagctgaattcaatcttctccttaaggcacatacacttgaaacctatggggtcgacccacacccttgcaaagattcaaccggaaccacgacctttctgggattcaccgccgccggattcgtggtcttccaaggcaacaagaggatccacctgatcaagtggccagatgtgtgtaaactgaaatttgagggcaaaaccttttacgtcatcggaacacagaaagagaaaaaggccatgctggcattccacacctctacacccgctgcctgtaagcacctgtggaaatgcggcgtggagaatcaagcattttacaaatacgctaaaagttcccagataaagactgtgtctagctccaagatctttttcaaagggtcacgattccgctactccggaaaggtggcgaaggaagttgtagaagcttctagcaaaatccagcgcgaacctcccgaggtacaccgcgcaaacattactcagagccgaagcagccattcattaaataagcagctgataatcaacatggaacctctgcaacctttattaccttctcctagtgagcaagaagaagaattgccccttggagaaggggttccactgccgaaggaggagaatatctccgctccgctgatctcaagttcccccgttaaagccgcccgagagtacgaggaccctccatccgaggaggaggacaaaatcaaggaggagcctctaacaatttcagaacttgtgtataatccatccgcctcgctgctgcccacacctgtggatgacgatgagatcgacatgctcttcgactgtccgtcccgtctggagctagaaagggaagacacggacagttttgaggatctggaggccgacgagaatgctttcctgatcgctgaggaggaggagctgaaagaggcgagaagggccctctcctggtcatatgacattcttacagggcacatcagagtaaaccccctagtaaagtcattctccaggttgctggtggtgggcctgggcctgctgctttttgtgttcccactcctgctcttactgctagagtcggtgtctatgcagtag

SEQ ID NO: 187747 - DNA, 423 bp, synthetic construct
  misc_feature 1..423: note = Description of Artificial Sequence: Synthetic coding sequence
  source 1..423: mol_type = other DNA
ggcaccaccaccttcctgggcttcaccgccgccggcttcgtggtgtttcaaggcaataaaagaatccacctgatcaaatggcctgacgtatgtaaactgaaatttgagggaaagactttttacgtaatcgggacgcagaaggagaagaaagccatgctggccttccacacttctactcctgctgcctgcaagcatctctggaaatgtggggtcgaaaatcaggccttttacaagtacgcaaaatccagccagattaaaacagtgagctcctcaaagattttcttcaagggctctagatttcggtactccggtaaggttgccaaggaggtggtggaagccagtagcaagattcagagagaaccgcctgaggttcaccgctgtgttcagaaaaagatttgctcttgttttggggtaacttggtag

SEQ ID NO: 187748 - DNA, 2145 bp, synthetic construct
  misc_feature 1..2145: note = Description of Artificial Sequence: Synthetic coding sequence
  source 1..2145: mol_type = other DNA
atgctgcacctgaaggtgcagttcctggacgacagccagaagatcttcgtcgtcgaccagaagagctctggaaaggcactgtttaatctcagctgcagtcacttgaacctcgcagaaaaggagtatttcggcttagaattttgtagccattctggaaacaatgtctggcttgagttgctgaagcctattactaaacaggtgaagaacccgaaggaaattgtgtttaagtttatggtgaaattctttccggtagacccgggccacctgagggaagaattgacacgctatctattcacgctgcagatcaagaaagacctggctctcggacgcctaccctgtagtgacaattgtacagcactgatggtctcccacattctgcaatctgagctgggggactttcacgaggagacggaccgtaaacacttagcccaaacccgctacctgcccaatcaggattgtctcgagggcaaaatcatgcacttccaccagaagcacatcggccgatctcccgccgaatccgacattctgctcctggacatcgcgcgaaagctggacatgtatggaatccgacctcatcctgcgtccgacggggagggaatgcagatacacttggcagtggcccacatgggagtcttggtgctgcgcggcaacacgaaaatcaatacattcaattgggccaaaattagaaagctgtcttttaagcgcaaacatttcctaattaagctccacgctaacattctagttctgtgcaaggacactctggaatttacgatggccagtcgcgacgcgtgtaaggctttctggaagacatgtgtggaatatcacgcctttttccgcttatctgaggagcccaaatcgaaaccaaagaccctgctctgtagcaagggctctagtttcaggtacagcgggagaacacaacgccagcttcttgaatacggcagaaaaggtcggctcaaaagcctgcccttcgagcggaaacactacccaagccagtaccacgagcggcagtgtcgaagctcccccgatctgctgtcggacgtgagcaagcaggtggaagacttgagactggcctatggaggcggatattaccagaacgttaacggtgtacacgccagcgagcctgtccttgagtccagacgacgtaactccgccctcgaagtaactttcgcgactgaactggaacactcaaagccagaggcagatccaacgctcctgcatcagtcccagtcatcgtccagttttccattcatttatatggatcccgtgttcaacaccgaacctaatcccaatccggatcccagggacatattttccgagcgctctagtctgagctcattccaaacgtcctgcaagtttagcggaaatcatatgtctatctactcagggctcaccagcaaggtaagaccagctaagcagctcacatacactgatgtgccctacatcccctgtacaggacaacaagtgggcataatgcccccccaggtgttcttctatgtagacaagcctccccaagtacctcgctggagtccaatacgcgccgaagaacgtacctccccacactcatatgtggagccaaccgcgatgaaaccagccgaaaggagcccaaggaacatcaggatgaagtcattccagcaggaccttcaggtgctgcaggaggcaattgcccggacctccggaagatctaacattaatgtagggttggaggaagaagaccctaacctggaagacgcattcgtatgcaacatccaggagcagacccccaaaaggagccagagccagtcggatatgaagaccatccgttttccctttgggtctgagtttagacctttgggcccatgtcctgccctttcacacaaggccgatctgttcacagacatgttcgccgagcaggaactgcccgccgttctgatggatcagtccactgccgagagatatgtggcttccgagagcagcgattcagagtctgagatcctgaaacccgattattacgccctttatgggaaagaaatcagaagtcctatggcccgaatacggttaagttcagggagcctgcaactggacgaggaggatgaagacgcctactttaacaccccaactgctgaggatcgcacatctctgaagccatgcaattactttctagcatag

SEQ ID NO: 187749 - DNA, 1785 bp, synthetic construct
  misc_feature 1..1785: note = Description of Artificial Sequence: Synthetic coding sequence
  source 1..1785: mol_type = other DNA
atggtgagccacatcctgcagagcgagctgggcgacttccacgaggagaccgatcggaagcacctggcccagacccgttacttgccaaaccaggactgcctcgaaggcaagattatgcatttccaccagaaacacatcggtcgatcacccgcggagagcgatattctgctgttagatatcgcaaggaaactggacatgtatggaatccgaccccaccccgccagcgatggcgagggtatgcaaatccacctcgctgtcgcacatatgggcgtgctggtgctccgcggcaacactaagatcaacacatttaattgggcgaaaatccgcaagctttcgtttaaacggaagcacttcctcattaaactacacgcaaacattttagtgctgtgtaaggacactttggagttcaccatggccagcagagatgcatgcaaggctttctggaagacgtgtgttgagtaccatgcattcttccgtttgagcgaggagccaaaatccaagccgaaaaccctgctctgctcaaagggtagctcctttcgctattctgggagaactcagagacaacttttggagtacgggaggaaaggcaggctgaaatcactgccttttgagagaaagcattacccgtctcagtatcatgagagacagtgcaggagctctcccgacctcttgagtgacgtttctaagcaagtcgaagacttaaggctcgcctatggcggaggatactatcaaaacgtgaacggtgttcatgcctccgaaccagttttagagtcccgtcggcggaattccgctctggaggtcacatttgcgactgagcttgaacatagtaagcctgaggctgatcctacacttctgcatcagtcacagagctcttccagcttcccattcatttatatggatccagtgttcaatacggagcctaatcctaatcccgacccgagggacatcttttccgagcgtagctcacttagtagctttcagaccagttgcaaatttagcggaaaccacatgagcatctactctggccttacctccaaggttcgcccagccaagcagcttacatatacagatgtcccctacattccatgtactggacaacaggtcgggataatgcccccccaagtgtttttctatgtggacaaaccaccccaagtgccgcgctggtctccaattcgggcagaagaacgcacttcccctcactcctatgtggaacccaccgccatgaagcctgcagagaggagcccccggaacattcggatgaagagctttcaacaggacctgcaagtcctgcaggaggctatcgcccgtacctctggccgatccaatatcaatgttggtctggaggaagaagacccgaatctcgaggatgcctttgtgtgtaatatccaagagcagacgccgaagagatcccagagccagtctgatatgaagacaatccgtttccccttcgggtctgagttcaggccattgggcccctgccccgcactcagtcataaagcagatttgtttacagacatgtttgctgagcaggaactgcctgctgtcttgatggatcagagcaccgcggagcgctatgtggcatcggagtcatcggattccgagtctgaaatactgaaacccgactattatgcgctgtatggcaaggaaatacgatctcctatggctagaatccggctaagcagcggaagcttgcagttagacgaggaagacgaagatgcatactttaacactccgaccgccgaagaccggactagcctgaagccatgcaattattttctggcctag

SEQ ID NO: 187750 - DNA, 2043 bp, synthetic construct
  misc_feature 1..2043: note = Description of Artificial Sequence: Synthetic coding sequence
  source 1..2043: mol_type = other DNA
atggccctggacggcatccggatgcccgacggctgctacgccgacggaacctgggagctgtccgtgcacgtgacagatctgaaccgcgatgtgaccctgcgggtcacaggggaagtgcatattggcggagtcatgctaaagctggttgagaaactggacgtaaagaaagattggtctgatcacgcattatggtgggagaaaaagcgaacctggttgttaaagactcattggaccctggacaaatatggtattcaggctgacgcaaaactgcagttcactcctcagcataagctgctgagactgcagttaccaaatatgaaatatgtaaaggttaaggttaacttctctgatcgggtctttaaggctgtttcggacatttgcaagaccttcaacatccgccaccctgaggagctgtcgttgcttaagaaacccagggatccgacaaaaaaaaaaaagaagaagctggatgaccagtctgaggacgaagccctggagttggaaggccctctgatcacacctgggtctggttctatttattcctctcctggtttgtactccaaaaccatgacaccgacctacgatgctcacgacggatcaccactgtcacccacctcggcctggttcggtgactctgccctatcagaagggaatcctggcattctcgcggtcagtcaacccattaccagccccgaaatcctggctaaaatgttcaaaccccaggccttgctggacaaggctaagatcaatcagggctggttggattcatccaggtcattgatggagcaagacgtaaaggagaacgaggcactgttgcttaggtttaagtattattcattcttcgatctcaatccaaaatatgatgcaatacggatcaaccagctctacgagcaggctaaatgggccatcctgctcgaggagatagaatgtactgaggaggaaatgatgatgttcgcggccctccagtaccatattaacaaactgagtatcatgacttcggagaatcacctgaataacagcgacaaggaggtagacgaggtggacgccgcacttagcgatttagagatcactctcgaaggagggaaaacttctaccatacttggggacattacaagcattccagaactggccgactatataaaggtgtttaaacccaagaagctgaccttgaagggttacaagcaatattggtgcaccttcaaagacactagcatatcctgctacaagtctaaagaagagagctccggtactcccgcccaccagatgaatctgaggggctgtgaggtcacacctgacgtcaatatcagcgggcaaaaattcaacattaaactcttaattcctgtcgccgagggtatgaatgagatatggttgcggtgtgataacgagaagcagtacgctcattggatggctgcctgcaggcttgcttcgaagggcaagactatggcagacagcagttacaatctcgaggttcagaacatcctcagctttttgaagatgcaacatctcaatcccgatccccaacttatcccggagcaaataacaactgatattaccccagaatgcttggtttccccccggtatctgaaaaagtacaaaaataagcagatcaccgctcgaatcctcgaggctcaccagaatgtagcgcagatgagcctcatagaggcaaaaatgcgcttcatacaagcctggcagtcgttgcctgaatttggcataacccacttcatcgcccggttccagggcgggaaaaaagaagaattaatcggaattgcatacaaccgtcttatccgcatggatgccagtacgggcgacgcaatcaaaacgtggaggttctccaatatgaaacagtggaatgtgaactgggagatcaaaatggtcaccgtcgaattcgcagacgaggttaggttgtctttcatttgcaccgaagtggactgtaaggtcgtgcacgagtttatcgggggatatattttcctgtctacgcgggccaaggaccagaatgaatccctggatgaggaaatgttctataaactgacctctgggtgggtctag

SEQ ID NO: 187751 - DNA, 2064 bp, synthetic construct
  misc_feature 1..2064: note = Description of Artificial Sequence: Synthetic coding sequence
  source 1..2064: mol_type = other DNA
atggccctggacggcatccggatgcccgacggctgctacgccgacgggacgtgggagctttccgtgcatgtcactgatctgaatcgggatgtgactctccgggtgacgggcgaagtccacataggcggcgtaatgctgaagctggtagagaaactggacgtgaaaaaagattggtctgatcacgctctgtggtgggagaagaagcgcacctggctgctgaaaacacactggacattagacaagtacggaatccaagccgacgctaagcttcagtttactcctcagcacaagttactgaggctgcaactgccgaacatgaagtacgtgaaagtgaaggtgaacttcagcgaccgagtctttaaagcggttagcgatatctgcaagaccttcaatattcggcacccggaggagctttcgttactcaaaaagccacgggatcccacgaaaaagaagaagaaaaagctcgatgaccagtccgaggatgaggccctggaactggagggaccccttattacccccggctctggttcaatctactcgtcccccggcctttattctaagacaatgacaccaacctacgacgcccatgatggctctcccctgagtccaacatctgcctggtttggtgattctgctttgtcagagggaaatcccggaattctggcggtgagccagcctattacaagccccgagatcttggcaaagatgttcaagccacaggctcttctggataaggctaaaatcaaccaggggtggctggatagcagcaggagcctgatggaacaagacgtgaaggagaatgaagccctgctgctgcggtttaagtattatagcttttttgaccttaacccgaagtatgacgccatccgcattaaccaactctacgagcaggccaagtgggcaatcctcctggaggaaatcgagtgtacagaggaggagatgatgatgtttgccgccctgcagtaccacataaacaaactgtccatcatgacctccgagaatcacttgaataactctgataaagaggtcgatgaagtagatgccgcccttagcgacctagaaataaccctcgagggtggcaagacaagcacgatcctgggggatattacttccatcccagagttggccgattatatcaaggtgtttaagcccaaaaagttgactctgaaaggttacaaacaatactggtgcacttttaaagataccagcattagctgttataaaagcaaggaggagtcttccggcacgcctgcccaccagatgaatctacgtggttgcgaggtcaccccggatgtgaatataagcggtcagaaatttaacattaagctgctgattccagtggccgaggggatgaatgagatctggctgcgctgcgacaacgaaaagcagtatgcccattggatggcagcatgtcgacttgccagtaagggtaaaactatggccgattccagctacaatttagaggtgcagaatattttgagcttcctgaagatgcagcacctgaatccagacccacagctcattccagagcagataactacggatattactcccgagtgcctggtgtccccgaggtacctgaagaaatataaaaataaacagccaggatacatccgggacttgatcaccgcccgcatcctagaggcacaccaaaatgtcgcccaaatgagcctgatcgaagcgaagatgaggtttattcaggcgtggcagtcgctccctgaatttggtattacccatttcatcgctaggttccagggcgggaaaaaggaagagctgatcggcatagcttacaaccggctgattagaatggacgcttcgaccggagatgcgattaagacctggagattttctaacatgaaacaatggaatgttaactgggagataaagatggtgacagttgaattcgccgatgaggtacggctgagttttatctgcactgaggtggattgtaaagttgtgcatgaattcatcggtggttacattttcctgagcacaagggccaaggaccagaatgaatcattggatgaggagatgttttataagctgacctcaggttgggtatag

SEQ ID NO: 187752 - DNA, 2043 bp, synthetic construct
  misc_feature 1..2043: note = Description of Artificial Sequence: Synthetic coding sequence
  source 1..2043: mol_type = other DNA
atggccctggacggcatccggatgcccgacggctgctacgccgacggcacttgggagcttagcgttcacgtgaccgacctgaaccgggatgtgacattgcgcgtgaccggagaggtgcatatcgggggggtgatgctgaagctggtcgaaaagctggacgtgaagaaagactggtccgatcacgctctatggtgggagaaaaaaaggacttggctgctcaaaacgcattggaccctggacaaatatgggattcaagccgacgcaaagctccaatttaccccccagcataagttattaagacttcaactccctaacatgaaatatgtcaaggtgaaggtcaacttcagcgaccgcgtgtttaaagctgtgagtgacatatgtaagacgtttaatatcagacaccccgaagaactaagtctcttaaagaagcctcgcgatccaacaaaaaagaagaaaaagaaactcgacgatcagagcgaggacgaggccttagagctggaaggccctctaattacgccaggctccggcagcatctactcatctccgggactgtattcaaagactatgactcccacatacgacgcccacgatggatctccattgagccccaccagcgcatggttcggagattcagccctcagtgagggaaatcccggcatactcgctgtttctcagcccataacatcccctgagatccttgcaaagatgtttaaaccacaggctctgctggacaaggcaaagatcaaccaggggtggctggactctagccggagcctgatggagcaggatgtgaaagagaacgaggccctcctgctccggttcaaatactactcgtttttcgatttgaatcccaaatacgacgcgattagaattaatcagctgtacgagcaggccaaatgggctatactgttagaagaaatcgaatgcacagaagaggagatgatgatgtttgccgcactgcaatatcatattaataaattgagtattatgacctccgaaaaccacctgaacaactcagacaaagaggtggacgaggtcgacgctgcactctccgacctggaaataacactcgaaggcggcaagacatcgactatcctgggtgatatcacgtcaatcccggagctcgccgactatatcaaggtgttcaagcccaagaagcttacacttaagggctataagcagtactggtgtacttttaaagacacatccatcagctgctataagtcgaaggaggagtcttcagggacacctgcgcatcagatgaatttgcgcggatgcgaagtcaccccggacgttaacattagcggtcaaaaatttaacattaagctcctcattcccgtcgctgaaggaatgaacgagatctggttgcgttgcgacaacgagaaacaatacgctcattggatggctgcatgtagattggcctctaagggcaaaacaatggccgactcttcctataatttagaggtacaaaatatcctgtctttcttgaaaatgcagcacttaaatcccgacccccagctgataccagaacagattaccactgatattaccccagagtgtctggtgagtccaagatatctaaagaaatataagaacaagcagataacagccaggatcttagaagcacaccagaacgtggcgcaaatgagtcttatcgaagccaagatgcggttcatccaagcatggcagagcctcccggaattcgggatcacccacttcattgctcgtttccagggtggaaagaaggaggagctgatcggcatcgcttataatcgcctgatcaggatggacgcatcgactggagacgccatcaaaacctggcggttcagtaacatgaagcagtggaatgtcaattgggaaattaaaatggttacagtggagttcgcagacgaggtccggttgagctttatttgcaccgaggttgactgcaaggtagtgcacgaatttattggaggctatatatttctgagcacaagggccaaggaccagaatgagtcccttgatgaagaaatgttttacaaattgacctcgggctgggtgtag

SEQ ID NO: 187753 - DNA, 1902 bp, synthetic construct
  misc_feature 1..1902: note = Description of Artificial Sequence: Synthetic coding sequence
  source 1..1902: mol_type = other DNA
atggccctggacggcatccggatgcccgacggctgctacgccgacggtacctgggagctgtcagtgcatgtaacggacctgaaccgcgatgtgactcttcgagttacgggcgaagtgcatatcggaggagttatgctcaagctggtcgaaaaactggacgtgaagaaagactggagcgaccatgccctgtggtgggagaagaaacgtacatggctcctgaagactcattggacccttgataagtacggtatacaggcagacgctaaactgcaattcacaccgcagcacaaactcttgcgcttgcaactgcctaatatgaaatatgttaaggtcaaggttaattttagcgatagagtgtttaaggctgtgtcagacatatgtaaaacatttaacatccgacatcctgaggaactcagtctgcttaagaaaccaagagaccctaccaaaaaaaaaaaaaaaaaacttgacgatcaaagcgaggacgaggccctcgagcttgaggggcccctcattactcctggcagcggcagcatttactcctcgcctggcctttatagcaagactatgactcctacctacgatgcacacgatggttcacctctgagccccacgtcagcctggtttggtgacagcgctttaagtgagggtaaccccggtatcctggctgtcagccagcctattaccagccctgaaattcttgctaaaatgttcaagccacaagcactgctagataaggccaaaattaatcaaggttggctggattcatcccgatcattaatggagcaggatgtaaaggagaacgaagcgttactgttgcgattcaagtattacagcttcttcgatcttaatcccaagtacgacgcaattaggattaaccaattgtatgaacaggcgaagtgggccatccttttggaagagatcgagtgtacggaagaagaaatgatgatgttcgcagcgctccaatatcatattaacaaactgtccatcatgacaagcgaaaatcacctgaacaactcagataaagaggtagacgaggtcgatgccgctctgtcagatctggaaattactttggagggcgggaaaacgagtaccattctgggtgatataacgtccattccggaacttgcagattatatcaaagtgtttaagcccaaaaaacttacactaaagggctacaagcaatactggtgtaccttcaaagatacatcaatcagctgctataaaagcaaagaagagagttccggcaccccagcgcatcagatgaatctcaggggttgcgaggtcacccccgatgtgaatatcagcggtcagaaatttaacatcaaattgctgatacccgtcgctgaagggatgaacgagatctggttaagatgcgataacgaaaaacagtacgcacactggatggcagcttgccggctggcatccaagggcaaaacaatggcggatagttcttacaatcttgaggtgcaaaacatactgtctttcttaaagatgcaacatctgaatccggatccacaactgattcccgagcaaatcacaacagacatcacaccggaatgtctcgtctctcccaggtacctcaaaaagtacaaaaacaagcagccagggtacattcgggacctaatcacagctagaatcttggaagcacaccagaatgtggctcaaatgagtctcattgaagcaaagatgcggttcattcaagcctggcagagcctacccgagttcgggatcactcatttcattgccaggttccagggtggcaagaaggaagagctgattgggatcgcctacaaccgtttgattcggatggacgcgtccactggagacgccattaagacttggaggttttcgaatatgaagcaatggaatgttaactgggagatcaaaatggtgaattcttag

SEQ ID NO: 187754 - DNA, 2064 bp, synthetic construct
  misc_feature 1..2064: note = Description of Artificial Sequence: Synthetic coding sequence
  source 1..2064: mol_type = other DNA
atggccctggacggcatccggatgcccgacggctgctacgccgacggcacctgggagctgtcagtccacgtgaccgacctgaaccgggatgtgaccctgcgcgtgacgggcgaagtgcacataggaggcgtcatgttaaagctggtcgaaaaactcgatgtgaagaaggactggagtgaccacgccctttggtgggagaaaaagcggacttggcttctcaagacgcactggacgctagataagtacggcattcaggctgacgcaaagctgcagttcactcctcagcacaaattgttgcgcttgcagctgcctaacatgaagtacgttaaggtgaaagtcaactttagcgatcgcgtttttaaagccgtaagtgatatttgtaagactttcaatataaggcacccagaggaactgtcccttcttaagaaaccaagggatcctaccaagaaaaaaaaaaagaagctggacgaccagagtgaagatgaagctttggagctggaagggcccctgataacaccgggtagcggatccatctatagcagcccaggactgtatagtaaaaccatgactcctacttacgatgcccatgatggctctcccctatcccccacgtcagcttggtttggagatagcgccctgtccgagggaaatcccggcatccttgcagtctctcaaccaattacgtcgcctgagattctggccaagatgttcaagccgcaagcactgctggacaaggccaagatcaatcagggttggctcgacagcagcagaagcctcatggaacaagacgttaaagagaacgaggccctgttgcttaggtttaagtactactctttctttgatctgaacccaaaatacgatgctattagaattaatcaactgtacgagcaggctaaatgggcaatcctactcgaggaaatcgaatgtactgaagaggagatgatgatgtttgctgcattgcaataccatatcaacaaacttagtattatgacttcagagaaccatctcaacaacagtgacaaagaagttgatgaggtggacgccgccctgagtgacctcgagattacgctcgaaggtggaaagacatcaacaatattgggtgacattacatcaatcccagaattagcagattatattaaggtctttaagcccaaaaaacttaccctgaaaggctataaacaatactggtgtacattcaaagacacaagcatttcctgttacaagtccaaggaggagtcctctggtactcccgcccatcaaatgaacttacgcggttgcgaggtgactccagacgtcaatatctccggacagaagtttaatatcaagttgctcattccggtggctgagggaatgaatgagatctggctcaggtgtgacaacgagaagcagtacgcgcattggatggcagcgtgtagactggctagtaagggcaagaccatggccgactcgagctataacttagaggtacaaaatatcttgtcttttctcaagatgcaacatctcaatccagatccccagctgatccctgagcagatcacaactgatataacccccgagtgtctagtaagcccccgctacttaaaaaaatacaagaataaacagcccggctatattcgggacctgatcacagccaggattttggaggcacaccagaacgtggcccaaatgtctctgattgaagctaagatgaggtttattcaggcctggcagtctctgccagaattcgggattacacacttcatcgcccgctttcaaggcggaaagaaagaagaattaatcgggatagcttataatcgactgattaggatggacgcctctactggcgacgcgatcaagacctggaggttctccaatatgaagcagtggaatgtcaattgggaaattaagatggtgaccgtcgagttcgcggatgaggttcgactaagcttcatctgtactgaagtggactgtaaggtggttcacgagtttatcggcggatacatattcttgtctactcgcgcaaaagaccagaatgaaagcctggatgaagaaatgttctataaactcactagcggatgggtgtag

SEQ ID NO: 187755 - DNA, 462 bp, synthetic construct
  misc_feature 1..462: note = Description of Artificial Sequence: Synthetic coding sequence
  source 1..462: mol_type = other DNA
atggccctggacggcatccggatgcccgacggctgctacgccgacggtacctgggaattgtcagtccatgttaccgatctgaatagggatgttaccctccgggttacaggggaagtgcatatcggaggagtgatgctgaaactggtcgagaagctagatgtgaaaaaggattggtctgaccacgctctgtggtgggaaaaaaagcgaacatggttacttaagacccattggactctggacaagtacggaatccaagccgacgcaaagttacaattcacgccgcagcacaaattgttgcggctgcagttgcccaatatgaagtacgtgaaagtaaaagtgaacttttccgatcgggtgttcaaggccgtctctgacatatgcaaaacgttcaatatcagacaccctgaggagctgtctctgctgaagaaaccacgtgatccaactaaaaagaaaaaaaagtag

SEQ ID NO: 187756 - DNA, 2004 bp, synthetic construct
  misc_feature 1..2004: note = Description of Artificial Sequence: Synthetic coding sequence
  source 1..2004: mol_type = other DNA
atggccggcatgaagaccgccagcggcgactacatcgacagcagctgggagctgcgtgtcttcgtcggtgaggaggacccagaggcagagtccgttacactccgcgtgacaggagagagtcacattggcggggttttactgaagatcgtggagcagatcaatagaaagcaggattggtcagaccatgctatttggtgggagcaaaaacggcagtggctactgcagacacactggaccttggataaatatgggatcctggccgatgcccggctgttcttcggcccccagcatcgcccagtcatcctgaggttgccgaacagacgggctctcaggctgcgggcttcgttctcacagcctctgttccaggctgtagctgccatctgtagactcctatcaataagacaccccgaggaactttcacttctcagggcccccgagaagaaggagaaaaagaagaaagaaaaagaacctgaagaagagctttacgacctctcaaaggtggttctcgccggcggcgtggcgccagctctgtttagggggatgccggcccatttctcggactctgcccaaacagaagcatgctaccatatgttatcccgaccacaaccgccccccgacccattgctgctgcagaggctccctcgcccttcatctctctccgataagacacagttgcattccaggtggctcgattcaagtagatgcctaatgcagcaggggatcaaagctggggacgcactgtggttaagatttaagtactattcttttttcgacctcgatccaaaaaccgaccctgtgcggctaacccagctgtacgagcaggcacggtgggatctgctcttggaggagattgattgcaccgaggaggagatgatggtctttgctgccctgcagtaccacattaacaaactgagccagagcggggaagttggagagcccgccggcaccgatccaggcctcgatgatttagacgtcgccctctcaaacctggaggttaaactggagggcagcgcccctaccgatgtcctagatagcctcacaaccatacctgagctgaaagaccatctaagaattttcagaatcccaagacgcccacgtaaactgaccctgaagggctatcggcagcattgggtcgtgttcaaagagacaactctgtcctactacaagtcacaggatgaagcccctggtgatccaatacagcaactcaatctgaaggggtgtgaggtggtgccggacgtaaatgtcagcggccagaagttctgtatcaagctgttggttccatcacccgaaggcatgagcgaaatctatctgaggtgtcaggacgagcagcaatacgcgaggtggatggctggctgccggttggccagtaaagggcgcaccatggcagatagcagctacacttcggaggtccaggcaatactggcattcctctccctccaaaggactgggtccggcgggcccggcaatcatccacatggcccagatgcttctgccgaaggcctgaatccctacggcttggtcgcccctagattccagaggaagttcaaagctaaacaactgactccccggattctggaggctcatcagaatgtggcccagctttcgctggccgaagcccaactcagattcattcaggcatggcaaagtcttcccgactttggaataagctacgtcatggtaagattcaagggtagcagaaaagacgagattttgggtatagccaacaaccgacttataaggatagatttagctgtgggagatgtagtaaagacctggcggttcagtaatatgcgtcagtggaatgtcaactgggacatcagacaggtggctattgagttcgatgagcacattaatgtggccttctcttgcgtgagtgctagctgcagaatagttcacgagtatataggaggatatattttcctgagcacgagagagcgagccaggggggaggagctcgatgaggacttgtttctccagcttactggaggccatgaagctttctag

SEQ ID NO: 187757 - DNA, 1992 bp, synthetic construct
  misc_feature 1..1992: note = Description of Artificial Sequence: Synthetic coding sequence
  source 1..1992: mol_type = other DNA
atggccggcatgaagaccgccagcggcgactacatcgacagcagctgggaactccgggtgttcgtaggcgaggaggatcccgaggccgagagcgtgactctgcgggtcaccggcgaatcccacatcggcggggtgctattgaaaattgttgaacagatcaacaggaagcaggactggagcgatcatgctatatggtgggaacagaagcgccaatggctgctacagacacactggactctagataagtatggcattctcgccgatgcccggctctttttcggtccacaacatagacccgttattctgaggctgcctaaccggcgggctctgcggctcagagctagcttttcccagcccttgttccaggccgtcgctgctatctgtcgtcttctttcaattcgccatccggaggaactgtctctgctaagagctcctgagaaaaaagaaaaaaagaagaaggagaaggagcccgaggaggagctgtatgatctatccaaggtcgttctggccgggggagtggcacccgctctgtttcggggtatgcccgcacacttttcagactctgcacagaccgaggcctgttaccacatgctgagcaggccgcagcctcctccggacccactgctgttgcagcggcttccccggccttcaagtctctccgacaaaacccagctgcattctcgatggcttgacagctctcgctgtttgatgcaacagggaattaaagccggggatgcattgtggctgaggttcaagtattactcattcttcgatctggatcctaaaactgaccccgtacggctgactcagctctacgagcaggcgcgctgggacttgttgttggaggagatcgactgtactgaggaagaaatgatggtttttgcggcactccagtatcacataaacaagcttagccaatccggcgaagtcggcgagccagccgggactgaccccggcctggacgacctagatgtggccctatcaaacctagaggtgaagttggagggctccgcgcctaccgatgtgctcgatagcctgacaactattcctgagctcaaggaccacttgaggatcttcagaccacggaagctgaccctgaaggggtatagacagcattgggtggtcttcaaagaaacaaccctgtcctactacaagtcacaggacgaggctccaggagaccctatccagcaactcaatctcaaagggtgcgaggtggtgcctgacgtgaacgtgtctggccagaagttctgtataaagctgctggtcccaagcccggaagggatgagcgagatctacctcaggtgccaggacgagcagcagtatgcccgctggatggctgggtgcaggcttgcaagcaaaggtaggaccatggctgactccagctatacttcagaggtgcaggccatcctggcatttctcagcttgcagcgcacaggaagcggaggaccaggaaaccacccacatggacccgatgccagtgccgaaggactgaatccttatggactggtcgcccctcgcttccagcggaagtttaaggctaagcagttaacacctcgcattcttgaggcccatcagaacgttgcacagttgtctctggccgaggcccagctgcgtttcatccaagcatggcagtctctgccagacttcggtatcagctacgtgatggtacgctttaaaggcagtcgtaaggatgagatcctggggatagccaacaacaggttgataagaatagacctggcagttggcgacgtggtgaaaacatggcgcttttcaaatatgagacagtggaacgtgaactgggacataagacaggtggcgatcgagtttgacgaacatattaatgtggcttttagctgcgtctccgcctcttgtagaattgtccacgaatacatcggtggatatattttcctctcaacacgagagagggcccgcggcgaggaacttgatgaggatctcttcctacagctgactggcgggcacgaggcattctag

SEQ ID NO: 187758 - DNA, 861 bp, synthetic construct
  misc_feature 1..861: note = Description of Artificial Sequence: Synthetic coding sequence
  source 1..861: mol_type = other DNA
atggccggcatgaagaccgccagcggcgactacatcgacagcagctgggagctcagggtattcgttggcgaggaagatcccgaggccgaatctgtaacgctgagagtgacaggcgagagccacattggaggagtcttacttaaaattgtggagcagatcaatcgcaagcaggactggtcagatcatgccatatggtgggagcagaaaagacaatggcttttgcaaacacactggacgctcgacaagtacggaatccttgctgatgccaggttgttctttggtccacagcatcgacccgtgattctgagactgcctaatagacgcgctctcaggctgcgagctagcttctcgcagcccctttttcaggcggttgcagcaatctgcaggctgctgagtattcgccacccagaagagctgtcgctgttgcgggcccctgagaaaaaggaaaagaaaaaaaaagagaaagagcccgaagaagagctgtacgatctttccaaggtggtcctggctggaggggtcgccccggcactctttagggggatgccagcccacttctcagactccgcacagactgaagcttgttaccatatgctcagccggcctcaacctcccccagatcccctcctgctgcaaagactgccacgaccctcttctttaagtgataaaacacagctccacagtcgatggctggacagttcgagatgcttgatgcaacagggaatcaaggcaggggacgctctgtggcttcggtttaaatattactctttctttgatctagatccaaagacagaccctgtgcgccttactcagttatacgaacaagcccgctgggatctactcctagaggaaattgattgttag

SEQ ID NO: 187759 - DNA, 555 bp, synthetic construct
  misc_feature 1..555: note = Description of Artificial Sequence: Synthetic coding sequence
  source 1..555: mol_type = other DNA
atggccgccgccggcggcgcccggctgctgcgggccgccagcgccgttctgggagggccagccggccgctggttgcatcacgcgggctcccgcgccggctcttcagggcttcttcgtaaccggggaccggggggatctgctgaggccagcaggagtttgtccgtgagtgctcgagctcggagctcctctgaagataaaatcactgttcacttcattaaccgcgacggggaaacactaactacgaaagggaaggtaggggactcactcctagacgtcgtggtggagaataatttggacatagacggttttggagcgtgcgagggtaccctggcgtgttccacctgtcatctaatttttgaggatcatatctatgagaagctggatgccatcactgacgaagagaacgacatgttagacctcgcctatggccttaccgatcggtcccgcctcggctgtcaaatttgtctgacaaagtctatggacaatatgaccgttcgcgtccccgagacagtggccgatgcccggcagagtatcgacgtcggcaagacttcatag

SEQ ID NO: 187760 - DNA, 1494 bp, synthetic construct
  misc_feature 1..1494: note = Description of Artificial Sequence: Synthetic coding sequence
  source 1..1494: mol_type = other DNA
atggccagccggtgctggcggtggtggggctggagcgcctggccccgcaccaggcttccccccgctgggagcaccccaagcttctgccatcatttttcaacccaggagaagactcctcagatctgtgtcgtcggatcaggcccagccgggttttatacagcacaacatctgctaaaacatccacaggctcatgtcgacatatatgagaagcagcccgtgccttttggactggtcagattcggtgtcgctcctgaccaccctgaagtgaagaatgtgattaacactttcacgcagactgcacattccggtcgctgcgctttttgggggaacgtcgaggtggggcgtgatgtgacagtgcccgagctgcgcgaagcttaccacgccgtggttctgtcatatggggctgaagaccacagggccctcgagatacccggcgaggaattacctggggtgtgctctgctagggcgttcgtgggatggtacaacggcctccccgaaaatcaagaattagagcccgacctgagctgcgacaccgcagttatattgggtcaggggaacgttgctctagatgtggctaggatcctcctcacaccaccagagcacctggaagctcttttactgtgtcaaagaacagatatcaccaaggccgcgctgggagtcctgcgccagtccagagtgaagacagtatggttggtaggtaggcgaggccccctgcaggttgcgttcaccatcaaggagctgcgggaaatgattcagctgcctggagcaagacctattctcgaccctgtggattttctaggcctccaggacaaaataaaggaggtgccacgcccccgaaaacggctgaccgagcttctgctgcgaacggccacagaaaagcctgggcccgcggaggcggcacggcaagcttcggcttcacgcgcctggggccttcggtttttccgatctcctcagcaggtgctgcccagccctgatgggcgcagggctgccggtgtgaggttggctgtcacacgtctcgaaggagtggacgaagctactcgcgctgttcccactggcgacatggaagacctgccatgtggtttggttcttagctctatcggctataagtctcggcccgtagacccttctgtgccttttgatagcaaactcggagtgattcctaatgtagaaggaagagtcatggacgtgcctggcctttattgtagcggatgggttaagcggggccccaccggtgtaatcgccacaacaatgacagacagctttctgacaggtcaaatgctgctgcaggacttgaaggcggggttgctcccctctggcccacgccccggctacgcagccatccaagcacttctctcttcacgcggggttcggccagtatcatttagcgactgggaaaagctggatgcagaggaggttgcccggggacaaggcactggtaaaccccgcgagaaattagtcgatccccaggagatgcttcgtcttctcggccactag

SEQ ID NO: 187761 - DNA, 1569 bp, synthetic construct
  misc_feature 1..1569: note = Description of Artificial Sequence: Synthetic coding sequence
  source 1..1569: mol_type = other DNA
atggccagccggtgctggcggtggtggggctggagcgcctggcccaggactcggctgccgcctgctggatccactccaacttttggtggttcagacgaggtgagggaccctgccaatgcaaaggctctgcggaataagagacggcggatgcaggtgcgcgtaaaattaggcaagttccagctgctgttagatattcaggaaaaaaccccccagatttgcgtggttgggagcggccctgcagggttctacactgcgcagcacctcctgaagcatccacaagcccatgtcgatatatacgagaagcagcccgtcccgtttggcctggtgcgattcggcgtggcaccagatcacccggaggttaaaaatgttattaatacattcacccagacagctcacagtggccgctgcgcattttgggggaatgtggaggtagggcgcgatgtgaccgttccagaattgcgggaggcttatcatgccgtagtgctgtcttacggagcagaagaccaccgggcgttggagatcccgggagaagaactgcctggagtatgcagtgcgcgggcctttgtgggctggtacaatgggctgcccgaaaatcaagagttggagcctgaccttagctgcgatacggccgtgatccttgggcagggaaacgtggcactcgatgtggcacgaattttgttaaccccacccgaacacttggagcgtaccgatattaccaaggctgccctcggagttctgagacagagtcgagtcaagaccgtgtggctggtgggaaggcgtgggcctctgcaagtggcctttaccattaaagagctgcgcgagatgattcagctgcctggggcgcggcccattctagatccggtggactttctgggtctgcaagataagattaaggaagtgcccaggcctaggaaaagactgaccgagctgttactacggaccgcgaccgaaaagcctggtccggcagaggccgctcggcaggcctcagcctctcgcgcatggggactgaggttttttcggagccctcaacaagtgcttccaagccctgatgggcgccgcgctgcgggggtgcgtctcgccgtcactcggctggagggagttgatgaggcaactagagcggtccccaccggagacatggaagacctgccttgcgggctggttttgagtagcatcgggtacaaaagtagacccgtcgacccgagcgtccctttcgactcaaaattaggggtgatcccaaacgtcgaaggaagggttatggatgttccgggactttattgctctggctgggtgaagcgcgggcctactggggtcatagccaccaccatgactgattcctttctgactggccagatgctgctgcaggacctgaaagcggggcttctcccttcgggcccccgacccggttacgccgctattcaggctctgttgtcatctaggggcgtgcggccagtgtcctttagtgattgggagaagctagacgccgaagaagttgctcggggccagggcaccggcaaaccaagggagaagctggttgacccccaggagatgctgcgcttgctggggcattag

SEQ ID NO: 187762 - DNA, 1356 bp, synthetic construct
  misc_feature 1..1356: note = Description of Artificial Sequence: Synthetic coding sequence
  source 1..1356: mol_type = other DNA
atggccagccggtgctggcggtggtggggctggagcgcctggcccagaactaggttaccccctgccggaagtacaccctcattttgccaccactttagtacacaggaaaaaacaccccagatctgcgttgttggaagcggcccagctggattttatacggcacagcacctgctgaaacagcacccccaggcacacgttgacatctatgaaaagcagccagtgccattcgggttagtgcgattcggggtggctccggatcaccctgaagtgaagtcctacggagcagaggaccatcgagccctcgagatcccgggcgaagagctcccaggcgtgtgtagcgccagggcattcgtaggatggtataatgggctaccagaaaaccaggagctggaaccagatctctcatgcgacacagccgtgattttaggtcaggggaatgtcgctctcgatgtggcccgaatacttctgaccccacccgaacacctcgagcgcaccgatataacaaaagctgctctgggcgttttaaggcagtccagagtgaagactgtttggcttgtgggcagaagaggacctctgcaagtcgcctttacaatcaaggagctcagggagatgattcaacttccgggagcccgccccatccttgaccctgtcgacttccttgggttgcaagacaaaattaaggaagtaccacgccccaggaagcgccttaccgaactcctgcttagaacggctaccgaaaagccaggccctgcagaggcagcccggcaggccagcgcctcgcgagcatggggcctccgcttcttcagaagtccacagcaggtgttaccctcccccgatggccggagagctgctggggtccgcctggctgtaaccagactggaaggtgtagacgaagcgaccagagcagtgccaactggcgatatggaagacctgccttgcggccttgtcctgtccagcatcggttataaatccagacctgtggaccctagtgtcccctttgattcaaaactcggcgtcatccctaacgtcgagggccgagtcatggacgtgcccgggttatactgttccgggtgggtcaagaggggtcccacgggcgtcattgcaacaaccatgaccgacagttttctgaccggacagatgcttctgcaggatcttaaggctggcctacttccaagcggcccaaggcctgggtacgccgcaatacaggcccttttgtctagccggggagtgaggccagtcagctttagcgattgggaaaaactcgatgccgaagaggtggcccgcgggcaaggcaccggcaagccccgcgagaaacttgtggatccacaagagatgcttcgcttgcttggacattag

SEQ ID NO: 187763 - DNA, 1605 bp, synthetic construct
  misc_feature 1..1605: note = Description of Artificial Sequence: Synthetic coding sequence
  source 1..1605: mol_type = other DNA
atggccagccggtgctggcggtggtggggctggagcgcctggcccaggacgcgtttgccccccgctgggagcacaccgagtttttgtcaccatttctctactcaggaaaaaacgccccagatttgtgtcgtgggaagcggtccagctgggttttatacagcgcagcatcttctgaaacgcgtggaagctctgtgctctcaaccaagggtactaaattctcctgcactctctggggaaggcgaagatctcggtgcctcccagcctctctcacttgatccaacctcctgccatccagtccctcagcagcaccctcaggcccacgtggacatttatgaaaaacaaccagttccgtttggtctagttaggttcggtgttgccccggaccatccagaggttaagaatgtgatcaacactttcacgcagacagcccactccggccgatgcgccttttgggggaacgtagaggtcgggcgagatgtgactgtgccagaactgcgggaggcctaccacgctgtggtactctcttacggggctgaggatcatagagctttggaaatcccgggagaggagcttccaggcgtgtgctctgctcgcgcatttgtcggctggtataatggactgcctgagaatcaggagctggagcccgatctgagctgtgacactgcggttattctgggccagggtaacgttgcacttgatgtggccagaattcttctgacccccccagaacacctcgagcgcaccgacatcacaaaagctgccctgggcgtattacggcagtccagagttaaaacagtgtggttagttggtagacgtgggcccctccaggtggctttcactattaaagaactacgggaaatgatccagctgccaggagctcggcctatcctggatccagttgactttcttggactgcaggacaaaatcaaggaagtgcccagacctagaaagcgacttacagagctattgctgcggaccgcaacggagaagcctggacccgccgaagctgcgaggcaggcgagcgcatctcgcgcctggggactgcggttcttccggagtccccagcaggtgcttccctcaccagatggaaggcgcgccgcaggtgtgcggctggcagtgaccaggctggaaggggtggatgaagctacaagggctgtgcccaccggcgatatggaagatcttccctgcggactcgtgctgtcatccattgggtataagagtagaccggttgacccaagcgtaccatttgactcaaaactgggagtaattcccaacgtcgaaggccgggtgatggacgtccccgggctgtattgtagtggatgggtgaagcgtgggccaactggtgtgatcgccacaactatgacagattctttcctaaccggacagatgttgctgcaggatctaaaggcggggctcctcccttctggccctaggccaggttatgccgccatccaggcattgctgtcctcccggggagtgaggcccgtatctttttccgattgggaaaaactggatgcagaggaagtagcaaggggccagggaaccggaaaacccagggagaagctggttgatcctcaggaaatgctccgcttgcttggccactag

SEQ ID NO: 187764 - DNA, 1146 bp, synthetic construct
  misc_feature 1..1146: note = Description of Artificial Sequence: Synthetic coding sequence
  source 1..1146: mol_type = other DNA
atgaccacctgcaaggccggcgtggtgcccctggccagccagcagcacccgcaggcacacgtggatatttatgagaagcagcctgtgccattcgggttagtccggttcggagtagcccccgaccatccagaagtcaagaacgttatcaacacctttacacagaccgcacactcaggccggtgcgcgttttgggggaatgtcgaggtggggcgggacgtgactgtgccagagctgcgggaggcatatcacgccgttgtcttgagttacggagcagaggaccacagggctttggaaattcccggggaggaacttcctggcgtctgcagcgctagggcctttgttggctggtacaatggccttcccgagaaccaggagctagagcctgatctttcatgtgacacagccgtgatactagggcagggcaatgtggcccttgacgtcgcaaggattctcctcactccccccgagcatctggagcgaaccgacataaccaaggccgctttgggtgtgttgagacagtcccgagtgaagacagtatggttggtgggacggagaggaccgttgcaggttgccttcaccattaaagagctgcgagaaatgattcagctccctggagccaggccaattctcgatccagttgatttcctgggacttcaggacaaaatcaaagaagtcccacggcccagaaagcgactgaccgagttgctgctccgaacggcgaccgaaaagccgggaccggctgaggccgcccggcaggcctcagccagtcgggcctggggtcttaggttcttcagatcgcctcagcaggtcctcccttcgcccgacggacggcgagcagccggagtgcgattggccgtcacgcgcttagaggtgtcactcatgttcctcaaggacaccccctttccaggactgtgccatcctcccggcgttgcccataccctgcccaaccgcgtatcgatgcggccccccgtgcagtgccctcgagaaacttggaagacttcactcgttgggtggtgtagcgctgccctcggtattcgcgccgcccttagtacacaggcctgtccactgactccaagcctaggttcgagtcctatgtggcgggcagggctgtggatgtgccaggcctctacagctgccgccggatag

SEQ ID NO: 187765 - DNA, 1320 bp, synthetic construct
  misc_feature 1..1320: note = Description of Artificial Sequence: Synthetic coding sequence
  source 1..1320: mol_type = other DNA
atggaggacaaggaccgggagcacccccaggcccacgtggacatctacgagaagcaaccagtcccctttggactggtccgctttggagtggcaccagatcaccctgaagtcaaaaacgtgattaacacattcactcaaactgcgcacagcggccgttgcgctttctgggggaacgtcgaagtggggagagacgtgactgttcccgaactgcgagaggcgtatcacgctgtggtcctctcatacggcgcagaagatcaccgcgccctagagatacccggagaagagttgccaggtgtgtgttctgccagagctttcgtggggtggtacaacggccttcccgaaaaccaggagcttgagcccgatctctcctgcgatactgcagtaatcttgggacagggcaacgtagctttggatgtcgcaaggattctgctgactcctccagagcatctagagagaacagacatcacgaaggcagccctgggcgtgcttcgccaatcccgtgtcaaaacagtttggctggtgggccgtaggggtcccctgcaagtcgcattcaccattaaggagcttcgcgagatgattcagctccctggagctcgacccatactggatccagtcgatttcttgggcctccaggataagattaaagaggtgccgagaccaagaaaaaggctcacagaactattgctcaggactgccactgaaaagcccggaccagctgaagcagccaggcaagcttctgccagtcgggcttgggggctgagattctttcgttctcctcagcaggtgttaccttcacccgatggccgaagggccgccggggtaagactcgctgtcacaaggcttgaaggcgtagacgaagccaccagagccgtgccaactggggacatggaagatctgccatgtggccttgtgctatcttctattggctacaagtctcgtccagtggatccctccgttccattcgacagtaaattgggagtcatcccaaacgtcgaggggcgcgtgatggatgttcctggattatactgctctggctgggtaaagcgcggacctactggagtgatagccacaactatgacagatagcttcttaacaggccagatgcttctccaggaccttaaggcaggcctgctgccaagcggtccacgacccggatacgccgctatacaggctcttctgagttcccgcggagttaggcccgtaagctttagtgactgggaaaagctcgatgccgaagaggtggcaagagggcagggaactggtaagccgcgggaaaagctggtggacccacaggagatgttaagactgctaggccactag

SEQ ID NO: 187766 - DNA, 1494 bp, synthetic construct
  misc_feature 1..1494: note = Description of Artificial Sequence: Synthetic coding sequence
  source 1..1494: mol_type = other DNA
atggccagccggtgctggcggtggtggggctggagcgcctggcccagaaccagactccctccagctggctctaccccatctttctgccatcacttctcaacccaggagaagaccccccagatctgtgttgtgggatccggcccagcgggcttctatacagcgcagcacctgcttaagcacccacaggctcatgtggatatttacgagaagcagcccgtcccttttggactggtgcgattcggagtggccccagatcatccagaggtgaaaaatgtgattaacaccttcactcagaccgctcatagtggtagatgtgctttttggggcaatgtcgaagtgggacgagatgttacggtgccggagctgagagaggcttatcatgccgtggtcctgagctacggggcagaagaccatagagcactggagatcccaggcgaagaactgccaggggtctgctctgcacgggcctttgtcggctggtacaacggactgcctgagaatcaggagcttgaaccggacctaagctgtgacactgctgtgatactcgggcagggcaatgtggccttagacgtcgctagaatcctgctcaccccgcccgagcacctagaggcactcctgttgtgccaacggaccgatattaccaaagccgcactgggagttctgaggcaaagtagggtcaaaactgtgtggttagtagggaggagggggcctttgcaagtggcattcacaatcaaagagttgcgggagatgattcaactgcctggggcccgtcctatcctcgaccccgtggatttcctggggctgcaggataaaatcaaggaagtgcccagaccacgcaaacgtcttactgagcttctcctgaggacagcaactgagaaaccaggacccgcagaggcagcgcgccaagcttccgcatctagagcatgggggctgcgcttctttcggagtcctcagcaggtcctgccaagtccagacgggagacgagcagcaggcgtcaggctcgccgtcacaaggttggagggcgtggacgaggctactcgtgccgtcccaacaggcgacatggaggatcttccatgtgggctagtgctctcaagcattggatataaaagccggcccgtcgatccatctgtcccttttgattcgaaactgggcgtgatcccaaacgtggagggaagagtcatggacgtgcccggtctgtattgctccgggtgggtaaagagaggccccaccggggtgatcgctacaacaatgaccgactcattcctcacggggcagatgctgttgcaagatctgaaggccggactactaccctcgggacccagaccaggctacgccgccattcaggccttactgtctagcagaggggtgaggcccgttagttttagtgactgggagaagctggatgccgaggaagtggcacgtggccaggggaccgggaagcctcgcgaaaagcttgtggacccacaggaaatgctccgcctgctggggcattag

SEQ ID NO: 187767 - DNA, 1452 bp, synthetic construct
  misc_feature 1..1452: note = Description of Artificial Sequence: Synthetic coding sequence
  source 1..1452: mol_type = other DNA
atggccagccggtgctggcggtggtggggctggagcgcctggccccgaaccaggctgccacctgcaggctccaccccatccttttgccaccatttttccacccaagagaaaacccctcaaatctgcgtggtgggcagcggcccagctggattctatacggcccaacacctcctcaaacaccctcaagctcatgtggacatctacgagaagcaacctgtgccgtttgggctggtgaggttcggggtggccccggatcatcctgaagtgaagactgctcattcaggtagatgcgctttctggggaaacgtggaggtggggcgtgacgttactgtgcctgagctgagagaagcttatcacgctgtcgtcctctcttacggtgccgaggaccatagggccctggagatacctggggaggagcttcccggtgtctgttccgctagggccttcgtagggtggtacaacggcctgcctgagaaccaggaactggaacccgatctgtcatgtgatactgccgtgatcctgggtcagggcaatgtggccctggacgttgcccggatcctccttactccccctgaacacctggaaaggactgatatcacgaaggccgctctgggagttctgcggcagtctcgagtgaagactgtctggctcgtgggtaggcgggggcccctacaggttgctttcacaatcaaggagctccgcgaaatgattcagctgcccggtgcgagaccaattcttgatcctgtggatttcttggggctgcaggacaaaatcaaggaggttcccagacctcgaaaacgtctgaccgaactcctcctgagaacagctaccgagaaaccaggaccagccgaagcagctaggcaagcttcagcctcccgtgcatggggtctgagattctttaggtccccgcagcaggtgctgccatctccggacggccggagagctgccggcgtccgattagccgtcacacgcctggaaggcgtagacgaagccactcgggcggtgccaacgggggacatggaggacttgccctgtggtctggttttatcctcaattgggtataaaagcaggccagtagatcccagtgtgcccttcgatagtaagttgggtgtcattccaaacgtggaagggagggttatggacgtacccggactctattgtagtggctgggtaaaacggggcccgactggggttattgccactaccatgactgactcgttcttgactggccagatgttgctgcaagacctcaaggctggtctgctgccgagtggccccagacctggctacgctgctattcaggctctactatcttccagaggcgtgcgtcctgttagcttctctgattgggaaaagctggacgcagaagaggtagcccgtgggcagggaaccggcaagccccgagagaaacttgtggacccacaagaaatgcttaggctgcttggccattag

SEQ ID NO: 187768 - DNA, 1881 bp, synthetic construct
  misc_feature 1..1881: note = Description of Artificial Sequence: Synthetic coding sequence
  source 1..1881: mol_type = other DNA
atggccgtgagcggcttcaccctgggcacctgcatcctgctgctgcacatttcatatgtagctaactacccgaacggcaaagtgacccagtcctgccacgggatgatccctgagcacggccattcccctcagtctgtgccagtccacgacatctatgtgagtcagatgaccttccgaccaggcgaccagattgaggtcactctgtccgggcacccatttaaaggcttcctgttagaagcaagaaatgcggaggatctgaatgggcctcccatcggttctttcacgttaattgacagtgaggtcagccagctgctgacttgtgaggacatccagggatcagcagtgtctcaccgaagcgcttctaagaagactgagataaaagtatactggaatgccccctcctccgcacccaaccatacacagtttctcgttaccgtggtcgaaaagtataaaatctactgggtcaagataccaggccccattatttctcaaccgaacgccttcccctttacgactccaaaggctacagtggtcccattaccgacactgccccctgtgtcgcaccttacaaagcctttctcagccagcgattgtggcaataaaaagttttgtataaggtccccgctgaattgcgatcccgaaaaggaagcctcttgcgtcttcctgtcattcactcgggacgaccagtccgtaatggtggaaatgtcaggcccatctaaaggatacctgtccttcgctctgtcgcatgatcagtggatgggtgatgatgatgcttacctctgtatacacgaggatcagacagtgtacatccagccatcacacctgactggccgttcccaccccgtgatggatagccgtgatacgttagaggacatggcctggcgactggccgacggggttatgcagtgctccttcagacgcaatatcaccctaccaggtgtgaagaaccggtttgacctgaacacttcgtactacattttcctggccgacggcgctgcaaatgatggacgaatttacaaacactctcaacagccactaatcacctatgagaaatatgatgtcacagattctcctaagaatattgggggttcacactccgtgttattactgaaagtacacggagccctgatgttcgtggcatggatgaccacagtgagtataggggtgcttgttgctcgattcttcaagcctgtgtggagcaaagccttcctccttggcgaagcggcatggttccaggtccaccgcatgctcatgttcaccacaaccgtgctcacttgcattgcatttgtaatgcctttcatatatagagggggctggagccgacacgcagggtatcatccttatctgggttgcatcgtgatgacacttgctgtgctgcagccccttttagctgtcttccgtccacccttgcacgacccccggcggcagatgtttaattggacgcactggagtatgggaaccgccgctcgcatcattgccgttgccgcgatgtttttaggcatggacctgccaggactgaacctgcctgatagttggaagacgtacgccatgacaggctttgtggcatggcatgtaggcactgaggtcgttctggaactcaaatactggatgatgacagaatttcgctccttctctcacttactgcagtggaagcagcgagtcatgctcttaaaaagacagtgttggcagtttatgtcggtgggcatgcttctgtttagcagctatttctatctgcaatctactatttacgaacaggcgaaaacccttgcctttgcaggtcaggtcatcatcataattaaaccaaagaagctcgaagcttgcccggattgcctcgagcacatttgtgagttttccctcggtaggcttgggtcatgcttgtag

SEQ ID NO: 187769 - DNA, 1779 bp, synthetic construct
  misc_feature 1..1779: note = Description of Artificial Sequence: Synthetic coding sequence
  source 1..1779: mol_type = other DNA
atggccgtgagcggcttcaccctgggcacctgcatcctgctgctgcatatttcctatgtagccaattacccaaacggcaaggtaactcagagctgtcacggtatgatacccgaacatggccactctccccagagtgtccccgtgcatgacatttacgtgtcacagatgacatttcggccaggggaccagatagaggtgacactctcaggtcatccctttaaggggtttctccttgaagcaaggaacgctgaagacctcaatggtcccccaataggctccttcacgctgatcgactccgaagtgtctcagttgctgacatgcgaagacatacaaggctctgccgttagtcatcgctccgcctccaaaaagaccgaaataaaagtttactggaatgcccctagttccgctcctaatcacacccagtttctggtgactgtggtggagaagtacaaaatttactgggtgaaaatccctgggcccattatctctcagccaaatgctttcccatttacgacacccaaggcgacagtcgttccattacctacattgccaccggtctcccatctaactaagccattcagtgcttcagactgtggcaacaaaaaattctgcattcgaagccctttaaattgcgatcccgagaaagaggcctcttgcgtcttcctttcatttaccagggatgatcagtccgtgatggtcgaaatgtctgggccctccaaaggttatctgtcctttgcgctgtcccacgaccagtggatgggcgatgatgatgcgtatctctgtattcatgaggatcagacggtttacatccagcccagtcatttaacgggaaggtcacacccagtcatggattctcgggacactctcgaggacatggcatggcgactagctgacggtgtgatgcagtgctccttcaggagaaacattactctgccaggggtgaagaatagattcgatctcaacaccagctattacatatttttggccgacggcgctgctaacgatggtaggatttataagcacagccaacagcccctcatcacctatgaaaaatacgatgttaccgatagcccaaagaatattggtgggtctcattctgtgctgctacttaaagtgcatggcgccctcatgtttgtggcttggatgactacggtgagcatcggcgtactggtagcacggttttttaaaccggtgtggtccaaagctttcctgctgggggaggcggcctggttccaggtccacagaatgctgatgttcacaactacagtgctgacatgcattgccttcgtgatgccgttcatttaccggggggggtggtcaagacatgccgggtaccatccttacctggggtgcattgtcatgaccctggccgtgctccagccccttctggctgtgtttcgccctcctctccacgacccgaggaggcagatgttcaattggacgcactggagcatgggaacagcagctagaataatcgccgttgcagcaatgtttctaggaatggatcttccagggctgaatctgcccgattcctggaagacgtacgcaatgaccggcttcgtggcttggcacgtcggcactgaagtcgtgttggaagttcatgcctacagactgtcacgaaaggtcgagattctagatgacgataggatccaaattctccagtctttcactgctgtggagacggagggccatgcctttaagaaggccgtgctggcaatatacgtgtgcggtaacgtgacatttctcatcattttcctgtccgctataaaccacctgtag

SEQ ID NO: 187770 - DNA, 729 bp, synthetic construct
  misc_feature 1..729: note = Description of Artificial Sequence: Synthetic coding sequence
  source 1..729: mol_type = other DNA
atgctgagctgcttccggctgctgagccggcacatcagccccagcctggccagcttgagacctgtccgctgctgcttcgccctgccactgagatgggcccccggccgaccactggacccccgccagatcgctccaaggaggcctctcgcagccgcggcctctagccgtgaccccacaggccctgcagccggccccagccgggtccgtcagaatttccatccagacagcgaggccgccataaaccgccaaatcaacttagagctttatgcttcctacgtatatctgtccatggcctactacttctcccgagacgacgtagctttgaacaatttcagcaggtactttctccatcagagcagggaagagacggagcacgccgagaagctgatgcgcctgcaaaaccagcgcggcggtagaatcaggctccaggacatcaaaaagcccgagcaggacgactgggagagcggactgcacgcgatggagtgcgcactgttgctggagaagaatgtaaaccagagcttgctggagctgcatgcgctggcttccgacaaaggagatccccacctctgtgactttcttgagacctattacctcaatgaacaggttaagagtattaaagagctaggagatcatgtccacaatcttgtgaaaatgggagccccagatgctggactggccgagtacctctttgacacacatacactgggaaacgagaacaaacagaactag

SEQ ID NO: 187771 - DNA, 552 bp, synthetic construct
  misc_feature 1..552: note = Description of Artificial Sequence: Synthetic coding sequence
  source 1..552: mol_type = other DNA
atgaccaccgccagcaccagccaggtgcggcagaactaccaccaggactctgaggcggctataaatcgacaaataaatcttgagttatacgcctcttacgtctacctaagcatgtcttactatttcgatcgcgacgacgttgcgctgaaaaacttcgctaaatatttcctgcatcagagccatgaagagagagaacatgctgagaagctgatgaaacttcagaaccagaggggtggacgtattttcctccaggacattaagaaaccggattgcgatgactgggagtctggcctaaatgccatggagtgcgctctccacttggagaagaacgttaaccagtcactcttagaactccataaactggcaaccgacaagaacgatccacatctgtgcgacttcatcgagacacattatctgaacgagcaggtgaaggcaattaaggaacttggggatcacgtgaccaatctacgaaaaatgggagccccggaaagtgggctggcagagtacttattcgataagcatactttgggagactcggataacgaaagttag

SEQ ID NO: 187772 - DNA, 699 bp, synthetic construct
  misc_feature 1..699: note = Description of Artificial Sequence: Synthetic coding sequence
  source 1..699: mol_type = other DNA
agcggcttccccgccagcaccgtgctgggccggaaccccgccctggtgccccaccccgggaggcctcccattgcgtcaccaccatctcctctgcacagaaccttggggctgcctcagggccccaggcggctcagtctcgtggccgccatgactactgcctctacatcccaggtgcgccagaactaccaccaggattcagaagccgcaatcaacagacagattaatctcgaactgtacgcctcatacgtgtacctttctatgtcctactactttgacagggacgatgtcgccctgaagaattttgctaagtactttcttcatcagagccatgaggaacgcgagcacgcagagaagttgatgaagctccagaaccaaagaggaggccgaattttcctgcaggatataaaaaaaccagactgtgacgactgggaatcaggtttgaacgctatggagtgcgctctgcatctggaaaagaatgtcaaccaatctttgttagaactccataagttggccactgacaagaacgatcctcatttgtgcgattttatcgagactcactatctgaacgagcaggtgaaagccattaaggaactgggtgaccacgtgactaacctaagaaagatgggtgctccggaaagtgggctggccgaatatcttttcgacaaacacaccctgggtgattcagacaatgaaagctag

SEQ ID NO: 187773 - DNA, 462 bp, synthetic construct
  misc_feature 1..462: note = Description of Artificial Sequence: Synthetic coding sequence
  source 1..462: mol_type = other DNA
atgaccaccgccagcaccagccagagctactacttcgaccgggacgatgtggccttaaagaattttgctaagtacttcctgcaccagtcccacgaagagcgagagcatgcagagaagcttatgaagttacagaatcaacgcggagggcgtatttttctacaggacattaagaaacccgactgtgacgattgggagagcggacttaacgcaatggagtgtgctctgcacctggaaaagaatgtgaatcagtccctgttagaactgcacaagctcgccacagataagaatgatccacatctgtgtgatttcatcgaaacccactacctgaatgaacaggtcaaagctattaaagaactgggcgaccacgtaaccaaccttcgaaaaatgggtgcacccgagtctggcctggccgagtacctgtttgacaagcatactctgggcgattcagataacgaaagctag

SEQ ID NO: 187774 - DNA, 552 bp, synthetic construct
  misc_feature 1..552: note = Description of Artificial Sequence: Synthetic coding sequence
  source 1..552: mol_type = other DNA
atggccaccgcccagcccagccaggtgcggcagaagtacgacaccaattgcgacgcggcgatcaatagccacattaccctcgaactgtatacaagctacttgtacctgtctatggccttctattttaaccgggacgatgtcgctctcgagaattttttcaggtatttcctgaggctttcagatgacaaaatggagcacgctcagaagcttatgcgcctgcagaaccttcgcggcggccatatttgcctgcacgacataagaaaacctgagtgtcaaggatgggagtctggattggtggctatggagtctgccttccacttggaaaaaaatgtgaaccaatccctcctcgatttgtatcagctggctgtcgagaagggcgatcctcagctgtgccactttctagagtctcattacttgcatgagcaggttaaaacaataaaagagttaggcggctacgtgtccaacctgcgcaagatctgtagcccagaagccgggcttgccgagtacttatttgacaaattaacacttggcggccgtgtgaaggaaacttag

SEQ ID NO: 187775 - DNA, 528 bp, synthetic construct
  misc_feature 1..528: note = Description of Artificial Sequence: Synthetic coding sequence
  source 1..528: mol_type = other DNA
atgagcagccagatccggcagaactacagcaccgacgtggaggccgccgtcaacagcttggttaatctgtatctgcaagcctcttacacttatttatcactggggttttacttcgaccgagacgacgtggctctcgagggagttagccacttctttcgcgagctggccgaggagaagagggaaggatacgaaaggttgctgaagatgcaaaatcagcggggagggcgtgcgttatttcaggacatcaaaaagcccgcagaggacgaatggggcaagacccccgacgccatgaaggccgcgatggctctggagaagaagctgaaccaggcgctactcgatctccacgcactgggatcggccaggaccgacccacacctttgtgacttcctcgaaacacatttcttggatgaagaggtgaagctgatcaaaaaaatgggagatcatttgaccaacctgcatcggctcgggggacccgaggctggactcggggagtatctgttcgagcgcctcactcttaaacatgattag

SEQ ID NO: 187776 - DNA, 573 bp, synthetic construct
  misc_feature 1..573: note = Description of Artificial Sequence: Synthetic coding sequence
  source 1..573: mol_type = other DNA
atgagcagccagatccggcagaactacagcaccgacgtggaggccgccgtaaactcactcgtcaacctttatctccaggccagctacacttatctctccctcggattctattttgatagggacgacgttgcactcgagggagtaagtcatttctttcgagaactggcggaggaaaagagggagggatacgagcggctccttaagatgcagaatcagagaggcgggcgcgctctgttccaagacatcaagaagccagctgaggacgaatggggaaagaccccagatgctatgaaagcagcaatggccttggaaaagaaactgaatcaggcgctgcttgacctgcacgcactcggtagtgcccgcacagacccacatctttgtgactttctggaaacgcactttctcgacgaggaagtgaagcttattaagaaaatgggcgaccatcttacaaacctgcaccgcctgggggggcctgaagccggccttggggaatatctgtctaagggaagccttagctctactacaaaaagcctgctatcacccgccactagtgagggaccccttgcaaagtag

SEQ ID NO: 187777 - DNA, 1272 bp, synthetic construct
  misc_feature 1..1272: note = Description of Artificial Sequence: Synthetic coding sequence
  source 1..1272: mol_type = other DNA
atgcggagcctgggcgccaacatggccgccgccctgcgggccgccggtgtcctcctcagagatcccctggctagctcgagctggcgggtgtgtcagccctggcggtggaagtcgggcgccgcggccgccgctgttaccacagagacagcgcaacatgcccagggcgcaaaacctcaggtgcagccgcagaaacggaagcctaaaactggaatattgatgctgaacatgggtgggcccgagactctgggagacgttcatgatttcttgcttcgcctgtttttggaccgcgacctcatgactctgcccattcagaacaagcttgccccgttcatagccaagcggcgcacccccaaaatccaggagcagtacaggagaattggcgggggcagccccataaaaatttggacttcaaaacaaggggaaggtatggtaaagctattggatgagctgtcccccaacacagcaccccacaaatactacatcgggttccgttacgtacatcccctgacagaggaagccatcgaggagatggagagagatgggctcgagcgtgcgattgcgtttacacagtatccacaatacagttgctcgactaccggaagctctctgaacgccatttacaggtactacaaccaggtaggacgcaagcccactatgaagtggagtacaattgatcgttggcctacgcaccacctgctgatccaatgcttcgctgaccatattttaaaggaactcgatcatttccctcttgaaaaacggagcgaggtggtcattctgttcagcgcccacagcctcccaatgagcgttgttaatagaggagacccttacccccaggaagtgtccgccacagttcagaaagtcatggagcggttagagtactgtaacccctatcgcctggtgtggcagtctaaagtgggccccatgccctggctaggaccgcagactgacgaaagtataaaagggttgtgcgaacggggtagaaagaatatcctccttgtgccaatcgcatttacaagcgatcacattgaaacattgtacgagctagacatcgagtatagccaagttcttgccaaggagtgcggtgtggaaaacattcgaagagcggagtcactcaatggcaaccccttgttttctaaagcactggctgacctggtccatagtcacattcagagcaacgaactttgtagcaaacagctcactctgagttgtccactttgtgtgaatccagtgtgcagagaaaccaagtctttcttcactagccagcagctctag

SEQ ID NO: 187778 - DNA, 1290 bp, synthetic construct
  misc_feature 1..1290: note = Description of Artificial Sequence: Synthetic coding sequence
  source 1..1290: mol_type = other DNA
atgcggagcctgggcgccaacatggccgccgccctgcgggccgccggcgttctgttgagagaccccctcgccagttcttcatggcgcgtctgccagccttggaggtggaaatcaggagctgccgcagccgcagttaccacagagactgcacagcacgcccagggcgctaagccgcaggttcagccacagaaacgctacgagagcaatatcaggaagccaaaaacaggcattttaatgctcaatatggggggacccgaaacactaggagatgtacacgatttcttacttaggctctttctggatagggatttgatgaccctgccaatccaaaacaaactggccccattcatagcaaagagaaggacacccaagattcaagagcaataccggcgaatcgggggcggttctcctatcaaaatatggacgtctaaacagggtgaggggatggtcaagctcctggatgagctgtcacctaacacggctccgcataagtattatatcggattccgctatgtgcacccactcacagaggaagccattgaagagatggaacgagacggactggagagagccattgcattcacacagtaccctcagtattcttgctccaccaccggttcctcattgaacgctatttaccgctattacaatcaggtgggaagaaagcccacaatgaagtggagcacaatcgaccgatggccaactcatcacctcttgatccagtgcttcgcagaccacattctgaaggaactagaccatttcccgctggagaaacgtagcgaggttgtcatcctcttctccgcgcattcattgcctatgtccgtggttaaccggggagatccgtacccgcaagaagtctctgccacagtgcaaaaggtaatggaacgccttgagtattgcaacccataccgcctggtctggcagtcaaaagtgggtcctatgccctggcttgggccccagacggacgagagcatcaaaggcctctgcgagcgcggccgcaagaacatccttctcgtaccgatcgccttcactagcgaccatatcgagaccctgtacgagctggacattgaatactcccaggtcctcgcaaaagagtgcggagtcgaaaatattcggcgcgccgaatccttgaatgggaacccattattcagcaaagcattagcagaccttgtccatagtcatatccagagtaacgaactatgttccaaacagttgacgctgtcatgcccactatgcgttaaccctgtctgcagagaaacaaagagcttcttcactagccagcagctctag

SEQ ID NO: 187779 - DNA, 1149 bp, synthetic construct
  misc_feature 1..1149: note = Description of Artificial Sequence: Synthetic coding sequence
  source 1..1149: mol_type = other DNA
atgggcctgctgctgcccctggccctgtgcatcctggtgctgtgctgtggcgccatgtctccaccgcagctggccttaaatcccagtgcgctgttgagccgtggttgtaacgatagtgatgtcctcgccgttgccggcttcgcgctccgtgacatcaataaggaccgcaaagatgggtacgttttgcggctcaaccgggtcaacgacgcacaggagtatagacgcggaggcctagggagtctcttctatctcacactcgatgtgctggagactgattgccacgtgcttcgtaaaaaagcctggcaggattgcggcatgaggatcttcttcgagagcgtttacggccagtgcaaagccatcttttacatgaataatccaagtcgggtcctgtacctggctgcctacaactgtacgcttcggccggtcagcaagaagaagatctacatgacgtgccctgattgcccttcaagtattccgacggattccagtaaccaccaggtgttagaggctgctacagaatctctcgctaaatataacaatgagaatacttcgaaacaatacagtctgttcaaagtcacaagggcctcaagccaatgggtggtcggcccgagttacttcgtggagtacctcataaaggaatccccctgcacaaaatctcaggcttcatcctgcagtttgcaatccagcgacagcgtgccggttggtttatgtaaaggcagtcttactcggacgcactgggagaaatttgttagcgtcacatgtgacttcttcgaatcacaagcgcctgccaccggcagtgagaatagtgctgtgaatcagaagcctacaaatttacctaaggttgaagagtcacaacagaagaatactcctcccacggactctccgagtaaagctggaccgcgcggctccgttcagtacctccccgacctcgatgataagaatagccaggagaagggacctcaggaggcctttccagtccacttggatctgaccacgaacccacagggggaaactcttgatataagcttcctctttctagagcctatggaggagaagctggtggtgctcccattcccaaaagagaaagcccgcacggcagagtgtcctggacctgcccagaacgcaagcccactggtcctccctccttag

SEQ ID NO: 187780 - DNA, 1149 bp, synthetic construct
  misc_feature 1..1149: note = Description of Artificial Sequence: Synthetic coding sequence
  source 1..1149: mol_type = other DNA
atgggcctgctgctgcccctggccctgtgcatcctggtgctgtgctgtggcgctatgagccccccgcaacttgctctcaaccctagcgccctcctttctagagggtgtaatgacagcgacgtgctggctgtcgcaggcttcgcgctgcgtgacataaataaggaccgaaaagatggatatgtgctgcgtctgaaccgggtgaatgatgctcaggagtaccggagggggggcctggggtccctgttttaccttacccttgatgtgcttgagactgactgtcatgtcctgcgaaagaaagcttggcaagactgtggaatgaggattttctttgaatcagtgtacgggcagtgcaaagccatcttttatatgaacaacccctctcgcgttttatacctggccgcctacaactgcacactgaggcccgtatctaagaagaaaatatatatgacttgccccgattgcccgagctccattccaaccgactcctcaaaccaccaggttctggaggctgcaacagagtccctcgcaaagtacaacaatgaaaacacctcgaagcagtatagcctctttaaggtgactagggcgtcttctcagtgggtggtgggtcccagctacttcgtagaatacttgatcaaagaatccccctgtacaaagtcacaagcgagctcatgctcccttcagagtagcgatagtgtgcctgttggcctgtgtaagggttctctgacgaggacacactgggagaaattcgtttccgtgacatgtgacttttttgagagtcaagcccccgctactggctctgagaactctgccgtcaaccaaaaaccaacgaacctcccgaaggttgaagagtcccagcagaagaatacaccaccgacggatagtcccagcaaagccggaccccgaggttcagtccagtacctcccagacctcgatgacaaaaattcacaagaaaaggggccccaggaagccttcccagtgcacctggacttgacaactaaccctcagggagaaacactggacatctcctttttatttctagagcccatggaggagaaactagtggtcctgcccttccccaaggagaaagcacggaccgccgagtgccctggccctgctcagaacgcatcgcctctagtcctcccaccttag

SEQ ID NO: 187781 - DNA, 705 bp, synthetic construct
  misc_feature 1..705: note = Description of Artificial Sequence: Synthetic coding sequence
  source 1..705: mol_type = other DNA
atgacctgccccgactgccccagcagcatccccaccgacagcagcaatcaccaggtcctggaggccgccaccgagagcctcgccaagtacaataacgagaacacgtccaagcagtacagcctatttaaggtcacccgcgccagcagccagtgggtggtgggccctagctacttcgtggagtacctgatcaaagaatctccttgtacaaaaagccaggcatcaagttgttccttacagtccagtgactccgtgcccgttggactgtgcaaagggagtctcacccggactcattgggaaaaatttgtgtcagttacctgcgattttttcgagagccaggcgccggccactggcagtgaaaatagcgcggtaaatcagaaacctaccaacttgccaaaagtcgaggaatcacagcaaaagaatacgccacctacagactcaccgagtaaggctggcccccgtggtagcgtgcaatatctgcccgacctggatgacaagaatagtcaagagaagggaccacaggaggcctttcccgtgcacctggacctgaccaccaatccacagggggaaacacttgatattagcttcctttttctcgaacctatggaagagaagttggtggtgttaccattccctaaagagaaggctcggactgctgaatgtccaggtcctgctcagaacgccagtccattggtgctgcctccgtag

SEQ ID NO: 187782 - DNA, 717 bp, synthetic construct
  misc_feature 1..717: note = Description of Artificial Sequence: Synthetic coding sequence
  source 1..717: mol_type = other DNA
atgcggcagagcggcgccagccagcccctgctgatcaacatgtaccttcccgaccctgttggggacggcttgtttaaggatggaaaaaatcccagttggggccctctttctccagccgtgcagaagggcagcgggcagatccagctgtggcaatttttgcttgagctgctggccgaccgggctaatgccggttgcatcgcatgggaaggcggacatggcgagttcaagctaaccgatcctgacgaggtggcaagacgctggggggagagaaagtcaaaaccgaacatgaattatgataagctgagtagagccctccggtactactacgacaaaaacataatgtccaaggtccacggcaagcgctacgcgtataggtttgatttccagggactggcgcaggcttgccaacctccaccggcccatgcccacgccgccgctgctgcagcagccgccgctgcagccgcccaggacggagctttgtataagctgcctgctggcctcgccccattgccctttccgggcctctctaagttgaacctgatggcagcctcagccggagtagctcctgccgggttctcctactggccaggacccggccccgcggctacagcggccgccgccacagccgcgttgtaccccagcccgtcacttcagcccccccccggaccatttggggctgtggcggcggcaagccaccttggaggacactatcactag

SEQ ID NO: 187783 - DNA, 1416 bp, synthetic construct
  misc_feature 1..1416: note = Description of Artificial Sequence: Synthetic coding sequence
  source 1..1416: mol_type = other DNA
atggacagcagctgccacaacgccaccaccaagatgctggccaccgcccctgccagggggaacatgatgtccacgtcgaaacccctggccttttcaatcgagaggattatggccagaactccagaacctaaggccttacccgtcccacacttcctccagggtgcactgccaaaaggcgagccaaaacattccttgcacctgaattcatctatcccctgtatgatacccttcgtacccgtggcttacgacacctctcctaaggctggcgttaccgggagtgagccacggaaagccagccttgaagccccagcagctccggccgcggtcccatcagccccagctttcagttgcagtgacctgctgaactgcgcactgagtctcaagggggacctcgctagagacgccctgccactgcagcagtataaattggttcgacccagggttgtcaatcacagctcatttcatgccatgggcgctctatgttatctcaatcggggagacgggccttgtcaccccgccgcaggagtgaacatccaccctgtcgcatcctacttcttaagttctcccctgcaccctcagcctaaaacttacctggccgaaagaaataaactagtcgtgccagccgtggaaaaatacccttcgggtgtagcgtttaaggacctcagccaggcccagctccagcactatatgaaagaatccgctcaactgctctcggaaaaaattgcatttaagaccagcgatttctcccggggatcgccaaacgccaagcctaaagtattcacatgtgaggtctttaatgctcattataatttgaccagacatatgcccgtccatactggcgcaagaccatttgtttgcaaagtttgtggtaagggcttccggcaggctagtactctctgtaggcataaaattatccacacacaagagaagcctcacaagtgtaaccaatgcgggaaagccttcaacaggtcaagtacactgaatacacacaccaggatccatgccggttacaagccattcgtgtgtgaattctgtgggaagggctttcatcagaaaggcaactataagaaccataagctgacccactctggagagaaacagtttaaatgcaacatttgtaacaaggcattccaccaggtttataacctcacttttcatatgcacacgcacaacgataagaaacccttcacatgtcctacttgtggaaaggggttctgcaggaacttcgacttgaaaaaacatgttcggaagttgcacgactccagtctcggactggctcgaacgccagctggcgagccaggcacagagcctccccctcctctgccacagcaaccccccatgacattgccaccactgcagccccccctgcccactcctgggcctttgcagcccggcctgcaccagggtcatcagtag

SEQ ID NO: 187784 - DNA, 108 bp, synthetic construct
  misc_feature 1..108: note = Description of Artificial Sequence: Synthetic coding sequence
  source 1..108: mol_type = other DNA
atggacagcagctgccacaacgccaccaccaagatgctggccaccgctcccgcccggggaaacatgatgtccaccagcaaacccttggccttttccattgagcgctag

SEQ ID NO: 187785 - DNA, 1278 bp, synthetic construct
  misc_feature 1..1278: note = Description of Artificial Sequence: Synthetic coding sequence
  source 1..1278: mol_type = other DNA
atggacagcagctgccacaacgccaccaccaagatgctggccaccgccccagctcggggcaacatgatgtctacctctaagcctctggcttttagcatcgagaggataatggctaggactccagagcccaaagctcttcccgtccctcacttcctccagggggccctgccaaagggggaacctaagcactccctgcacctgaactcttcgataccttgtatgatccccttcgtgccagttgcctatgatacatcaccgaaagctggagtgacgggctctgaaccccgcaaagcatctttggaagcacccgcagctcccgcagccgttccctccgctcctgccttctcctgctccgatctgctgaactgcgctctgagcctcaagggcgacctggctcgcgacgctctaccactccaacagtacaagctcccaaagacctatttggccgagcggaacaagctggtcgtcccagccgtagagaagtatccctctggcgtcgccttcaaagacctttcccaagcccagttacaacattacatgaaagaatccgcacagctgctcagtgagaaaattgcgttcaagacaagcgattttagcagagggtcacccaatgcaaaacctaaggtgttcacttgcgaggtgtgtggtaaagtcttcaacgctcattacaacttgactcggcacatgccagtgcatactggtgcccggccctttgtatgtaaggtatgcggaaaaggatttcggcaggcaagtaccctgtgccggcacaaaattattcatacgcaggagaagccgcacaaatgcaatcagtgtggtaaggctttcaaccgatcttccacgctgaatactcatacaagaatccatgcaggttataagccgtttgtgtgcgaattctgcggcaaaggttttcaccaaaagggcaattataaaaaccataagctgacccattcaggcgaaaagcaattcaagtgcaacatatgcaataaagcattccaccaggtttacaatctaactttccacatgcacacacacaacgataagaaaccgttcacatgccccacctgtggcaagggtttttgcaggaatttcgatttgaaaaaacacgtgcgtaaactccacgacagcagccttggtctggcacgcacacctgctggcgaaccaggtacagagccgccgccacccctgccacagcaacctcctatgaccctgccgccactccagccgcccctcccaacccctggcccgctgcaacctggtctgcaccaggggcaccagtag

SEQ ID NO: 187786 - DNA, 1428 bp, synthetic construct
  misc_feature 1..1428: note = Description of Artificial Sequence: Synthetic coding sequence
  source 1..1428: mol_type = other DNA
atggacagcagctgccacaacgccaccaccaagatgctggccaccgcacccgcacgaggtaatatgatgagcacaagtaaacccctggcgtttagcatcgagagaatcatggctcggacccccgagcctaaagctctgccagtgccacacttcttacagggggccctacccaagggcgaacctaagcactctttgcacctcaactccagtattccatgcatgatcccctttgtgcccgttgcctacgacacgtctccaaaggcaggggtgactggttccgagccaagaaaggcctcgctggaggcccctgccgcgcccgcggcggtgccatctgctcctgcattttcttgtagtgacctcttgaattgtgccctgagtctcaaaggggacctggcccgggatgcactgccactgcaacaatataaactcgtacgcccccgggttgtcaatcactcttcattccatgcaatgggggcactgtgctatctgaacagaggcgacggtccctgccaccccgccgccggggttaacatccaccctgtcgcgtcttactttctcagctcacccctccatcctcagcctaaaacctacctggccgaaagaaacaagctggtcgtgcctgcagtcgagaaatatccgagtggggttgcattcaaggatttgagccaggcgcaactacagcactacatgaaggagagcgcccagttgctgtcagagaagatcgccttcaagaccagcgacttttcacgaggaagccccaacgcgaagccgaaggtctttacgtgcgaagtttgtggcaaggtctttaacgctcattacaacttgactcgccacatgccagtacacacaggcgctcgcccctttgtgtgcaaagtgtgtggaaaaggtttccgacaggcgagtaccctctgcaggcataaaattattcatacccaagagaaaccgcacaagtgcaatcagtgcggcaaagctttcaatcggagcagcacactgaacacacataccaggattcacgccgggtacaaacctttcgtctgcgaattttgcgggaagggattccatcagaagggcaattacaaaaatcacaaactgacacacagcggcgaaaagcaattcaagtgcaatatatgcaacaaagcctttcatcaggtgtataacctaacctttcacatgcatacccataatgataagaaaccctttacatgcccaacttgcgggaaaggattttgccgtaactttgatttaaagaagcatgtgcgcaagctgcatgattccagtctggggctagcccgcacgcccgcaggggagcctgggactgagccaccgccccctttgccccagcagccacctatgacgctgcctcctctacagccacctttaccaacaccgggtcccctgcagcctggacttcatcaaggtcatcagtag

SEQ ID NO: 187787 - DNA, 1380 bp, synthetic construct
  misc_feature 1..1380: note = Description of Artificial Sequence: Synthetic coding sequence
  source 1..1380: mol_type = other DNA
atggccagcagcgccagcctggagaccatggtgccccccgcctgccctagggccggggcgtccccagccacgtccaaaactcttgcgttcagcatcgaacgtattatggccaagacgtccgagccaagagctcccttcgaacccagacccggcgcactggaggcagatggatcccagggcaaaaagttgctcaacctttgcagcccgctcccatgtatgattcccttgcagccactgggctatgaggtgccctccaagacattgctgtcttattcagagctgtggaagtcttccctaagggcaggaggtggaggcgggggggggggcggcgggggcggcgggggcggaggagctcctgtttgtggggcttctggcctgtgcaagaccaattgcggcgtctgttgtaaggctgagctgggcctggcgccatccgctctgcccgcaggccgtgtgatcaaacctcaagtcattaatcaggccgtcgggttgcctgcctctggctctctgtactactttaattacctcgattcgacagcctacccaccctctgagctgctgagcggccaccttttccctagtggattgctaaatgcacaggcccccgccgctctagcagcccaccccaaactattcctattagagaacgcaaaacttgctggcctcgctgccgacaaattccctcacccagcaccctatccccacaaggaaaggttgccagccccactagagcaggtgctcaaagagaacagcgccctgaccgctgaaagaggcggagttaagggtcattctaaattacctggagggagtgcggacggtaagcccaaaaatttcacttgtgaggtctgcggaaaggtgttcaacgctcactacaatctaactcggcatatgcctgtgcacactggtgccaggccttttgtatgcaaagtctgtgggaaaggatttcgccaagcctccacgttgtgccgacacaaaataatccacacacaagaaaagccgcacaagtgcaatcagtgcggcaaagcatttaaccgctcatctacactgaatactcacattaggattcatgctggttacaaacccttcgtgtgcgagttctgcggaaagggtttccatcagaaaggtaactataagaatcacaagctgacgcacagtggcgaaaaacaatacaagtgcaccatttgtaataaggcgtttcaccaggtttataatttgacctttcatatgcatacccacaacgacaaaaagccttttacatgcgccacttgcggcaagggtttctgccgcaattttgacctgaagaagcatgtaaggaagctgcacgactcagtgggtcccgccgccccgtccgcaaaggatctaactcgcacggtgcaatcttag

SEQ ID NO: 187788 - DNA, 1380 bp, synthetic construct
  misc_feature 1..1380: note = Description of Artificial Sequence: Synthetic coding sequence
  source 1..1380: mol_type = other DNA
atggccagcagcgccagcctggagaccatggtgccccccgcctgcccacgcgccggcgcttccccagccacttcgaaaaccctcgctttctccattgagcggatcatggccaaaaccagcgaaccacgggcacctttcgagcctaggcccggagccctggaggctgacggcagtcaaggcaaaaaattgcttaatctttgtagtcccctcccatgtatgattcccctgcagccattggggtacgaggtgccatccaagactctgctctcctatagtgagctgtggaaatcttcgttacgagctgggggtggcggtggaggtggcggaggcggggggggcggaggtggaggggccccagtgtgtggggcttcaggcctgtgcaagaccaattgtggtgtgtgttgcaaagcagaacttggtctagcaccaagtgcgttgcctgccgggagggtgataaagccccaggtgatcaaccaggcagtcggacttccagcttcggggtccctctattacttcaactatcttgatagcaccgcctaccctccaagcgagctcctgtcaggacatctcttcccaagcgggttgctgaatgcccaggccccggctgccttagccgcccacccaaagttattcctgctcgagaatgccaagctcgctggcctcgctgccgacaaatttccacaccctgctccttacccccacaaggagcgactccccgcaccactggaacaggtactgaaggagaatagcgcactcacagcagagaggggtggtgtgaagggccactctaaactccccggaggtagcgcagacggcaagcccaaaaatttcacatgcgaagtgtgcggcaaagtgtttaacgctcactataatttgactcgccacatgcctgtccatacaggtgctaggcctttcgtgtgtaaggtctgcggtaaaggattcagacaagccagtaccctatgccggcataaaattatccatactcaagagaagcctcacaagtgtaaccagtgcggcaaagctttcaacaggtctagcaccctaaacacccacatcagaattcacgctggttacaagccgtttgtttgcgaattttgcgggaaggggttccaccaaaaaggaaattacaaaaaccataagctcacacattcaggtgagaaacaatataagtgcactatttgcaataaggccttccaccaggtgtataatctcacctttcacatgcatactcataacgataagaagccctttacgtgcgccacttgcggaaagggcttctgtcgcaattttgaccttaaaaaacacgtccgtaagctacacgactctgtgggtccggccgctccgagcgcaaaagatctgacgcggactgtccagagctag

SEQ ID NO: 187789 - DNA, 1380 bp, synthetic construct
  misc_feature 1..1380: note = Description of Artificial Sequence: Synthetic coding sequence
  source 1..1380: mol_type = other DNA
atggccagcagcgccagcctggagaccatggtgccccccgcctgcccacgcgctggagcaagccctgcaactagcaaaacactagctttctctatagaaagaatcatggcaaaaacatctgaaccacgggctccctttgagccaagacccggtgccctcgaagcggacggcagccaggggaagaagctgctgaacctgtgcagccctctgccatgtatgattcccctccagccccttggctacgaagtgccttctaaaacccttctatcctacagtgaactgtggaagtcttctctgcgggccggcggaggaggaggcggggggggaggggggggtggagggggcggaggggcaccagtatgtggggccagcgggctgtgtaagactaactgcggtgtctgctgcaaggccgagctcgggcttgccccaagtgccctgcctgctggaagggttataaaacctcaagtgatcaaccaggctgtcgggctcccggccagcggctctctctattattttaactacctcgacagtactgcgtaccccccaagtgagctcctaagcggccacttattcccaagcggcctgctgaacgcacaagcccccgctgctctggctgcccatcctaaacttttcttgctggaaaacgcgaagctagctggcctcgcagcagataaatttccccacccagcaccataccctcacaaggaacgtttacctgcgccgctggagcaggttctgaaggagaactcagcactcacagccgaacggggcggcgtgaagggccactccaagctacctggtggctcagcagacggaaagccaaagaactttacctgcgaagtttgcggaaaggttttcaatgcacattacaatctgaccaggcatatgccagtgcacacaggggcacgccccttcgtgtgtaaagtttgtgggaaggggtttcggcaggcttccaccctctgccgacacaagattatccacacccaggagaagcctcacaagtgcaatcaatgcggcaaggcttttaatcggagttccaccctcaatactcacatacgtatccacgccggatacaagcccttcgtttgcgagttttgcggcaaagggttccaccagaagggaaactacaaaaaccacaagctcactcattctggcgagaagcagtacaaatgtactatctgtaacaaagcttttcatcaggtgtacaacctgacatttcacatgcacacacacaatgacaagaaacccttcacttgtgccacttgcgggaagggcttctgcagaaactttgacctgaagaagcacgttagaaaactccacgactcagttggccccgccgccccaagtgccaaggatttgacccggacagtccagtcatag

SEQ ID NO: 187790 - DNA, 1140 bp, synthetic construct
  misc_feature 1..1140: note = Description of Artificial Sequence: Synthetic coding sequence
  source 1..1140: mol_type = other DNA
atggccgccaccgccgccgccgtggtggccgaggaggacaccgagctgcgggatcttttggtccagacattggagaattcaggcgtcctgaataggatcaaagctgaactaagagccgccgtgttcctagcgcttgaggaacaagaaaaagtagagaacaaaacccctttagtgaatgagtcactgaagaaatttttaaacaccaaggatggtagactcgtcgccagtctggtagctgagtttctgcagttctttaatctggattttacactggcagtatttcagccagaaacgtccacactccagggtctcgaagggcgggaaaatctcgctcgcgacttgggtatcatcgaagctgaagggacggtcggaggccccctgttgctggaagttattcgccggtgccagcaaaaagaaaagggccccaccacgggcgagggcgctctggacctaagcgacgtgcactcaccacccaagtcacccgaaggaaagacgagcgcccagaccacaccatctaagaaggccaacgatgaggccaaccagtcagatacatccgtatctctcagcgaacccaagagtaagtcatctctgcacctattgagccatgaaactaagattggtagtttcctgtccaatcggactctcgacggtaaggataaagccggcctgtgccccgacgaggacgacatggaaggggactcttttttcgatgatccgatccctaagcctgagaaaacctacggactcaggaaagaacccaggaagcaggcaggtagtctggcatcattatcggatgctccacctttgaagtctggcctgagctcattagccggagcgcccagcctcaaagattccgagtccaagcggggtaacacagttctgaaagatcttaaactgatttctgacaagatcggatcgctagggctcggaaccggggaagacgacgattacgttgacgatttcaacagtacgagccacaggtctgaaaaatccgaaataagtatcggagaagagattgaagaggacttaagtgtggagatagacgacataaatacatccgacaagttggatgacctcactcaggatttgaccgtgtcacaacttagtgatgtagcggactatctcgaagatgttgcttag

SEQ ID NO: 187791 - DNA, 1200 bp, synthetic construct
  misc_feature 1..1200: note = Description of Artificial Sequence: Synthetic coding sequence
  source 1..1200: mol_type = other DNA
atggccgccaccgccgccgccgtggtggccgaggaggacaccgagctgagggatctgttggtgcagacactcgaaaactccggggtgctgaacagaatcaaggccgagctccgcgcagctgtgtttctggctctagaggagcaggaaaaggtagaaaataaaaccccccttgtgaacgagtctctcaaaaagttcctgaatacaaaggacggacgcctcgtcgccagtctggtcgcagagtttctgcagtttttcaatctggactttaccctggctgtttttcagcccgagactagcacacttcagggcctggaaggtcgggagaatcttgctcgagacctgggcatcatagaggcagagggcacagttggtggtcccctgctgctggaggtgatccggaggtgccagcagaaagagaagggaccgactaccggcgaaggcgctctggatctgtctgatgtgcactcccctcccaaatctcctgagggcaagacctctgctcagacaacccccagcaagattccccggtacaagggacaggggaaaaaaaaaacatccggtcagaaagccggggataaaaaggccaatgatgaagctaaccagtctgatacgagcgtgtctctgtcagaacctaagtctaaatcatccctgcacctactatctcacgagacaaaaattggctccttcctaagcaataggactcttgatggtaaggataaggccggcttgtgccctgacgaggacgacatggaaggtgactcattctttgacgacccaatccccaaacctgaaaaaacatatgggctccgcaaggaaccaagaaagcaggcggggtcgctggcaagcctgagtgacgctccccccctgaaatccggactgtctagccttgcaggagcccctagcttgaaggactccgagtcaaagcggggcaacacagtcctcaaagacttgaaattaatcagtgataagatcggaagtctggggctgggaaccggagaggatgatgattatgtggatgatttcaacagtacctctcacaggtctgagaaatcagaaataagtattggcgaggaaatagaggaggacctgtcagtagaaatcgatgacattaatacttccgacaagttggacgatctaacccaggacttgaccgtctcccagctgtctgacgtggcagactatctggaagatgttgcatag

SEQ ID NO: 187792 - DNA, 1095 bp, synthetic construct
  misc_feature 1..1095: note = Description of Artificial Sequence: Synthetic coding sequence
  source 1..1095: mol_type = other DNA
atggccgccaccgccgccgccgtggtggccgaggaggacaccgagctccgggatctgctggtacagaccctggaaaactccggcgtactcaacaggatcaaggccgaattaagggccgctgtctttcttgctctcgaggagcaggaaaaggtggagaataagaccccacttgtcaacgagtccctcaagaagtttctgaatacaaaagacggtcgcttggtcgctagcctcgtggccgagttcctccaattctttaaccttgactttaccctagcggtgtttcagccagagacgagtacactccagggcttagagggacgagaaaacctggcgcgcgacctgggcattatcgaagcagagggaacggtgggtggccccctgctgctagaggttatccgtagatgtcagcagaaggagaagggaccaacaacaggtgagaaagctaatgacgaggccaaccaaagtgacaccagcgtgtcgcttagtgagccgaaatccaaatcttcattgcacttgctgtcccatgagactaaaatcggctcattcctgagcaatcggacgcttgacggtaaagataaagccggcttatgccccgatgaagatgatatggaaggagactccttctttgatgatcctattccaaagcctgagaaaacctatgggctccggaaggagcccaggaagcaggccgggtccctggcatccctgtccgatgcccctccactgaaatccggcctttcgagcctagctggagcccccagcctgaaagattcggagtcaaagaggggcaataccgtgctcaaagacctcaaactgattagtgataagataggcagtctgggtctaggcaccggggaggatgatgactatgtggacgactttaactcaacttctcaccgatcagagaagagtgaaatcagcatcggcgaggaaatcgaagaagacctgtcagtggaaatcgacgacatcaatacatctgataagacaattacacagctggagtgcttactttcaatcggggcactgcatttcaaaaacaccgcagatatttttaaggtgattttcattcttctcaataagatcttgccaatctag

SEQ ID NO: 187793 - DNA, 420 bp, synthetic construct
  misc_feature 1..420: note = Description of Artificial Sequence: Synthetic coding sequence
  source 1..420: mol_type = other DNA
atgagcagcctgcccgtgccctacaagctgcccgtgagcctgagcgtgggctcctgcgttataatcaaagggactccgatacactccttcatcaatgacccacagcttcaagtagacttttacacggatatggacgaggactccgacattgctttcaggttcagagtgcactttggcaatcatgttgttatgaataggcgagaattcggaatctggatgctggaggagacaaccgattatgtccccttcgaggatgggaagcaatttgagctgtgcatctatgtccattacaatgagtacgaaatcaaggtgaatggtatacgcatatatgggttcgtgcacagaattccaccctcttttgttaaaatggtccaggtgtctcgggatatttccctcaccagcgtttgtgtctgtaactag

SEQ ID NO: 187794 - DNA, 8616 bp, synthetic construct
  misc_feature 1..8616: note = Description of Artificial Sequence: Synthetic coding sequence
  source 1..8616: mol_type = other DNA
atgcggcggggccggctgctggagatcgccctgggcttcaccgtgctgcttgcgtcatacacaagtcacggcgccgatgctaatctcgaagccggaaacgtcaaagagacgagagcgagtagggctaaacgcagaggagggggcgggcacgatgccctgaagggccctaacgtctgtgggtcccggtataacgcttattgttgccccgggtggaagacccttcccggcgggaaccagtgcatcgtgcccatctgtcgtcactcctgcggtgatggtttctgttctcgtccgaatatgtgtacctgtccctctggacagattgcaccttcatgcgggtcgcgatccatccagcactgcaacattcggtgcatgaacggtggttcttgttctgatgaccactgcctgtgtcagaagggttacatcggcacccactgtggtcagcccgtttgcgagtctggctgcctcaatggtggcagatgcgtggcccctaacaggtgcgcctgcacgtatggtttcaccgggccccaatgtgagcgcgattaccgaactggcccttgctttaccgtcatctccaaccaaatgtgccaagggcagctgtctggcatcgtgtgcacaaagaccttgtgctgcgcaaccgtgggacgtgcttggggtcatccctgcgagatgtgcccagcacaacctcacccttgtcgccgcgggtttattcctaacattcgcactggcgcctgccaagatgtggatgaatgccaggccatccctggcttgtgtcaggggggaaattgcattaacaccgttggttcgttcgaatgcaaatgccccgccggacataagctgaacgaggtgagccagaaatgcgaggatattgacgaatgttcaaccattccgggaatctgtgagggtggcgaatgtacgaacacagtgagttcttacttttgtaaatgccccccagggttttacacgagccctgacggaacaagatgcattgatgtaaggccgggttactgctacacagccctgactaatggccgctgttcgaatcaactcccgcaaagtatcaccaagatgcagtgttgttgtgatgccggtcggtgttggtcgcccggggtgactgtcgctccagaaatgtgtccaattcgggcaactgaagattttaataagctctgttctgtcccgatggtgattccaggtagacctgagtacccacctcctccgctcggccctatcccccccgtgctccctgtgcctccaggtttccctcctggccctcagatccccgtgcccagaccaccggttgaatacttgtatccctcaagagaacctcctagggtgttgccagtgaacgtgaccgactattgccaactcgtgcggtacctctgtcagaatggccgctgtatcccaacacctggttcatgccgctgtgagtgtaataaaggattccaattggatctgagaggcgaatgtattgatgtggatgagtgcgagaaaaacccctgtgccggaggagaatgcattaataaccaagggagctatacctgccagtgcagagccggataccagtccactttgacccggaccgagtgcagggacatagatgagtgcttacagaacggcagaatttgcaataatggcaggtgtatcaatactgacggcagttttcactgtgtctgtaacgcggggtttcatgtgactagggacggcaaaaactgtgaggacatggatgagtgctccatccggaacatgtgcttgaacggaatgtgcattaacgaggatggttcctttaaatgcatctgcaagccaggatttcagctcgcgtcggatggacgatactgtaaggatatcaatgagtgcgaaacacccgggatatgtatgaacgggaggtgcgtcaacactgatggatcgtatcggtgtgagtgtttcccaggactggccgtcgggcttgatggacgggtgtgtgtagacacacacatgcgcagtacttgctacggaggttataagagggggcagtgcataaaaccactgtttggggccgtgactaagtctgagtgctgctgcgcatcaactgagtatgccttcggggagccatgtcagccatgtcccgcccagaattctgccgagtatcaggcactgtgttcttcaggtccaggaatgacatctgctggttcggatatcaacgaatgcgctctggatccagatatttgtcccaatggcatatgtgaaaatctacgggggacatataagtgcatatgtaactctggctacgaagtggatagcacagggaagaattgcgtggacatcaacgagtgtgtgttgaatagcctcctgtgcgacaatgggcagtgcaggaatacacctggcagcttcgtttgtacttgccccaaggggtttatctacaagccggatcttaagacctgcgaggacattgatgagtgtgaaagttcgccatgtattaacggtgtgtgtaaaaacagtccaggcagttttatatgcgagtgttcctctgagtcaacgctggatcccacaaaaactatttgcattgagacgattaaggggacctgttggcagaccgttattgatggcaggtgcgagatcaacattaatggagctacactgaaaagccagtgctgtagtagcctcggagcagcatggggtagcccttgcacgctctgccaggttgatccgatttgtgggaaaggatattcccgtatcaaaggcacccagtgtgaggacattgatgagtgtgaggtgtttcctggggtgtgcaagaatgggttatgtgttaatactagaggcagctttaagtgtcagtgtccttctggcatgaccttggacgctaccggaagaatctgcttggatatcagactcgaaacgtgcttcctgcggtatgaggatgaggagtgcacacttcccattgcaggacgccataggatggacgcttgctgctgctcggtgggcgcggcttggggtaccgaggaatgtgaagaatgccctatgcgaaatacacctgaatatgaggagctgtgcccccgcggcccaggtttcgccaccaaggagatcacaaacggcaagcctttttttaaagatattaatgaatgcaagatgattccgtcgctctgtactcatggaaagtgtcgcaacaccatcggaagcttcaagtgtagatgtgacagcggttttgcacttgactctgaagagcgcaactgtacagacattgatgaatgtcgcataagccccgacttatgtggccgcggccagtgtgtcaatacgcccggggactttgagtgtaagtgcgatgagggttacgagtccggctttatgatgatgaagaactgcatggacattgacgaatgtcaacgggatccacttctctgcagaggcggagtctgtcacaacactgagggctcctatcggtgcgagtgcccgccggggcaccagctgtcccccaacatcagtgcctgcatcgacataaacgagtgtgagttgagcgctcacctatgccccaacggacggtgtgtgaacctgattggaaaatatcaatgcgcatgtaaccccggctatcactcaactccagataggctcttttgtgtggatatagatgagtgctctatcatgaatgggggatgtgaaaccttttgtactaactccgaggggtcttatgaatgtagctgccagccaggctttgccttaatgcccgatcaaagatcttgcaccgatatcgatgaatgcgaggacaaccctaacatttgtgacggagggcagtgcaccaacattcccggagaatatagatgtttgtgttacgacggcttcatggcttccgaagatatgaagacgtgcgttgacgtgaatgagtgcgatcttaatccaaacatctgtctgagcgggacatgcgaaaacacaaaaggaagtttcatatgtcactgcgatatgggatacagtgggaagaaaggcaaaactggctgtacagacatcaatgagtgcgagataggggcacacaactgtggaaagcacgccgtttgcactaatacagctggctcatttaagtgtagctgtagtccagggtggataggggacggaatcaagtgtaccgacctcgatgagtgctccaacggaacgcatatgtgctctcagcacgcggattgtaaaaatactatgggatcctatcgttgtttatgcaaagaaggctataccggagacggtttcacctgcaccgacctcgacgagtgctccgagaacttaaacctctgcgggaatggacagtgtctcaatgctccaggcggttatcggtgtgaatgtgacatgggcttcgtcccttcagccgacggtaaagcgtgcgaggacatcgacgagtgctccctgcccaatatctgtgtgttcggaacgtgccataatttacctgggctcttccgatgcgaatgtgaaataggatatgaactagaccggtccggcggtaattgcactgacgttaacgaatgcctggatcccactacttgtatttccggcaattgcgtgaacactcccggctcctatatatgtgactgcccaccggacttcgagcttaatccaacacgagtcgggtgcgtggacactcgcagcggcaactgttaccttgacatccggcccaggggagataatggggataccgcttgctccaatgagatcggcgtgggcgtgagtaaggcaagctgttgttgctctctgggcaaggcctggggcaccccttgcgaaatgtgccccgcagtgaatacctctgagtacaagatcttgtgccctggcggagagggctttaggcctaacccaataacagttattcttgaggatattgatgaatgccaggagctgcctgggctctgtcagggagggaagtgcatcaacacgttcgggagtttccagtgtcgctgcccaacagggtattatctcaacgaagacaccagggtgtgcgatgatgtgaatgagtgcgaaactcctggcatttgcgggccaggaacatgttacaacaccgtagggaactacacgtgcatttgcccccccgactacatgcaggtcaacgggggcaataactgtatggacatgcggcgctctctgtgctaccggaattactatgctgacaatcagacttgtgacggggaactgctcttcaacatgactaagaaaatgtgttgctgcagctacaacatcggtagggcctggaacaaaccttgcgaacagtgtccaatcccaagcacggatgaattcgctactttgtgtggaagtcaacggcctggcttcgtgatagacatttacaccgggctccctgtggacattgatgaatgtcgcgagatacctggagtctgtgagaacggagtttgcatcaacatggtgggaagctttagatgtgaatgccctgtggggtttttttacaacgataagctgcttgtctgtgaagacattgacgaatgccagaatggtcctgtctgccaaagaaacgctgagtgtattaacaccgcaggttcatataggtgtgactgtaagcctggatatcgattcacctccaccggacaatgcaatgaccgcaatgagtgtcaggaaatccctaacatctgttcccatggccagtgcattgacacagtgggttctttttactgtctgtgtcacaccggcttcaagactaatgatgatcagactatgtgtctggatatcaacgagtgtgagagagacgcttgcggaaatggaacctgtaggaatacaattggcagctttaattgtagatgcaaccatggattcatcttgagtcacaacaatgactgcatcgatgtggacgaatgtgcttccgggaacggtaatctgtgccggaacgggcagtgcatcaatactgtgggctcctttcagtgtcagtgcaatgagggctatgaggtggcacctgacgggcgtacatgtgtggatatcaacgagtgcttgctggagcctcgtaagtgcgcacctggtacctgtcagaatttggatgggagctatagatgcatttgtccgcccggatacagcctccagaacgagaagtgtgaggacatagacgaatgcgtggaagagcccgagatttgtgccctcgggacctgtagtaacaccgagggctcattcaagtgtctatgccccgagggtttcagtctgtccagcagcgggcgccggtgtcaggatttgcggatgagctactgctacgcgaagtttgagggaggaaagtgctcttctcctaagagtcggaatcacagcaagcaggagtgctgctgcgcattgaagggggagggctggggggatccatgtgagctatgccccacggaacctgatgaggccttccgtcagatatgcccctacggatcggggatcattgtggggcctgatgatagcgctgtggacatggacgagtgcaaagagcctgacgtctgtaaacacggccagtgcattaacaccgacggcagctatcgatgcgagtgtccttttggctacatcctcgccggcaatgaatgtgtggacaccgatgaatgctcagttggtaatccctgcggaaatgggacctgcaagaatgtcattggtggtttcgaatgtacttgtgaggaaggctttgaaccagggcctatgatgacctgcgaggatattaacgaatgcgctcagaaccctttgctgtgcgcattccgttgtgttaacacttatggaagctacgagtgcaagtgtccagtcgggtatgtattgcgagaggaccgacgaatgtgcaaggatgaagacgagtgtgaggagggaaagcatgactgtacagaaaaacagatggaatgcaaaaatttaatcggcacttatatgtgcatatgcgggccgggctatcagcgccgtccagatggtgagggatgtgtggacgagaacgaatgccagacaaagcccggtatctgcgaaaacggaagatgcctgaatacacgaggatcctacacatgtgagtgcaacgacggcttcacagcaagtccaaatcaggacgaatgcttggacaatcgtgaagggtactgctttactgaagtgctacagaacatgtgccaaatcgggtcgagtaacaggaaccccgtcaccaaaagcgagtgttgctgcgatggggggagaggatggggtccacactgtgagatctgtcccttccagggtacagtagcgtttaaaaagttgtgccctcacggtagaggatttatgactaatggggccgatatcgatgagtgtaaggtaatccacgacgtgtgtcgaaacggagaatgtgtaaatgatcgcggaagttaccactgcatctgcaaaaccgggtataccccagacatcaccgggactagttgcgtagacttgaatgagtgcaatcaggccccaaaaccatgtaacttcatttgcaaaaacacagaaggaagttaccagtgtagttgccccaaagggtatatactccaggaagatggtcgcagctgtaaagacctcgacgaatgcgctactaaacaacacaattgccagttcctgtgtgttaataccatcgggggttttacttgtaaatgcccccccggctttactcaacatcatactagctgcatagacaacaacgaatgcacgagcgatatcaatctgtgtgggtctaagggcatttgtcaaaacactcccggctccttcacgtgtgagtgccagcggggattttcactagatcagacaggatcaagttgcgaagatgtggatgaatgtgagggaaatcataggtgtcagcacggttgtcagaatattatcggggggtatagatgctcatgtcctcagggatacctgcaacattaccagtggaatcagtgcgtggatgagaatgaatgtctgtctgcgcacatctgtggcggggcatcttgtcacaatactcttggcagttataaatgcatgtgccccgccggttttcaatatgagcagttcagcggaggctgccaggacattaacgaatgcgggagcgctcaagcaccctgttcctatgggtgctccaacaccgaggggggatatctctgtggatgcccacccggatattttagaattggtcaggggcattgcgttagcggtatggggatggggcggggaaaccccgagccgcctgtgtcaggcgaaatggacgacaatagcctctctccagaggcctgctatgaatgtaagattaacggttatcccaagagggggaggaagaggagatcgaccaacgagactgacgcctctaatattgaagatcagagtgagacagaggccaatgtgagtctcgcttcatgggacgtggaaaaaaccgcgattttcgcatttaatatcagccacgtgagtaacaaggtacggatactcgagctactacctgctcttactaccctcacaaatcacaatcgttacctgatcgagtcaggcaatgaagacggattctttaagatcaaccagaaagagggcatctcctatctccattttacgaagaagaagcctgtagccggtacctatagccttcaaatctcctcaactcccctgtacaaaaaaaaggagctgaatcagctcgaagataagtacgacaaggactacctgtccggtgagctgggtgataacctgaagatgaaaattcaggttctgctccactag

SEQ ID NO: 187795 - DNA, 2958 bp, synthetic construct
  misc_feature 1..2958: note = Description of Artificial Sequence: Synthetic coding sequence
  source 1..2958: mol_type = other DNA
atgggcttcgtgcccagcgccgacggcaaggcctgcgaggacatcgacgagtgctctctgcctaacatctgcgtatttggcacatgccacaacctacccggtctctttcgatgcgaatgcgaaattggctatgagctagataggtccggcggcaattgtactgatgtcaacgaatgtctcgacccaacgacttgtatctccggtaactgcgtgaacactccaggatcctatatttgtgactgtcctcctgatttcgagttgaatccaacccgcgtgggctgtgtagacacccgcagcggcaattgctacctggacatcaggccacggggggacaacggtgatactgcttgtagtaacgaaatcggagtgggcgtgtccaaggcctcatgttgttgctccctggggaaggcttgggggacaccttgcgaaatgtgtccagctgttaatacaagcgagtacaagatcctgtgccccgggggagagggtttccgccccaaccccattaccgtgatccttgaagatatagatgagtgccaggagctcccaggcctgtgtcagggtggcaagtgcatcaacacatttggtagtttccagtgcagatgcccaactgggtattacctgaatgaagatacccgagtctgtgacgatgtgaacgagtgtgaaacgcctggcatttgtggaccaggaacatgttataacacagtcgggaactacacttgtatttgccccccagactacatgcaggttaatggaggtaataactgtatggatatgcgccgcagtctgtgttacagaaactactacgccgataaccagacatgcgacggcgagctgctcttcaacatgaccaagaagatgtgctgctgtagctacaatattggtcgtgcttggaacaagccctgtgaacagtgccctatccccagcaccgacgagtttgccaccttatgtggctctcagcggcccggttttgtgatcgacatctacactgggctgcccgtggacatcgatgagtgtcgggaaattccaggagtgtgcgagaacggtgtgtgtatcaacatggtgggctcatttcggtgtgagtgcccggttggctttttttataacgacaagttacttgtttgtgaagatattgacgagtgccagaatggccccgtatgccagaggaacgccgagtgcattaatactgctggctcttataggtgcgactgtaagcccggttaccgctttacctctacaggacagtgcaacgatcggaatgaatgccaagagatccccaacatttgttcccatgggcagtgtatcgatacggtagggagcttttactgtctctgccacacaggtttcaagaccaacgacgatcagacgatgtgcctggacattaacgaatgtgagcgggatgcgtgcggtaatggcacatgcaggaatactataggatcctttaattgccgctgcaaccacggattcattctctctcataacaatgactgtattgatgtggatgagtgcgcatctggcaacgggaatctgtgtcgcaacggtcaatgcattaataccgttggctccttccagtgtcaatgcaacgaggggtacgaggtggcaccagatgggagaacatgcgtcgacatcaacgagtgcctgcttgaacctcgcaaatgtgccccaggcacctgtcagaatttggacggatcttataggtgcatctgccctccaggctacagtctgcagaatgaaaagtgcgaagacatcgatgaatgcgtcgaggagcctgagatatgcgccctgggcacctgtagtaacaccgaaggttccttcaagtgtttgtgcccggaaggtttcagtctctcttccagcggaaggcggtgccaggatttgcgaatgagctactgttacgctaagttcgagggtggaaagtgcagttcccccaagagcagaaatcactccaagcaggaatgttgctgcgctctgaagggggagggatggggggatccgtgcgaactgtgtccgaccgaacccgatgaagcctttcgccagatttgcccctatggttctggcatcattgtcggccctgatgactccgctgttgatatggatgagtgtaaagaacccgatgtgtgcaagcacggtcagtgtatcaataccgatgggagctaccgttgcgaatgtccgtttggatacatactggcaggcaacgagtgtgttgatactgacgagtgctccgttgggaatccttgcggaaacggaacttgcaaaaacgtcatcgggggctttgaatgcacctgcgaagagggattcgagcccggccccatgatgacttgcgaggatattaatgaatgtgctcagaaccctctcctctgtgcattcagatgcgtgaacacatacgggtcctacgagtgcaaatgccccgtggggtatgtgttgcgagaagaccgccgaatgtgtaaggacgaggatgagtgcgaggaggggaagcatgactgtaccgaaaagcaaatggagtgcaagaacctcatcgggacgtacatgtgcatttgcgggcctggctatcagcgtagaccggatggcgaggggtgcgtggatgaaaacgagtgccagacaaagccaggcatatgcgagaatgggaggtgcctgaatacaagaggtagttacacttgcgagtgtaatgacggtttcaccgcctcgcctaaccaagatgagtgtctggatgttatcctttcccttctcctgttgagtcctgcctttccctcttgcttcttctcacctcgcaccattggaaaaggaactgcatcacaacggtgttataaaacgtgcgtccggtcagcaccagccactggaactccatccccgaatcggaatgccgccgtcacggagggcgaagcgggcgtgccgacagtgaggtccgctctatcccgcggcctgtggcttagtaggaattctgtgccaatggctgaggactcctag

SEQ ID NO: 187796 - DNA, 3450 bp, synthetic construct
  misc_feature 1..3450: note = Description of Artificial Sequence: Synthetic coding sequence
  source 1..3450: mol_type = other DNA
atgcggcggggccggctgctggagatcgccctgggcttcaccgtgctgttagcctcatatacttcccatggcgcagatgccaatctagaggccggcaatgtgaaggagacgcgggcatcgagagccaaacgcagggggggaggtgggcacgacgcacttaagggccccaatgtttgcgggtccaggtacaacgcctactgttgccccggctggaagacccttcctgggggcaaccagtgcattgtgcccatctgtagacactcctgtggggatggcttctgctcccgacctaacatgtgcacatgcccgtctggtcagatcgcccccagctgcgggtctcgaagtattcagcactgcaatattagatgcatgaacggcggatcttgttctgacgatcactgcctctgtcagaagggctatatcggaacccactgtggccagccagtgtgtgaatccggctgcctgaacgggggccgatgtgtcgctcccaaccgctgcgcatgcacgtatggattcacagggcctcagtgtgagcgagattaccgcaccggtccctgtttcaccgttatctcaaatcagatgtgtcagggccagctgagcggcatcgtctgcaccaagaccctgtgctgcacatacattaacgaatgcgagatcggcgcacataactgtggtaagcatgctgtatgtacgaatactgcaggttcgttcaagtgttcttgcagccctgggtggattggggacgggattaaatgcactgaccttgatgaatgctcaaatggaacccacatgtgctctcagcacgctgactgcaaaaataccatgggatcctacagatgcctgtgcaaggaggggtacacaggggacggatttacctgtactgacttagacgagtgctctgaaaacctcaatctctgtggtaatggtcagtgcctcaacgcccctggcggctacagatgcgaatgtgatatggggtttgtgccatcggccgatgggaaagcctgtgaagacatcgacgagtgctcactaccgaacatctgcgtgtttggcacatgccataacttacctggcctcttccgctgtgagtgcgagatcggctacgaactggaccggtctggaggaaattgcactgacgtcaatgagtgtctggatccgaccacctgtatcagcggaaattgcgtgaatacacctggtagttacatttgcgattgcccccccgactttgaactcaacccaacacgtgtcggatgcgtcgacacccggtcagggaactgctatctggacatacgcccgcgcggggacaatggtgacaccgcttgctcgaacgaaattggggtgggggtgtcaaaggcgtcgtgctgctgcagccttggtaaggcctggggcacgccttgtgagatgtgcccggctgtcaatacctccgaatacaaaattctttgcccggggggagagggctttaggccaaaccctataaccgtcattctggaggatatcgacgagtgtcaagaactgccggggctatgtcagggcgggaagtgtattaacaccttcgggtcattccagtgtagatgtccaaccgggtactacttgaacgaagatacccgggtgtgtgatgatgtgaatgaatgcgaaacccccgggatatgtggccccggcacgtgctataacacggtgggtaattacacttgcatctgccccccagattacatgcaggtgaacggaggcaacaactgtatggacatgcggaggtcattgtgttaccggaattactacgcggataaccagacttgtgatggagaactgctgtttaacatgactaagaagatgtgttgttgctcctacaacatagggagagcgtggaataagccttgtgagcagtgtccgatcccaagcacagatgagttcgcaacactctgtgggagccaaaggcctggattcgtaatcgatatttacactggactgccagtcgacatcgatgagtgtcgcgagatcccgggagtgtgcgagaacggagtgtgcattaatatggtcggctcctttcggtgtgaatgtcccgtggggtttttttataatgataagcttctcgtgtgtgaggatattgatgaatgccagaatggcccggtctgtcaaaggaatgctgagtgtatcaacaccgctggcagctataggtgtgactgcaagcctggatatagattcacaagtacaggccagtgcaacgataggaacgagtgccaggaaattcctaacatatgtagccatgggcagtgtattgatacagtggggagtttttattgcctgtgtcataccggatttaagactaatgatgatcagaccatgtgcctggatatcaatgagtgtgagcgcgacgcttgcggtaacgggacctgtcgtaataccattggcagcttcaactgcagatgtaaccatgggtttattctgagtcacaacaatgactgtatcgacgtggatgagtgcgccagcggcaacgggaatttgtgtagaaacggacaatgcatcaatacggtgggttcctttcaatgtcagtgtaacgaggggtacgaagtagctcccgatggtcggacctgtgttgacatcaatgaatgtttgttggagccccgaaaatgtgcaccgggcacttgccagaacctcgacggcagctacagatgtatttgccctccaggctactctttacagaatgaaaagtgtgaggacatcgacgagtgcgtggaagaacctgaaatctgcgcccttggcacgtgctcaaacaccgagggaagtttcaagtgcttgtgccccgagggatttagcctatcatctagcggtcgtcgatgtcaagacctgcgcatgtcttactgttatgccaaatttgagggcgggaaatgcagcagccctaaaagtaggaatcatagcaagcaggagtgttgctgcgctctgaagggagaagggtggggagacccttgcgagctctgccccacggaacccgatgaggctttcaggcagatctgtccctacggatctggaattatcgtggggcctgacgacagtgccgtggatatggacgagtgcaaagagccggatgtctgtaaacacggtcagtgcatcaatacagatgggagctacaggtgtgagtgcccattcgggtacatcctcgccggcaacgaatgtgtcgatactgacgagtgctccgttggtaatccatgcggaaatggtacgtgtaagaatgtcattggaggttttgagtgtacgtgtgaggaggggttcgaaccagggccaatgatgacctgtgaggatataaatgagtgtgcccagaaccctctgctgtgtgcctttcggtgcgttaacacttacggatcctatgaatgtaaatgccccgttggttatgtgctgagggaagaccggaggatgtgcaaagatgaggacgaatgtgaagaagggaagcatgattgtacatag

SEQ ID NO: 187797 - DNA, 8739 bp, synthetic construct
  misc_feature 1..8739: note = Description of Artificial Sequence: Synthetic coding sequence
  source 1..8739: mol_type = other DNA
atgggccggcggcggcggctgtgcctgcagctgtacttcctgtggttaggatgcgtggtgttgtgggcccaggggaccgccggtcagccccagccccctccccccaagccgcccaggcctcaaccaccaccccagcaggtccgtagcgcgaccgcaggctccgagggcggttttctggctccggagtacagggaagagggcgcagctgtggccagccgggtcagaagacgcggccaacaagatgtgttgcgcgggcctaacgtttgcgggtctcgttttcacagttactgctgccctgggtggaagacgctccctggcggaaaccagtgtatcgtgcctatatgcagaaattcttgcggagacggattctgttctagacctaacatgtgcacttgctcaagtggacaaatctcttcaacttgtggtagtaagagcattcaacagtgttccgttcggtgcatgaatggtggaacctgcgcagatgatcattgtcagtgtcaaaaagggtacattggaacctattgtggccaaccggtgtgtgagaacggatgccagaacggcgggcgttgtattggcccaaaccggtgcgcctgtgtttatggattcacggggccccagtgcgagcgtgactatcgcactggaccctgcttcacccaggtcaacaatcagatgtgccaggggcagctgaccggcatcgtgtgtacaaagactctgtgttgtgctacaatcggaagggcctggggacacccatgtgagatgtgccccgcgcaacctcagccctgcaggcggggatttatccccaacattaggacaggtgcatgccaggatgttgatgagtgccaggccattcctggtatatgccaggggggcaactgtattaataccgtgggcagcttcgaatgtcgttgccccgcaggacacaaacagagtgaaacgacacagaagtgcgaagacatcgacgagtgttccataataccaggcatctgtgaaaccggcgagtgcagcaatacagtgggaagttacttctgtgtctgcccaaggggatacgtgacaagtaccgacggatcacgttgtattgaccagaggactgggatgtgcttctcgggtctagtcaatggaaggtgtgcacaggagctgcccggacgaatgacgaaaatgcagtgctgttgcgaacccggtaggtgctgggggatcggcactatccctgaggcctgccctgtacggggttccgaagagtacaggagattgtgtatggatgggctccctatgggtggaatccctggtagcgctggctcccgccctggaggcacaggaggaaatggcttcgccccatccggaaacggcaacgggtacggaccaggcgggaccggcttcataccaattcccggagggaatggctttagcccgggcgtgggtggcgccggagtgggggctggtggccagggaccaattataaccgggctcactatattaaaccagacaattgacatctgcaagcatcacgctaacctctgtttgaacggacgctgtatccccactgttagttcttacaggtgtgagtgcaacatggggtataagcaggatgctaacggtgactgcatagatgtcgacgaatgcacgtccaatccctgcactaatggagactgcgtcaatacccctggctcatattactgtaagtgtcatgccggcttccagagaactccgaccaagcaggcttgcatcgacattgacgagtgtattcagaatggtgtcctgtgcaaaaacggaagatgtgttaatacggacggttccttccaatgcatttgcaacgcagggttcgagcttacgaccgacggcaagaattgtgtcgatcacgacgagtgtacaacgacaaacatgtgtcttaacggaatgtgtatcaatgaggatggcagcttcaaatgcatttgtaagccaggcttcgtgctagcacctaacggacgttattgtacggacgtggacgaatgtcagaccccagggatctgtatgaatggacattgcattaactcagagggctcgtttagatgtgattgtcctcccggcttggctgtggggatggacggccgagtatgcgtcgatacccacatgaggtccacttgctatggggggattaagaaaggcgtctgcgtgagacctttcccgggcgcagtgacaaaaagtgagtgctgctgtgctaacccagactatggcttcggcgagccctgtcagccatgccccgctaagaactcagcggagttccacgggctttgcagttccggggtcgggatcactgtggatgggagggatatcaacgagtgcgccctggatccagacatttgtgctaacgggatatgtgaaaatctgcggggctcataccgctgcaactgtaacagtggctatgagccagatgcaagcggacggaactgtattgatatcgacgaatgcctcgtcaacaggctgttatgtgataacggactctgccgcaacacacccggttcttacagttgtacctgcccgccaggatatgtgttcaggaccgagaccgagacctgtgaggacatcaatgaatgcgagtccaacccctgtgttaacggagcgtgccggaacaacttgggtagctttaattgtgagtgcagtcccgggtcaaagctgagttcaacaggtttgatttgcatcgacagcttgaaagggacatgttggctcaacattcaggacagtcgatgtgaggtcaacatcaatggggccaccctcaagtccgaatgctgcgcaacacttggcgcggcctggggctccccttgcgaacgatgcgagctggatacagcatgcccccggggactggccaggatcaagggggtgacctgcgaggacgtcaacgagtgtgaggtcttccccggggtttgcccgaacgggcggtgcgtgaatagcaagggttcttttcactgcgaatgccccgagggcctcactcttgacggcaccggccgggtttgcctcgatatcaggatggaacaatgttacctgaaatgggatgaagatgagtgtatccatcccgtgccagggaaattccgaatggacgcttgctgttgtgccgtaggagccgcatgggggaccgagtgcgaggagtgtcccaagccaggtactaaggagtatgaaacactgtgcccccggggcgcaggttttgccaatagaggagatgtactaactggacgccctttttacaaggacatcaatgagtgcaaagccttccccggcatgtgtacatacggaaagtgtcgaaataccattggaagcttcaagtgtcgatgtaatagtggctttgcccttgacatggaagagagaaactgtaccgatattgatgaatgtcgtatctctcccgacctgtgtggctcggggatttgtgttaatactccgggctcgtttgaatgtgaatgttttgaaggctacgaatcaggcttcatgatgatgaaaaactgtatggacatagacgagtgtgaacgcaacccactgctctgtagagggggtacatgtgtgaacactgaggggtcgttccaatgtgactgccctctgggtcacgagctttcccccagtagagaagactgcgtcgatatcaatgaatgtagcctttcggacaatctctgtaggaatgggaaatgtgttaacatgatcggcacctaccaatgcagctgtaaccccggataccaggcgacaccagaccgtcagggctgtactgacattgacgagtgtatgattatgaacggtggatgtgacacacagtgcaccaatagcgaagggtcctacgaatgttcttgcagcgaggggtacgcactgatgcctgatggacgctcatgcgctgatatcgatgaatgtgagaacaaccccgatatctgtgatggaggacagtgcaccaacatcccaggcgagtatcggtgcctctgctatgatggctttatggcatctatggatatgaagacctgtattgacgtgaacgaatgcgatcttaactcaaatatttgcatgtttggtgaatgcgaaaatacaaagggatctttcatctgccactgccagctggggtactcagtgaagaaggggacaaccggttgcacggacgtggacgagtgcgagatcggcgcacacaactgtgacatgcacgcatcttgtctgaatatccccgggtctttcaagtgctcttgccgtgaaggatggattgggaatggcataaaatgtatagacctcgacgagtgctcaaacggtacacatcaatgcagtattaacgcccagtgcgtaaacacacccggctcttatcggtgcgcatgctccgaaggttttaccggcgacggattcacatgctctgacgtagacgaatgcgctgagaatataaacttgtgtgaaaacggacagtgtctgaacgtgcctggagcgtatagatgtgagtgcgagatgggcttcaccccagcgtccgattcccgatcttgccaggatatcgatgagtgctcattccagaatatttgcgtatttgggacttgtaacaacctgcctggaatgttccactgcatctgtgatgatgggtatgaactggatcgcaccgggggaaactgtaccgatattgatgaatgcgccgaccctatcaattgtgtgaacggactgtgcgtaaatactcctggccgatacgaatgcaactgccctcccgattttcagctgaatcccactggagttggttgcgtagacaaccgtgttggcaactgttatctcaagtttggtcccaggggagacggttccctgagctgtaacactgagattggcgtgggcgtgagtcgaagctcctgttgttgcagcttgggcaaggcatggggtaatccctgtgagacctgccctcccgtgaattcaacagagtattacacactgtgcccggggggcgagggcttccgtccgaatccaatcacaattatccttgaggacatagacgagtgtcaggaacttccaggtctttgtcagggcggtaactgtataaataccttcggtagcttccagtgcgaatgtccacaggggtattacctgtctgaagacactcgtatctgtgaggacatagacgaatgctttgctcatccaggtgtttgtggccctggaacttgttacaataccttagggaattatacctgtatctgccctcccgagtacatgcaggtgaacggcggacacaactgtatggacatgcgcaaatctttttgctataggtcctacaacggcacaacatgtgagaatgaactcccgtttaatgtgacgaagcgcatgtgttgctgtacctacaatgtcggtaaagcttggaataagccctgtgaaccttgccccacacccgggacagctgatttcaagacaatttgtgggaatatacccggcttcacgttcgatattcatacgggaaaggcagtggacatagacgagtgcaaggagatccccggcatatgcgctaacggcgtgtgtatcaatcaaatcggttcctttaggtgcgagtgtccaacgggtttctcctacaatgatcttctgctcgtgtgtgaggatattgacgaatgcagcaatggggacaatctgtgccagaggaatgctgattgcattaacagccccgggtcttatcggtgcgagtgtgcggccgggttcaaactgagtcctaacggtgcatgtgtcgacaggaacgagtgtcttgagattccgaatgtgtgcagccacggcctgtgtgtagacctccaagggagctaccagtgtatttgccacaacgggtttaaggccagccaggaccagactatgtgtatggacgttgatgaatgtgagcggcacccttgtggaaatggaacttgcaaaaatacagttgggtcgtataactgcctatgctacccagggttcgaactgacccataacaacgattgtttggatatagacgaatgctcctcgttttttgggcaggtgtgtaggaacggacggtgtttcaatgaaattggctccttcaagtgtttatgcaacgaagggtatgaactgactcccgacggtaaaaactgcatagacacgaatgagtgtgtggcgctgcctggatcttgttctcccgggacttgtcagaacctggagggtagctttaggtgtatctgccccccagggtatgaggtgaagtctgaaaattgcattgacatcaacgagtgcgatgaggacccaaacatttgtctgtttgggtcctgtactaacacgccaggaggttttcagtgcttgtgccctcctggttttgttttgtctgacaacgggaggaggtgcttcgacactcggcaaagtttttgcttcacaaacttcgagaacggaaagtgtagcgtccctaaggcttttaacacaaccaaggctaagtgttgttgcagtaagatgcccggcgaggggtggggcgacccctgcgagctatgtccaaaggacgatgaagtcgcattccaggacctgtgcccatacggacatgggacagttccaagtctgcacgatacaagggaagatgttaatgagtgcctcgaatccccaggtatctgttcaaatggccagtgcatcaacacagatggatctttccgctgtgaatgccctatgggttataacctggattataccggggtgcgttgtgtggacactgatgagtgcagtattgggaacccctgtgggaatggaacctgcaccaacgtgataggttctttcgaatgcaactgcaacgaaggctttgaaccagggccaatgatgaattgcgaagatataaacgaatgcgcacaaaaccccctcctgtgtgcatttcgctgcatgaacacattcggctcttacgaatgcacttgtccgattggctatgctctgcgggaggatcaaaaaatgtgtaaagacctggacgagtgtgccgaagggctgcatgactgcgagtctcgtggcatgatgtgtaagaacctcattggcacctttatgtgtatttgtccccctggaatggctaggcggcctgacggtgaaggctgcgtggatgagaatgaatgcaggacaaaacctggcatatgtgagaacggccggtgtgttaacataatcgggtcttacagatgtgagtgtaatgagggattccaatcatccagcagcggcactgaatgcctggacaaccgccaggggctgtgtttcgctgaggtgcttcagacaatctgtcagatggccagctcaagccggaatcttgtcacaaaatcagagtgctgctgtgacgggggccgcggctggggacaccaatgtgagttgtgccctctgccagggaccgcccagtacaagaaaatctgtccacacggacccggatacaccaccgatggcagagacattgacgaatgtaaagtgatgcccaatctttgcacaaatggccagtgtatcaataccatggggagtttccggtgcttctgtaaggtaggatataccaccgatatttcagggactagctgcattgatctggacgaatgttctcagtctccgaagccttgcaactatatctgcaaaaacaccgaaggctcctaccagtgttcttgccctagaggctatgtgcttcaggaggacggaaagacttgcaaggacctggatgagtgtcagactaagcaacacaactgccagtttctgtgtgtgaatactttagggggttttacttgcaagtgcccccccggctttacgcagcaccacacagcgtgcatcgacaataatgagtgcggctctcagccatctctatgcggagcaaagggtatatgtcagaacacccctggaagcttctcctgtgaatgtcagagggggttttccctcgacgctaccggtctgaattgtgaggatgtggacgagtgcgatggcaaccatcgttgccagcatggatgccagaacatactgggcgggtacagatgtggctgccctcagggctacatccagcactaccagtggaatcaatgcgttgatgagaatgagtgttcgaatcctaatgcatgcggctctgcttcgtgctacaatacgctggggagttataagtgtgcctgtccttctggtttttctttcgaccagttctccagtgcatgccatgatgttaacgagtgctcctcatccaagaatccgtgcaattacggatgttctaacacggagggcgggtacctctgtggatgtccacccggctactatagggtcgggcagggacactgcgtcagcggaatgggctttaacaaagggcaatacctctccctggacacagaggtggacgaggagaatgccttgtcccccgaggcatgctatgagtgtaaaattaatggatacagtaagaaggacagtcggcaaaaaaggtccattcacgagcccgacccaacagctgtggagcagatttctctggagtctgtagacatggacagtccagtgaacatgaaattcaaccttagccacctggggagcaaagagcacatactggaattgagacctgccatccagccacttaataaccacattcggtatgtgatcagccagggtaacgacgacagtgtcttcagaatccaccagcgcaacgggctctcttatctgcacacggcaaaaaagaagctgatgcctgggacttacactctggagatcacttccattcccctgtacaaaaaaaaagagctgaagaagcttgaggaaagtaacgaggatgattatctcctgggtgaacttggcgaggcactgagaatgcggctccaaattcagttatactag

SEQ ID NO: 187798 - DNA, 8739 bp, synthetic construct
  misc_feature 1..8739: note = Description of Artificial Sequence: Synthetic coding sequence
  source 1..8739: mol_type = other DNA
atgggccggcggcggcggctgtgcctgcagctgtacttcctgtggcttggctgtgtcgtgctctgggcgcaaggaacagccggacagcctcagccaccaccacctaaaccccccagaccccagccgcccccacagcaggtaagatcagcaactgccggcagcgagggtggattcctagcgccagagtacagagaagagggcgctgccgtggcatcaagagttcgccggcggggccaacaggacgtgctcagaggccccaatgtgtgcggttcccgatttcatagctattgttgtccaggatggaagacccttccaggaggcaaccagtgcatcgtcccaatttgtcggaatagctgcggagatggattttgttcaagaccaaacatgtgcacatgtagcagtggtcagatctcctcaacctgcggctctaagagcatccagcagtgctcggttcggtgcatgaacggaggcacatgtgcagacgaccactgccagtgccagaaaggttatatcgggacatattgcggccaacccgtctgcgagaacggatgtcagaacggagggcggtgtattggccctaaccgatgcgcctgtgtgtacgggttcacggggccccagtgcgagagagactatcggacagggccttgcttcacacaggttaacaaccagatgtgccagggacaattgacaggtattgtatgtacaaaaaccctgtgctgcgcaactataggacgagcctgggggcacccatgcgaaatgtgtcctgcccagccgcagccatgtcgccgcggcttcatccccaatattaggacaggcgcatgtcaggatgttgatgagtgccaagcaattcctgggatttgccaggggggcaattgtatcaataccgtcggctctttcgaatgccggtgccctgcaggccataaacagtctgaaactacccagaagtgtgaagacatcgacgagtgtagtatcattcccggaatctgtgagaccggtgagtgttctaataccgttgggtcatacttttgtgtatgcccccgaggatacgtcaccagtacggacggtagtaggtgtatcgaccaaaggactggcatgtgcttcagtggcctggtcaacggacgttgtgcccaagaacttccaggcaggatgacaaaaatgcagtgctgttgtgaacctggacggtgctgggggataggaactatccctgaggcgtgccctgtgagaggaagcgaggaatatcgcaggctctgcatggatggactgccaatgggggggattcccgggagtgctgggtcccggccaggcgggactggcggcaatgggttcgccccctccggcaatggcaacggatacggacccggaggcactggcttcatcccaattcccgggggaaatggcttttctccgggagtgggtggggccggagtcggcgccggcgggcaggggcctatcatcactgggttgaccatcctaaaccagacaattgatatatgtaagcaccacgccaacctgtgccttaatgggcgttgcatcccgaccgtcagcagctatagatgtgaatgcaacatgggatacaagcaggacgccaacggggactgtatcgacgtggatgaatgtacctctaatccgtgtaccaatggggattgtgtcaacactcccgggagctattactgcaagtgtcacgcaggtttccaaaggacaccgactaagcaggcttgtattgatatcgacgaatgcatacaaaacggggtgctatgcaaaaacggcaggtgtgtgaacaccgacggctcttttcaatgcatttgtaacgccggttttgagctgaccacagacggaaagaactgcgttgaccacgacgagtgtaccacaactaacatgtgtctaaatggcatgtgcattaatgaagatgggagctttaagtgtatctgtaagcctgggtttgtcctagcgccaaatggccgatactgcaccgacgtggatgagtgccaaacaccagggatatgtatgaatggtcattgcatcaattctgaggggtcctttcgctgcgattgtcctcctggtctggccgtcggcatggacgggagggtgtgcgtggatacccacatgcgctccacttgctatggtggaatcaaaaaaggagtgtgcgttaggccctttcccggagcggtgacaaagagtgagtgctgctgcgctaatcccgactacggattcggtgagccatgccagccatgccccgctaagaattcagctgagtttcatgggctgtgttcttcaggagtgggcatcactgtggacggcagggacatcaacgagtgcgctctggacccagacatctgtgccaatggcatctgcgagaacctccggggctcttatcggtgtaattgtaacagcggctatgagcccgatgccagcggccgcaactgcattgacatcgatgagtgtttggtcaataggctcttatgtgacaacggcctgtgccgaaacacgcctggctcttattcatgcacttgcccgccaggatatgtgtttaggaccgaaaccgaaacctgtgaagacatcaatgagtgcgaatccaacccatgcgttaacggtgcctgtagaaacaacctgggcagcttcaattgtgagtgctccccaggaagcaagttgtctagtaccggcctcatatgtatcgatagcctcaaagggacatgttggcttaacatacaagatagccggtgcgaagtgaacatcaatggcgccactcttaagagtgagtgctgcgccacattgggcgccgcctggggatccccttgtgaacggtgcgagttggatacggcctgcccccggggactagcaagaatcaagggagtgacatgcgaggacgtcaatgagtgcgaagtcttccccggcgtgtgccctaacggtcgctgtgtgaattctaagggtagctttcactgtgaatgccctgagggcctcactctcgatggcaccggaagagtgtgcctagacatcaggatggagcagtgttatttgaaatgggacgaggacgaatgcatccatcccgtgcctggcaagtttaggatggacgcctgttgctgcgctgtgggcgcagcctggggaacagagtgtgaggaatgccctaaacctggcactaaggaatacgagacactttgcccgagaggcgccggatttgctaatcgcggagatgtgctcaccggaagacctttctataaagatatcaatgagtgcaaggcttttccaggaatgtgcacgtatggtaaatgtaggaacacgattggtagcttcaaatgtcgctgcaactcaggttttgccttggatatggaggagaggaactgcacagatatagatgagtgccggattagcccagatctttgcggatcaggcatttgtgtaaatacgcctggcagcttcgagtgcgagtgctttgaggggtacgagagtggcttcatgatgatgaaaaactgtatggacatcgacgaatgtgaaagaaacccactcctgtgtagaggcgggacctgcgttaacaccgagggatccttccagtgcgattgccctctcgggcacgagctcagccctagcagagaagactgtgttgacattaacgagtgctccctctccgacaacctatgtcgcaacggaaagtgtgtgaatatgatagggacatatcagtgttcatgcaatcccggctaccaggccacccctgacaggcaaggatgtaccgatatcgatgaatgcatgattatgaatgggggttgcgacacacagtgtaccaatagtgaaggttcctacgagtgttcttgctctgaaggctatgcactgatgccagacggccgaagttgcgcagacatcgatgagtgtgaaaacaacccagatatctgcgacggggggcagtgtacaaacatacccggggagtacagatgcctgtgctatgacggcttcatggccagcatggacatgaaaacctgtatagatgttaacgaatgtgacctcaacagtaacatctgtatgttcggggagtgtgagaatactaaaggttcattcatttgtcactgccagctaggatattccgtcaaaaagggaacgaccgggtgcactgatgttgatgagtgcgagattggtgctcacaactgcgacatgcacgcttcctgcctgaatattcctggctcattcaagtgctcctgtagggaaggttggattggaaacggaattaagtgtatagacctagatgaatgctctaacggaacgcatcaatgtagtataaacgctcagtgcgtgaatactcctggcagctatcgctgtgcgtgtagcgaagggttcacaggcgacggattcacttgttcagacgttgacgagtgcgccgagaatattaacctctgtgaaaacgggcagtgtctaaatgtgccaggtgcttatagatgtgaatgcgaaatggggttcactccagcttccgattcacgatcatgccaggacattgacgagtgcagttttcagaacatttgcgtatttggcacatgtaataatttgcctggcatgttccactgcatctgcgacgatggttatgagcttgataggaccggagggaattgtacagatattgatgagtgtgctgatcctatcaactgcgtgaatggactgtgcgtaaacacccccggtcgctatgagtgtaactgtcccccggacttccagctcaaccctactggagttggctgtgtggataatcgcgttggtaactgctatctgaagtttgggcccagaggcgatggatcccttagctgcaacacggagatcggcgtgggggttagcaggtcctcatgctgctgtagccttggtaaggcctggggaaacccttgcgaaacctgccccccggtaaatagtacagagtattacacgctgtgcccaggcggcgaggggttccgacctaatccgatcactatcattctcgaagacatcgacgagtgtcaggaacttcctgggttgtgccaagggggcaattgtatcaatacatttggcagctttcagtgtgaatgtcctcagggatattacctctcagaagatacgcgcatctgcgaggatatcgacgaatgcttcgcccatccaggcgtctgtggaccaggtacgtgttacaacacactgggtaattacacttgcatttgcccccctgagtacatgcaagtgaatgggggccacaattgtatggatatgaggaaaagcttctgctatagaagctacaacggaaccacgtgcgagaacgagctccctttcaacgtaacaaagcgaatgtgttgttgtacatacaatgtcgggaaggcatggaacaaaccatgcgagccatgccccaccccaggaaccgcagatttcaaaactatctgcggtaatattcccggattcacattcgacatccacaccggaaaggcagtggatattgatgaatgcaaagagattccaggcatttgtgcaaacggagtctgcataaatcaaatagggagctttcggtgcgaatgcccaactggtttctcctataacgaccttctactcgtgtgcgaagacatagatgagtgttccaacggggataatctgtgccagagaaacgccgattgcattaatagtcctgggagctaccgatgcgagtgcgccgccggattcaagctgagcccaaatggagcctgcgtggatcggaatgagtgtctggagattcccaacgtgtgcagtcatggactgtgcgtggatctgcagggttcttatcaatgcatttgccataacgggttcaaagcaagtcaggaccagactatgtgtatggacgtggacgagtgcgaaagacacccatgtggtaatgggacttgtaagaacacggtcggctcctataactgcctttgctatcctggcttcgagctcactcataacaacgattgcctggatattgacgagtgttctagcttcttcggtcaggtttgccggaatggacgctgcttcaacgaaataggcagctttaaatgtctctgcaacgagggctacgaactgactccggatggcaaaaattgtattgatacgaacgaatgtgttgccctgcccggctcctgcagccccggtacatgccagaaccttgaggggagcttccggtgcatctgtcctccaggctatgaagtcaagtctgagaactgtatcgacattaatgagtgcgatgaagaccctaacatttgtctgttcggctcatgtactaacacaccgggggggttccagtgcctttgcccccctggcttcgtgctgagtgataacgggaggaggtgttttgacacaagacaaagcttctgtttcactaactttgaaaacgggaagtgttcggttccaaaagctttcaacactactaaggccaagtgttgttgctccaagatgccaggcgaaggatggggcgatccctgtgaactgtgtcctaaagacgacgaggttgcttttcaagatctttgtccgtatggtcacggcactgtcccatcgctacacgatacccgggaggatgtgaatgagtgtctcgagtcgccgggtatttgctcaaacgggcagtgcatcaacacagacggttccttcaggtgcgagtgtcctatgggatacaacctggactataccggggttcgttgcgttgatactgacgagtgcagtattggaaatccttgcggaaacgggacatgcaccaatgtcataggaagcttcgagtgtaactgcaacgaggggtttgaacctgggccaatgatgaactgtgaggatattaatgagtgtgcgcaaaatccactactctgtgcatttcgatgcatgaatactttcggatcgtacgagtgcacatgtccgatcggctatgccctgagagaggatcagaagatgtgtaaggatctggatgagtgcgccgaggggttgcacgattgtgagtcccgaggcatgatgtgtaaaaatctgattgggacttttatgtgtatatgtccacctggaatggcccggcgtcctgatggggagggttgcgtcgacgagaatgagtgtagaaccaaacccggaatctgtgaaaacgggcgctgtgtgaatataattgggtcataccgatgcgagtgtaacgagggtttccagagttctagctccggaacagaatgtcttgacaatagacagggcctgtgttttgctgaagtgcttcagacaatctgccagatggccagctctagccgaaacctagtcactaagtcagaatgctgctgcgatggcggacggggctggggccaccaatgtgaactttgtccactcccggggaccgcgcagtacaagaagatatgccctcacggccctggatacacaaccgacggcagagatatcgacgagtgtaaagtgatgcctaacttatgtacaaacggccagtgtattaataccatggggagctttcgatgcttttgtaaagtcggatataccacagatatctcagggaccagttgcatcgacctggacgagtgttctcagagtcctaagccgtgtaattacatctgcaagaacaccgagggatcatatcagtgctcttgccccagaggctatgttctacaggaagacggcaagacctgtaaagatttggatgagtgtcaaactaagcagcataactgtcagtttttgtgcgtgaacactttgggcggcttcacctgtaaatgtccgcctggtttcacccagcaccatactgcttgcattgacaacaatgagtgcgggagccagccctcgctctgcggggctaaaggaatttgccaaaatacccccgggagcttcagttgcgagtgtcagagggggttctcactggatgccacggggttaaactgtgaggacgtcgacgaatgcgacggaaaccataggtgtcagcatggatgtcagaatattcttggcggatatagatgtggctgtcctcaaggatatatccaacactatcagtggaaccaatgcgtagatgagaacgaatgttcaaaccccaacgcgtgcggctctgcttcttgttacaacacactagggtcttacaagtgtgcctgtccttcaggcttcagtttcgatcagttctctagtgcatgccacgatgtaaacgaatgttcaagcagcaagaacccttgcaactacggttgcagtaatacagaaggaggttacctgtgtggctgccccccaggatattaccgggtggggcaggggcactgcgtgtccggtatgggcttcaataaggggcagtatctgagtctcgatactgaagtggatgaggaaaacgccttgtccccagaagcgtgctacgaatgcaagatcaatggctacagcaagaaggatagcagacagaagcgcagcattcatgagccggacccaaccgcggtagaacagatttctctagagtctgtagacatggatagccctgtaaacatgaagttcaatctgtcccacttgggaagtaaagagcatatcctggagttacgcccagcaatacagcctctgaacaaccatatccggtatgtcattagccaaggcaacgacgactcggtcttccgcattcaccagagaaatgggctgagctatttgcacacagctaagaagaaactgatgcccggcacctatacacttgagattacgtcaatacctttatataagaaaaaggaactgaaaaagctggaagaaagtaatgaggacgactacttgctcggtgagctcggcgaagccctgaggatgagactgcagatccagttgtactag

SEQ ID NO: 187799 - DNA, 597 bp, synthetic construct
  misc_feature 1..597: note = Description of Artificial Sequence: Synthetic coding sequence
  source 1..597: mol_type = other DNA
atgggcctgcggaagggccacggcaccctgggccagggcctgagcgctctgcagagcgaacaaggcaggctgatccagttgctgagtgaatcccagggccatatggcccacttggttaattctgtgtccgatattctcgacgccctgcaacgcgatagaggcctcggtaggcctcgaaacaaagccgatctgcaaagggccccagccagagggactaggccgagaggctgcgcaacaggttcgcgacctcgcgactgtctcgacgttctgctgagcggacagcaggacgatggagtgtactccgtttttcccacccactatccagctggcttccaggtgtactgcgatatgaggaccgatgggggagggtggactgtcttccagagacgggaggacggaagcgtgaacttcttcagaggctgggacgcgtaccgggacggctttggccggttgacaggcgaacattggctcggtcccttagactggtgcactctgtctttggccctgctcgtgcccgtagctcccagccctacaccgcctcatagcttcgttaacgtgttacaccctcccgttcctggggggccaacactgcagtag

SEQ ID NO: 187800 - DNA, 912 bp, synthetic construct
  misc_feature 1..912: note = Description of Artificial Sequence: Synthetic coding sequence
  source 1..912: mol_type = other DNA
atgggcctgcggaagggccacggcaccctgggccagggcctgagcgccctccaatcagaacaaggccgcctcatccagttgctttccgagagtcagggacacatggcgcacctggtgaattccgttagcgacatcctggacgcactacagagagacagaggcctgggccgtcctcggaacaaggccgacctccagcgcgccccggccaggggcacacgcccccgcggctgtgctacaggatccaggcccagagattgcctcgacgtactacttagcgggcaacaggacgatggggtgtactccgttttccctactcattatcctgcaggcttccaagtttactgcgacatgagaaccgatggtggcggctggaccgtattccagaggagagaagacgggagcgtaaacttttttagagggtgggatgcctatagggacgggttcgggagattgaccggcgaacactggctggggttgaagaggatccatgcgctcacaacacaggcggcctatgagctccacgtagaccttgaggattttgagaacggcactgcctacgcacgttacggcagctttggggtcggcctgttcagcgtggaccctgaggaagacggctaccctcttacagtcgcagactattccggtacggcaggcgattcacttctgaagcactcggggatgaggtttaccactaaggacagagactctgatcacagcgaaaataattgtgcagctttttaccggggtgcttggtggtatcgaaattgtcacacttcaaatctgaacggccagtatctgaggggggctcacgcctcatacgcagatggtgtagaatggagtagctggaccggctggcagtattctctgaagttctccgaaatgaagataaggccagtccgcgaggatcggtag

SEQ ID NO: 187801 - DNA, 1386 bp, synthetic construct
  misc_feature 1..1386: note = Description of Artificial Sequence: Synthetic coding sequence
  source 1..1386: mol_type = other DNA
atggtgaacgaccggtggaagaccatgggcggcgccgcccagctggaagatcggccaagagataagccacagaggcctagctgcgggtatgtgctgtgtacggtgctcctggccctggctgttttactcgcggtggccgtgactggggccgtcctgttcctgaatcacgcccatgccccaggaactgcgccacctccagtggtgtcaaccggggccgcttcagccaacagcgctttggtaactgtcgagcgcgctgactctagccacctgtctattctcatcgatccacgatgccccgacctgaccgactcattcgcaagactggagtctgcgcaagcgtccgttttgcaggcactcactgagcatcaagctcaaccccgactggtcggcgaccaagagcaggaacttctcgatactctagccgatcagttgcctaggctgctggcaagggcgtctgaactgcagaccgagtgcatgggcctgcggaaaggtcacggtactctcggtcagggcctatccgccctgcagtccgaacagggacgtctcatccagctgctcagcgaatcacaggggcacatggcacacttggtgaactccgtttcagatattctggacgcccttcagagggatcgcggactcggacgccctagaaataaagccgatctgcagcgggcgcctgccagggggacccgcccaaggggatgtgcaacggggtcaagacccagggactgtcttgacgtgcttctctcaggacaacaagatgacggcgtttatagcgtatttccaactcattatccagcgggcttccaggtgtattgcgatatgaggactgacgggggcgggtggacagtgttccagaggcgtgaggacggtagcgtcaattttttccgcggttgggatgcttatagggatggatttggccgcctaacaggagagcactggctcggcttgaaacggattcatgccctgactacccaggccgcctatgagcttcatgtcgacctggaagactttgagaacggcacagcgtatgcacgctacggatcctttggtgttggtttgttcagtgtggaccccgaagaggacgggtatcccttgactgtggcagactacagcggtaccgcaggagactctctgctgaaacactccggtatgaggttcaccaccaaggaccgcgactccgaccacagcgagaataactgtgctgccttttaccgaggcgcctggtggtacagaaactgtcatacctccaatctgaacgggcagtacctacggggggcccacgctagttacgctgatggtgtggagtggtcctcctggaccggctggcaatatagtcttaaattctctgagatgaagatccgtccagtgcgtgaggacaggtag

SEQ ID NO: 187802 - DNA, 933 bp, synthetic construct
  misc_feature 1..933: note = Description of Artificial Sequence: Synthetic coding sequence
  source 1..933: mol_type = other DNA
tgaaccggcgccgtgctgttcctgaaccacgcccacgcccccggcaccgctccgcccccggtggttagcaccggcgcagcatccgcaaactctgccctggtgaccgtcgagagagcggattcatctcatttgagtattctgatcgatcctcgctgtccagaccttaccgattcattcgcccgcttggagtccgcgcaggcctcagtgctccaggctctgacggaacaccaggctcagccgaggttggtcggggatcaggaacaggaactcctagacactctagctgaccagctgcctaggctgctcgccagagccagtgagctccagacagaatgcatggggctgaggaaaggccatggcactttgggccaggggctcagcgcactccagtccgaacagggtcggctcatccaactgctgagtgagtctcagggccatatggcccacctggtgaattcagtaagtgatattctcgatgcactccagcgggatcggggcctgggaaggcctcggaataaggccgacctccaacgagcaccggcacgggggactcgccctagggggtgtgctaccggcagtaggcctcgggactgtctcgatgttctcttaagtggccagcaggacgatggtgtctattcagtgttcccaacacactacccggccgggtttcaagtgtactgcgatatgcgaacggatggaggggggtggacggtgtttcagcggagggaagacggttccgtgaacttttttagagggtgggacgcatatagagacggattcggccggctgacaggcgagcactggctggggcccttggactggtgcacactcagtttagcgctgctggttcccgttgctccctctcccaccccaccccatagttttgtaaacgttctgcaccctcctgtcccaggcggtcccaccctgcaatag

SEQ ID NO: 187803 - DNA, 1386 bp, synthetic construct
  misc_feature 1..1386: note = Description of Artificial Sequence: Synthetic coding sequence
  source 1..1386: mol_type = other DNA
atggtgaacgaccggtggaagaccatgggcggcgccgcccagctggaagatcggcctcgggataagccccagagacccagctgcggctatgtgctctgtaccgtgttactcgcgctagcagttctgctcgccgttgccgttaccggcgccgtactctttctcaaccatgctcacgcccccggcactgcgccccctccagttgtttccacaggagcagcgtccgcaaactcggccctggttaccgtggaaagagccgactcctcccacctgtccattctaattgaccctaggtgcccggatctcaccgattcatttgctagactggagtcggcgcaggcaagcgtgctacaggcactcactgagcaccaggcacaaccccgcctggttggagaccaggaacaagagctccttgacaccctggctgaccaactgcctcgtctgcttgctcgtgcttcggagctgcagaccgaatgtatggggcttcgaaaagggcatggcaccctgggccagggcctgagcgctctccagagcgaacaaggtcgcctgattcagctactctccgagtcccaggggcatatggcgcacctcgttaacagcgttagcgatattctagacgctctgcagagagatcgggggttaggccgaccaagaaacaaagccgacctgcaaagagcccctgccagagggaccaggccacggggctgcgcaacgggctcccgccctagagattgtcttgacgtgctgctgagcgggcagcaagatgatggagtgtactccgtctttcccactcactatcctgctgggttccaggtgtactgcgatatgcggacagacggaggcggctggacagtattccagagaagggaagatggctcagtgaacttctttaggggttgggatgcctacagggacggctttggacgtctgaccggcgaacactggctcggtctgaaaagaatccatgcgctgacaacacaggctgcatacgaactgcacgttgacttggaagactttgagaacggaacggcatatgctaggtacggctccttcggcgttggactgttctcggtagatccagaggaggatggttatccactcactgtggctgattactccggcacagctggggactcgctgttaaagcatagcggcatgaggtttacaaccaaggaccgcgacagcgaccactcagagaacaactgcgctgcattctataggggagcttggtggtatcgaaactgccatacatccaacctgaacggccagtacctgagaggggcgcatgcaagctacgcagatggcgtggagtggtcatcttggaccggctggcagtatagtctcaagtttagcgaaatgaagatccgacccgtccgggaagaccgctag

SEQ ID NO: 187804 - DNA, 870 bp, synthetic construct
  misc_feature 1..870: note = Description of Artificial Sequence: Synthetic coding sequence
  source 1..870: mol_type = other DNA
atggtgaacgaccggtggaagaccatgggcggcgccgcccagctggaggacagaccccgggacaaaccacagcggccaagctgtgggtatgtgctgtgcactgttcttttagctctggctgtactgctggctgtggccgtcaccggtgcagtactctttttaaatcacgcacacgcgcctggcaccgcaccaccccccgttgttagcacaggagctgcgagcgctaattcggcgctggttactgtggaacgggctgattctagccatttatccatattgattgatcccaggtgtccagatcttaccgacagttttgctcggttagaaagtgcccaggcgtcagttctgcaggctttgacagagcaccaagcccaacctaggctggtcggcgatcaagaacaggagctgctggacacgctagccgatcaactgccgcgcctgttagcccgagctagcgagcttcagacggaatgcatgggtctacgcaaaggccatggaacactgggccagggcttatcggctttgcagagcgagcagggccggcttatccagctgcttagcgaatctcaaggtcatatggcccatctggttaactccgttagcgacatcctggacgccctgcagcgcgacagaggcttaggacggcctcgcaacaaggcggacttgcaaagagcccccgcccggggaactcgtccacgtggctgtgccacgggatccagacctcgggactgcctggacgtccttcttagcggccagcaagacgacggagtttattccgttttcccaactcactaccctgcgggcttccaagtctattgcgatatgcgtaccgatgggggaggctggaccgtcttccagcgacgggaatag

SEQ ID NO: 187805 - DNA, 540 bp, synthetic construct
  misc_feature 1..540: note = Description of Artificial Sequence: Synthetic coding sequence
  source 1..540: mol_type = other DNA
atggtgaacgaccggtggaagaccatgggcggcgccgcccagctggaggatcgtccaagggataagccacaggcgcggaaactgcgcttgagagaaagacctagttgtgggtacgtgctgtgcactgtgctgctggccctagctgttctgctggctgtggctgttacaggggctgtgctattcctgaatcatgcccacgccccgggcacagcccctccccctgtggtttccacaggtgcggcttccgccaacagtgccctggtgaccgttgaacgcgccgatagttcccacctgtcaattttaattgacccgcgatgccccgacttgactgacagctttgcccgcttagagtccgcccaagcaagcgttctacaagcactgacagagcatcaggcacaaccacgattggtgggggaccaggagcaggaacttctggatacgctcgccgaccagctgccacggttgctcgccagagcgtccgagctgcagacagaatgtatgggcttacggaagggccatggaaccctcggccaggggtag

SEQ ID NO: 187806 - DNA, 1170 bp, synthetic construct
  misc_feature 1..1170: note = Description of Artificial Sequence: Synthetic coding sequence
  source 1..1170: mol_type = other DNA
atgcggcgggtgaccctgttcctgaacggcagccccaagaacggcaaagtcgttgctgtgtacggcactctgtctgacttgctgtccgtggcttccagcaagcttgggatcaaggccaccagcgtgtacaacggtaaaggtggcttgattgacgacatcgctctgatccgggatgatgatgtgctctttgtgtgcgagggagagcccttcatcgaccctcagactgattctaagccgcctgagggtctccttgggtttcacacagactggttgaccttgaatgtcgggggtcgatattttacaacaactaggagcacccttgtcaacaaggagccagactcaatgctcgcacacatgttcaaagataagggagtctggggaaataaacaggatcaccgaggtgcgtttctgattgatcgctccccagagtatttcgagccgatcctgaactacctgaggcatgggcagctgatcgtgaacgatggcataaatttgctgggggttctcgaagaagcaagattcttcggaatcgattctttaatagagcatcttgaggtagccattaaaaactcccagcctccagaggaccacagccctatcagtcgcaaggagtttgtcagattcctactcgctacacctaccaagtccgaactgcggtgtcaagggctgaacttctcgggcgccgatttgagccggctggatctcaggtacattaattttaaaatggcgaacctgtcgagatgtaacctggctcatgcaaatttatgctgcgcaaatctggagcgagcagacttgtcaggctcagtgctggactgtgctaacctccagggggtgaagatgttgtgtagcaatgccgaaggggcaagcctgaaactgtgtaattttgaagatccaagtggtttgaaagctaacctagagggggctaacttgaaaggcgtcgacatggagggatcccaaatgaccggcataaacctccgggtggctactctcaagaacgctaagttgaaaaactgtaatttgagaggcgcaacgctggccggtacggatctcgagaactgcgatttatctggctgtgacctgcaagaggctaacttgagggggtctaacgtgaaaggagccattttcgaggaaatgctcaccccactccacatgagtcaatctgtcaggtag

SEQ ID NO: 187807 - DNA, 939 bp, synthetic construct
  misc_feature 1..939: note = Description of Artificial Sequence: Synthetic coding sequence
  source 1..939: mol_type = other DNA
atggccaaggtgttcagcttcatcctggtgaccaccgccctgaccatggggcgggagataagcgctctcgaagactgtgcccaagaacagatgcggctgagagcacaggtccgcctactagagactcgggtgaaacaacagcaggtgaaaatcaaacagctgctgcaggagaacgaggtccagtttctcgataagggcgatgaaaacactgttatcgacctaggcagcaagcgccaatatgccgactgtagcgaaatctttaacgacggctataaactgtcggggttctacaagataaagcccctccagagccctgctgagttttccgtttattgtgatatgtcagacggcgggggctggaccgtcatccagcggcgtagcgacgggagcgagaactttaatcgcggctggaaagactacgagaatggctttggtaactttgtgcaaaagcacggggagtactggctcggcaacaaaaatttgcatttcttgacgactcaggaggattataccctcaaaattgatctcgccgacttcgagaagaacagcagatacgctcagtataaaaatttcaaggttggggacgaaaagaatttctacgaattgaatatcggagagtacagtgggacggcaggcgactcactggcaggtaactttcaccccgaggtgcagtggtgggcgtcgcaccagcgtatgaagttctccacttgggatagggatcatgacaattatgagggaaattgcgcggaggaagatcagtctggctggtggtttaaccgctgccactccgccaacctgaatggagtctactatagcggtccgtacactgcaaagacagataacggaatcgtttggtatacctggcacggttggtggtacagcctgaagtctgtggtgatgaagattcgacccaatgattttattcccaacgtgatatag

SEQ ID NO: 187808 - DNA, 939 bp, synthetic construct
  misc_feature 1..939: note = Description of Artificial Sequence: Synthetic coding sequence
  source 1..939: mol_type = other DNA
atggccaaggtgttcagcttcatcctggtgaccaccgccctgaccatgggaagagagatctccgcattagaggattgtgcccaggagcagatgcgattgagggctcaggtcaggctccttgagacaagggttaagcaacagcaggttaagatcaaacagctgttacaggaaaatgaagtgcagttcctggataaaggcgacgagaacactgtcatcgacctggggagcaagaggcagtacgcggactgctctgagatttttaatgacggatataagctaagtggattctacaagatcaagccattacagtctccggctgaattttccgtgtattgcgatatgtctgacggaggagggtggaccgtgatacagcggaggtcagacggatccgaaaattttaatagagggtggaaggattacgaaaacggcttcggtaacttcgtgcagaaacatggggagtattggctaggcaacaagaacttacatttcctaaccactcaggaagattatactttgaagatcgacctggcagacttcgagaaaaattctaggtatgcccaatacaagaattttaaagtcggagacgagaaaaatttttatgaactgaacatcggcgagtactccggcacagccggagactctttggcaggtaactttcatccggaggtgcaatggtgggcgtcgcatcaacgtatgaaattcagcacctgggacagggatcacgataattacgaaggtaactgtgccgaggaggatcaaagcggctggtggtttaacagatgtcatagcgccaatctgaacggagtgtactattccggtccttacaccgcaaagactgataatgggatcgtgtggtacacctggcatggttggtggtactctttgaagtcagtcgtgatgaagataaggcctaatgacttcataccaaacgtcatctag

SEQ ID NO: 187809 - DNA, 939 bp, synthetic construct
  misc_feature 1..939: note = Description of Artificial Sequence: Synthetic coding sequence
  source 1..939: mol_type = other DNA
atggccaaggtgttcagcttcatcctggtgaccaccgccctgaccatgggcagagagattagcgctcttgaggactgcgcacaggaacagatgagattgagagcacaggtgaggttacttgagactagggtcaagcagcagcaggtcaagatcaagcagttgctgcaggagaatgaggtgcagttcctcgacaagggcgacgagaataccgttattgatctgggaagtaagcgccagtacgcagattgctcagagattttcaacgacgggtataagttatcagggttttataaaatcaaacccctgcagagccctgctgaatttagtgtctactgcgacatgtcagatggcgggggctggactgtcatccagcgccgttctgacggaagcgagaattttaaccgtggctggaaggattacgagaatggcttcggcaattttgtccagaagcatggagaatactggctgggcaataagaacctgcatttcctcacaactcaggaagactataccctcaaaattgacctggccgactttgagaagaactccagatacgcacagtataaaaatttcaaggtgggtgatgagaagaacttctatgagttaaatatcggagagtacagcggaactgcaggtgattctctggctgggaattttcatcccgaggttcagtggtgggcatctcaccagcgcatgaaatttagtacatgggatagagaccacgataattacgagggcaactgcgcagaggaggaccagtccggctggtggttcaacaggtgtcattctgcaaatctcaatggggtgtactactcaggtccttacaccgctaaaactgataacgggatagtctggtacacatggcatggctggtggtactctttgaagagcgtggtcatgaaaatccgccctaacgatttcataccaaatgttatctag

SEQ ID NO: 187810 - DNA, 939 bp, synthetic construct
  misc_feature 1..939: note = Description of Artificial Sequence: Synthetic coding sequence
  source 1..939: mol_type = other DNA
atggccaaggtgttcagcttcatcctggtgaccaccgccctgaccatgggcagagaaatcagcgcattggaggattgcgctcaggagcaaatgcggttaagggcccaggttaggcttctcgaaacgcgggtcaaacaacagcaggtcaagatcaagcaactcctccaggagaatgaggtacagtttctagataagggcgacgaaaatactgtaattgaccttggctctaagagacagtacgccgactgtagtgagattttcaacgacggctataagctgtcggggttttacaagatcaagccccttcagtcgcccgcggagttctctgtttactgtgacatgtctgatggtggggggtggactgtgattcagcgccgaagtgacggctcagagaactttaatcgaggctggaaggactacgagaacggtttcggtaactttgtgcagaagcacggggagtactggctgggaaacaaaaatctgcatttccttaccacacaggaggattatactctgaagatcgacctggccgatttcgaaaagaactcccggtatgctcagtacaagaacttcaaggtgggcgacgaaaaaaatttctacgaacttaacataggagaatattcaggaacagcaggggactcccttgcagggaacttccatcctgaggtccagtggtgggcctcccatcaaaggatgaagttctcaacttgggaccgggatcatgataactacgaagggaactgcgccgaagaagaccaaagtgggtggtggttcaatcgttgccatagcgccaatctcaatggggtctattactctggtccttataccgccaagacagacaacgggatagtttggtatacctggcacggctggtggtattcactaaagtccgtggtcatgaagatcagaccgaacgacttcatcccgaatgtcatttag

SEQ ID NO: 187811 - DNA, 939 bp, synthetic construct
  misc_feature 1..939: note = Description of Artificial Sequence: Synthetic coding sequence
  source 1..939: mol_type = other DNA
atggccaaggtgttcagcttcatcctggtgaccaccgccctgaccatggggcgcgagatcagtgctcttgaggactgtgcacaggaacagatgcgccttagggcccaggtgcgcctcctggaaacaagagtgaagcagcagcaggtgaagatcaaacagctgttacaagaaaacgaagtccagttcctggataaaggggatgagaatactgtgattgatcttggatcgaagcgccagtatgcagactgttccgagatctttaacgacggctataaactgtcagggttctacaagataaagccgttacagagcccggcagagttctcagtgtattgcgatatgtctgacggcggaggatggacggtgattcagcgcaggtcggacggatccgagaatttcaaccgcggctggaaagactacgagaatggttttggaaacttcgtgcagaaacacggggaatattggcttggaaacaaaaacctgcacttcttgacaacacaggaggattatactctgaagatagatctggcagacttcgagaagaacagtcggtatgctcagtacaagaatttcaaagtcggggacgaaaagaatttttacgaattgaacatcggggagtactcaggaacagcaggggattccctcgcggggaatttccacccagaggtgcagtggtgggctagccaccaaagaatgaagtttagtacctgggatagggatcacgataattacgagggcaactgcgccgaggaggaccagtcagggtggtggtttaatcgctgtcactccgccaatctgaatggagtttattattctggtccttacaccgccaagacggacaatggaattgtctggtacacttggcacggttggtggtactctttaaagagcgttgtgatgaagatccggccgaatgattttattcctaacgttatctag

SEQ ID NO: 187812 - DNA, 939 bp, synthetic construct
  misc_feature 1..939: note = Description of Artificial Sequence: Synthetic coding sequence
  source 1..939: mol_type = other DNA
atggccaaggtgttcagcttcatcctggtgaccaccgccctgaccatgggaagggagatcagcgcacttgaggactgcgcccaggagcagatgcgtttgcgcgcacaagtgagactactggagactcgtgtcaaacagcagcaggtcaaaataaagcagttgctccaggaaaatgaagtgcagttcctggataagggggacgagaatacggtgatagacctgggatccaagcgtcaatatgctgactgttccgaaattttcaacgacgggtataagctgtccggcttctacaagattaaacctctccagagtccagccgaattctccgtatactgcgacatgtccgatggaggaggctggacagtcattcaacgccggtctgacggctccgagaatttcaaccggggctggaaggattatgagaacggtttcgggaacttcgtccaaaaacatggagaatactggctgggcaacaagaacctacacttcctgactactcaggaggactatactctgaaaatcgacctggcagacttcgaaaaaaacagtcggtacgcccaatataaaaactttaaagtcggggacgaaaaaaatttttatgaattgaacatcggtgagtattcgggaaccgcgggagatagcctagcaggtaactttcacccagaggtacaatggtgggcctctcaccagcggatgaaattttccacatgggatagagaccacgataattatgagggcaactgcgctgaggaggatcagtctggctggtggtttaaccgctgtcattctgcaaatcttaacggcgtgtattactctgggccctacaccgccaagactgataacggcatcgtatggtacacctggcacgggtggtggtattctctgaagtctgtagtgatgaagattcgccccaatgacttcattcccaatgttatctag

SEQ ID NO: 187813 - DNA, 849 bp, synthetic construct
  misc_feature 1..849: note = Description of Artificial Sequence: Synthetic coding sequence
  source 1..849: mol_type = other DNA
atgcggctgcgggcccaggtgcggctgctggagacccgggtgaagcagcagcaggtaaaaataaaacagttactgcaggaaaatgaagtgcaatttctggataagggagacgaaaacactgtgattgacctgggatctaagagacaatatgctgactgctccgaaatcttcaacgacggctataaactgtctggcttttacaagataaagcccctgcagagtcccgccgagttttccgtgtattgtgatatgagtgatggaggcgggtggacagttatacagagaaggtccgatgggagtgaaaattttaaccgaggctggaaagactatgagaatggctttggaaatttcgtacagaaacatggcgaatactggctaggcaataagaacctgcactttctcactacacaggaggattacacactgaagattgacctggccgatttcgaaaaaaactctaggtacgctcagtataaaaatttcaaagttggtgacgaaaaaaacttttatgagctcaacatcggcgagtactcggggactgctggagatagtctggcaggaaacttccaccctgaggtgcaatggtgggcaagccatcagcggatgaagttttccacttgggatcgcgaccatgacaactacgaggggaattgcgctgaggaggatcaatcaggttggtggttcaatcgatgccacagcgccaatctcaacggcgtgtattatagcggaccttatacggcaaagacagacaacggtatcgtgtggtatacatggcacggttggtggtattcgctcaagtctgtggtgatgaaaattaggcccaatgatttcattcctaatgtaatctag

SEQ ID NO: 187814 - DNA, 939 bp, synthetic construct
  misc_feature 1..939: note = Description of Artificial Sequence: Synthetic coding sequence
  source 1..939: mol_type = other DNA
atggccaaggtgttcagcttcatcctggtgaccaccgccctgaccatgggaagagaaataagtgcattagaggattgtgcacaggagcaaatgcgtctgcgcgcccaggttcgtctcctcgagactagggtgaaacagcaacaagttaagatcaaacagctgctccaggaaaacgaagtgcaattcttggataagggagacgaaaacactgtaattgatcttggatccaagcggcaatacgccgactgctctgagattttcaatgatggctataaactcagcggattttacaagattaagccactgcaaagcccagcagaattctcggtgtactgtgatatgtctgacggtggaggctggaccgttatacagaggcgcagtgatggctctgagaatttcaacaggggctggaaggattacgagaatggcttcggcaacttcgtgcagaaacacggcgagtactggctagggaacaaaaacctacacttcctgactacacaagaagattataccctgaaaatagacctggccgacttcgagaaaaatagccgctatgcccagtacaaaaattttaaagtcggggacgagaaaaatttttacgagttaaacatcggtgagtactctgggaccgccggagatagtcttgccgggaacttccacccagaagtacagtggtgggcatcccatcagagaatgaagttctccacatgggaccgggatcacgacaactatgaggggaactgcgccgaagaagaccagagtggctggtggttcaacaggtgtcactccgcaaacctgaacggggtctactactctggtccatacacggctaaaacagataatggcatagtgtggtacacatggcacgggtggtggtactccctgaagagcgtggtaatgaaaattaggccaaacgactttattccgaatgtcatttag

SEQ ID NO: 187815 - DNA, 1320 bp, synthetic construct
  misc_feature 1..1320: note = Description of Artificial Sequence: Synthetic coding sequence
  source 1..1320: mol_type = other DNA
atgaagctggccaactggtactggctgagcagcgccgtgctggccacctatggttttctagtggtcgcaaacaacgaaacggaggagatcaaggatgagagggctaaggatgtgtgcccggttagattagaatcgcggggtaagtgcgaagaggccggggagtgcccataccaagtaagcctgcctcctctcacaattcagctccctaagcagttttctcgcatagaggaggtttttaaagaggtgcaaaatttgaaagagatcgtaaactccctgaaaaaaagttgccaggattgcaaacttcaggctgacgataacggagatcctggccggaatggacttctcctgccatccacaggcgctcccggcgaggtgggagacaatagggttagggagctcgagagtgaagttaacaaactcagtagcgagcttaaaaatgccaaggaagaaattaacgttctgcacgggaggctagagaaattgaaccttgttaacatgaataatatcgagaactacgtagattctaaagtcgcgaacttgactttcgtggtcaattccctggatggaaaatgtagcaaatgtccttcacaagagcagattcagtcccgtcccgttcagcacttgatctataaagactgctctgattactatgcgattggaaagcgtagctctgaaacctaccgggtgacacctgatccaaagaactcctcttttgaagtttactgcgacatggagacgatggggggcggatggactgtgctgcaggctaggctcgatggaagcactaattttacaagaacttggcaggactacaaggcggggttcggtaatctccgtcgcgagttctggctgggcaatgacaaaattcatttgctaactaaaagcaaggaaatgattctgcgcattgatctggaggacttcaatggggtcgaattgtacgccctctatgaccagttctatgtggcaaatgaatttctcaagtacaggctgcatgttggcaattataatggaacggccggagacgcactccgttttaacaagcactataatcacgacttgaaattttttactacccctgacaaagacaatgatcgctacccatctggaaattgcggcctgtattacagtagcggttggtggtttgacgcatgcctgagtgctaacctcaacggaaagtactaccaccagaaatatcgaggtgtcaggaacgggatcttttggggaacttggccaggcgttagtgaagctcaccccggcggctacaagagctccttcaaagaggctaaaatgatgattagacccaaacacttcaaaccttag

SEQ ID NO: 187816 - DNA, 1095 bp, synthetic construct
  misc_feature 1..1095: note = Description of Artificial Sequence: Synthetic coding sequence
  source 1..1095: mol_type = other DNA
atgaccagcgagctggacatcttcgtgggcaacaccaccctgatcgacgaagacgtgtatcgattatggttagacgggtattccgtcacggacgccgtcgccttgcgcgtgcgcagtggcatcctcgagcagactggcgcaaccgccgcagtgttgcagtccgataccatggaccattacagaactttccatatgttggagcggttactgcacgcaccgccaaaattacttcatcaactgatttttcagatccctcccagccgtcaggccctgctgattgagcggtattacgccttcgacgaagcgtttgtgcgagaggtcctggggaagaaacttagcaaaggaacaaaaaaagatcttgacgacatcagtactaaaaccggcattacactgaaatcttgccgccgccagttcgacaatttcaagcgggttttcaaggtggtcgaggaaatgcgcggttccttggtcgataatattcagcagcactttcttctatcggaccgattggcccgtgactacgctgctatcgtgttctttgcaaataatagatttgagacagggaagaaaaagcttcagtatctgagctttggagattttgcattctgcgcggagctcatgatccaaaactggacactgggagcagtcggcgaggccccaactgatcctgacagtcagatggacgacatggacatggatctcgataaggaatttcttcaggaccttaaagagctgaaagttttggttgccgataaggaccttctggacttgcacaagtccctcgtgtgtacagcgctgcgcgggaaactgggagtcttctcagagatggaggcgaacttcaagaatctgtcccgcgggctggtgaacgtcgcggctaagctcactcacaataaagacgtccgggatctgttcgtcgatctggtcgagaaattcgttgaaccttgcaggagtgatcactggccactgagcgatgttcgattcttcctgaaccagtactcagcgtccgtacattctttagacgggttccgccaccaggcactgtgggaccgttacatgggcacactaagggggtgcctcttacgattgtaccacgattag

SEQ ID NO: 187817 - DNA, 1074 bp, synthetic construct
  misc_feature 1..1074: note = Description of Artificial Sequence: Synthetic coding sequence
  source 1..1074: mol_type = other DNA
atgaccagcgagctggacatcttcgtgggcaacaccaccctgatcgacgaggatgtctacagattgtggctggatggatactccgtcacggacgcagtggcacttcgggtccgcagcggcatactggagcaaacaggcgctacagccgctgtgctccaatcagacacaatggaccattatcgcacatttcacatgctggaaaggctgctgcacgcaccccccaaactgttacatcaactcattttccagatacctccatcaagacaagcattgctcattgaaagatattacgcgttcgacgaagccttcgtgagagaagtccttggcaagaagttgagcaagggaactaaaaaagacttagacgacatctcaactaagactgggattaccctgaaatcctgtcggcgccagttcgataatttcaaaagagtgttcaaagtggttgaggaaatgaggggaagcctggtggacaacatccagcagcactttcttctctcagataggttagccagagactacgccgcgatcgtctttttcgcgaataaccgttttgagacgggtaaaaagaagttgcagtacctgtcgttcggagacttcgcattttgcgcagagttaatgattcaaaactggaccctgggagctgtagattcccagatggatgatatggacatggatctcgacaaagaattcctgcaagatcttaaggaactgaaggtgctggtggccgacaaagatctcttggacctccacaagtccctggtgtgcaccgcactccggggtaaactgggcgtattttccgaaatggaggccaactttaagaacctaagtaggggtctcgtgaatgtcgctgccaagctgactcacaataaggatgtaagagacctgttcgtcgaccttgtcgagaagtttgtagagccgtgtcggtctgaccactggcctttaagcgatgttagattttttctgaaccagtactccgccagcgttcacagcctggatgggttccgacaccaggcgctgtgggataggtatatgggcacactccgcggctgtctgctgcgactttaccacgactag

SEQ ID NO: 187818 - DNA, 1989 bp, synthetic construct
  misc_feature 1..1989: note = Description of Artificial Sequence: Synthetic coding sequence
  source 1..1989: mol_type = other DNA
atgtggagctggaagtgcctgctgttctgggccgtgctggtgaccgccaccttatgcaccgcccgaccctcccctacactcccagaacaggcccagccatggggggctccagtggaagttgagtctttcctggtccaccctggcgatctgctccaattacgctgccgcctgcgggatgatgtgcagagcattaactggctgcgcgacggcgtccagctggctgaatcgaaccgaactcggattactggagaggaggtggaggtgcaggacagcgttccagccgactccgggctgtacgcatgcgtaacatctagcccgagtggcagtgatacgacatacttcagtgtgaatgtcagcgatgcccttccctcttcggaagatgacgatgacgatgatgacagtagttccgaggagaaggagaccgacaacacaaagcccaaccgtatgccagttgccccttactggacctctcctgaaaagatggagaaaaaactccacgccgtacccgctgcaaagaccgttaaatttaagtgtcccagcagtggaaccccgaaccctacattacggtggcttaagaatggcaaagagtttaagccggaccataggatcggtggatataaagtgcgctacgcaacgtggagcattattatggactccgtagtaccttccgacaaagggaattacacatgtatcgtggagaacgagtatggctccatcaatcacacgtatcagctcgatgtagttgagagaagtccgcatagacccattctgcaggctggactgcctgctaataagaccgtcgcgctgggcagcaacgtggagtttatgtgtaaagtgtacagtgatccgcaaccgcatatccagtggctgaagcacattgaagttaacggctccaagatcggacctgataatctaccctatgtgcaaatactcaaaaccgctggcgttaacacaacagataaggaaatggaagtgctgcatctgcgaaatgtctcattcgaagatgcaggggagtacacttgcctggctgggaatagtatcggactgagtcaccactctgcatggctgaccgtactggaggcgctggaggaacggccagcagtgatgacgtcgcccttgtatcttgagattataatttactgtaccggggcatttctcattagctgcatggtcggaagcgttattgtctacaagatgaagtccgggacaaagaagtccgatttccacagtcagatggccgtgcataaactggcaaagagcatcccgctgaggaggcaggtgacagtttctgcggatagctctgcctccatgaactcaggagttctcttggtgcgtccctcaaggctgtcgtccagcgggacgcctatgttggcaggcgtcagcgagtacgagctccctgaggaccctaggtgggaattgccccgcgatcgcctggttctggggaaaccactgggggaagggtgcttcgggcaggtagtcctggctgaggccattggattagacaaagacaagccaaatagggtcaccaaggtggcagtgaaaatgttaaagtcagacgcgaccgaaaaagacctgtcggatctgataagcgagatggaaatgatgaagatgatcggaaagcataagaatatcattaacctgctgggtgcatgtacgcaggatggccccttgtacgtgatagttgagtacgcatccaaaggaaatctccgggaatatctccaagcacgtcggcctccaggcttagagtactgctacaatcctagtcacaatcctgaggagcaactttcttccaaagatctcgtgtcgtgtgcttaccaggtggctcgggggatggagtatctggcgtcaaagaaagtttggaaccttaaagctccccttgtacacacccctaggcccggatcccaggagtgtcctggcgatcgtggccagtgtgacgaagattcccggttgtggccgaggactgggcatagccctcataggctactatag

SEQ ID NO: 187819 - DNA, 1104 bp, synthetic construct
  misc_feature 1..1104: note = Description of Artificial Sequence: Synthetic coding sequence
  source 1..1104: mol_type = other DNA
atgtggagctggaagtgcctgctgttctgggccgtgctggtgaccgctactctatgtacagcacggccttcccctactctgccagaacaggcacagccctggggcgcccctgtggaagttgagtcatttctagtgcatcccggagacctcctgcaactccggtgtcgactgagggacgacgtgcagtctatcaattggctccgcgacggggtccagttagccgaaagcaatcgaacacggattactggtgaggaggtagaggtccaggattccgtgccagcggacagtggcttgtacgcatgtgttaccagctccccctcgggctcggacaccacctacttttccgtgaacgtgtccgtgccgatcgacgctctacccagctctgaggacgatgacgacgatgatgatagcagcagcgaggagaaagagacagacaatacaaaaccaaacccagtggccccgtattggaccagccctgagaaaatggagaaaaagcttcacgccgttcccgccgccaagacagtcaagtttaaatgcccaagcagcgggacccctaacccgactcttcgctggctcaagaacggtaaagaatttaaaccagatcacagaattggtgggtataaagtaaggtatgccacctggagcattatcatggacagcgtggtccccagcgataagggcaactatacctgcattgttgagaacgagtacggaagtattaaccacacgtaccagctcgacgtggttgaaagatctccgcaccggcctattctgcaagctggccttccagctaataaaacagtcgccctggggtcaaacgtggaattcatgtgtaaggtctattccgacccacagccacacatacagtggctcaaacacattgaagtgaacggatccaagatcgggccagacaacctaccgtacgtgcagattctgaagcatagtggcataaacagctcagatgcagaggtcctgacactgttcaatgtcacagaagcccagagtggagagtatgtctgcaaggtcagcaactatatcggggaggccaaccagtccgcttggctcacagtgactcgcccagtcgccaaggactgttggagttag

SEQ ID NO: 187820 - DNA, 2196 bp, synthetic construct
  misc_feature 1..2196: note = Description of Artificial Sequence: Synthetic coding sequence
  source 1..2196: mol_type = other DNA
atgtggagctggaagtgcctgctgttctgggccgtgctggtgaccgcaactctttgtacagcgcggcccagtcccaccctgccagagcaggatgctctgccttcctccgaagatgatgacgatgacgatgattccagcagcgaagaaaaggagacggacaacaccaaaccgaatcctgtcgccccatattggacaagccctgaaaagatggagaagaaattacacgctgtgcctgccgccaagacagtgaagtttaagtgtccatcttctggaacgcccaacccaaccctgaggtggctgaaaaatggcaaggaatttaagcccgaccaccggataggggggtataaggtccgttatgccacctggtctattataatggactctgtggtccccagcgataaaggcaactatacttgtatcgtcgagaatgaatatggttcaattaatcatacgtaccagctggatgtggtggagcgatcaccacatcgtccaatcctgcaggctggcctgccagccaataaaacagtcgccttgggctcaaacgttgaatttatgtgtaaggtctactccgacccacaaccgcacatccagtggctgaagcacatagaggtgaatggcagcaaaatcggcccagataatcttccatatgtccaaattctcaagaccgctggagttaataccaccgataaagagatggaagtccttcaccttcgcaatgtttctttcgaggatgccggagagtatacctgcctagcaggtaactcaattggcttgagccaccacagcgcctggttaacagtcctggaagccttggaagagcgccccgcggtgatgacatcccctctctatttagagatcattatctattgtacaggcgccttcctgatttcatgcatggttggttctgtcatcgtatacaagatgaagtccggtactaagaagtctgattttcacagtcaaatggctgtacataaactcgccaagtctatacctctgaggagacaggtcaccgtgagcgctgactccagcgcaagcatgaatagcggcgtgctactggtgcgcccttcaagactctcatcatccggcacgccaatgttggctggagtatcagagtacgaactcccagaggaccccaggtgggaattgccgcgggatcgcctggttttgggaaaaccccttggagagggctgtttcggccaggtagtgctggcagaagccattgggctggacaaagacaaacctaatcgagttacaaaagtagcagtgaaaatgctgaagtctgacgcaaccgaaaaagatctcagcgatctgatctccgagatggagatgatgaaaatgatcggaaagcataagaatatcatcaacctgctgggagcctgtacacaggacggtccactgtacgtgatagtcgagtacgcaagcaagggtaatctccgagagtacctgcaggcccgtagaccaccaggcctggaatactgctataatcccagccacaacccagaagaacagctgagtagtaaagatctcgtcagctgcgcatatcaggtcgcccggggtatggaatacctggcttcgaagaaatgcattcaccgggatctcgcggcccgtaacgtgctggtaactgaggacaatgttatgaagatcgcagacttcggcttggcgagagacatacatcacattgattattacaagaaaactactaacggtagattgccggtgaagtggatggcccccgaagccctgttcgaccgaatctatacccatcagagcgatgtatggagtttcggcgtgctgctttgggagatcttcaccctgggaggcagcccttacccgggggtaccagttgaagaactgttcaagctcctcaaagagggtcatcggatggacaagcccagcaattgtacaaatgagctatacatgatgatgagagattgctggcatgccgtgcctagtcagcggcccacattcaaacagctggtggaagatctggataggatcgttgccctgacctctaaccaggagtacctcgatctttcaatgccattagatcagtattcacctagcttccctgacaccaggagctctacttgcagcagtggagaagacagtgtattctctcatgagccactgcccgaagagccttgtctgcctcggcatcccgcacagttggccaatggagggctcaagagacgttag

SEQ ID NO: 187821 - DNA, 2439 bp, synthetic construct
  misc_feature 1..2439: note = Description of Artificial Sequence: Synthetic coding sequence
  source 1..2439: mol_type = other DNA
atggccgccgtgacccgggacttcggcgagatgctgctgcacagcgggagagtgcttcccgccgaggcccagccctggggagcgccagtcgaggttgaaagtttcctggtgcaccccggcgaccttcttcagctgcggtgcaggctgagagacgacgtgcagagcatcaattggctccgggacggggtgcaattggccgagagtaataggacaaggatcacaggggaggaggtggaggtccaggatagtgtgcccgcagattcgggtctttatgcatgtgtgactagcagcccctccggcagcgataccacctatttctcagtcaacgtctccgatgctctcccgtcctcagaagatgatgatgatgacgacgactcatcctccgaagagaaggaaaccgacaatactaagcccaataggatgccagttgccccctattggacctcgccggagaagatggaaaagaaactccacgcagtgcctgccgcgaagaccgtcaagtttaagtgtccctcatccggcactcccaatcccactttgaggtggttaaaaaacgggaaggaatttaagcccgatcacagaattggcggctataaggtgcgatatgccacttggtccatcatcatggactctgtggtgccctctgacaaggggaattatacctgtattgtagaaaatgaatacggcagtatcaaccacacctaccagctggacgtcgttgagcgaagcccacaccgcccgattctgcaggccggcttgccagccaacaagaccgtggcgttgggtagtaacgttgaatttatgtgtaaggtgtattccgacccacagcctcacatccagtggcttaaacacattgaagtcaacggcagcaagatcggacccgataacctgccatacgtccagattctgaagacagccggggtcaacaccactgacaaggagatggaagtcttgcacctcagaaatgtgtccttcgaagacgcaggggagtatacttgcctggccggcaatagtatcgggctgtctcaccacagcgcttggctaacggtcctcgaagcactggaagagaggccagctgtgatgacctcaccgttgtatttggagatcatcatctattgtaccggagcattcctgatatcatgcatggtcgggagtgtgatagtgtacaagatgaaatccggcactaagaaatctgatttccactcccagatggcggtgcacaagcttgccaaatccatccctcttaggagacaagtatcagcagattcgtcagcctcaatgaattcaggagtcttacttgtgaggccatcccgactctccagtagcggaactcccatgctcgctggcgtgtccgagtacgagctccctgaggatcccagatgggagcttccacgggatcggctggtgctcggcaaaccccttggggaaggctgctttggccaggtggtgctggcagaggcgatcgggctcgataaggacaaaccaaaccgcgtgacaaaagtggctgtgaagatgcttaaatcagacgctacagaaaaagatctctctgatttgatcagtgaaatggagatgatgaaaatgattggaaaacacaaaaacatcatcaatctgctgggagcctgcactcaagacgggcctctgtatgttattgtggaatatgccagcaagggcaatctccgcgaataccttcaggcccgccgcccaccagggcttgagtactgctacaatccgagccataatcctgaggaacaactgtcctccaaggatttggtttcatgtgcttatcaggtggctcgcgggatggagtacctggcctcaaagaaatgtatacatcgtgacctcgccgctcgaaatgttcttgtgactgaagataacgtcatgaagattgcagacttcggtctggctcgggatatacatcacattgactactacaagaagaccactaatggacgcctcccggttaaatggatggcccccgaggctctgttcgacaggatctacacacatcagtccgacgtgtggtcctttggcgtcttgctgtgggagattttcaccctgggcggctcaccatatcccggagttcccgtggaagaattgtttaaactcctgaaggaagggcacagaatggataaacccagcaattgcacaaatgaactgtatatgatgatgcgtgattgttggcatgccgtgccttcacagaggcccacatttaagcagctcgtcgaagacttagaccgcatcgtcgctctgacttccaatcaggaatacctggacctgtcaatgcctcttgatcagtattctccttccttccccgacactagatcctctacatgctcttccggcgaagatagtgtgttcagtcacgaacctcttccggaagagccctgcctaccacggcacccagcccagctggccaacggcgggctgaaaaggcggtag

SEQ ID NO: 187822 - DNA, 2469 bp, synthetic construct
  misc_feature 1..2469: note = Description of Artificial Sequence: Synthetic coding sequence
  source 1..2469: mol_type = other DNA
atgtggagctggaagtgcctgctgttctgggccgtgctggtgaccgccactttgtgcaccgccagaccatctccaacattgcccgagcaggctcaaccttggggcgcacctgtggaggtcgagagttttctggtgcaccctggcgatctcttacagttgagatgccgcctgcgggacgatgttcaatccataaactggctcagagatggcgttcagctggccgaaagcaatagaaccagaatcacgggggaggaagtggaggtacaagattcagtgccagctgacagtggtctctacgcctgcgtcactagctccccaagcggctcagataccacttatttttccgtgaatgtgtcagtgccaatcgatgctcttccctcttcggaggacgacgatgacgacgatgacagcagttcagaagaaaaggagaccgataacaccaagcctaatcccgtcgccccttactggacttcccctgaaaagatggaaaagaaactgcatgctgttcctgccgccaagaccgtaaagttcaagtgccctagtagcggcacgccaaaccccaccctccggtggctaaagaatggaaaagaatttaaacccgaccatcgtattggtggatataaagtgcgatacgcaacctggagcattataatggactccgtggtgccgagtgacaaagggaactacacatgtatagtggagaacgagtatggaagcataaaccatacataccagctggacgttgtagagcgcagtccccatcgccctatactgcaggctggcctgcctgcgaacaagacagtggccctcgggtccaacgtggaattcatgtgcaaggtgtactccgacccacagccccacatccagtggctgaaacacatcgaggtcaacggctctaagattggacccgataacctgccttatgtgcagatcctcaagcacagcggcattaattcgagcgatgcggaggttctcacactctttaatgtcacggaggcccagtcgggtgaatacgtctgcaaggtgagcaattacatcggtgaagccaaccaatccgcttggctgacggtgactaggccagtactcgaggagcggcctgcagttatgaccagcccattgtacctggagatcataatctactgcacaggagcatttctgattagctgtatggtgggctccgtgatcgtgtataagatgaaatctgggactaaaaaatctgatttccatagccaaatggcagttcacaaactcgcaaagtctatcccactccgtaggcaggttaccgtttcggctgattcttccgcttcaatgaatagcggggtcctcttggttcggccaagtcgtctgagctctagcgggacacctatgttggcaggagtgtctgagtacgagcttccagaagaccctaggtgggagctccctagggaccggctggtgcttggcaaacctctaggtgagggctgttttgggcaggtggtcctggcggaagccattgggctggacaaagacaagcccaatagagtgaccaaagtggccgtgaagatgctgaagtcggacgcaaccgagaaggatttgagcgacctgatctcggagatggaaatgatgaaaatgattggtaaacataagaatatcataaaccttctgggagcgtgcacacaagatggccctctgtacgtgattgtggagtacgcctcaaagggaaacctccgggaatacttacaggctcgaaggccgccaggtcttgagtattgttacaatccatcccataaccccgaagagcaactgtccagcaaggacctggtgtcatgtgcgtatcaggttgctagagggatggagtacctcgcttctaagaagtgcattcatagggatctagccgcccggaacgtgctggtcacagaggacaacgtcatgaaaatcgccgactttggccttgctcgggacatccaccacatcgactactataagaagaccacgaacggtagactgcctgtgaaatggatggcccccgaggctctgttcgatagaatatatactcaccagtccgacgtgtggtcttttggggtcctcctgtgggagatcttcaccctcggtgggagcccttaccctggcgtgcctgtggaggaactcttcaaactcctaaaggaaggacatcggatggataagccttcaaattgtactaacgagctctacatgatgatgagagactgctggcacgctgttccatcccagcgaccaaccttcaaacagcttgtcgaggatctggacaggatcgttgcgctgacgtcaaatcaggagtaccttgatctctccatgcctctggaccaatattccccaagtttcccagatactcggtcctccacgtgttcatcaggagaagacagtgtcttctcacatgaaccattgcccgaggagccctgcttacctcgacatcccgcccagctcgctaatgggggtctcaaaagacgctag

SEQ ID NO: 187823 - DNA, 2202 bp, synthetic construct
  misc_feature 1..2202: note = Description of Artificial Sequence: Synthetic coding sequence
  source 1..2202: mol_type = other DNA
atgtggagctggaagtgcctgctgttctgggccgtgctggtgaccgccactctgtgcacagcacgaccgtctcctaccttgccagagcaggacgctctgccctcctcagaagatgatgatgacgacgatgattcaagctccgaagagaaggaaacagacaatactaagccgaaccgaatgccagtcgctccttactggacaagccctgagaaaatggagaagaaacttcacgcagtgcccgccgctaaaacagtgaaattcaaatgcccctcatcaggcaccccaaaccctaccctcagatggctcaagaacggcaaggaattcaagccagatcatcggatcgggggctataaggtacgctatgcaacatggtcgattattatggattctgtggttcccagtgataaggggaactacacttgtattgtggagaacgagtacggatcgattaatcacacctatcaactcgacgtcgtagagagatctccgcacaggccgatcctgcaagcaggacttcccgcaaacaaaactgtggctctgggcagcaacgtggaatttatgtgcaaggtctattcagatccacagccacatatacagtggttgaagcatatcgaggtgaatggcagcaagatcggtcctgataatctaccgtatgtccaaatattaaagacagccggggtcaacacaacagataaggaaatggaagtcctccacctacggaacgtgtctttcgaggacgccggtgaatatacgtgcttagccggaaacagcatcgggcttagtcaccattctgcctggctaacagtgctggaagcccttgaggagcggcctgctgtgatgacttcacctctctacttggagatcatcatttactgcaccggagcatttctgatctcgtgcatggtgggcagcgtcattgtgtataagatgaaatccggcaccaaaaagtccgattttcatagccagatggcagtccacaaattggcgaaatctattccacttcgtagacaagtcactgtgtctgccgactcctcagcgtcaatgaatagtggtgtgctactggtacgccccagccgcttatcctctagcggaactcccatgctggccggggtgagtgagtatgagctgcccgaggatcctcggtgggaactgccaagagacaggcttgtgctgggcaaaccactcggagaagggtgttttggacaggtagtgctggccgaggccattggtctcgataaagataagccaaatcgcgtgactaaggttgccgtgaaaatgctgaagtcagacgccacagaaaaagatctgtccgacttaatctcagagatggagatgatgaagatgatcggtaagcataaaaacattatcaatctgttgggggcctgcactcaggatgggcccctttatgtgatagtcgagtatgcatccaagggaaacctcagagaatacttgcaggcgagacgacctccaggcctggaatactgctataatccatcacataaccccgaggaacagctctcttctaaggacctggtctcttgtgcctatcaagtggcgagaggaatggagtacctggcatctaagaagtgcattcatcgcgatctggctgcccgcaacgtgctcgtgactgaagacaatgtgatgaagatcgcagatttcggtctcgcacgtgatatccaccacatcgactattacaagaaaacaaccaatggccgattacctgtgaaatggatggcgccggaagctctctttgatcgaatctacacccatcagtcggacgtgtggagcttcggcgtgctactttgggagatatttaccttaggggggagcccgtatcctggtgtgccagtcgaggaactctttaaacttttgaaagaaggacacagaatggacaagccgtccaattgcacaaacgaactatacatgatgatgcgcgactgctggcacgccgtgccctctcaacgacctaccttcaaacagttggtggaagatctggaccgcattgttgctcttacttctaatcaggaatatcttgacctgagcatgcctctggatcaatactcgccttcatttccagacacaaggtcctctacgtgttccagcggcgaggatagcgtgttcagccacgagccccttcctgaagagccctgccttccccgccatcctgcacagctggctaatggagggctgaaaagaaggtag

SEQ ID NO: 187824 - DNA, 2463 bp, synthetic construct
  misc_feature 1..2463: note = Description of Artificial Sequence: Synthetic coding sequence
  source 1..2463: mol_type = other DNA
atgtggagctggaagtgcctgctgttctgggccgtgctggtgaccgccaccctctgcacagcgcgcccctccccgaccctccccgagcaagcgcagccctggggtgcccctgtagaagtggaaagcttcctcgttcatcccggggaccttctccagctgcgatgtcgcctgagggatgatgttcagtctataaattggctgagagatggcgtgcagttagccgagtccaatagaactaggattactggcgaagaggtggaagtgcaggacagcgtgcccgccgattcggggctgtacgcttgcgtcacgtcctcaccaagtggatccgatactacgtatttttcagtcaatgtgtcagacgccctgccgtcaagcgaggatgatgatgatgatgatgactcttcgtccgaagagaaggaaaccgataacaccaagcccaacccggtggccccctattggacatctcccgaaaaaatggagaagaaattacacgccgttcccgcagcaaaaaccgtgaagttcaaatgtcctagctctggcaccccaaaccccacccttcgctggttgaagaacggcaaggaattcaaaccagaccatagaatcggcggctataaagttcggtacgccacttggtccattatcatggatagtgtcgtccccagcgataaggggaactacacctgtattgtggaaaatgagtatggcagtatcaatcatacctaccagttagacgtcgtggaaagatcgcctcacagaccaattttacaggcgggcctcccagccaataagacggtggctctggggagcaacgtagaatttatgtgtaaagtgtattccgacccccagccacacattcaatggttgaagcacatcgaggttaatggctccaagattgggcctgataatctcccctacgtccagattctaaaaaccgcaggcgtgaatacaacagataaagagatggaggtactacacctccgtaacgtaagcttcgaggacgcgggagagtacacctgccttgccgggaattctatagggttgtctcatcactcagcctggctgactgtgctggaggccctggaggaacgcccggccgtgatgacatcacccctgtacctcgagattattatttattgtacaggcgctttcctaatctcttgtatggtgggttccgtgatcgtgtataagatgaagtcaggaacaaagaagagcgacttccatagtcagatggcagtccataaactggctaagtctattcctttaaggcgccaggtaactgtttctgcagacagctcagcatccatgaactccggcgtgctactggtaaggccctcacgactcagcagctccggcacacccatgctggctggtgtgagtgaatacgagctgccggaagacccccggtgggaactgcctcgagataggctggtgctaggcaagccgttaggggagggttgttttggacaggtagtccttgccgaggcaatcgggttggacaaagacaaacctaacagagtgaccaaagtcgctgttaaaatgctcaagtctgatgctacagaaaaagacctctccgacctcatcagcgagatggaaatgatgaaaatgatcggtaagcacaagaatatcatcaaccttctcggggcctgtacccaggatggtcctctgtatgtgatagtcgaatacgcctcaaagggcaacctgagagagtatctgcaggccaggagaccccctggcctggagtattgctacaatccatctcataacccagaagagcagttgagctcgaaggatctggtaagctgtgcgtaccaggtcgctcgtgggatggaatacctcgcgtccaaaaagtgcattcatagggatctggcggccagaaatgtccttgttacagaggacaacgtgatgaagattgccgactttggcttggctagggacatacaccatatcgattattacaaaaaaaccacaaatggacggctacccgtcaagtggatggctcccgaggccctgtttgacagaatttatactcatcaatccgacgtgtggtcttttggagtgcttctgtgggagatcttcacactaggaggctctccatatcctggagtgcctgtggaagaattgttcaagctactgaaggagggacacaggatggacaagccctcaaattgtacaaatgagctctatatgatgatgcgggattgctggcatgctgttccttcccagcgccctacctttaaacagttggttgaggatctggatagaattgttgcactaactagtaaccaggaatatctggacttgagtatgcctctggaccagtatagtccctcatttcccgatacaagaagctcgacatgttcctccggtgaagacagtgtgttcagccacgaacctcttcctgaggaaccctgtcttcctcggcacccggcacagctggcaaatgggggcctaaaacgccgatag

SEQ ID NO: 187825 - DNA, 2202 bp, synthetic construct
  misc_feature 1..2202: note = Description of Artificial Sequence: Synthetic coding sequence
  source 1..2202: mol_type = other DNA
atgtggagctggaagtgcctgctgttctgggccgtgctggtgaccgccactctatgtacagctcgaccttcccctacccttccagaacaagacgcccttccatcctctgaagatgatgatgacgatgatgattcctcctccgaggagaaggagacagataataccaaacccaatcctgttgccccgtactggacttcgccagagaaaatggagaagaagcttcatgcagtcccagctgcaaagaccgtgaaatttaagtgtcctagcagtggtacacccaatcctactctccgttggctgaagaacgggaaagagttcaagccggaccaccggattggcggatataaagtgaggtatgccacctggtccatcattatggacagcgtggtcccttctgacaaaggcaattacacttgtattgtcgaaaacgagtatggctctatcaaccacacttaccaactagatgtcgtggaacgatcaccacatcgacccattttacaggcgggcctgccggccaacaagaccgttgcattgggctcaaatgtcgagttcatgtgcaaggtctattctgacccccaaccacatattcagtggctgaagcatatcgaggtgaacggctcgaagatcggacccgataacctgccatacgtacagatacttaagcattccgggattaacagcagcgacgcggaggtactgactttgtttaatgtgactgaagctcaatctggggaatacgtgtgtaaagtgagcaattatataggagaagctaatcaatccgcctggctgactgtgaccagacctgtggctaaagcgctggaagaaagacccgcagtcatgacgagccctctgtatctcgagattataatttactgtaccggagctttccttatatcctgcatggtagggtcagtgatagtttataagatgaagtctggcaccaagaagtcagactttcactctcaaatggcggtgcacaaactggcaaaatccattcccctgagacgacaggtgaccgtgagcgccgatagttctgcaagcatgaatagcggggttctgcttgttagaccttctcgcctttcatcaagcggaacccctatgcttgcaggagtttccgagtatgagctgccagaagaccctaggtgggagttgcctcgcgaccgcttggtgctgggtaagcctctgggcgagggttgtttcgggcaggtcgtgctcgctgaggcaatcgggttggacaaggacaagccaaaccgagtgacgaaggttgccgtaaagatgctgaagtccgacgccactgagaaggatttgagcgatcttatttcagagatggaaatgatgaaaatgatcgggaaacacaagaacatcattaatctcctgggtgcatgcacgcaggatggccctctgtacgtaatcgtcgagtacgcctctaaaggtaacctccgcgagtacctgcaagccagaagaccacccgggttagagtactgctacaacccaagccataaccctgaggagcaactatcttccaaagatttggtttcttgtgcctaccaagtcgcacgtggtatggagtacctggcctccaaaaaatgtattcacagagatctggctgccagaaacgttctcgtcactgaagacaacgtgatgaagatcgccgacttcggtttggcgcgagatattcatcatatcgactactataaaaagacaacaaacggccgactgcccgtcaaatggatggcaccggaagcattgttcgacagaatttatacccaccagagcgatgtgtggagctttggcgtgctgttatgggagatcttcacgttgggggggtcaccttatccgggggttcctgtggaggagctgttcaagctgttgaaggagggccatcggatggataaaccttcaaattgcacaaatgaactttacatgatgatgcgggattgttggcatgctgtgcctagccagagaccaacttttaaacagctggtagaggacctggatcgcatcgttgccttaacgagtaaccaggagtacctcgacctctccatgccccttgaccagtactccccttcattccctgacactcgctcttctacctgtagttcaggagaggacagcgtgttctcacatgaaccccttcctgaagaaccctgcctgccccgacaccccgcccagttagccaacggcggccttaaaaggagatag

SEQ ID NO: 187826 - DNA, 2463 bp, synthetic construct
  misc_feature 1..2463: note = Description of Artificial Sequence: Synthetic coding sequence
  source 1..2463: mol_type = other DNA
atgtggagctggaagtgcctgctgttctgggccgtgctggtgaccgccaccctgtgcactgctcggccaagcccaacattgccggagcaagcacaaccatggggggccccagtcgaggtggaaagctttctagtgcatcctggggacctccttcagttgcgctgccgactgcgagacgatgttcaatcaatcaattggttaagagacggcgtacaactggcagaaagcaaccgaacccggattacgggcgaggaagtggaggtgcaggactccgtgcctgccgactcagggttgtatgcatgtgtcactagttccccatctgggagcgacacgacttacttctctgttaacgtgtcagatgctctgccttcatctgaagacgatgacgacgacgacgacagcagtagcgaggaaaaggaaaccgataacactaagcctaacccagtcgcgccttactggacaagtcccgagaaaatggaaaagaaattgcatgcggttcctgccgctaaaaccgtgaagttcaaatgtccctcctcaggcacccctaaccccacactccgttggctgaaaaatggtaaggaatttaagcccgatcaccgaatcggtggctataaggtgaggtacgccacatggagcatcatcatggacagcgtagtaccctccgacaagggcaactacacttgtatcgttgagaatgagtacgggagtatcaaccacacttaccagctcgatgtagttgagaggtcgccacaccggccgattctgcaggccgggctccctgcgaacaaaaccgttgctctaggctcaaatgttgagtttatgtgcaaggtctacagtgatccgcagccccacatccaatggctaaaacacattgaagtgaacgggtcaaaaatcgggcccgacaatctcccatacgtacagattctgaagacagctggtgtcaatacgacagataaggagatggaggtgctccacttaaggaatgtgagcttcgaagatgcgggggaatatacctgtctggctggaaatagcatcggcctgtcgcatcactcagcatggctcaccgttctggaggctttagaagagagacctgccgtgatgacatcacctctttacttggagataatcatatactgcactggggcgttcctgatttcttgcatggttgggagcgtgatcgtgtataagatgaagtctggcaccaagaagtctgacttccatagccagatggccgtgcataaactcgccaagtccatccccctccggcgacaggtgacagtcagcgctgatagcagcgcctccatgaactcaggcgtgctactcgtgaggcctagtaggctgtcctccagtggcacacccatgctcgctggagtgtcagagtacgagcttcccgaggatccgcgctgggaactgccacgtgaccgcctggtgctgggaaagcccctgggtgagggctgtttcggccaggtggtcctggcagaggcaatcggcctggacaaagacaagccaaatagggtgacaaaggtggctgtgaaaatgcttaagagtgacgccaccgaaaaggatttgagcgacctgattagcgaaatggagatgatgaaaatgattgggaaacataagaatatcattaatctgctgggagcctgcacccaggatggacccctctatgtgatagtcgagtacgctagcaaggggaacctcagggagtacctgcaggccaggcggccccccggtctcgaatattgctacaatcccagtcataaccctgaggagcagcttagctccaaggatttggtgtcttgtgcatatcaagtggccagaggaatggagtatctggctagtaaaaagtgtattcaccgtgacctggcggctcggaatgtgctcgtgacagaagataacgttatgaagatcgctgattttggcctggcccgcgatatccatcacatagattactacaagaagaccaccaatggaagactgcccgttaagtggatggcgccagaggcgttgttcgacagaatttacacccaccagagtgacgtgtggagttttggagtgttgctttgggaaatttttacccttggtgggtcaccttacccgggcgttccggttgaagagctgtttaaactgctgaaagaaggacaccggatggacaagccaagtaattgcacaaacgagctgtacatgatgatgcgggattgctggcacgccgtgccgagtcagagaccaactttcaagcaacttgtggaagatttggataggattgtggcattgactagtaatcaagagtacctcgatctcagcatgcctctggaccagtattcaccttcattcccagatactaggtctagcacttgtagcagcggtgaggacagtgttttcagccacgaacccctccctgaggaaccttgtctcccgagacacccggctcagctagcgaatggtggactgaaacggagatag

SEQ ID NO: 187827 - DNA, 2463 bp, synthetic construct
  misc_feature 1..2463: note = Description of Artificial Sequence: Synthetic coding sequence
  source 1..2463: mol_type = other DNA
atgtggagctggaagtgcctgctgttctgggccgtgctggtgaccgctacgctttgtacagcacggccatcacccactctccccgagcaggctcagccatggggagcaccggttgaagtggagtccttcctggtccacccaggtgacctgctacagttgagatgccgcctaagggatgatgtgcagtccatcaattggctgagagatggggtgcagttagccgaatctaatcgcactcgcatcaccggtgaagaagttgaagtgcaggactcggttccggccgattctggcctttacgcctgtgtcacatcaagcccatcaggtagcgatactacatatttctcagtgaatgtgtctgacgccctgcctagcagtgaagatgatgacgacgacgatgacagctcgtccgaggaaaaggagactgataacacaaagcctaatccagtggccccctactggacctcccccgaaaaaatggaaaagaaactccatgcggtgccagctgcaaagaccgtaaaattcaaatgtccatcttctggcaccccgaacccaacattgcggtggttgaaaaatggaaaggagttcaagcctgatcacaggatagggggatacaaagtgagatatgccacttggagtatcattatggatagcgtagttcctagtgacaaaggaaactatacttgcatcgtggagaatgaatatggctccattaaccacacctatcagctggacgtggtggagagatccccacaccgtcccattctccaggcagggctgccagctaataaaactgtggccctgggatcaaatgtcgaattcatgtgtaaagtgtattctgaccctcagccccatatccaatggctcaaacacattgaggttaatggttccaagattgggccggacaacctgccatacgtgcagattctgaagacagccggtgtgaatacaacagataaagagatggaagtcttacacctgaggaatgtgtcttttgaggatgcaggcgaatacacttgcctagctgggaactctattggcctgagccatcattccgcctggctcactgtcctagaggcactagaagaacgccctgctgtcatgacatccccactgtacctggaaattatcatctactgcaccggtgccttcctgatcagttgcatggtgggatccgtcattgtgtacaagatgaaatccggaacaaaaaagtcagacttccacagccagatggccgtgcacaaactggcgaagtctatacccttgaggagacaggttacagtatccgccgacagcagcgcgtcgatgaatagcggcgtgcttttggtgaggccctcaaggctgtcatctagtggcaccccaatgcttgcaggagtgtcagaatacgaactccctgaagatcctcgttgggaactgccgcgagaccgcctcgtgcttgggaaaccactgggagaaggttgcttcggccaggtggtactggccgaggccatcggcctggataaggataaacccaatcgcgtgacaaaagtcgctgttaagatgctgaaaagcgacgccactgaaaaagatctgtctgacttgatatctgagatggaaatgatgaaaatgatcggcaaacataagaatatcattaacctgttgggagcgtgcacacaggatggcccattatatgtcatcgtggagtacgcctcaaaaggaaaccttagggagtatcttcaagcccgcagaccaccagggctggagtattgctacaacccttctcataaccccgaagagcagttgtcatctaaggacctcgtcagttgcgcgtatcaggtcgcccgcgggatggagtatctggcctcaaaaaagtgtatccaccgggatctggcagcacgcaacgtgctagtgacagaagacaatgtaatgaagatcgcagatttcggacttgctcgggatattcaccacattgactattataaaaagacgactaacggaaggctcccagttaaatggatggcccctgaagcactgttcgatagaatttatacccatcagtcagatgtgtggagtttcggtgttctcctgtgggaaatctttactcttggcgggtctccataccctggggtccccgtagaggagctcttcaaactactgaaggaggggcataggatggataagcccagcaactgtacaaacgagctgtacatgatgatgagagactgctggcatgctgtgccttcccagcgcccaacctttaagcagcttgtagaagatctcgacagaattgtagccctgacgagcaatcaggagtatttagacctgtccatgcctctagaccagtattccccctctttcccagacacaaggagcagtacatgctcctccggggaggatagcgtctttagccacgagcccctccccgaggagccttgcctaccccggcaccccgcccagttggcaaacggagggctgaagcgtcgatag

SEQ ID NO: 187828 - DNA, 324 bp, synthetic construct
  misc_feature 1..324: note = Description of Artificial Sequence: Synthetic coding sequence
  source 1..324: mol_type = other DNA
atgtggagctggaagtgcctgctgttctgggccgtgctggtgaccgcaactctgtgtacggccagaccatctccaacactgcccgaacaggctcagccatggggggcgcctgtagaggtggaatcgtttcttgttcaccccggggacctactgcagctgaggtgtagactgcgcgacgacgttcaatccatcaattggcttcgggacggcgttcagctggcggagtcaaatagaacaaggatcacaggagaagaagtggaggtgcaggatagtgtcccagccgactcagggctgtatgcatgtgttacttcttcgccttcttag

SEQ ID NO: 187829 - DNA, 2562 bp, synthetic construct
  misc_feature 1..2562: note = Description of Artificial Sequence: Synthetic coding sequence
  source 1..2562: mol_type = other DNA
atggaggcccgggtgagcctgaagcggcggatcgagctgaccgtggagtacccatggcggtgcggtgcattgagtcccacgtcaaattgtcggaccggcatgtggagttggaaatgtcttctgttttgggccgttctggtaaccgcaacgttatgcacagcaaggcctagcccaacccttcccgagcaagcacaaccatggggtgccccagtggaggtcgaatctttcctcgttcatcctggcgacctgctgcagttgaggtgccgcctgagggatgatgtccaaagtatcaactggctacgggacggtgttcagttggctgaatccaacaggacccgcatcaccggggaggaagttgaagttcaggattccgtcccagccgactcgggcttgtacgcatgcgtaactagctccccgagcggctctgacaccacttactttagcgtaaatgtatctgatgctcttccctcctctgaagatgacgacgatgatgatgactcatcctcggaagaaaaagagacggacaacactaaacctaacccagtggcgccatactggactagtccagagaagatggagaagaagctccacgcagtgccggcagccaagacggtaaaatttaaatgcccatctagtggaaccccaaaccccaccctgagatggctaaaaaacggaaaagagttcaaacctgatcatcgtatcgggggatataaagtcaggtacgctacttggtctattataatggatagtgttgtaccgagtgacaagggaaactatacatgcatagtagaaaatgagtacggttctataaatcatacgtatcaactggacgtggtcgagaggagccctcatcggccgatcctgcaagctggattgcccgctaataaaaccgtcgcacttgggtcaaatgttgaatttatgtgtaaggtatatagcgatccacagcctcatatccagtggttgaaacacatagaggttaacgggtccaagatagggcccgataacttaccgtacgtacagatcctgaaaaccgccggcgtgaacacaacggataaagagatggaggtgctgcatttacgcaatgtgtctttcgaggacgcaggcgaatatacctgcttggcagggaatagtatcggtctgagccaccactctgcctggcttacagtgctggaggctcttgaggagcggccggctgtgatgacaagtcccctgtatctggaaatcatcatctactgcactggcgctttcctgatctcctgcatggtaggctctgtcatcgtgtataaaatgaagtctggtacaaagaagtccgattttcactcccagatggctgttcacaagttagccaagagcattccccttaggagacaggtaaccgtcagtgcagatagtagcgcatctatgaattccggagtcttgttagtgcgcccgagccgcttgagctcctcggggacaccgatgttggccggcgttagtgaatacgagctacccgaggatccccgctgggagctaccccgggacagactggtcctgggtaagcctctgggggagggatgttttgggcaggtggtgttggccgaggccatcggcctagataaggataaacctaaccgggtaaccaaagtggctgtgaaaatgctgaaatccgatgcaaccgagaaagacctctctgacctaataagcgaaatggaaatgatgaaaatgatcgggaagcataaaaatattataaacctgctgggcgcgtgcacacaagatggccccctgtatgtgattgtggaatatgcctcgaagggcaatctgagagaatacctgcaggcacgccgcccaccaggactggagtactgctacaatcctagtcataatcctgaggaacaattgtcctccaaggacctcgtgagctgtgcttatcaagtagcaagggggatggagtatctggcttcaaagaagtgtattcatcgagacctggctgctagaaacgtattggtgacggaagataacgtgatgaaaatcgctgacttcggactggccagggacatccaccatatcgattattacaagaaaacaaccaatggccgcttaccggttaaatggatggcgcccgaggcgttattcgacagaatctacacacatcagtccgatgtttggtccttcggcgtccttctctgggagattttcacactaggagggagtccatacccaggcgttcccgttgaggaactattcaaattgctgaaggagggccaccgcatggataagccttctaattgcaccaacgagctgtatatgatgatgagagactgctggcacgcagtgccaagccagagacctaccttcaagcagctggtggaagacctggatcggatcgtggctctgacctcaaaccaggagtatctggatctgtccatgccacttgatcagtacagcccgtcttttccagatactcggtcttccacctgtagctccggagaggactctgtgttcagtcacgagcccctgcccgaggagccgtgcctccctcgccatcctgctcagcttgccaacggcggactgaagagacgctag

SEQ ID NO: 187830 - DNA, 168 bp, synthetic construct
  misc_feature 1..168: note = Description of Artificial Sequence: Synthetic coding sequence
  source 1..168: mol_type = other DNA
atgtggagctggaagtgcctgctgttctgggccgtgctggtgaccgctaccctttgcacggctcgaccctcccctacattgccagaacaggacgctctgccgagctccgaggatgatgacgatgatgacgattcaagcagtgaggaaaaagaaacagataatacctag

SEQ ID NO: 187831 - skipped

SEQ ID NO: 187832 - DNA, 2469 bp, synthetic construct
  misc_feature 1..2469: note = Description of Artificial Sequence: Synthetic coding sequence
  source 1..2469: mol_type = other DNA
atgtggagctggaagtgcctgctgttctgggccgtgctggtgaccgctacactttgtacagcgcgcccctccccaactttacctgaacaggcacaaccctggggagcccccgtggaggtagaatctttcctggtccacccgggagatctgctgcaacttagatgcaggcttagggatgatgttcaatcgataaattggctaagagatggcgtacagctggcagaaagcaaccggacaagaatcaccggagaagaagttgaagttcaagattctgtcccggccgacagcggcctctatgcttgcgtgacttcttctcctagcgggtctgacaccacctattttagcgttaacgtgagtgatgctctcccctcttccgaagatgacgacgacgacgatgatagctcaagcgaggagaaggagactgacaataccaagccgaacaggatgccggtcgccccatattggacttcccccgagaagatggaaaagaaactccacgccgtccccgctgcaaagaccgttaaatttaagtgcccatcatctggtacacccaatcccaccctgcgctggttaaaaaacggaaaggagtttaaacccgaccaccggatcggcggctacaaagtaaggtatgcaacctggtcaatcatcatggacagcgttgttccatccgacaagggcaactatacttgtattgtggagaacgagtatgggtccatcaatcacacgtaccagctcgatgtggtggagcgctctccacaccgtcctatcctacaggctggcctgcccgctaataagacagtagcgctaggcagcaatgtggaatttatgtgtaaagtgtacagtgatccacagccccatatccaatggttgaaacacatcgaggtcaatggctccaaaatcgggccagacaacctgccctatgtacagattctgaaaactgctggagtcaacacaacagataaagaaatggaggtgttgcacttgcgcaacgtctccttcgaggacgcaggagaatatacatgtctcgctggcaattctattggactgagtcatcactcagcatggctgaccgtactggaagccttggaggaaaggcccgccgtaatgacgtcacccctttatctcgagatcatcatctactgtaccggtgccttcctgatatcctgcatggttggatcagtgattgtttacaaaatgaagtctggcaccaagaaatcggacttccatagtcagatggctgttcacaagctcgccaagtcaattcccttacgccgccaggtgactgtgtccgctgactcaagtgcctctatgaattccggggtacttctcgtgcgcccctctagactctcttcatcaggcacacctatgcttgcgggcgtgagtgagtatgagctgcctgaagaccctagatgggaattgccccgggacagacttgttctggggaaaccacttggagaggggtgcttcgggcaggtagtgctcgccgaggccattggcctggacaaggacaaacctaaccgggttacaaaagtggcagtcaagatgctgaagtctgacgccacagagaaagacctttccgacctcatatctgaaatggagatgatgaagatgattggcaaacataagaacatcattaatctgctgggcgcctgcacacaggacggtccgctgtacgtcatcgtcgagtacgcttccaagggaaatctgcgagaatacttacaagcgaggcgccctccaggcctcgagtactgctacaacccctctcacaaccctgaggaacaattgagttcgaaggacctggtcagttgtgcctatcaggtggctcgggggatggagtacctcgcctccaagaaatgcatacacagagaccttgccgcccgcaatgtgctcgtcaccgaagacaatgtgatgaagattgcagatttcgggctcgcccgagatatccaccacatcgactattacaaaaagacgacgaacgggagactgcctgttaagtggatggccccagaagccttattcgacaggatctacacccatcaatccgatgtgtggtcattcggggttttgctttgggagatctttacgctaggggggagcccctatccaggcgtgcccgtagaagagctgtttaagcttctgaaggaaggtcatagaatggacaagccgtcgaactgcactaatgaactctatatgatgatgagagactgctggcatgctgtaccaagccagcggcccactttcaaacagctggtcgaagatctcgatcgcattgtggcgctgaccagcaatcaagagtaccttgatctgagcatgcccctcgaccaatacagcccatccttcccagatacacgctctagtacgtgttcttcaggagaggatagcgtcttctcccacgagcctctgccagaagagccttgtctgccccgccaccccgcccaactggctaatggaggcctaaagcgacgctag

SEQ ID NO: 187833 - DNA, 897 bp, synthetic construct
  misc_feature 1..897: note = Description of Artificial Sequence: Synthetic coding sequence
  source 1..897: mol_type = other DNA
atgtggagctggaagtgcctgctgttctgggccgtgctggtgaccgctacactttgcacagcgcgcccatcacccaccctaccagagcaggcgcagccttggggagctccagtagaggtagaaagctttcttgttcaccccggggatcttctgcagctcaggtgccggctgcgcgacgacgtacaatccatcaactggctgcgcgatggagtgcagttagccgaaagcaataggactcgaatcactggagaagaggtagaagttcaagattctgtgccggcagactctggattatatgcctgcgtgacgtcttccccttccggcagcgatacaacgtacttcagcgttaacgtatccgatgccttgcccagcagcgaggatgacgatgacgatgacgactcttccagcgaggagaaagaaactgataacaccaagcccaaccgcatgcccgttgcaccctactggacatcacctgagaagatggaaaaaaagttacacgctgtgcccgccgcaaagacggtaaaattcaagtgcccctcttccggaacacctaacccaaccctgcgttggttgaaaaacggcaaggaatttaagcctgatcaccgcatcggcggctacaaggtgcgatatgcgacttggtccattatcatggactcagtggttccgtccgataaaggaaattacacatgtattgtggaaaatgagtatgggtctattaaccacacttatcagttggatgtggtagaaagatctccacataggccgatacttcaagcagggctgcccgcaaacaaaactgtggccctaggttcgaatgtcgaatttatgtgtaaggtctactctgacccacagccgcatatccagtggctcaagcacattgaggtaaatggaagttag

SEQ ID NO: 187834 - DNA, 438 bp, synthetic construct
  misc_feature 1..438: note = Description of Artificial Sequence: Synthetic coding sequence
  source 1..438: mol_type = other DNA
atgtggagctggaagtgcctgctgttctgggccgtgctggtgaccgcgacactgtgtactgcgaggccttcaccaaccctaccggaacaggacgcgctacctagctccgaggacgatgatgacgacgatgattcaagcagcgaggaaaaagaaactgataacacaaagcccaacccagttgccccctattggactagtccagagaaaatggagaagaaactgcacgctgttccagccgcaaagaccgtgaagttcaagtgccccagttcagggacaccaaacccaaccctgagatggctgaagaacggaaaggaattcaagcctgaccaccgaattggaggttacaaagtccggtacgctacgtggtctataatcatggattccgtcgtgcccagtgacaagggcaactacacttgcatagtcgagaacgaatactag

SEQ ID NO: 187835 - DNA, 429 bp, synthetic construct
  misc_feature 1..429: note = Description of Artificial Sequence: Synthetic coding sequence
  source 1..429: mol_type = other DNA
atgtggagctggaagtgcctgctgttctgggccgtgctggtgaccgccactctgtgcacagcgagaccaagcccaacccttccagaacaagacgctctgcctagttccgaggacgatgacgacgacgacgacagtagttctgaggaaaaagagaccgacaacacaaagcctaaccgcatgccagtcgctccttattggaccagtcctgagaagatggagaagaaacttcatgcagtgccagccgcgaaaacagttaagttcaagtgccccagctccggcacccccaatcctactttgagatggcttaagaatggcaaagaattcaagcccgatcacagaatcggggggtataaagtacgctatgctacgtggtctattataatggactcggtagttccatcggataagggcaactacacttgcatctag

SEQ ID NO: 187836 - DNA, 258 bp, synthetic construct
  misc_feature 1..258: note = Description of Artificial Sequence: Synthetic coding sequence
  source 1..258: mol_type = other DNA
atgtggagctggaagtgcctgctgttctgggccgtgctggtgaccgctactctctgcaccgcccgcccatctcctaccctacccgaacaggacgccctgccttcctcagaagatgacgacgacgacgatgattccagctcggaggagaaagaaacggataacaccaagcctaacccagtggcaccttactggacttctccagaaaaaatggagaagaaattgcacgctgtccctgcggctaaaactgtgaaattctag

SEQ ID NO: 187837 - DNA, 2463 bp, synthetic construct
  misc_feature 1..2463: note = Description of Artificial Sequence: Synthetic coding sequence
  source 1..2463: mol_type = other DNA
atgtggagctggaagtgcctgctgttctgggccgtgctggtgaccgccactctttgtactgcaagaccttcccccacgctgcccgaacaggcccaaccttggggggcccccgtggaggtagagtctttcctggtgcatcccggggatctgctgcaattgcggtgcaggcttcgcgatgatgtacagtccatcaactggttgagagacggtgtccagctggccgagagtaatagaactcgcataaccggtgaggaagtagaggtccaggattcggttcctgctgatagcgggctctatgcttgcgtaacttctagccccagcgggtcagataccacatatttctctgtcaacgtcagtgatgctctcccatcttcggaggacgacgacgacgacgatgacagttcgtccgaggaaaaggaaaccgacaataccaagcccaacaggatgccagttgccccctactggacgtcacccgagaagatggagaagaaactgcatgcggtgcctgctgccaaaacagttaagttcaaatgcccatcctccggcaccccaaacccgactctgcgctggctgaaaaatggtaaagaattcaaaccagaccatagaatcggagggtacaaggtgcgctacgctacttggagtatcatcatggatagcgtcgttcctagtgacaaggggaactacacttgtattgtcgagaatgagtacggcagcattaaccatacctatcagctcgatgtggtggaacgctcaccacatcggcctatcctccaagcaggtctgcctgctaacaagacagtagctttaggatctaacgtggagttcatgtgtaaggtgtactccgaccctcagcctcacattcagtggctgaagcacatcgaggtcaatggttcaaagattgggccggacaacttaccctacgtacaaatcctgaagacagcgggtgtgaatacaactgataaggaaatggaggttctgcatctgcgcaacgtgagtttcgaagatgctggagagtacacatgtctggcaggtaactctattgggctgtcacatcacagcgcctggctgacagtattagaggcgctggaggagagaccggctgtcatgacatcccccctgtatctggagatcatcatatactgtaccggagcattcctaatcagctgtatggtggggagcgtgattgtgtataagatgaagtcaggcacaaagaagagcgacttccacagtcaaatggcagtgcacaagcttgcaaaatctatacccctgagaaggcaggtgtccgcggattcatccgcatccatgaactccggcgtgcttctcgtgcgcccttcccgcctctcttcgtctggaacaccaatgttggctggtgtttcagagtacgaacttccagaggacccacgctgggagttaccacgagaccgactggtcctgggaaagccgctaggggagggctgttttggtcaggtggttctggcagaggctatcggcttagacaaagataaaccaaatcgggttacaaaagtggcggtgaagatgctaaagtccgatgcaacagaaaaagacttgtcggacttaatctccgagatggagatgatgaaaatgatcggtaaacacaagaatatcatcaatctgcttggcgcttgcacccaagacgggcctctctacgtaatcgtggagtacgcttccaaaggcaacctgcgcgagtacctccaggctcgccggcctcccgggctcgaatattgctacaaccccagccacaatccagaggagcaactgagcagcaaagacttagtttcttgcgcctaccaggtggccagggggatggaataccttgcctccaagaagtgcatccacagagatctcgcagccagaaacgtgctcgtaaccgaggataatgtaatgaagattgctgatttcggcctcgcccgcgatatccatcacatcgactattacaagaaaacaaccaatggcagacttcccgtcaaatggatggcccctgaagccctatttgatcgtatatacacacaccagtcagacgtgtggtcgtttggcgtcctgctctgggaaatctttacactgggagggtcaccgtatccaggagtacccgtcgaagagctgttcaagctgctcaaggaaggacacagaatggacaagcccagcaattgtacaaacgaattatatatgatgatgagggactgttggcacgccgtgccctcacaaaggccgacattcaagcagctcgtggaggatcttgaccggatcgtagcactgaccagcaatcaagaatacctagacttgtctatgcctcttgaccaatacagtcccagcttccccgatacccgatctagcacatgcagctcaggagaagactccgtgttcagccatgaacctctccccgaagagccctgtctcccgcgtcaccccgcccaactcgccaatggcggcctaaaaaggcgctag

SEQ ID NO: 187838 - DNA, 2010 bp, synthetic construct
  misc_feature 1..2010: note = Description of Artificial Sequence: Synthetic coding sequence
  source 1..2010: mol_type = other DNA
atggtgagctggggccggttcatctgcctggtggtggtgaccatggccacacttagcctggctcgtccttcattcagcctggttgaggatacgactctggaaccagaggatgccatttcatcaggcgacgatgaggacgacacggatggagccgaggacttcgtgtcggagaactccaacaataaacgggcaccatactggaccaatacagagaagatggaaaagcgcctccacgcagtgcccgccgcaaataccgttaaatttcgctgccccgctggcggcaatcccatgccaacaatgaggtggttaaagaacgggaaggaatttaaacaagagcacagaatcggggggtacaaagttagaaatcagcattggtccctcatcatggaatccgtggtgccctccgataaaggcaactacacctgcgtggttgagaacgagtacggctccatcaatcacacatatcacctggatgtggtcgagcgcagtccgcaccgtcctatcttgcaggcaggtctccctgctaacgcgtccaccgtggtaggcggggatgtagaatttgtatgcaaagtctattcagacgctcagccacacattcagtggataaaacacgtagagaaaaacgggtcaaagtacggccctgacggactcccatacctgaaggtactgaaggctgctggcgtgaatacgacggacaaagaaattgaggtgctctatatcagaaatgttacattcgaggatgcgggagagtacacatgcctagcgggaaattccattggtatctcgttccactcagcatggttgaccgtcctgccagctcccggacgcgagaaggaaattactgcgagtccagactacctagagatagcaatatactgcattggggttttcctgattgcctgcatggtagtcaccgtaatcctttgccgcatgaaaaatactacaaaaaaaccagacttctcaagtcagccggcagtccacaaactgactaagagaattccgctccggcgccaagtctccgctgagtcatcttcttctatgaattctaacactccactggtcagaatcacaaccagattgtcctccacagctgacacccccatgctagctggggtgtccgagtatgaactgccagaggacccaaagtgggaatttccaagagacaagctcacccttggcaagcctcttggagaagggtgcttcggacaggtagtgatggcagaggctgtgggcatagacaaggacaagcctaaggaagccgtgacagttgctgttaagatgctgaaggatgatgccaccgagaaggacctctcggatctggtttccgagatggagatgatgaagatgattggcaagcataaaaacatcatcaatctgctcggagcttgtacgcaggacggccctctctatgtgatcgtagagtatgcatctaaaggcaacctgcgcgaataccttagagccagaagaccgcctggcatggagtacagctacgacattaacagagttccggaagagcagatgactttcaaagacctggtgagctgcacataccagttggccagaggcatggaatacctcgcatctcagaagtgcattcatcgcgacttggcggcaagaaatgttctagtaactgagaacaacgtcatgaagattgcagactttggccttgcgcgcgatattaacaatatcgattactataagaaaaccaccaacggccggctccccgtgaaatggatggcccctgaggctcttttcgatcgagtttacacccaccagtcagatgtatggtcctttggagtcctaatgtgggagattttcaccctgggcggatccccgtaccctggcatccccgtcgaggagctatttaaactactgaaagagggtcacaggatggataaaccagcaaactgcactaacgagctctatatgatgatgcgcgactgctggcatgcagtaccatcgcagcgcccgaccttcaaacagctcgtcgaggaccttgataggatttag

SEQ ID NO: 187839 - DNA, 2460 bp, synthetic construct
  misc_feature 1..2460: note = Description of Artificial Sequence: Synthetic coding sequence
  source 1..2460: mol_type = other DNA
atggtgagctggggccggttcatctgcctggtggtggtgaccatggccacactctccctggcaaggcccagcttctccctggtcgaggacaccaccttagagcctgaagaaccccctaccaaatatcaaatcagccaacccgaggtgtatgtcgcggcaccgggagaaagtctcgaagtcaggtgtttactgaaggacgctgccgtcatatcctggaccaaagatggcgtgcacctgggacctaacaacaggactgtgctcattggtgaatatctacagattaagggtgccactcccagggattccggcttgtacgcctgtactgcttctcgcactgttgatagtgaaacttggtacttcatggtcaatgtgaccgatgctattagcagcggtgatgacgaggatgacaccgacggcgcggaggactttgtaagtgaaaacagcaacaacaagcgggcaccttattggacaaatactgaaaaaatggagaagcggttacacgcagtgccagctgctaacaccgtgaaatttcgatgccccgctggtggaaaccctatgccaactatgcgttggctgaagaacggaaaggaatttaaacaagagcaccgcatcggaggatacaaagtgagaaaccaacactggtctctcattatggagagcgtggtgccatccgacaagggcaactacacatgcgtagttgaaaatgagtatggatccatcaatcacacttatcacttggacgtggtggaaaggagtccgcatcgtcctatactacaggccggcctccctgctaatgcttctactgtggttgggggcgacgtagagttcgtttgtaaggtctactccgatgcccagcctcatattcagtggatcaaacatgtcgaaaaaaatgggtctaagtacggaccggatggtctgccttacctcaaggtcctgaaagccgcaggagtcaacaccacagacaaagaaatcgaagtgctttacatccgcaacgtgaccttcgaggacgcaggggaatatacatgtctagctggcaacagcattggtatcagctttcatagcgcttggttaaccgtgctgccagcacctggcagggaaaaggaaatcacagcatcccccgattatttagagatcgcaatttactgtataggtgtgttcctcatagcttgcatggtcgtcactgtgatactgtgcagaatgaagaacactactaagaaacctgacttttcgtctcagcccgcagttcacaagctaaccaagcgtattcctttgcgaaggcaagtatctgcagagtcaagctcttcaatgaattcgaatacccccctcgtgcggatcacgactcgcctgagtagcacagccgatactccgatgcttgcaggcgtgtccgaatatgaactgcctgaggatccgaagtgggagtttccaagagacaagctgaccctgggcaaacctctcggggaaggttgctttggccaggtggttatggcagaggcggtaggaattgacaaggataaaccaaaagaagccgtgaccgtagcagtcaagatgctaaaagacgacgccaccgaaaaggatttgagcgacttagtgagtgagatggaaatgatgaagatgatcggtaagcataagaacattattaatctccttggcgcctgtacccaggatggccctctgtacgtcatcgtggaatatgcatccaaaggaaatttaagggagtacttaagagctaggagaccccctgggatggagtacagttacgacattaacagagttcctgaagaacagatgaccttcaaggacctggtgagctgtacctatcagcttgcgcggggtatggagtatctggcctcgcagaagtgcatacaccgggaccttgcagcaaggaacgtgctggtcaccgagaataatgtcatgaaaatcgctgattttggactggccagggatattaacaatattgattactataagaaaactaccaacggccggctgccagtgaaatggatggcccccgaggctctttttgatagggtgtatacccatcagtccgatgtttggagctttggagtgctcatgtgggagattttcacccttggggggtctccctacccggggattcccgtggaagagctgttcaagctgctgaaagaaggacaccgaatggataaacctgccaattgcaccaacgaactgtatatgatgatgagagattgctggcacgcggttccttcccagcggcccactttcaagcagctcgttgaggatctggatcggatcctcacccttacgactaatgaagaatacctagacctgagtcagccattagagcaatatagtcccagctatccagacactcgctccagctgttcgtctggggatgattctgtcttctcccccgaccctatgccttacgagccttgcctacctcaatatccgcacattaatggctccgtcaagacgtag

SEQ ID NO: 187840 - DNA, 2358 bp, synthetic construct
  misc_feature 1..2358: note = Description of Artificial Sequence: Synthetic coding sequence
  source 1..2358: mol_type = other DNA
atggtgagctggggccggttcatctgcctggtggtggtgaccatggctaccctcagcctcgcccgccctagctttagcctcgtggaagatactactctggagcctgaggaacctcccaccaaataccaaatctcccaaccagaggtttacgtcgcggctcctggggagagcctggaagtgcgctgtttactcaaggacgccgccgttatatcatggaccaaggacggtgtgcatctcggacccaacaatagaacagtacttattggcgagtacttgcagatcaaaggcgctacaccgcgcgattctggtctttatgcgtgtactgccagtaggaccgtggacagcgagacttggtactttatggtgaatgtcactgatgcaatctcctcaggcgacgacgaggatgatacagatggcgccgaggacttcgtctcggaaaactctaataacaagcgcgctccctactggaccaatacggagaagatggagaaacgcctccacgcggtcccagccgccaataccgtcaagtttcggtgtccggctggaggaaatccaatgcccactatgcggtggctgaagaacggaaaggaatttaaacaggaacatcgtataggaggttataaagtgaggaaccagcactggtcactgatcatggagtccgtggtgccgagcgacaaagggaattatacctgtgttgtcgagaatgagtatggatctataaaccacacttaccatctggatgtcgtggagaggtcaccacatcggcctatcttgcaggccggccttcccgctaatgcctcgacagtcgttgggggtgatgtcgagttcgtatgcaaggtgtactcggatgcccagccccatattcagtggatcaagcatgtggagaaaaacggatctaaatacgggcccgatggcttaccatatcttaaagtcctaaaagctgcaggtgtaaacacaacggataaggagatagaagtcctgtacatcagaaacgtgacatttgaagacgccggcgaatatacatgtcttgctggcaattccatcgggatatcctttcattcagcctggctgaccgtcctgcccgctcctggtagagagaaagagatcaccgcctccccagactatcttgagattgctatctattgtattggcgtatttttaattgcgtgtatggtggtcacagtgattctctgtagaatgaagaatacgactaagaagcccgatttctcgagtcagcctgctgtccataagctgacaaagagaattcccctgaggcggcaagtgtccgcagagagctccagttcgatgaatagtaacactcccctggttaggattactactaggctgtcttcaactgccgacacgcctatgttagcgggggtttcagagtacgaactgcccgaggatcccaaatgggagttcccaagggataaattaacgttaggcaagcccctgggcgaagggtgcttcggtcaggtggtaatggcagaagcagtagggatcgacaaggacaaaccaaaggaagctgtgaccgtagccgtcaagatgctgaaagacgatgctaccgaaaaggatctgagcgatctggttagcgagatggagatgatgaaaatgatcggaaagcataaaaacatcattaaccttttaggcgcatgtacgcaggacgggccactgtacgtgatcgtagagtacgcaagtaagggaaacctgagggagtacctgagggccaggaggccccctgggatggagtactcgtatgacattaacagagtgccggaagaacagatgaccttcaaggaccttgtgtcttgtacgtatcagcttgccaggggcatggaatatttggcttctcaaaagtgcattcatagggatctagccgcccggaatgtcctggttactgaaaataacgtaatgaagattgcagatttcggtctggctagagatatcaacaacatcgattattataagaaaacaactaacggccggttgcctgtcaaatggatggcccctgaagcactctttgaccgagtttatacccatcagagcgacgtctggagtttcggggttctgatgtgggaaatttttacattgggtggatcaccctatccaggcatacctgtggaagaactcttcaaactgttaaaagaaggacaccggatggacaagccagcaaactgtaccaatgaactgtacatgatgatgagggattgttggcatgccgtccctagccagaggcccacttttaaacaattagtcgaagatctggaccggatcttgaccctgaccaccaatgaggagtacctcgacctctcgcaacccttggagccgtactctccttgctatccagaccctcgatag

SEQ ID NO: 187841 - DNA, 2115 bp, synthetic construct
  misc_feature 1..2115: note = Description of Artificial Sequence: Synthetic coding sequence
  source 1..2115: mol_type = other DNA
atggtgagctggggccggttcatctgcctggtggtggtgaccatggccaccctgtctctggcccgcccatcattttcgctagtagaggatacgacgcttgagccagaaggggctccctactggaccaacactgaaaagatggaaaaacgcctgcacgcagtcccggccgccaatacagtgaagttccggtgccctgccggcgggaatcctatgccgactatgaggtggctgaaaaatggaaaagagtttaagcaggagcacaggattggtggctacaaggtgagaaaccaacattggagcctcatcatggaaagtgtagttccttcggacaaaggcaactatacatgtgtggtggaaaacgagtacggaagcattaatcacacttatcacctcgatgtagtagaaagatccccccacagacccatcttgcaggccggcctccctgccaacgcgagcaccgtggtgggaggtgatgttgagtttgtgtgtaaggtgtattctgatgctcagccacatattcaatggatcaagcacgtggaaaagaatggcagcaaatatgggcctgacgggctgccgtacttgaaagtgctgaaggccgctggagttaataccaccgacaaagagattgaagtcctgtacatccgtaacgttaccttcgaggacgctggggaatacacctgtctcgccggtaattcaatcggcataagttttcattctgcatggcttacagtgctgcccgctccagggagagagaaggagatcaccgcaagcccagactacttagagattgcgatttattgtataggggtcttccttatcgcttgtatggtggtaacggtgatcctctgccggatgaagaataccactaagaagcctgacttctcaagtcagccagccgtgcataaacttacaaaacgaatccccctgcggcgtcaggtctctgctgaatcatccagcagcatgaactctaacacacctcttgtgcgcatcacaacaagattgtctagcactgccgataccccaatgctagcaggagtcagcgagtatgagttacctgaggatccaaaatgggaattcccacgggacaagctcaccttaggaaaacctctaggtgagggctgctttggacaagtggttatggcagaggccgtcggtattgacaaagacaaaccaaaggaagcggtaactgtcgccgtgaagatgctgaaggacgatgcaaccgagaaggacctgtctgacttagtgtccgagatggaaatgatgaaaatgattggcaaacataagaacataattaatctgctgggcgcatgtactcaagacggaccactctatgtcattgtcgaatatgcctcaaaggggaatctaagggagtatctgagagccagaagaccccccggcatggaatatagttacgacattaatcgcgttccagaggagcagatgaccttcaaagaccttgtctcctgtacctaccagctggcccgaggtatggaatacctggcatcgcaaaagtgcatccatcgcgacctggctgcccggaatgttcttgtcacggagaacaatgttatgaaaatagcagatttcggcctggcccgggatattaataatattgattactataaaaaaacaacgaatgggcgtctgcctgtgaaatggatggcccccgaggctctttttgatagggtgtatacacaccagtcagatgtgtggagtttcggagtcctgatgtgggaaatttttacgctcgggggatctccgtaccccggcattcccgtggaggaactgtttaaattgctcaaggaaggacatcgtatggacaagcctgccaattgcaccaacgagttatacatgatgatgagggattgttggcacgccgttccgtcccaacgccctactttcaaacagttggtcgaggatcttgacaggatccttactttgactactaatgaggagtatctcgacctctcccagcccctggaacagtatagcccaagttacccagatacacggagcagctgttcaagtggcgacgattcagtgttttcccccgacccaatgccatatgagccctgccttccacagtacccacatatcaatggaagcgtgaagacctag

SEQ ID NO: 187842 - DNA, 2124 bp, synthetic construct
  misc_feature 1..2124: note = Description of Artificial Sequence: Synthetic coding sequence
  source 1..2124: mol_type = other DNA
atggtgagctggggccggttcatctgcctggtggtggtgaccatggcaactttatccctggcccgccctagtttttcactagtagaggatacaactctagagcctgaggatgccatcagctcgggtgatgatgaggacgacacggacggggcagaagactttgtgagcgagaattccaacaacaaacgagctccttactggaccaataccgaaaaaatggaaaaacgtctacatgccgttccagccgctaataccgtaaagtttagatgtcctgccggggggaacccaatgccaacgatgcgatggctgaagaatggtaaggagttcaaacaggagcaccggatcggaggttataaggtgcgaaaccagcactggagtctgattatggagagcgtggttccttcagacaaaggcaattacacctgtgtggtcgaaaatgagtacggctctatcaatcacacatatcacctcgatgttgtagaaaggtcaccacacaggcccatactgcaggctggactgccggccaatgctagcaccgtggtgggcggcgacgtggagttcgtgtgcaaggtgtacagcgatgcacagccccacattcagtggattaaacacgtcgagaaaaatgggtccaagtacggacctgacgggcttccttatctcaaggtgttgaaggccgctggcgtgaacactacagacaaggagatcgaagttttatacatccggaatgtgacgttcgaggacgctggcgagtacacgtgcctagccggaaacagtatcgggatctcttttcacagcgcctggcttacagtactgcctgcccctggaagagaaaaggaaatcactgcatctccagactacttagaaatagccatttattgcatcggtgtattcctgatcgcatgtatggtagtcaccgtgatcctttgcagaatgaagaacaccaccaagaaaccagatttcagctctcagcccgctgtgcacaaattaaccaagcgcattcccttgagacgccaggtcacagtatctgcagagtcaagttcatctatgaacagtaataccccacttgtacgaataacaacacggctctcctcaactgcagacacacctatgcttgctggggttagcgagtacgagctccctgaggacccaaagtgggagttcccgcgggacaagctgacccttggaaaacctctaggagagggatgttttggtcaggtagtaatggccgaggcagtgggtattgacaaggataagccgaaggaggccgtcacagtggccgtgaagatgttgaaggatgatgccaccgagaaggacctctccgatctggtgtccgagatggaaatgatgaaaatgatcgggaaacacaaaaacattattaacctgctaggggcctgcacacaagacggccccctgtatgtaattgtggagtacgcgtcaaagggtaacttgagagagtacctccgcgctaggcgcccgccgggaatggagtactcgtacgatatcaaccgcgttccagaagaacagatgactttcaaggacctggtttcatgcacttatcagctggcaagggggatggaatacctagccagccagaaatgcattcacagagaccttgctgctcgtaatgtacttgtcacagaaaataacgtcatgaaaattgccgatttcggcttggccagagacattaacaacattgattattacaagaagacgaccaatgggcgcctccctgttaagtggatggcaccggaggccctcttcgatcgcgtctatacccatcagagtgatgtgtggagcttcggcgtcctcatgtgggagatcttcacactgggagggagcccctacccagggatccctgtggaagagctatttaaactgttgaaagagggccatcgcatggacaaacctgcaaattgtaccaatgagctctacatgatgatgcgcgactgttggcatgcagtcccatcccagcgtcctacattcaagcaactcgttgaggatctcgacaggattcttactctcacgacaaacgaagaggagaagaaggtgtcgggcgcagtggattgtcacaaacccccatgcaatccatctcatctcccctgtgtcttggcagtcgaccagtag

SEQ ID NO: 187843 - DNA, 2466 bp, synthetic construct
  misc_feature 1..2466: note = Description of Artificial Sequence: Synthetic coding sequence
  source 1..2466: mol_type = other DNA
atggtgagctggggccggttcatctgcctggtggtggtgaccatggccacactgtctcttgcgaggcctagttttagcctggtcgaggatacgaccctagaaccggaagaacctcctaccaaataccaaatcagccagccagaggtgtatgtggctgccccaggagagtcattggaggtgcgatgcttgttgaaagacgccgccgtgattagctggaccaaggatggagttcatttgggcccgaataataggaccgtgctaatcggcgagtatctacagatcaagggggctaccccccgcgattccgggctgtacgcctgcacagcgtctaggactgtcgactcagaaacgtggtatttcatggttaacgttacagacgcaatctcctctggcgacgacgaggatgataccgatggcgctgaagactttgtgtccgaaaactccaataataaaagggctccatattggacaaatactgaaaaaatggagaaacggctccatgccgtgccagctgccaacaccgtaaagtttcggtgccccgccggagggaatccaatgcctacaatgcgttggctgaaaaatgggaaggaattcaaacaagagcataggatcggaggatataaggtccggaatcagcattggagcctgatcatggaatcagttgttcctagtgataagggcaattacacatgtgtcgtggagaatgaatacggatccatcaaccacacgtaccacctagacgtggtcgaacgaagtcctcataggcccatccttcaggcgggcctcccggcaaatgccagtaccgtggtagggggtgatgtggagttcgtttgtaaggtatattcagacgcacagccccacatccagtggatcaagcacgtagaaaagaacgggagcaagtacggcccagacggtttaccttacctgaaggtcctaaaggctgcaggggtgaacaccaccgataaagagatcgaggtgctgtacatccgcaacgttaccttcgaggatgcaggcgagtatacttgcttagcaggcaactcgatcggcatcagctttcattctgcctggctgacagtgcttcctgctcccggaagggagaaggagattaccgcctcgccagactatcttgaaatcgctatatattgtataggggtcttcctgatcgcctgcatggtcgttacagttatcctgtgtcgcatgaagaacaccacgaaaaagcccgattttagctcgcaaccggcagtacacaagctcaccaaaagaatccccttgaggaggcaagttacagtgagcgctgaaagtagctcctctatgaattcaaacacaccccttgtgcggatcactactaggctttcctccacagctgatactcctatgctggccggagtctccgagtatgagctgcccgaagaccctaaatgggagttccctcgggacaaactgactcttggcaagccactgggagaggggtgttttggccaggtggtgatggcagaagctgtgggtattgataaggataaacccaaggaggccgtgacagtagcagtcaagatgctcaaagatgatgctaccgaaaaagacctgagcgatctagtctcagagatggagatgatgaagatgattggcaaacacaagaatattataaacctcctgggggcgtgcacacaagacggccccctctacgtcattgtcgagtatgcctcaaagggaaacctgcgagagtacctcagggctcgacggcctcctggcatggagtactcttatgacataaaccgcgttcccgaggaacagatgactttcaaagacctggtgtcctgtacctaccagctggcccgaggtatggagtacctcgcgtcacagaagtgtatacacagagacttagccgccagaaatgttttagtgacggagaataacgtaatgaaaatagctgattttggtctcgcccgagatatcaataacatcgactactacaagaagactaccaacggtcgcctgcccgtgaaatggatggcgccagaagcgctcttcgaccgagtatacacccatcagtccgatgtctggagcttcggcgtcctaatgtgggaaatcttcaccttgggaggcagtccttacccaggcatacccgtcgaagagctgttcaagctgctgaaagaagggcaccgtatggacaagccagccaattgtacaaatgagctttacatgatgatgcgcgactgctggcacgcggtaccgtctcagaggccaacattcaagcagctcgtcgaggatcttgatagaattctcactttgactaccaatgaggagtatcttgatctgtcacagcctctggagcaatattccccttcataccccgacactcgcagcagctgctcaagtggtgacgacagtgtcttctctcctgacccaatgccatacgagccttgcctgccccaatacccccatattaatggttctgtcaagacttag

SEQ ID NO: 187844 - DNA, 765 bp, synthetic construct
  misc_feature 1..765: note = Description of Artificial Sequence: Synthetic coding sequence
  source 1..765: mol_type = other DNA
atggtgagctggggccggttcatctgcctggtggtggtgaccatggctaccctctctctggctcgaccttcctttagcctggttgaagataccactctcgagccagaggagcccccgacgaaatatcaaatctctcagcccgaggtttatgtcgcagcccccggagagtccctcgaggttaggtgcctgttaaaagatgctgctgtaataagttggacgaaggacggcgtgcaccttggccccaacaataggaccgtgctgatcggtgagtacctgcagatcaaaggtgccacacctagagattctggtctgtacgcatgcacggcatccagaacagtggattcagagacttggtatttcatggttaacgttaccgacgccatatcaagcggggacgatgaggacgataccgatggggcggaggatttcgtcagtgaaaacagcaataataagcgagcaccgtattggaccaacactgaaaaaatggaaaaaagacttcacgcggtgccagccgcgaacaccgtgaagttcagatgccctgccggaggtaatcctatgccaactatgaggtggctgaagaatggcaaagagtttaagcaggagcaccgtatcggcgggtacaaggtccggaaccagcattggagtttaataatggaatctgtggtccccagcgacaagggcaattatacctgtgtagtggagaatgagtacgggtctattaaccacacctatcatctggatgttgtgggaagccaagggctctag

SEQ ID NO: 187845 - DNA, 2043 bp, synthetic construct
  misc_feature 1..2043: note = Description of Artificial Sequence: Synthetic coding sequence
  source 1..2043: mol_type = other DNA
atggtgagctggggccggttcatctgcctggtggtggtgaccatggccacgcttagcttggctcgaccttcatttagcctggttgaggacacaactctagagcctgaagacgccatcagttcaggcgatgatgaagacgacaccgatggagccgaagacttcgtgtccgaaaattccaacaacaagagggccccttattggaccaacaccgaaaaaatggagaaacgattacacgctgtgccagctgcaaatacggttaagttccgatgccccgccggcggaaaccctatgcccacaatgcgatggctaaaaaacggaaaggaattcaaacaggagcatcggatcggcggctataaagtgcgcaaccagcattggtctctaattatggagtcagtggtgccctctgacaaaggtaactacacttgtgtggtcgagaatgaatatggctcaattaaccatacataccacctggacgtagtggagagatccccacatcgtcctatcctccaggctgggctgccagctaatgcatccacagtcgttggtggtgacgtggaattcgtttgcaaggtgtacagcgatgctcaacctcacattcagtggatcaaacacgtagaaaagaatggcagcaagtatggaccagacgggcttccctacctcaaagtgctgaaacattccggaataaattcttctaacgctgaggtgctagctctgtttaacgtaactgaggccgacgccggagagtatatttgtaaagttagcaattacattggccaagccaatcagtcggcatggctgaccgttctgcccaaacagcaggccccaggccgagagaaggaaatcaccgcatcacccgattatctggaaatcgcaatatactgcatcggcgtcttcctcattgcatgcatggtcgttaccgtcatcctgtgtcggatgaaaaataccaccaagaagcccgatttttccagccagcccgccgtgcataagctcacaaaacgcatccccctccgacggcaggtgacagtgtccgctgagtcttctagttcaatgaattccaacactccgcttgtgcgtattaccactaggttgagttcgacagcggatactccaatgctggcaggcgtctcggagtatgagttacctgaagatcctaaatgggagtttccccgtgacaaactgacccttggaaaaccactgggggaggggtgcttcggccaggtggttatggctgaggctgtggggattgacaaagataaacctaaggaggctgtcaccgtcgcggtgaagatgcttaaagacgacgctactgaaaaggatctctctgatttggtgagtgagatggagatgatgaagatgatcggaaagcataagaacattatcaatctcctcggtgcctgcacccaggatggaccactctatgtgatcgtcgagtatgcctcaaagggtaaccttcgggagtatctgcgcgcgaggcgcccccccggcatggagtattcatatgatattaacagagtccccgaggagcagatgaccttcaaagacctagtcagctgcacctaccagctggccaggggcatggagtatttagcatctcagaagtgcatacatcgagacctcgctgcgcggaacgtccttgtgactgaaaataatgttatgaaaatcgcagacttcggactcgcacgcgacatcaacaatatcgactattataaaaagacgaccaatggacggcttcctgtcaagtggatggctcccgaagctttgttcgacagggtgtacactcatcagtcagacgtctggtcttttggtgtcctgatgtgggagatttttactcttggcgggtcaccataccccggaattcctgtcgaggagctgtttaagttacttaaggaaggccacaggatggataagcctgcaaactgcactaacgaactgtacatgatgatgcgcgattgctggcacgcagtgccatcccagcggccgactttcaaacagctggtggaagatctggaccgtatactcacactaactacaaacgaaatttag

SEQ ID NO: 187846 - DNA, 2310 bp, synthetic construct
  misc_feature 1..2310: note = Description of Artificial Sequence: Synthetic coding sequence
  source 1..2310: mol_type = other DNA
atggtgagctggggccggttcatctgcctggtggtggtgaccatggcaactttaagtctagcacgcccttccttctccctggtagaggacacgactttggagccggaggaaccacccaccaaataccaaatctcacagccagaggtctatgttgcagctccaggcgagtctctcgaagttcgatgcttactgaaggacgccgccgtgattagctggacaaaagatggcgtgcatctaggacctaacaaccgaaccgttttgatcggcgagtatttgcagattaagggcgcaactccccgcgattcaggtctgtacgcttgcaccgcatctcggactgtggactctgaaacctggtactttatggttaatgttaccgacgctatcagttccggggatgacgaagatgacacagacggcgctgaagatttcgtctccgagaattctaacaacaagagggccccttactggacgaataccgagaagatggaaaaacgactgcacgcggtgcccgctgccaacaccgtgaagtttagatgtccggctggcggtaaccccatgcccacgatgagatggctgaagaacggcaaggagtttaagcaggagcacaggatcggcggctacaaagttagaaaccagcattggagcctgatcatggaatccgtggtccctagcgacaaggggaactacacctgtgtggtagagaacgagtatgggtccataaaccacacttatcatctagacgtcgtggaacgaagcccacacagacctattctgcaggccggacttccagctaatgccagcaccgtggtcggaggggacgtagaattcgtctgcaaagtgtacagtgacgcacagccccatattcagtggatcaagcatgttgagaagaacggatccaagtatggacctgatggactgccttacctcaaagttcttaagcatagcggtattaactccagcaacgctgaggtgctggccctgtttaacgtgacggaagcagacgcaggggaatatatttgtaaagtttccaactacattggacaggccaatcaaagtgcctggctaacggtgctgcctaaacaacaagcacctggccgcgaaaaggaaattactgcgtcccctgactatctagagattgctatctactgcataggcgtgttcctgatcgcgtgtatggtagttactgtgatcctctgtagaatgaagaatacaacgaaaaaacctgatttctccagccaaccagctgtccacaagctgacaaagcgaatcccactgagaaggcaggtcacggtgtcagcagaatcttcttccagtatgaattcgaatacaccattggtgaggatcactacccgtctgtcttcaactgccgacacccctatgctggctggggttagcgaatacgagctgcccgaagatcctaagtgggagttcccacgggacaagttgactttaggaaagcctcttggagagggctgcttcggccaggtggtcatggcggaagccgtgggcattgacaaagataaacctaaggaagcggtaacggtggccgtaaagatgctaaaggacgatgccaccgaaaaagatttgtctgatctagtctctgaaatggagatgatgaaaatgattggcaaacacaagaatatcataaatctgctgggcgcctgcactcaggatggtcctctgtacgtaatcgtggagtacgcctccaaaggaaatttacgcgaatacttacgggcacgacgaccccccggtatggaatactcctacgacataaatcgagtccctgaagaacagatgacattcaaagatctggtgtcctgtacttaccagctcgccaggggaatggagtatttggcttctcagaagtgtattcacagagacctggcagccaggaatgttctagtgacagagaacaatgtcatgaagatagccgactttggactggctcgggacattaataacatcgattattacaagaagactaccaacggacggcttcctgtgaagtggatggctccggaagccctttttgatcgggtgtatacacaccagtcggacgtatggtcatttggggtactgatgtgggagatattcaccctgggcgggagtccatacccagggatcccagttgaggagctcttcaaactcctgaaggagggtcacaggatggataagcccgcgaattgtacaaatgagctgtacatgatgatgcgcgactgttggcacgccgtgccctcccagagacccacattcaagcagctggttgaagacctagaccgaattctgacgctgactaccaacgaaatttag

SEQ ID NO: 187847 - DNA, 2307 bp, synthetic construct
  misc_feature 1..2307: note = Description of Artificial Sequence: Synthetic coding sequence
  source 1..2307: mol_type = other DNA
atggtgagctggggccggttcatctgcctggtggtggtgaccatggcaactttgtccctggctcgtcccagcttctctctcgtggaggacaccacactagagcccgaggagccccccaccaagtaccagatcagtcagccagaggtgtatgtggcagcacccggagaaagcttagaagtccggtgcctgctgaaggacgctgctgtcatcagctggacaaaagacggagtacaccttggccccaacaacaggaccgtactgataggagaatatctccagattaagggggccaccccaagggattctggcctgtacgcctgcactgcatccagaacagtcgacagcgagacatggtattttatggtgaacgtcactgatgccatcagcagcggcgacgatgaagatgacacagacggggccgaggatttcgtgtccgagaattctaacaataaacgcgccccctactggaccaacacagagaagatggagaagaggctgcacgccgtgccagccgccaacacagttaaatttagatgtcccgccggagggaaccctatgccaacaatgcgatggttaaagaatgggaaagaatttaagcaggagcaccgaatcggcggatataaagtccggaatcagcattggtctctgatcatggagtccgtcgtgccatccgacaagggaaattatacttgcgtcgtcgagaatgagtacggctccatcaatcatacctatcatctggacgtggtggagagatctcctcatcgacctatcttgcaagcaggcctgccagccaacgctagcactgtggttggcggtgacgtcgagtttgtatgtaaggtttactccgacgcccagcctcacattcaatggatcaaacatgtggagaagaacggatcaaaatacgggccagatggtctgccatatcttaaggttcttaagcactctggaatcaatagctccaatgctgaggtcctcgcattatttaacgtgaccgaggccgatgccggtgagtatatttgtaaagtgtcaaactatattggacaagccaatcagtcggcctggctcacggtgctgcccaaacagcaggctcctggaagggaaaaggaaatcaccgcttcacccgactatctggagatcgccatttattgtatcggcgtgttcctgatcgcatgtatggtggtcaccgttattctgtgcagaatgaaaaatactactaagaagccagacttctcctcacaacccgccgtgcataaacttaccaaacgtattcctctgaggcgacaggtgaccgtgtccgccgaatcctctagtagtatgaattctaatactccacttgtaagaatcacaactaggctcagtagcaccgccgacactccgatgcttgctggggttagcgagtacgagcttcccgaggaccccaaatgggaattcccccgtgacaagttaaccttggggaagccgctgggggaaggatgtttcgggcaagtagtgatggctgaggccgtgggtatcgacaaggataaaccaaaagaggccgtcaccgtcgccgtgaaaatgcttaaggacgacgccacggaaaaggatctgagcgatctggtgtccgagatggaaatgatgaagatgattggtaaacacaagaatataatcaaccttttgggcgcttgtacacaggatgggcccctatacgtgatagtcgagtacgcaagcaaaggtaatctccgtgagtacttgagagcaaggaggcctccgggcatggagtattcctatgacataaatcgggtgcccgaggaacagatgacatttaaagatttggtgagttgtacctaccagcttgcccgcggcatggaatacttggcaagtcaaaagtgtatccaccgggatctggccgcccgaaacgtgctcgtcacagagaacaatgtcatgaagattgccgacttcggcctggctagggacatcaataatatagattactataaaaagaccactaacgggcggttgcccgtgaagtggatggctcccgaggccttattcgaccgcgtgtacacacatcagagtgatgtctggagctttggcgtgctgatgtgggagatctttactctcggcgggagtccttatcctggcattcctgttgaggaactgtttaagttgctgaaggaaggacaccggatggacaagcccgcgaactgtactaacgagctttatatgatgatgcgagattgctggcatgccgtcccatctcagcgacccacctttaagcagctggtggaagatctggataggattctaaccctaacgaccaatgagtag

SEQ ID NO: 187848 - DNA, 2124 bp, synthetic construct
  misc_feature 1..2124: note = Description of Artificial Sequence: Synthetic coding sequence
  source 1..2124: mol_type = other DNA
atggtgagctggggccggttcatctgcctggtggtggtgaccatggccacattatcactggctcgtccaagtttcagtctggtggaggacactacactcgaacccgaaggagctccctactggacgaatactgagaagatggagaagcgtctgcacgctgtgcccgccgccaacactgtgaagttccgctgccccgcaggagggaatcctatgccaacgatgcggtggctcaaaaatggaaaggagtttaaacaagaacatcgaataggaggctataaggtacggaatcagcactggtctctgatcatggaaagtgtcgtcccatccgataagggcaactatacttgtgtggtggagaacgagtacgggtcaatcaaccacacataccatctggacgtggtagagcgatctccacaccgcccaatcttgcaggcaggactgccggccaacgcctctactgttgttggtggcgacgtggagttcgtatgcaaagtatacagtgatgctcagcctcatatccagtggattaaacacgtggagaagaatggatcaaagtacgggcccgatgggcttccgtacctgaaagtactcaaacatagtggaataaattcctccaacgctgaagtacttgcactgttcaacgtgacagaggccgatgcgggcgagtacatttgcaaggtaagtaattacatcgggcaagctaaccagtctgcatggctcactgtgttaccaaaacagcaggcccccggtagggagaaagaaattacggcctcgccagactacctggagatcgctatttactgcatcggggtttttctgatcgcatgcatggtcgttactgtcatcctgtgccggatgaagaacacaacaaaaaaacctgatttttcctctcagcccgcagtgcataaactcacgaagaggatacctctgaggagacaggtcaccgtgagtgctgaaagctccagttccatgaacagtaatactccacttgttagaatcaccacccgcctttccagtacagctgacacccctatgctagctggtgtgtctgaatacgaactccctgaagaccccaagtgggagttcccgagggacaaactgactctagggaaacctctgggcgaagggtgcttcggtcaggtcgttatggcagaagccgttggcattgacaaggacaaaccaaaggaagccgtgactgtggccgtgaaaatgctgaaggacgacgcgacagagaaggatctgtccgatttggtgagtgagatggagatgatgaaaatgattggaaaacacaagaatattataaacttgctgggggcctgtacacaggatgggccactgtacgtaattgtagaatacgcttctaaggggaacctcagagagtacctgagggcacggcgccccccaggcatggaatactcttacgatattaaccgagtcccagaagagcagatgacttttaaagacttggtgtcatgcacctaccaactggcccgggggatggaatacctcgcatctcagaagtgtatacatagagacctagccgctcgaaacgtcttggtgacagaaaacaatgttatgaaaatcgcggacttcggactggctcgagatattaataacatcgattattataaaaagacgaccaacggccgtttgcctgttaagtggatggccccagaagccttattcgatagagtgtacacccaccaatccgacgtgtggtctttcggagttctgatgtgggaaatctttactttgggagggtctccatacccggggattccggtagaagagctcttcaagttactcaaagaagggcatcggatggacaagccagcgaattgcaccaatgagctgtacatgatgatgagggattgctggcatgccgtccctagtcaacggcccacctttaaacaactggtcgaggatctggaccggatcctgaccctcaccacaaatgaagagtacctcgatctctctcagcctctggaacaatattctcctagttaccctgacacaaggagcagctgttcctccggagacgatagtgtgttttcgcctgaccctatgccctatgagccgtgtctgccacaatatccccacatcaacgggtctgttaagacttag

SEQ ID NO: 187849 - DNA, 2118 bp, synthetic construct
  misc_feature 1..2118: note = Description of Artificial Sequence: Synthetic coding sequence
  source 1..2118: mol_type = other DNA
atggtgagctggggccggttcatctgcctggtggtggtgaccatggccactctatccctcgcacgcccaagtttcagtctcgtggaagacaccaccctggagccagaggaacccccaactaagtaccagataagccagcctgaggtctacgtcgccgctcccggggaaagcctggaagttcgatgtctgttaaaagacgctgccgtgatatcctggacaaaggacggagtccatctgggccccaacaataggaccgtgctcattggcgagtacctccagatcaagggcgcgacaccaagagattccggtctgtatgcctgtacagctagccgtaccgttgatagcgagacgtggtatttcatggtgaacgtaaccgacgcgatcagcagtggggatgacgaagacgacaccgacggcgccgaggattttgtaagcgaaaacagcaacaataaacgggcaccctattggaccaatactgagaagatggagaaaagactgcatgctgtccctgccgctaataccgtgaaattccggtgtccagccggcggcaatcccatgcccaccatgaggtggctgaagaacggtaaagagttcaaacaggagcaccggatcggcggctacaaagtacgcaatcagcattggagtctcataatggaatccgtggtgcccagtgataaggggaactacacctgcgtggtggagaatgagtacgggtctataaatcacacttaccacctagacgtggtcgagcggtcccctcaccggcccattctccaggccggcttacctgccaacgcaagcaccgtggttggaggcgacgtggagtttgtttgcaaggtgtattcagatgcccaaccacacatccaatggattaagcatgtcgagaagaacggcagcaagtacggccccgacggactcccatatttaaaagtgcttaaggtgtccgcagaatcttcctcatctatgaatagcaacacccctcttgtaaggattactacaagactgagctctaccgccgacacccccatgcttgccggggtcagcgagtacgaactgcccgaagacccaaagtgggaattccctagagacaagctcacacttggcaagccactgggagaaggttgtttcggtcaggtggtgatggctgaagcggtaggcattgacaaagacaagcccaaggaggctgtaacagtggccgtgaagatgttgaaggacgacgcgacggagaaggatctctcagacctggtgtcagagatggaaatgatgaagatgatcggcaagcacaagaatataatcaatctcctaggagcctgcactcaggacggccctttgtatgtaatagtggaatatgcttccaaaggcaacttgagggagtaccttcgcgcaaggaggccgcccggcatggagtatagctacgatatcaaccgagttcccgaggagcagatgacgtttaaggatttggttagttgcacttatcaactcgcaagaggaatggagtatcttgcgtcacagaagtgcatccacagagacctggctgctagaaatgtcctggtaaccgaaaataacgtaatgaagatcgctgactttgggctggccagagatataaacaatattgactactacaagaaaactacgaacggacggctgccagtcaagtggatggcccccgaggccctattcgaccgtgtgtatacgcaccaatctgacgtttggtccttcggtgtgctcatgtgggagatattcacacttggcggaagcccctatcctggcataccagtcgaggagcttttcaagttgctgaaagaaggtcaccggatggacaaaccagccaattgcactaatgagctctacatgatgatgagagactgctggcacgccgtgccatctcaaaggcctacttttaagcaactggttgaagacttggacagaatcttaaccttgaccaccaacgaagaatatctggatctgtctcagcccctcgagcagtactcaccctcttacccagacactcgatcttcttgttctagcggcgacgattcagtgtttagtcctgatcctatgccctatgaaccatgcctgccccagtatcctcacataaatggatcagtaaaaacctag

SEQ ID NO: 187850 - DNA, 2130 bp, synthetic construct
  misc_feature 1..2130: note = Description of Artificial Sequence: Synthetic coding sequence
  source 1..2130: mol_type = other DNA
atggtgagctggggccggttcatctgcctggtggtggtgaccatggccacattgtctcttgctcgcccttctttctcactggttgaggataccactctggaaccggaggaacctcccaccaagtatcaaatcagccagccagaggtttacgtagcagcccccggagagtctctcgaggtgcgatgcctcttaaaagacgcggccgtgatttcctggacgaaagatggagtgcacctgggaccaaataatcgcactgtgctaattggcgagtacttgcaaataaagggggcaacccctagagactctggcctgtatgcttgcacagccagcagaaccgtcgacagcgagacatggtactttatggtcaatgtgacggacgccatctcctccggtgacgacgaagatgacacagacggagcggaagactttgtttcagaaaattccaacaacaaaagagcaccatattggacgaatactgaaaagatggaaaagagactccatgcggttcctgccgccaacaccgtcaaattccggtgtcccgccggggggaatccaatgcctactatgaggtggctgaaaaatgggaaggagttcaaacaagaacatagaataggtggctacaaagtgcgcaatcaacattggtcactgattatggaatccgtcgtgccctcggataaaggcaattacacgtgtgtggtagaaaacgagtatggcagtatcaatcacacctaccatttggatgtcgtcgctcccggccgagaaaaagagattactgcatccccggactacctggagatcgctatctattgtattggagtttttctaattgcctgcatggtcgtcactgtgattctgtgtcgaatgaaaaacacaactaagaaacctgacttttcttcccagcccgcagtgcacaagctgaccaagcggattccattgcgccggcaagtaacagttagtgccgagagcagtagcagtatgaatagtaatacacccctcgtacggattaccacgaggctttctagcaccgccgatacccctatgttggccggcgtctctgagtacgaactgccagaggatcccaaatgggagttccctcgcgataaactgaccttggggaagccattgggcgaggggtgctttgggcaagttgtcatggccgaggctgtgggaatagataaagataaacccaaagaggccgtgaccgtcgctgttaaaatgttgaaggatgatgcaactgagaaagatctgagcgatctcgtcagtgaaatggaaatgatgaagatgataggcaaacataagaatatcataaacctcctgggggcctgcactcaggatggacctctctacgtgattgtcgaatacgccagcaagggcaatctgagggagtatttgagggcaaggaggccacctggcatggaatatagttacgacattaatcgggtccccgaggagcagatgacattcaaggatttagtcagctgcacttatcagctcgcgcgaggcatggagtatttggcctctcagaaatgtattcaccgggatctggccgctaggaacgttctggtaaccgaaaacaatgtcatgaagattgcagactttggcctcgcgagggatataaacaatatagactactacaaaaagaccaccaacggacgactcccagtgaagtggatggccccagaagctcttttcgatcgcgtttacacccatcagtctgacgtgtggagcttcggtgtgctcatgtgggaaatctttactctggggggctccccttatcctgggataccagtggaagaactgtttaagctacttaaagaaggccaccgcatggataaaccagctaactgcacaaacgaactctatatgatgatgagagattgctggcacgcggtaccaagtcagcgacctacgtttaaacagctcgtggaagacctggatcgtatactaactctgacaacgaacgaagaatacctagatctcagccaacctctggagcagtactctccctcttatccagatacacgctcttcctgtagtagcggtgacgactcagtgttctcaccagaccccatgccttatgagccatgcctccctcagtatccccatattaatggctcggtgaaaacttag

SEQ ID NO: 187851 - DNA, 2469 bp, synthetic construct
  misc_feature 1..2469: note = Description of Artificial Sequence: Synthetic coding sequence
  source 1..2469: mol_type = other DNA
atggtgagctggggccggttcatctgcctggtggtggtgaccatggcaaccctctccctggcccgcccctccttttctctggtcgaggacacaaccctggagcctgaggagccacccacaaaatatcagatcagtcaaccggaagtgtacgttgccgccccaggggaatcacttgaagtccgctgcctgctgaaggatgccgcggtcatcagctggaccaaggacggagttcatttgggtccgaataacagaaccgtcctgatcggcgaatacctgcagatcaagggggcaacgcccagagattctggcctgtatgcgtgtactgcttcgaggactgtcgattctgagacgtggtattttatggttaacgtaactgatgcaatctcaagtggtgatgatgaagacgatacggatggtgcagaagactttgtgtccgagaattccaataataagcgcgcaccctattggactaacaccgagaagatggagaagcggctgcacgctgtacccgccgccaacaccgtgaaattccgctgcccagccggcggcaatcctatgccaaccatgaggtggttaaaaaacggaaaggaattcaaacaagagcatagaattggcggttataaagtgagaaaccagcattggtcactgattatggagtcagtggttccctctgacaaaggcaactacacttgtgttgtagagaacgagtacggcagtattaaccacacctaccatctggacgtcgtggagaggagtccacatagacctatcctgcaggccggcctacccgccaacgcctcaacagtggtgggaggggatgtagaattcgtgtgtaaagtctactcggacgcccaaccacatatacaatggattaagcatgtcgaaaagaacggaagcaagtacggtccggatggtttgccctatctgaaagtactgaaagtgacaaaggccgctggcgtcaatactactgacaaggaaattgaggtcctctacatcaggaatgtgacctttgaagatgccggcgagtacacatgtctcgcaggaaacagcatcggaattagctttcactctgcttggctaacagtgctcccagcacctgggcgggagaaagagatcaccgcctcacctgactatctcgagatcgccatttattgcattggagttttcctgattgcttgcatggttgtgacggttatcttgtgtcggatgaagaatactacaaagaaaccagactttagttcccagcctgccgtgcataagcttactaaaagaattcccctgcggcggcaggtgtcagcggagagcagctcatcaatgaacagtaatacgcctctggtcaggatcactacacgcctttcatctactgcagatacacctatgctcgcaggtgtgagcgagtatgagttgcccgaggaccctaaatgggagttccctagggataagttgacacttggcaagcccctgggagagggatgctttggccaggttgtcatggccgaggccgtgggcattgataaggacaaacctaaagaggcggttaccgtggctgtgaaaatgttaaaagatgatgccacagaaaaggacttgtcggaccttgtgtctgagatggaaatgatgaagatgatcggcaaacacaagaacatcatcaacctcctgggcgcatgtactcaggatgggcctctgtacgtgatcgtggagtatgcaagcaagggcaacttaagagagtacctgcgggcacgcagaccccccggaatggaatattcctatgatattaatagggttcctgaagagcagatgaccttcaaggatctcgtgtcttgcacctaccaactcgctaggggcatggagtatcttgcaagtcaaaagtgtatccaccgggacctcgcggctagaaacgtgctcgtgacagagaataatgtgatgaaaattgcggatttcggactggcaagagacatcaataatatcgactactataaaaagacgacgaacggcaggctccctgttaaatggatggcccccgaagcactctttgatcgcgtgtatactcaccaaagtgacgtgtggtcttttggagtgctgatgtgggagatattcaccctgggaggatccccatatcctggaatcccagtggaggaactgttcaagttgcttaaggaggggcacagaatggataagccagccaactgtacgaacgagctgtacatgatgatgagggactgctggcacgccgtcccatcacagcggccaacttttaaacagctcgttgaagatctggaccgtattctcacgttgaccacgaacgaagaatacctagaccttagtcagcctctggaacagtactccccctcatacccagacacgcggagcagttgctctagcggcgatgacagcgtgttctcacccgaccctatgccctatgaaccttgtctgccacaatatccacatattaatgggagcgtgaagacatag

SEQ ID NO: 187852 - DNA, 2469 bp, synthetic construct
  misc_feature 1..2469: note = Description of Artificial Sequence: Synthetic coding sequence
  source 1..2469: mol_type = other DNA
atggtgagctggggccggttcatctgcctggtggtggtgaccatggcaactttgagcctggcccggcctagcttctccctcgttgaggacaccactctggagcctgaagagcctcccacaaaataccaaatttctcaacccgaagtttacgtagccgcacccggggaatcactggaggtgcggtgtctgttgaaagacgcagccgtcatttcctggacgaaggacggggtgcacctaggacccaacaaccgaacagtactgattggagagtatttgcaaattaaaggagccacacctcgcgactccggactatacgcctgcacggcatcccgcactgtagactccgaaacctggtattttatggtgaatgtaacagatgcgatctctagcggtgacgatgaagatgacaccgacggcgccgaagacttcgtgtcagagaactccaataataaaagagctccttattggactaacactgaaaagatggagaagcgtctacatgccgtgcccgccgccaacactgtcaagttccggtgtcctgccgggggtaacccaatgcccacgatgagatggctcaagaatggaaaagagttcaagcaggaacatcggattgggggttacaaagtgagaaatcagcactggtccctaattatggagagcgtggtcccatctgacaagggcaattatacctgcgttgtagaaaacgaatatggctcaataaaccacacctatcacctagatgtcgtcgagcgctctccacaccgccccatattacaagcaggactccctgcgaacgcttcaacagtggtagggggggacgtggaatttgtgtgcaaggtgtatagcgacgcacagccacatatccagtggatcaagcacgtggagaagaatggctcgaagtacggacccgatggcttaccttacctcaaggtgctgaagcacagtggtatcaatagtagtaacgcggaggtccttgcgctgttcaacgtgacggaggccgacgctggagagtacatttgtaaggtatcgaactatatcgggcaggcaaaccagagtgcttggttgacagtgttgcctaagcagcaggctcctggacgagagaaagaaatcactgcctctcctgactatctggaaattgcaatctattgcattggcgtattcctgattgcgtgtatggtggtaaccgtgattctgtgtcgaatgaaaaataccaccaagaaacctgacttttcctcgcagccagcagtccataaactaactaaacgtatacctctccggcgccaagtgacagtctccgccgagtcctcatcctctatgaactccaacactcccctcgtgcgcattacaacacggctgtccagtactgctgacacacccatgctcgccggcgtctccgaatatgaacttcccgaagaccccaaatgggagtttcccagagataagctaactttaggcaagccactgggcgaagggtgttttgggcaggtagtgatggcggaggccgttggtatcgataaagacaaaccgaaggaggccgtcacagtggccgtgaagatgctgaaagacgacgctacagagaaggatttatctgacttggtgtctgaaatggaaatgatgaagatgattggtaaacacaaaaacattattaaccttctaggggcttgcactcaagatgggcccctgtatgttatcgtcgagtacgcttctaagggcaacttgagagagtatctgcgcgcccgcagaccgcccggaatggaatattcctatgacatcaatagagtacccgaggagcagatgaccttcaaagatctcgtctcttgtacttatcagttggctaggggcatggagtacctagccagtcagaaatgtatccatcgcgatctcgcagccagaaatgtgcttgtgaccgagaacaatgtgatgaagattgccgatttcgggctcgctcgagatattaacaatatagactactataagaagactaccaatgggcgcctgcccgtcaaatggatggcccccgaggcgctgttcgatagagtgtacacccatcagtccgatgtatggtcttttggtgtgctcatgtgggagatattcacactgggaggcagtccgtacccaggaatacccgtggaagagctgtttaaactcctgaaggagggtcaccgcatggacaagcccgctaattgcactaatgaactgtacatgatgatgcgagactgttggcatgccgtcccctcacagaggccaacctttaagcagctggtcgaagatcttgatagaattctgacactgaccacgaacgaagaatatctggatctttctcaacccctggagcagtactcccctagctacccggacacccggtcatcttgttcatctggggacgattccgtgttttcgcccgatcctatgccgtatgagccttgtctgcctcaatatcctcacataaatgggtccgtgaaaacatag

SEQ ID NO: 187853 - DNA, 1515 bp, synthetic construct
  misc_feature 1..1515: note = Description of Artificial Sequence: Synthetic coding sequence
  source 1..1515: mol_type = other DNA
atgacccccagccccctgctgctgctgctgctgccccccctgctgctgggcgctttcccccccgcagctgcagcccgggggcctccaaagatggccgacaaggtcgtgccacggcaggttgctcggcttgggcggaccgtcaggctgcaatgtcctgtggagggggaccccccaccacttacgatgtggacaaaagacggccggaccatccacagtggctggagccgctttagggtgctgccacaggggttgaaagtgaagcaagtggaaagggaggacgctggcgtgtatgtgtgcaaagccaccaatggatttggttctttgtctgtgaactacacgcttgtagttctggacgacatctcccccggtaaggagagccttggccctgacagttcctctggagggcaagaggatcccgccagccagcaatgggctcgccccaggtttactcagcctagcaagatgcgcaggagggtgatcgctcgtcctgtgggttcatctgttcgtttgaagtgcgtggcatccggacatccaagacccgatatcacctggatgaaggacgaccaagccctcaccagacccgaggctgctgagcctaggaaaaagaaatggacactgagtctgaaaaatcttcggcctgaagactctggtaagtacacttgccgggtgtccaatcgtgcaggagccataaatgccacttacaaagtggatgtcatacagaggactagaagcaaaccggtgcttacaggaacacaccctgttaacaccactgtagacttcggcggcacgacctccttccagtgtaaggttcggagtgacgttaagcccgtgatccagtggttgaaaagggtggagtacggggctgaggggcggcataactcgaccatcgacgtggggggacaaaaatttgtcgtactcccaactggcgatgtgtggtcaaggccggacggatcctacctgaacaagcttcttatcacgcgagcgcgccaggacgatgcaggcatgtacatatgtctcggggccaacacaatgggctactctttccggagtgcgtttttgaccgtgttacctgaccccaaaccacccggacctcctgtggccagtagctcttccgcaacttcacttccatggccagtcgttataggtatccccgccggggcggtcttcatcctcgggactctgctactgtggctctgccaggctcaaaaaaagccttgcacccctgcacccgcaccacccttgccaggccaccgcccaccaggcacagcccgggatagatccggtgataaggacttaccatccctagcagcgcttagtgcgggtcctggggttggactatgcgaggaacacggctcacccgcagcccctcagcacttgctagggcctggaccggtagctgggcctaagctctatcccaagctgtatacagatatacacacacacacacatacccacagccacacacactcacacgtggaaggaaaggtacaccaacacattcactatcaatgctag

SEQ ID NO: 187854 - DNA, 1515 bp, synthetic construct
  misc_feature 1..1515: note = Description of Artificial Sequence: Synthetic coding sequence
  source 1..1515: mol_type = other DNA
atgacccccagccccctgctgctgctgctgctgccccccctgctgctaggggctttcccacctgcggctgcagctagaggtcctcctaagatggctgacaaagttgttcccaggcaggtagccagattgggaagaacagtgcgtctgcagtgtccagtggagggcgaccctcctccacttacaatgtggacaaaggacggaaggacgatccacagtggctggagccgtttcagagtcctaccccagggactaaaggttaaacaggtggaaagggaggacgcgggcgtctatgtttgtaaagctacgaatggcttcgggtccctgtccgttaattacacactcgtggtgttggatgatattagccccggtaaggagagcctgggacctgacagctcgtcggggggacaggaggatcctgccagtcaacagtgggctagacctagatttacacagcccagcaaaatgcggcgcagggtaatcgcgagaccggtggggtcatccgtccgactcaaatgcgtcgccagcgggcatccaagaccagacataacatggatgaaagacgaccaagcgcttaccagacccgaggctgcagagccccgcaaaaagaaatggacgctcagcctgaaaaaccttcggcccgaggactctggtaaatacacatgtcgcgttagcaatcgcgctggcgcaataaatgcaacatacaaggtggacgtgatccagaggacccggagtaaacccgtcctcaccggcactcatccggtcaataccacagtggattttggggggactacctcttttcagtgcaaggtgcgatccgacgttaagccagtaattcagtggctgaaacgtgttgagtacggagctgaaggccgccataactctacgatcgacgttggcggccagaagtttgtggtgttgccgaccggagatgtgtggagtaggcctgacggtagctacctgaacaaacttcttataaccagggcgcgacaggacgacgccggaatgtatatttgcctcggggcgaacaccatgggttactcattcaggtcagcatttcttacggtgctgcccgatcctaaacctcctggtcctcctgtggcttctagctccagcgccaccagtctgccttggcctgttgtgattggaattcccgctggcgccgtattcatcctcgggacgcttctgctgtggctctgccaggcacagaagaaaccatgcacccctgcacccgctccgccgcttcctggacaccgccctcccggaaccgcccgagaccggtcaggtgataaggatctgccatcattggccgccttgtcagcgggccctggcgtaggactgtgtgaggagcatggatcccccgctgccccacagcacctcttggggcctgggcctgtcgctgggccaaaactctaccccaagctgtacacggacattcacacacacacacacactcattcccacacacattcacacgtggagggcaaagtgcaccagcatattcattaccagtgctag

SEQ ID NO: 187855 - DNA, 1515 bp, synthetic construct
  misc_feature 1..1515: note = Description of Artificial Sequence: Synthetic coding sequence
  source 1..1515: mol_type = other DNA
atgacccccagccccctgctgctgctgctgctgccccccctgctgcttggcgcctttcctccagctgccgctgccagagggccgccgaagatggctgacaaggtggtgccacggcaggtcgcccggctgggacgaactgtacgcttgcagtgtccagtggagggggatccccctcctttaacaatgtggacaaaggatgggcgaactattcactccggctggtcacgctttcgagtgctacctcaagggctgaaggtgaaacaggtggagagggaggatgcaggagtgtatgtatgcaaggcgaccaatggctttgggtccctcagtgtcaattacacactggttgtgctcgacgacatctcgccaggcaaggaaagcctggggcctgacagcagcagcggcggccaagaagacccagcgtcacagcagtgggctaggccacgtttcacccaaccaagcaagatgcgtcgccgggtgattgcacgccctgtgggcagctctgttagattaaagtgcgtggcctctgggcacccccggcccgatatcacatggatgaaggatgaccaggccttaacccggccagaggctgccgagccccgaaaaaaaaaatggactctgtctctaaaaaatctacgacccgaggatagcggcaagtatacgtgcagggtgtccaatagggcgggcgctattaatgctacatataaagtcgatgtcatccagcgtaccagatccaaacccgttctcacaggcacccatcccgttaataccaccgtagactttggcggcactacttcctttcaatgtaaggtgcgttccgatgtgaagcccgttatacagtggctgaagcgcgtggagtatggcgctgaaggccgacacaatagcaccatcgacgtgggagggcagaaattcgtggtgttgccaacaggtgacgtctggtcgcggcctgacggatcatacttaaacaagctcctgattaccagagcaaggcaggatgatgccggcatgtacatttgtctgggggctaatacgatgggctacagcttccggtccgccttcctgaccgttttgcctgatccgaagcctccaggccccccggtcgcctctagcagctcggctacatctttgccctggcccgtcgtcatcggaatcccagccggagcggtcttcattctcggtaccctcctactgtggctatgtcaagcccagaaaaagccttgtacccctgcacccgcaccacccttgcccggacaccgcccaccggggacagcccgagatagatcaggggacaaggacttaccgtccctggccgccttaagcgcgggaccgggggtgggactgtgcgaagaacacggttcgccagctgctccacagcacctactcggaccaggcccagtggcggggccaaaactgtatcctaaactttatactgacattcacactcatactcatactcattcgcacactcattcccacgtggaggggaaagtgcaccagcacattcactatcagtgctag

SEQ ID NO: 187856 - DNA, 459 bp, synthetic construct
  misc_feature 1..459: note = Description of Artificial Sequence: Synthetic coding sequence
  source 1..459: mol_type = other DNA
atgacccccagccccctgctgctgctgctgctgccccccctgctgctgggggcttttccccccgccgcagccgctcggggcccccccaaaatggccgataaagttgtaccccggcaggtcgcccgtcttggcaggaccgtaaggttacaatgcccagtggagggggacccaccgccattgacaatgtggaccaaggatgggcggactatccactccgggtggtctcggttcagggtccttcctcagggcctgaaggttaagcaggtcgaaagggaggatgccggagtgtatgtctgtaaggctactaacgggttcgggtctctttctgtaaattacactttggtggtgctagatgatatctcacccgggaaagagtctttgggcccggactcaagcagcggcggccaggaagaccccgcttctcagcaatgggcccgccctcggttcacccagccttag

SEQ ID NO: 187857 - DNA, 1515 bp, synthetic construct
  misc_feature 1..1515: note = Description of Artificial Sequence: Synthetic coding sequence
  source 1..1515: mol_type = other DNA
atgacccccagccccctgctgctgctgctgctgccccccctgctgttaggagcgttccctccagctgcagcagctcggggaccgcccaagatggccgacaaggttgtaccacgtcaagtcgctcgacttggtaggactgttcggttacagtgcccagtggaaggggaccctccccctctgactatgtggacaaaggatggccgaactattcatagtggttggtcacgctttagggtcctccctcaaggcttaaaagtaaaacaggtcgagagggaagacgccggcgtgtacgtgtgtaaggccacgaacggcttcgggtctttgtctgtgaattacaccttggtggttcttgatgacattagcccgggcaaggagagtctgggacctgattcatcctccggaggccaggaggatcccgcatcgcaacaatgggcccgaccacggttcactcagccttccaaaatgaggagacgagtgatcgcacggcccgtcgggagctcggtacgtcttaagtgcgtcgcctctggtcatcctcggcctgacataacttggatgaaagacgatcaggcccttaccagaccagaggccgccgaaccacggaagaagaagtggacgctctctcttaagaatctgcggcccgaggatagtggcaagtatacttgtagagtaagtaacagggcaggcgcaattaatgcaacttacaaagtcgatgtcattcagcgcacaagatctaagccagtgctgacaggcacccaccctgttaatactactgtcgatttcggcggcacgacctcttttcaatgcaaagtgaggtctgatgtgaaaccagtgatacaatggcttaagagagtagagtatggtgccgagggcagacacaacagcacaatagatgtcggaggacagaaattcgttgtgctcccaacgggcgacgtctggtctaggcctgatggctcatatctgaacaaactgctaattaccagggccaggcaggatgatgccggtatgtacatttgtttaggcgctaacaccatgggctattcattcagatctgccttcctgaccgtcctgcctgaccctaagccccccggtccacctgttgcttcgagcagcagcgcaacctctctcccctggccagtggtcatagggattccagcaggagccgtgttcatcctaggcaccctgctgctgtggctctgtcaggcccagaaaaaaccatgtacgccagcgcctgcccctcccctccctgggcataggccgccagggacagcccgcgatcgcagtggagacaaggatctaccttctctggcagccttatctgctggccctggagtgggcctgtgtgaggagcatggctcccccgctgccccacaacacctcctgggccccgggccagtggccggtcccaagctgtaccctaagctttatacagatatccatactcacacacacacacactctcacactcacagccacgttgagggcaaagttcatcagcatattcactaccagtgctag

SEQ ID NO: 187858 - DNA, 243 bp, synthetic construct
  misc_feature 1..243: note = Description of Artificial Sequence: Synthetic coding sequence
  source 1..243: mol_type = other DNA
atgacccccagccccctgctgctgctgctgctgccccccctgctgctgggcgcctttccaccagcagcggccgccaggggccccccaaaaatggccgacaaggtagtgcctagacaggtggcgaggctaggcaggacagtgagattgcagtgccccgtggagggagatccgcccccacttaccatgtggactaaagatggtagaaccatccattccggctggtccaggtttcgtgtgctgtag

SEQ ID NO: 187859 - DNA, 1326 bp, synthetic construct
  misc_feature 1..1326: note = Description of Artificial Sequence: Synthetic coding sequence
  source 1..1326: mol_type = other DNA
atggccgacaaggtggtgccccggcaggtggcccggctgggccggaccgtgagactccaatgcccagtagagggagatcccccaccactgacaatgtggacaaaggacgggagaacgatccattctggttggtctaggttcagggtcctcccccaaggcctaaaggtgaagcaggtggagagagaagatgcaggcgtgtacgtttgcaaagccacaaacggatttggctccttatccgtcaattacactctggttgtgctggatgatatcagcccagggaaggagtctctgggaccggattctagctcagggggccaggaggatccggcctcgcagcagtgggcccgccctcggttcacccagcccagtaagatgcggcgacgagtaattgcaagacccgtgggctcctctgtacgcttgaagtgtgttgcttctggccatccacggcccgacataacctggatgaaggatgaccaggcccttaccagacctgaagccgcagagcccagaaaaaagaagtggaccctctccctcaagaacctacggccagaggacagcgggaagtacacgtgtagagtgagtaacagggcgggggccattaatgccacctacaaagtggatgtgatacagcgcactaggagcaagcctgtcctcaccggcacccacccggtgaataccaccgtcgacttcgggggaacgacatctttccagtgtaaagtacgatccgatgtcaagccagtgatacagtggctgaagcgcgtggagtacggcgcggaaggcagacataactccacaatcgacgttgggggacagaaatttgtcgttttgccaaccggagacgtctggtcccgcccagacggaagttacctcaataagcttctaattactagagccagacaagatgatgcaggtatgtatatttgcctgggggctaatacaatgggctactcatttagatccgcttttttgacagtgttgcctgacccaaagccgcctgggcctccagtcgccagttcttcaagcgccaccagcctgccctggcctgtggttattggcattcccgcaggggctgtgtttatcctcggtacactgcttttgtggctctgtcaggctcagaaaaagccttgcacacctgcgcccgccccaccactcccaggccaccggccccccggcactgcaagggatcgctcaggcgacaaggatttaccgtcacttgcagccctgagtgcaggtcccggagtgggtttgtgcgaagagcacggctcaccggcagctccacagcaccccaccgtagtggtagctccagatttgtgcaatttcatgtag

SEQ ID NO: 187860 - DNA, 1131 bp, synthetic construct
  misc_feature 1..1131: note = Description of Artificial Sequence: Synthetic coding sequence
  source 1..1131: mol_type = other DNA
atgcagtggaccagcctgctgctgctggccggcctgttcagcctgagtcaggcacagtatgaagacgatccccactggtggtttcactatctgcgaagtcagcagtcgacttattatgatccttacgatccgtacccatacgagacgtatgagccgtacccatacggagttgatgagggcccagcctacacttacggaagtccctctcctcccgatcctcgggattgtccacaagagtgtgactgtccgccaaacttccctaccgccatgtattgcgataacagaaatttgaaatacctccctttcgtcccttcaaggatgaagtacgtgtatttccaaaataatcagataactagcatccaggagggggtgtttgacaatgccacagggctgctgtggatcgctctgcacggtaaccagatcaccagtgacaaggtcggtcggaaagtgtttagcaagttgagacacctcgaacggctgtatctcgaccacaacaatcttaccagaatgcccggaccactccctcgctcgctccgggaacttcacctggaccacaatcaaatttctcgcgtgcccaacaacgccctggaaggcctggagaatctgactgcactatatctgcagcataacgaaatccaagaggtgggctcctcgatgagagggctacgatccttgatcctgctggacctgtcgtataaccacctgcgcaaagtgcccgacggattacccagcgcccttgaacagttgtacatggagcacaataatgtgtacacagtcccagactcctattttcggggggctcctaagctgctgtacgtcaggctctcccataactcattaaccaacaatggcctcgcctccaatactttcaattccagcagtctgctggagcttgatctgtcctacaaccagttgcagaagataccaccggtgaataccaacctggagaacctctacctacaaggcaacagaatcaatgagttcagcatttcctctttctgtacagtggtcgatgttgtgaattttagtaaactccaagtcctccgcctggacgggaacgaaattaaaagatccgccatgccagccgacgcccccttatgcctgaggcttgcatccctgatcgaaatttag

SEQ ID NO: 187861 - DNA, 1092 bp, synthetic construct
  misc_feature 1..1092: note = Description of Artificial Sequence: Synthetic coding sequence
  source 1..1092: mol_type = other DNA
atgcagtggaccagcctgctgctgctggccggcctgttcagcctgtcccaggcccagtatgaggatgacccccattggtggttccattatttaagatcgcagcaatccacctattacgatccttacgatccatacccctacgaaacctatgagccatacccctacggggtcgatgagggccccgcttatacctacggaagtccctcaccacccgatcctagagactgcccccaggaatgtgactgccctccaaacttcccaccttttgtgccatcccggatgaagtacgtgtatttccaaaacaaccaaatcacatctattcaagaaggcgtgttcgacaacgcgaccggcctcctgtggatagctctgcacgggaaccagatcacgtctgataaagtgggaaggaaggttttctccaagcttcgccatttagaacgtctgtaccttgatcacaataacttgacaaggatgccgggccctctgccacgctccttgcgcgagcttcatctggaccacaaccaaatcagcagggtacccaacaatgccttggagggtctggaaaacttaactgcgttgtacctacagcataacgaaattcaggaggtaggttcaagcatgcggggcttacgaagtctgattttactcgaccttagctataaccatctgaggaaagttccggacggtttaccctccgcactcgagcagttgtatatggaacataataacgtgtacacggtgcccgactcctactttcggggcgctcccaaactgctatatgtccgactgagccataatagcttgactaataacggcctcgcgtcaaacacgtttaactccagctccctgctagaattagacctttcttataaccagctgcagaagatcccaccagtgaataccaacctagagaacctgtacctgcagggaaaccgtattaatgagttcagcatcagcagcttttgtaccgtggtggatgtcgtgaacttttcgaaactgcaagtgctgaggctcgatgggaatgagattaagcggagtgccatgccggcagatgccccactttgtctcagattagcctcattgatcgagatttag

SEQ ID NO: 187862 - DNA, 594 bp, synthetic construct
  misc_feature 1..594: note = Description of Artificial Sequence: Synthetic coding sequence
  source 1..594: mol_type = other DNA
atgaagatgaccctgatcggcggcagcaccaccagcgccgccagctctccccccaccactattccgatgacattgacacggatgcggcccaccagtctaacgcccatggggtggatgaagggtcagcccacaccaactgccctgcatcctctacagatccctgctacagcaccaaggagcgctactgcgcatcctacctctacagcaatgtactgcgacaataggaacttaaaatacctgccattcgttcccagccgaatgaaatatgtgtacttccaaaataatcagattactagtattcaggagggagttttcgacaacgctactggcctgctgtggatcgctctgcatgggaatcagatcacctccgacaaggtgggtcggaaagtcttctccaaattgagacacttagagagactctacctggaccataataatctgacccgcatgcccggacccttgccaagatccctgcgcgagctgcatttggaccacaatcagatttcacgcgtcccaaacaacgcgctggagggccgtacaagccggccatgcacctccaatactatgagaagtaggaagtgggctgtcccctag

SEQ ID NO: 187863 - DNA, 2025 bp, synthetic construct
  misc_feature 1..2025: note = Description of Artificial Sequence: Synthetic coding sequence
  source 1..2025: mol_type = other DNA
atggtggtggcccaccccaccgccaccgccaccaccacccccaccgccaccgtaactgccaccgtcgtgatgaccacagctacaatggatttacgcgattggctgtttttgtgctacggacttatcgccttcctcaccgaagtcattgactccactacatgtccttctgtatgcaggtgcgacaacggatttatttattgtaacgaccggggactgacgagcattcccgcagatatccccgatgatgccaccaccctatatctgcagaacaaccaaatcaacaatgctggaatacctcaggatcttaagacgaaggtcaacgtacaggtgatttacctgtatgagaatgatctggacgaattcccaattaacctgccaagatcactgagggagctacacttgcaagataacaatgtgcgaaccatcgcgcgcgatagtctggcaaggatcccactcctggagaagttgcacctcgatgataattctgtgtccaccgtctcaattgaagaggatgccttcgctgactctaagcagctgaagctattgttcttgtccaggaatcacctaagctctattccttctggactgccgcacaccctggaggaattaaggctggatgacaacaggatttctactattcctctccacgccttcaaggggcttaattccctaagaagactggtcctagatggaaatttactggctaaccagaggatcgccgatgataccttctcccgacttcaaaacctgacagaactaagcctggtcaggaatagtctagccgctccaccactgaatttgcccagtgcccatctgcagaagctgtatttacaagacaacgccatttcacacatcccgtacaatactctcgctaagatgcgtgaacttgagcgactggatctgtcaaataataacctgaccactttaccccgcggcctcttcgacgacctgggaaatttggcccagttgttgctgaggaacaatccctggttctgcgggtgtaacctgatgtggctgagggattgggtgaaagctcgggcagccgtcgttaacgtgagggggctcatgtgccaggggcctgagaaggtgcgagggatggccataaaagatattacatctgaaatggatgagtgtttcgagacaggcccccagggcggtgtcgcaaacgcagcagcaaagacaacagccagtaatcacgcctccgccaccaccccacaggggagtctgtttacccttaaggctaaaagaccagggctcagactgcccgacagcaatattgactaccctatggcaacaggagacggcgcaaagacattagcgattcatgtcaaggctctcacggcagacagtatacggatcacctggaaagctactctccctgcaagcagtttcagactcagttggcttagacttggccactcaccagcagtgggttcaatcacagaaaccctggtgcagggcgataagactgagtacctgttaacagcactggagccaaaatctacctacattatttgtatggtgacaatggaaacatctaatgcttatgttgccgatgagactcccgtctgcgcaaaggctgagaccgccgactcttacggacccactacaacgctcaaccaagaacagaacgccggccctatggcctctctgcccttggcaggaattatcggtggcgctgtggcgctggtgttcctgtttcttgtgcttggcgcaatttgctggtatgtacatcaggccggggagcttctgaccagagagcgggcgtataacagaggtagcagaaaaaaggatgattacatggaaagcggcaccaagaaagacaactcgatactcgagatacgaggacccggactccagatgctgcctattaatccatacagagctaaggaggagtacgtcgtgcacacaattttcccttcaaacggaagcagtctgtgcaaggcgacccatacgattggatatggtacgactagaggttatcgtgacggaggaatcccagatatcgactattcttacacctag

SEQ ID NO: 187864 - DNA, 1983 bp, synthetic construct
  misc_feature 1..1983: note = Description of Artificial Sequence: Synthetic coding sequence
  source 1..1983: mol_type = other DNA
atgggcctgcagaccaccaagtggcccagccacggcgccttcttcctgaaatcatggcttataatcagtcttgggttgtattcccaggtatccaagctgttagcctgtccctccgtgtgtaggtgcgatcgtaacttcgtgtactgcaacgagagatctttgacatcagtaccactgggcatcccggaaggcgtgacggtgctctaccttcacaataaccagataaataatgctggcttcccggcagaactccacaacgtgcagtccgtgcatacggtttatctgtatggcaatcagctggatgagttcccaatgaatttgcctaaaaatgttagggtcctacacttgcaggagaacaacattcagactattagccgcgccgccttggcacagctcctgaaactggaggagctacatttagacgataacagcatcagtactgtgggcgtggaggacggcgcattccgggaagctatcagcctcaaactgctatttctttctaaaaaccacctgtctagcgttcccgttgggttgccagtagacctgcaagagctgagggtagatgaaaacagaatcgccgtgataagtgacatggccttccaaaacctcacttcactcgaaagattgatcgttgacggaaacctgctcaccaacaaggggatcgctgagggcactttcagtcacctgactaaactgaaagagttttccattgtgcggaactccctatctcatcctccccctgaccttcctggaacgcatctgattaggttatatctgcaggacaatcagatcaatcacattcctcttactgctttctcaaatcttagaaagcttgagcgactggatatctccaacaaccaattacggatgcttacccagggcgtatttgataacctttcaaatcttaaacaactcacagccaggaacaatccctggttttgcgattgttccattaaatgggtgaccgagtggctgaaatacattccatcttcccttaacgtacggggtttcatgtgtcaaggacctgaacaggtgcggggcatggcagttagggaactgaacatgaacctgctgtcctgcccgactacaaccccaggactcccccttttcacacccgccccatcaaccgcttctccgaccacccagccccccacgctcagcatcccgaaccccagcagaagctacaccccgccaaccccgacaacctctaaattaccaaccatccccgactgggacggccgggagagagttacccctcctataagcgagcggattcagttaagcattcattttgttaatgacacatccattcaggtgagttggctttcattatttaccgtcatggcatataagctgacatgggtgaagatgggccatagccttgttgggggaatagtccaggaaagaatcgtctcaggagagaagcagcacctgtcactggtaaatctggagcctcgatccacataccgaatctgcctggtacctttggatgcttttaattacagagccgtcgaggacacgatctgttctgaggccactacccacgcgtcatatctcaataatggtagcaataccgctagtagtcatgagcagaccacctctcactccatgggttcaccattcctgctggctggcctcattgggggggctgtgattttcgtcctggtggtcctgctgtccgtgttttgttggcatatgcacaaaaagggaaggtacacgtctcagaaatggaagtataatcgcggtagacggaaggacgattactgcgaggcaggtaccaaaaaagacaatagtattctggagatgacggaaactagctttcaaatagtgtcacttaataacgaccagcttcttaagggggacttcagactacagcctatctacacacccaatgggggcattaattacaccgactgtcacatcccgaataatatgcgctattgcaactcctccgtgcctgacctagaacattgtcatacgtag

SEQ ID NO: 187865 - DNA, 942 bp, synthetic construct
  misc_feature 1..942: note = Description of Artificial Sequence: Synthetic coding sequence
  source 1..942: mol_type = other DNA
atggccgtgcgggagctgaacatgaacctgctgagctgccccaccaccacccctggcttacctttgttcacccctgcaccttccaccgcctccccaaccactcagcctccgaccttatcgatccctaacccgtctcgaagctacacaccacctacgccgacgacctcaaagctgcccacaatacccgattgggacggtagggagcgggtgacccccccaatctctgagagaatacagctaagcattcactttgtgaacgacaccagtatccaggtttcttggctaagcttgtttactgtgatggcgtacaaacttacgtgggtcaaaatggggcactcacttgtaggtggcattgttcaggaacgcatcgtgtctggcgaaaaacagcatctgtctttagttaatctcgagccacgctctacgtacaggatctgtctcgtgcctttggacgcctttaactatagagctgtggaggataccatttgctctgaagcaaccactcacgccagttatttgaataacggctctaacactgcatcctctcacgagcagactacttcccactcaatgggcagcccgttcttactggctgggcttattgggggtgccgtaattttcgtcctggtggttctcctcagcgtgttttgttggcacatgcataaaaaaggaagatacaccagtcagaagtggaaatacaaccgggggcgccggaaggatgactactgcgaggccggcaccaagaaagacaactctattctggaaatgaccgagactagctttcagatcgtgtcactaaacaatgaccagctcctgaagggtgactttagactgcaaccaatctacactcccaatgggggcatcaactatacggactgtcatattcctaacaatatgcgatattgcaattcgtcagtgcccgacctggagcattgtcacacatag

SEQ ID NO: 187866 - DNA, 1983 bp, synthetic construct
  misc_feature 1..1983: note = Description of Artificial Sequence: Synthetic coding sequence
  source 1..1983: mol_type = other DNA
atgggcctgcagaccaccaagtggcccagccacggcgccttcttcctgaagtcctggctcattatatcattgggcttgtattcacaggtgtcgaaactgttggcctgcccctctgtttgccggtgcgacagaaacttcgtgtattgtaatgagaggtctctgacctccgtccccctgggcatcccagagggagtgaccgtgctgtacttgcacaacaaccaaataaacaacgccggttttccagctgagctgcacaatgttcagtctgtgcacactgtctatctctacggaaatcaattagatgagttccctatgaatctcccaaaaaacgttcgggtcctgcacctgcaagaaaataacatccagactatctctagggccgctcttgcccaactactcaaactagaagaactgcacctggatgacaacagcatttccaccgtaggggttgaggacggggcgtttcgcgaagctatttctctaaaactgctatttctctccaagaaccacttgagttcagttcccgtggggttacctgtggatcttcaggagcttcgcgtggacgagaacagaattgctgtcatctccgacatggcctttcaaaacctaacctctctggaaagactcatagtcgatgggaacctgctgacgaataaggggattgctgaaggcaccttctcgcacctgactaagctaaaggagttttccattgtgcggaactctctgagtcacccgccccctgaccttcctgggactcacctaatccgactttatctgcaggacaatcagattaatcacattccactgacggcattctctaatctgcgcaagcttgagcgactggacatatccaacaaccagttgaggatgctgacgcagggggttttcgacaacctgagcaacctgaagcagctgacggcccgaaacaatccatggttttgcgattgttcaatcaaatgggttacagagtggctgaaatacatccccagttcattgaacgtgagaggctttatgtgtcaaggcccagagcaggttagaggcatggccgttagggagctcaacatgaacttattgagctgccctaccacgacgccaggcctgcctttgttcaccccagcacccagcaccgccagcccaaccacacagccgcccacgctgtctattcccaatcctagcagaagctatacccctcctactcccacaactagtaagctcccaacaatccctgattgggatggacgagagagggttacccctcctattagtgaacgaatacagctgtccattcacttcgtcaacgatacaagtatccaggtctcttggttgtcgttatttaccgtgatggcatacaagctcacatgggtaaagatggggcatagcctggtcggcggcattgtgcaggaaaggatcgtgtccggcgagaagcagcatctcagtttggttaaccttgaaccacgatccacatacaggatttgcctggtgcctctagacgcgtttaactaccgcgctgtggaagatacaatctgtagtgaggccacaacacacgcttcctacttgaataatggttcaaacaccgcatcaagtcatgagcaaaccacctcccactcaatgggtagtccgttcttgctggccggactcatcggaggagccgttatctttgtgctggtggtcttgctcagcgtgttctgctggcacatgcacaaaaaggggcgctacacgtcacagaaatggaaatataaccggggccgaagaaaggacgactactgcgaggcagggacaaaaaaggataattcaatccttgaaatgactgagacttcttttcagattgtgagcctgaacaacgaccagctgctgaaaggggactttaggctgcagcccatatatacgcccaacgggggcatcaactacacagattgccacatcccgaataatatgcgttactgtaacagctcagttcctgacctggagcattgccatacatag

SEQ ID NO: 187867 - DNA, 1950 bp, synthetic construct
  misc_feature 1..1950: note = Description of Artificial Sequence: Synthetic coding sequence
  source 1..1950: mol_type = other DNA
atgatcagcgccgcctggagcatcttcctgatcggcaccaagatcggcttgtttctccaggttgctcccttgtcggtcatggccaagagctgtcccagcgtatgccgctgtgacgctggcttcatttactgtaacgacaggtttctcacttccataccgactggcatccctgaagacgccaccacactgtacctccaaaataatcagataaataatgcaggcatacctagtgatcttaagaatctactcaaagtcgagcgaatctatctttatcataattctcttgatgagttccctacgaacttgcctaaatatgtcaaagagctacaccttcaagaaaacaacattcggaccattacctacgattctttatcaaagattccatacctggaagaattgcacctcgacgataatagcgttagcgccgttagcatagaggagggagcgtttcgggactcgaactatctgaggttgctatttctgagtcgaaaccaccttagcacaataccttggggcttgcctcgcacaatcgaggagctgcggctggatgacaatcgcatcagcacaatttctagtccatcacttcagggcttaacctctctgaagcggctcgtactggacgggaatcttctgaataaccacggccttggcgataaagtgtttttcaatcttgtgaatctcacagagctgagccttgtgcgaaactcactgacggcggcgcccgtaaaccttcccggcactaacctgcgaaaattgtatctacaggacaaccacatcaacagggtcccaccaaacgccttctcctacctgagacagttataccgcctcgatatgtctaataataatttgtccaacttgcctcagggtatttttgatgaccttgacaatatcactcaactgatcctgaggaacaacccctggtattgcggatgcaagatgaagtgggtcagggactggctacaatctctgccggtgaaagtaaacgttagaggtctcatgtgccaggcgcccgagaaggtaagaggtatggctattaaggatcttaacgccgaactctttgattgtaaggattccggtatcgtaagcactatacagatcaccactgcaatccccaacacagtgtatccagctcagggacagtggccagcgcctgtgaccaaacagcccgacatcaagaacccaaagctgacaaaggaccaccagactaccggctcacccagtaggaagacgatcacaataactgtcaagtcagtgaccagcgatacaattcatataagctggaagctcgcattgccgatgacagcgttgagattaagctggctgaagttgggtcattcacctgcttttggctccattactgaaaccatcgtcacgggagagagatcagagtatctggttacagcgctggagccggactctccttacaaagtgtgcatggtgcccatggaaacatcaaatctgtacctttttgacgagactccggtgtgtatcgagaccgagactgctcctctgcggatgtacaatcccaccaccaccctcaaccgggagcaggaaaaggagccatacaagaatcctaatcttcccctggccgctattattggaggagcagtggccctagtgactatcgcactgttggcattggtctgttggtacgtacacaggaatggttctcttttctccagaaactgcgcatattcaaaggggaggaggagaaaagatgattatgcggaggctggcactaagaaagataactccattctcgagatcagggaaactagtttccagatgctgcctatcagcaacgagcccataagtaaagaagaatttgttattcacaccatttttcctccgaatgggatgaacctgtataagaataaccatagcgaatcaagttctaaccgctcttatcgagactctggcatcccagactcagatcattcccactcatag

SEQ ID NO: 187868 - DNA, 1950 bp, synthetic construct
  misc_feature 1..1950: note = Description of Artificial Sequence: Synthetic coding sequence
  source 1..1950: mol_type = other DNA
atgatcagcgccgcctggagcatcttcctgatcggcaccaagatcggcctcttcctgcaggttgctccactgtctgttatggccaagtcctgtccctctgtttgtcgctgcgacgcggggttcatctattgtaacgacaggttcctcactagcataccaaccggcattccagaggacgccacgacactttatttgcagaataaccaaattaataatgccggtatacccagcgatctgaaaaatctgctgaaagtggaacgaatttacctgtatcacaattcattggacgaattccccaccaaccttcccaagtatgtcaaggagctgcacctccaggagaacaatataagaactattacatacgattcattgagcaaaatcccctatctggaggagttgcatctggacgataactcagtgagcgctgttagtattgaggaaggggcttttcgcgacagcaactatctcaggcttctgttcctgtcccggaatcacctgtctactatcccatggggcctccctcgaaccatagaagagctgaggctcgacgacaaccgtatttcaactatttccagtcctagcctccaaggacttactagtttgaagaggctggtgttagatggcaacctccttaacaaccatggcttgggagacaaagtgttttttaatttggtaaatctgaccgagctgtctctggttagaaactcactgacagcggctcccgtgaatctacctggcaccaatctaaggaagctgtatctgcaagataaccatattaatagagtgccaccgaatgctttttcatacttacgccagttgtaccgcttagatatgtctaataataatctctccaacctcccccagggaatcttcgacgacctggacaacattacccaactgatccttcgtaataacccatggtactgtggctgcaaaatgaaatgggttcgtgactggctccagtcgctgccagtgaaagttaacgttagggggttgatgtgtcaagctccagagaaggtaaggggaatggccatcaaagatctgaatgctgaactgtttgactgcaaggattcaggtatcgtgtctactattcaaattaccactgccattcccaacaccgtgtaccccgcacaagggcagtggccggcaccggtgacaaaacaacccgatatcaagaaccccaaacttaccaaagaccaccagaccaccggctccccaagtcgaaagactatcactattacagtgaagagtgtgacaagcgacacaatccacatctcctggaagctcgcccttcctatgactgccttgcggttgtcatggctcaagctgggacattcccccgcatttggctccattacagaaacaatcgtgaccggagagcggtcagagtaccttgtcaccgccctggaacccgattccccatataaggtgtgtatggtgccaatggagacatctaacctttatctgtttgacgagactccagtctgtatcgagacggaaactgcaccactgcgcatgtacaatcccaccaccacgcttaatcgcgagcaggagaaggaaccttataagaaccctaacctgcccctggccgccattatcggtggtgcagttgctcttgtgacgatagcgctgctcgctttagtatgctggtatgtgcaccggaacggaagcctgttctccaggaactgcgcatatagcaaaggacgccgacgcaaagacgactatgccgaagccggaaccaagaaagacaattctatcttggagatccgggagacctctttccagatgcttcctataagtaacgaacccatcagtaaggaagagttcgtaattcacacaattttcccgccaaatggtatgaatctttataaaaataaccattctgagtctagctcaaacaggtcttacagagactcagggatacctgactccgatcacagccattcctag

SEQ ID NO: 187869 - DNA, 1884 bp, synthetic construct
  misc_feature 1..1884: note = Description of Artificial Sequence: Synthetic coding sequence
  source 1..1884: mol_type = other DNA
atgatcagcgccgcctggagcatcttcctgatcggcaccaagatcggcctgtttctgcaggtagcaccgctaagcgtgatggccaagtcctgtccttcagtgtgtagatgcgacgcaggcttcatctactgtaatgacagattcctaacatccatccccactggaattccggaggacgctactacgctctatcttcagaataatcagattaacaacgctggaatcccatccgatttgaagaatctgctcaaggtggagaggatttatctgtatcacaactctctggacgagtttccaacaaaccttccaaagtacgtcaaagagctccacctgcaggaaaacaacatacgtaccatcacgtacgactccctgtccaaaatcccatatcttgaagaactgcatttagatgataatagtgtttctgctgtcagcatagaagaaggcgccttcagagactcaaattaccttcgcctcttgtttctttcacgcaaccacctcagcacaattccctggggcctgcccagaaccatcgaggaactcaggctggatgataatcgcatttccacaatctccagcccatctctccagggactcacttccctcaaacgcctcgtcctggacggaaacttgctgaataaccacgggctgggcgataaagtattctttaatctcgtgaatttgactgagcttagcctcgtgagaaattcattgaccgccgcgcccgtgaacttaccagggactaacctgcggaagttgtacctccaggacaatcacatcaatcgcgtgccacccaacgccttttcgtatcttaggcaattgtaccggctagacatgtccaataacaacctgtcaaatctgccgcagggtatcttcgatgaccttgataacatcacacagctgattttaaggaacaacccgtggtattgcggatgcaaaatgaaatgggtgcgggactggctgcagtccctcccagtcaaggtcaatgtccgtggcctgatgtgccaggcccctgagaaggtgagaggcatggcaatcaaagaccttaacgctgaactgtttgattgcaaagacagcggcattgttagtacgattcagatcaccaccgccatcccaaatactgtctatccggcacagggccagtggccagcacctgtgacaaaacaacccgatattaagaaccccaaactcactaaggaccatcagacaaccgggtcacctagccgcaagaccattactatcaccgtgaagagcgtgacaagtgataccatacatatcagttggaaacttgctctgcccatgacagctctacgcctgagctggttgaaactaggccattctcccgctttcggcagcattaccgaaactatagtaaccggagaacgctccgagtatttagttaccgccctggagcccgacagtccgtacaaggtgtgcatggttccaatggagactagtaacctttatttgtttgacgaaactcccgtgtgcattgagactgaaacagcccctctcagaatgtacaaccccacaacaactctgaatagagaacaggaaaaggaaccctataagaatccaaacttacccctcgcggctataattgggggggccgtcgcactggtgactatcgcactgcttgccctggtctgctggtacgtccatcgcaacgggagcttgttttctagaaactgcgcttactccaagggacgccggaggaaagatgactatgcagaagcaggcaccaagaaggataattccattttggagatcagagagacaagtttccaaatgcttccaatttccaacgaaccgatctcaaaggaggagttcgtcatccacaccatattccctcctaacggtatgaacctctataaacagtcccagtag

SEQ ID NO: 187870 - DNA, 402 bp, synthetic construct
  misc_feature 1..402: note = Description of Artificial Sequence: Synthetic coding sequence
  source 1..402: mol_type = other DNA
atgccccccagcaagccccacccccccgtggtgggcaaggtgacccaccacagcatagaactgtactgggatcttgaaaagaaggctaagagacagggaccacaggagcagtggttccggttttcaattgaggaggaggacccgaagatgcatacgtacggcatcatctacacaggatacgctactaaacacgtggtcgaggggctcgagccccgtactttatacaggtttaggctaaaggtgacctccccttcaggcgagtgcgagtatagtccactggtgtctgtttccaccacgagtagcatctggctgggaggggagccaatttcctcggaacatctccatcgggctgtctctgtgaatgatgaagatttactggtgcggatcttgcaaggcggctag

SEQ ID NO: 187871 - DNA, 849 bp, synthetic construct
  misc_feature 1..849: note = Description of Artificial Sequence: Synthetic coding sequence
  source 1..849: mol_type = other DNA
atgccccccagcaagccccacccccccgtggtgggcaaggtgacccatcactcaatcgaactgtattgggacctcgagaaaaaagccaagcgacaaggcccccaagagcaatggttccgttttagtatcgaggaggaggaccccaagatgcatacatacggcatcatctacactgggtatgctaccaagcacgttgttgagggcttggaaccaagaactctgtacaggttccgtctcaaggttacttccccaagcggtgaatgcgagtatagccctctggtttcagtcagtacaacctctagcatctggcttggcggggaaccgatttcttcagagcatttgcaccgggccgtgtccgtgaacgacgaagatttgttagtgagaatactgcagggtgggcgggtgaaggtcgacgtacccaacaaattcggattcaccgccctcatggttgcagcccagaagggatacacaagtttgatgctggcgtgctacgccggccacctggatgttgtaaagtacttacgcagacacggtgcctcctggcaagcacgagatttggggggctgcaccgccctgcactgggccgcagacggggggcactgttctgtgatcgagtggatgattaaggatggttgtgaggtagacgttgttgacaccgggagcggctggacccccttaatgcgggtatcggccgtgagcggcaaccagagagtcgcttcattgctcatcgacgccggcgcaaacgttaatgtgaaagaccggaacggaaaaacccctctgatgtcggtggtcagcttgttggaagagagaaaaaagaagcagcggccaaaaaaatcttgtgtatgctag

SEQ ID NO: 187872 - DNA, 1116 bp, synthetic construct
  misc_feature 1..1116: note = Description of Artificial Sequence: Synthetic coding sequence
  source 1..1116: mol_type = other DNA
ctgcagaagcagaagatcatgccccccagcaagccccacccccccgtggtcggcaaggtcacacatcactctatcgagctgtactgggacctggagaagaaggccaaaagacagggcccgcaggaacagtggtttagattctccatcgaggaggaagaccccaagatgcatacctacggcattatatatacaggctatgctacgaaacacgttgtcgaaggcctggaacccagaaccctgtataggtttcggttgaaggtgactagccccagcggcgagtgcgaatacagccccttagtgagtgtcagcaccacaagacctagcctgtccaaatcactggtgaagattagaatggtgaccagcgtgctgcacgggccccctaccgagaataccggagaacccatttcttcggagcatctacatcgggcagtaagcgttaacgacgaggacttgctcgttcggatcctgcagggtgggagagtgaaggtggatgttcccaataaatttggattcaccgcgcttatggttgcagcgcagaaaggctacacacgtctcgttaagattcttgtcagcaacgggacagacgttaaccttaagaatggctccggtaaggactccttaatgctcgcctgttacgctgggcacttggacgtggtgaaatatctaagacgccacggagcttcttggcaggccagagacctgggaggctgtactgccttacattgggccgctgatggcgggcactgcagtgtaatcgagtggatgatcaaggatggctgcgaagtggacgtggtcgataccggtagtggctggactccgctgatgagagtgagcgctgtttctgggaatcagcgagtggcctcgctgctgattgacgcaggggccaacgtcaacgttaaagatcgcaatggcaaaacccccctgatggtcgcagtcttgaataaccacgaggagctggtccagctactgttggacaagggtgccgacgcatccgtaaagaatgaatttggcaagggcgtgctggagatggccagggtgtttgatagacagtcagtcgtgagcttgttagaagaacgcaagaaaaaacaacgaccaaaaaagtcatgtgtatgttag

SEQ ID NO: 187873 - DNA, 1038 bp, synthetic construct
  misc_feature 1..1038: note = Description of Artificial Sequence: Synthetic coding sequence
  source 1..1038: mol_type = other DNA
atggagccccagaagatcatgccccccagcaagccccacccccccgttgtgggcaaggtcacccatcactccatcgaactgtactgggacctcgaaaaaaaagctaaaagacagggcccacaggagcaatggtttcgttttagtatcgaggaagaggacccaaaaatgcacacatacggcattatctacactggctacgccacaaaacatgttgtagaaggcttggagccacgcactctttatcgattccggctcaaagtcacctcaccgtccggagaatgtgaatattcccctctcgtgtcagtgagcacaactagggaacctatatcctcagagcatctccaccgtgctgtgagcgttaatgacgaagacctgctggtgcgaattctgcagggaggtagggtaaaggtggatgtcccaaacaaattcgggtttaccgcactgatggtggccgcgcagaaaggctatactaggttagtgaaaatacttgtttcaaatgggacagatgtcaacttgaaaaacggcagcgggaaagacagcttgatgctggcatgctatgcgggtcatttagatgttgtgaagtacctgcggagacacggtgcttcgtggcaggctagagacttgggtggttgcaccgcccttcattgggccgcagatggtggccactgctctgtcatagaatggatgattaaggatggatgcgaggtagatgtcgtggacacaggttcgggatggacccctttgatgcgtgtgtcagcagtgagtggcaatcagcgtgttgcatcactgctcatcgacgcaggtgccaacgtgaacgttaaagaccgcaatggcaaaacacctctgatggtcgctgtactcaacaaccacgaggaattggtgcagctgctgcttgataagggcgccgacgctagcgttaaaaacgagtttggtaagggagttctagagatggccagagtgttcgacagacagagtgtcgtaagtcttttggaggagcgaaagaagaagcagaggccaaagaagtcttgcgtctgctag

SEQ ID NO: 187874 - DNA, 1020 bp, synthetic construct
  misc_feature 1..1020: note = Description of Artificial Sequence: Synthetic coding sequence
  source 1..1020: mol_type = other DNA
atgccccccagcaagccccacccccccgtggtgggcaaggtgacccatcactccatcgagctgtactgggacctagagaaaaaggccaaacggcagggccctcaagaacagtggttcagattctcaatcgaggaggaggaccctaaaatgcacacctatggcatcatctacaccggatacgctacaaagcacgtcgtcgaaggccttgaaccaagaacactctataggtttagactgaaagttaccagccctagtggcgagtgtgagtatagccccctggtgagcgtgagtaccacccgcgaacccatttcatccgaacacctgcaccgtgcagtttcagtaaacgatgaggatctgctggtgcggatcttgcagggagggcgagtaaaggtcgatgtccctaataagttcggttttactgctttgatggtcgctgctcaaaaaggatacaccagacttgtcaaaatactggtaagcaatggaaccgatgtgaacctgaagaacggctccggcaaggactctttgatgctggcttgttacgctggacacctcgacgtcgtgaaatatcttcgacggcacggggccagctggcaggcgagagacttgggtggatgtaccgccctgcactgggctgccgacggcggtcattgcagcgtcattgagtggatgatcaaggacggttgcgaggtcgacgtagtcgacaccggcagtgggtggacaccactgatgagggtatccgctgtgagtggaaaccagagagtggcctcactcctgatcgatgctggcgctaatgttaacgttaaagataggaacggcaagaccccgctcatggtggctgtactgaacaatcacgaggagctggtccagctgttgctggataaaggcgcggacgctagcgttaaaaacgagtttggcaaaggggtactggaaatggcccgggtgtttgatcgacagtcagttgtcagcctcctggaggaaaggaagaagaaacagcgcccgaaaaagtcctgcgtgtgttag

SEQ ID NO: 187875 - DNA, 375 bp, synthetic construct
  misc_feature 1..375: note = Description of Artificial Sequence: Synthetic coding sequence
  source 1..375: mol_type = other DNA
atgccccccagcaagccccacccccccgtggtgggcaaggtgacccatcatagtattgagttgtactgggacttggagaagaaggctaagcgccaggggccccaggaacagtggtttcgcttttccatcgaggaggaggatccaaaaatgcacacgtacggcataatatataccggatacgctactaaacacgtcgtcgagggactcgaaccacggactctttaccggtttaggctgaaggttacatcgccttctggcgagtgtgaatatagcccattagtgtccgtcagtacgaccagagaacctatctcgtccgagcatctgcacagggctgtctcagtgaacgatgaggacctgctggtacgtatcctctag

SEQ ID NO: 187876 - DNA, 402 bp, synthetic construct
  misc_feature 1..402: note = Description of Artificial Sequence: Synthetic coding sequence
  source 1..402: mol_type = other DNA
atgccccccagcaagccccacccccccgtggtgggcaaggtgacccatcacagtatcgagttatattgggatctagagaaaaaagccaagcgccaggggcctcaggaacagtggttccgtttctcgatcgaagaagaggatcccaagatgcacacctatggcattatctacaccggatacgccaccaagcatgtcgttgagggactcgagcccaggacgctgtaccggttcaggcttaaggtgacaagcccctctggcgagtgtgaatattcaccactcgtgtcggtgtccaccacctcatcgatctggttggggggtgagcctatatccagtgagcatctccacagagctgtctccgtgaatgacgaggatttgttagtcagaatcctgcaggggggatag

SEQ ID NO: 187877 - DNA, 441 bp, synthetic construct
  misc_feature 1..441: note = Description of Artificial Sequence: Synthetic coding sequence
  source 1..441: mol_type = other DNA
atgccccccagcaagccccacccccccgtggtgggcaaggtgacccaccattctattgaactttattgggacctggagaaaaaagccaaacgccagggcccccaggagcagtggtttagatttagtattgaggaggaagatccaaaaatgcatacatatggtattatctatacggggtacgccacgaagcatgtggtggaggggctggagccacgcacattgtatcggttcagactgaaggtaacatccccctctggtgaatgcgaatactctccactggtctctgtttcaacaacgagcgagtacagcgacagaccccactcgcccttgtccagatctatggagatgacatccaatcttgagaaaatcttctgtctctcattcggcttgacgagaagccgcaacgacaccatcttcaagcactgtaataatatatgctag

SEQ ID NO: 187878 - DNA, 600 bp, synthetic construct
  misc_feature 1..600: note = Description of Artificial Sequence: Synthetic coding sequence
  source 1..600: mol_type = other DNA
tgagagcccatcagcagcgagcacctgcaccgggccgtgagcgtgaacgatgaggatctgctcgtgcgcatcctccagggcggccgggtgaaggttgatgtgccgaataagtttgggtttacagcccttatggtggccgctcaaaagggttatacacgcctagtgaagattttggtgagtaacggcacagacgtaaacctgaagaatggaagcggtaaagactctttgatgctggcatgctacgcagggcacctggatgtagtgaaatacctgcgaaggcacggggcatcttggcaagcgagggatctaggggggtgcaccgcgctccactgggctgccgatggaggacattgctcagtgattgaatggatgattaaagatggatgcgaggtggacgtggttgataccgggtccggctggacaccgctgatgagagtgtcggctgtctccgggaaccagcgtgtggcctcgctgctaattgacgccggcgccaacgtcaacgtgaaggacagaaatggaaaaacgcctctcatgtccgttgtgtctctgctggaggagcggaaaaagaaacagaggccaaaaaagtcttgcgtctgctag

SEQ ID NO: 187879 - DNA, 735 bp, synthetic construct
  misc_feature 1..735: note = Description of Artificial Sequence: Synthetic coding sequence
  source 1..735: mol_type = other DNA
atggaggtgaccggcgtgagcgcccccaccgtgaccgtgttcatctccagctcactgaacactttcaggtccgagaaacgctacagccggagtcttactatcgctgaatttaaatgtaaactggagctgctagtgggcagtcccgcctcctgtatggaactggagctgtacggggtggacgataaattttattctaagcttgaccaagaagacgcactgctgggctcttatccagtcgatgacgggtgtcgtatccatgtaatcgaccacagtggggcaagactgggcgaatacgaagacgtatccagggtcgaaaaatatacaattagccaggaggcatacgaccaaagacaggataccgtgcggagcttcctgaagcgctctaaattgggcaggtacaacgaggaggaacgcgcccaacaggaagccgaggcagcacagaggctggctgaagagaaagctcaggctagcagcattccagtcggatcccgctgcgaggtcagggcggctggccagtctcctcggagaggaacggtgatgtatgtggggctcacagacttcaagccaggatattggattggagtccgatacgacgagcctctgggtaaaaatgacggtagcgtcaacggcaagagatacttcgagtgccaggcgaaatatggcgcctttgttaaacccgctgtggtcactgtcggggatttcccagaagaggattacggactggatgagatttag

SEQ ID NO: 187880 - DNA, 1497 bp, synthetic construct
  misc_feature 1..1497: note = Description of Artificial Sequence: Synthetic coding sequence
  source 1..1497: mol_type = other DNA
atggacagccagaaggaggccctgcagcggatcatcagcaccctggcaaataagaacgatgaaatccagaactttatagatacccttcatcacaccctcaaaggtgtccaggagaatagttctaatatcctgagcgagctggatgaggagttcgatagcctctacagcatcttagacgaggtcaaggagtcaatgattaattgcattaaacaggaacaagcccgtaaatcgcaggaactgcagtctcaaatttcccaatgtaataatgctttggaaaatagcgaggagcttctagagtttgcgacccgatcgctcgacataaaagagcccgaagaatttagcaaagcagcccgccaaatcaaagatcgagtgacaatggcatctgccttccgtcttagtcttaagcccaaggtaagcgataatatgacccatctgatggtggacttttcacaagaacgccagatgcttcagaccctcaagttcctcccggtacctaaggccccagagatcgaccccgtagaatgtctagttgccgataactctgttactgtcgcttggcggatgcctgaggaagacaacaagatagatcacttcatacttgaacaccgtaagaccaactttgacggactcccccgcgtaaaggatgagcgatgttgggagataatcgacaatataaaggggacagaatataccctcagcgggttgaaattcgacagtaaatatatgaatttccgagtgagggcatgcaacaaggcagtcgcgggagagtacagtgaccccgtgactctcgagacgaaggccctgaacttcaatctggacaactcctcaagccatttgaacctgaaagtagaggatacatgtgttgagtgggatccaaccgggggtaaggggcaggagagcaagatcaaaggaaaggaaaacaagggtagatccggaactccttcccctaaaagaacctcggtgggatctagaccgcccgccgtgagaggttcacgagacagatttaccggcgaaagctacactgtgctgggagatacagcaatcgaatctggccagcattactgggaggttaaggcacaaaaggattgcaagtcatacagtgtaggggtagcctataaaactctgggcaagttcgaccagctcggcaaaacgaacacctcctggtgcatccacgtaaacaactggttacagaacacctttgccgccaagcacaataataaagttaaggccctagatgttacagtcccagagaagatcggggtcttctgcgactttgacggggggcagctctccttctatgacgcgaatagcaagcagctgctttactctttcaagaccaaattcacccagcctgttctccctggcttcatggtctggtgcgggggtctgagtctcagtacgggaatgcaggttcccagtgccgttagaacgttgcagaagagtgagaacggtatgactggcagcgcttcgagcctgaataatgtcgtcacccaatag

SEQ ID NO: 187881 - DNA, 438 bp, synthetic construct
  misc_feature 1..438: note = Description of Artificial Sequence: Synthetic coding sequence
  source 1..438: mol_type = other DNA
atggacagccagaaggaggccctgcagcggatcatcagcaccctggcgaataaaaacgacgaaattcagaactttattgacactcttcatcacacgctgaagggcgtgcaggagaattcctctaatatcctcagtgagctggacgaagaatttgattctctctattctatcctggacgaagtgaaagagagtatgattaactgcatcaaacaggagcaggcacgcaagagccaggaactgcagagccagatctcacaatgcaataatgcgctggagaacagtgaagagttgctggagttcgccacacgtagcttagacatcaaggaacccgaggagttctctaaagttcacaaaaactgtatcaacactctaaacaaaggaagttgcatctttaaaaaggcctttctgttcttcttctcctttgggttcctttactag

SEQ ID NO: 187882 - DNA, 1593 bp, synthetic construct
  misc_feature 1..1593: note = Description of Artificial Sequence: Synthetic coding sequence
  source 1..1593: mol_type = other DNA
atggacagccagaagtactgcttcaaggagaacgagaacgtgaccgtggataaggcctgcttcctgataagtaatatcaccatcggccccgaatccatcaatttgcagcaggaggctctgcagcgaataatttccacgttagcaaataaaaacgacgaaattcagaatttcatagacaccttgcaccacacgctgaagggtgtgcaggagaatagctcaaacatcctgagcgagctcgacgaagaattcgacagcctgtactctatcttagacgaagtgaaagaatccatgataaattgcatcaagcaggaacaggcccggaaaagccaagagctccagtcacagatctcccagtgtaataatgccctcgaaaacagcgaggagttacttgaatttgccaccaggtccctcgacatcaaagaaccggaggaattctccaaagccgcccggcagattaaggaccgggtcaccatggcctctgcctttagattgtccctgaagcccaaggtgagcgataatatgacccacttgatggttgacttctcccaggagcgtcagatgcttcagacattgaagtttttgcccgtgcctaaggccccggagatcgaccctgtcgagtgtttagtggccgataatagcgtgacagtggcttggagaatgccagaagaggataacaagattgaccatttcattttagagcaccgaaagaccaacttcgatggcctccccagagtcaaagacgagagatgttgggaaattattgacaacattaaggggaccgagtacaccctctctgggctgaagtttgacagcaagtacatgaatttcagggtgagggcctgcaacaaggccgtagccggcgagtattctgaccctgtgaccctcgagaccaaggctttaaattttaatttggacaattcctcctctcaccttaatttaaaagtggaggatacctgcgtcgaatgggatcccacgggtggaaaaggccaagaatctaagattaaagggaaggagaataaaggacggtctggcacaccaagtcccaaaaggacgtctgtcgggtctaggcccccagcggtgagaggttcaagggatcgattcaccggggaaagttataccgtcctcggcgatactgctatcgaaagcggacagcattattgggaggttaaggctcagaaggactgtaagtcctacagcgtaggggtggcatataaaaccctgggtaaattcgaccaattgggcaagacaaatactagctggtgcatccacgtcaacaactggcttcagaatacgtttgccgccaaacataataataaggtgaaggcactagatgtgaccgtccctgagaagatcggcgtgttctgtgactttgacggggggcagcttagcttttacgacgcaaacagcaaacagctcctgtactccttcaaaaccaaattcacccagcctgtgctgcctggcttcatggtctggtgtggcgggctctccctttctacaggcatgcaagttcccagcgccgtcagaacactgcaaaagagcgagaacggaatgaccgggtccgccagctcattaaataacgtcgtgacgcagtag

SEQ ID NO: 187883 - DNA, 1152 bp, synthetic construct
  misc_feature 1..1152: note = Description of Artificial Sequence: Synthetic coding sequence
  source 1..1152: mol_type = other DNA
atggccagcgccttccggctgagcctgaagcccaaggtgagcgacaacatgacccacttgatggtggatttcagccaggaacgccagatgctgcagacgctgaagtttcttcccgtgcccaaagccccagagatcgaccccgtggaatgcctcgtggccgacaattccgtaactgtcgcctggaggatgcccgaagaagacaataaaatcgaccatttcattctggaacatagaaagacaaacttcgatggtctgccccgtgtgaaagacgagagatgttgggagatcatcgacaatatcaagggaaccgaatacacactgtcagggttaaagtttgattccaagtacatgaactttcgtgtacgcgcctgcaataaggctgttgcaggtgaatactctgaccctgtgacactggaaacaaaagcgctcaacttcaacctagataacagctcgtctcatttgaatctgaaagttgaagatacgtgcgtcgagtgggatcctactggaggcaagggccaggagtccaagattaaagggaaagagaataagggaagtgtgcacgtgacgagcctgaagaagcatacgagcggtaccccaagtcctaagaggacgtccgtaggatcacgtccaccggccgtaaggggttccagggaccgttttacaggtgagtcatataccgtgctgggggatactgccatcgaatcagggcagcactactgggaggttaaggcccagaaagactgcaagagttatagcgtcggggtggcctacaagactttgggcaaattcgatcagttgggcaaaaccaatacctcctggtgcatacacgtcaacaattggctccagaacaccttcgccgcgaaacataataacaaggttaaggcactggatgtgacagtgcctgagaaaataggcgtgttctgtgatttcgatggaggtcaactgagtttttacgatgctaactccaaacagttactgtattcttttaagaccaaatttactcagcccgtcttgccagggtttatggtttggtgcggagggctgagcctgagcaccgggatgcaggtaccctctgcggtgaggactcttcagaagtccgaaaacgggatgacaggtagcgcgtcctcgctgaataatgtggtcactcagtag

SEQ ID NO: 187884 - DNA, 5685 bp, synthetic construct
  misc_feature 1..5685: note = Description of Artificial Sequence: Synthetic coding sequence
  source 1..5685: mol_type = other DNA
atggcccccgaggccggcgccaccctgcgggccccccggcggctgagctgggctgcccttctcctgctggctgcgctcttgcccgtggcgtcctcagctgctgcctcggtggatcatccgcttaaacctaggcatgtgaagctcctgagcaccaagatgggcctcaaggtgacctgggacccgcccaaggacgctaccagtcggcccgtggagcattacaatatcgcatatgggaaaagcttaaagtccctgaagtatattaaggtaaacgcagaaacatattcctttcttattgaggatgttgaacccggcgtagtatattttgtgctccttaccgcagaaaatcattcaggtgtgtctcggcccgtgtaccgcgcggaatcacctccaggcggtgaatggatcgagattgacgggttcccgattaaaggtcctggtccttttaatgaaacagtgactgagaaggaggtccctaacaagcctctaagggtcagagtgaggtcatctgacgatagactcagcgtcgcttggaaggcaccccgtcttagcggggccaagtctcccaggcggtcccggggcttcctgctcggctacggggaaagtgggcgtaagatgaattacgtgcccctgacaagggacgagcgtacccacgaaatcaagaagctggcgtcagaaagtgtgtacgtggtctccctacagagcatgaactctcagggcaggagccaacccgtgtatcgggcagccttaactaaaaggaaaatctctgaggaggatgagcttgatgttccggacgacatctccgtgagagtgatgagcagccagtcggtgctagtgagttgggtggatcctgttctcgagaagcaaaagaaagtagtggcgtcgaggcaatataccgtaaggtatcgtgaaaaaggcgagctggctcgttgggattataaacagattgctaatagacgcgtgctgatagaaaatttaatccctgataccgtctacgagttcgcagtgcggatttcgcagggagaaagagatgggaagtggtccacttctgtgtttcagaggactcctgagtctgccccaaccacggcccccgagaatctcaacgtttggccagttaatgggaaacctactgttgtcgctgcatcttgggatgcgctgccagagaccgaaggtaaggtgaaggagtacatcctaagttatgctcctgcactcaagccgttcggcgcaaaatcgttgacttaccctggggatacaacgtcggccctagttgacggtctgcaaccaggcgaaagatatcttttcaagatacgggcaaccaataggcgaggcctgggccctcattctaaagcatttatcgtcgccatgcccacaacatccaaggcagacgtggagcaaaatactgaagataatggaaagcctgagaagccagaaccaagcagcccttctcccagagcccctgctagctctcagcacccttcggtgccagcctctcctcaaggccggaatgccaaggacctgcttctggacttaaaaaataagatacttgctaatggaggagcacctcgaaagccccagcttagagcaaagaaggctgaggaacttgacctgcaatctacggaaatcacaggtgaagaagaactgggaagcagagaggactcgcccatgtcaccgagtgacactcaggaccagaagcggaccctcagacccccatctcggcacggccatagcgtcgtcgcaccaggacgaactgcagtgagagcacggatgccagctttaccccgtcgggagggcgtcgacaagccaggattctccctcgccacccagccgcgcccaggggcgcctccatcagcgagcgcttctcctgcacaccacgcctccacccaaggaacctcccacagaccatctctgcctgcatctctgaacgacaatgacctggtggatagtgatgaggacgaacgggccgtcgggagtttgcatcctaagggcgccttcgcgcagccgagacctgctctcagtccatctcggcagagcccttcttcggttctccgggacagaagttctgttcatccaggtgctaaacctgccagccctgcgagacgtacgccccacagtggggcagctgaggaggactccagcgcctcagcccctcccagtaggctcagtccccctcatggaggttcgtccagactgctgccaacacagccacacttatccagtcccttatctaagggaggtaaagacggggaggatgcacccgcaactaatagcaatgcccctagtagatcgacaatgagctccagcgtcagctctcatctttcgagcagaacgcaggtctccgagggggccgaggccagcgacggggaaagtcatggtgacggagatagagaagacggcggacgccaggctgaggccaccgcgcaaactctcagggccaggccagccagtggccatttccacttgctgcgacacaagccattcgcagccaacggacgctcaccctctcgcttctccattggtcgcggacctcgactgcagccttcgagctccccacagtctacagttcccagccgcgcccacccccgtgtaccatcgcactccgattctcaccccaagctgtcctccgggattcacggagatgaagaggatgagaagcccctcccggcaaccgtcgtcaacgatcatgtgccttcctctagtcgccagcccataagtagagggtgggaggacctgcgaaggtcgcctcagagaggcgccagtctgcataggaaggagccgatccccgagaaccctaagagcacaggcgccgacactcacccacagggaaagtactcatcattggcgagcaaagctcaggacgtgcagcagagtacagacgctgacacagaaggacacagtcccaaagctcagccgggctcaactgaccgccacgcctcaccagcccgcccacctgcagcgagaagtcagcagcacccatctgtgccccgacgaatgacacctggaagagcaccccagcagcaacctccaccccctgtcgctacatctcagcatcatcccgggccccaaagccgtgacgccggtagaagcccctcccagccccgtctctctctgacacaagccggccgcccacgacctacttctcagggtcggtcacactcctccagcgacccatacaccgcaagctcacgaggcatgttgccaaccgcactccagaatcaagacgaggacgctcagggaagttacgatgacgactcaaccgaagtggaggcacaagacgtacgagcgcccgcgcatgccgcaagagccaaggaagctgcagcttcactgccaaagcatcagcaagtggaatcgcccaccggcgctggcgccggaggtgaccacaggtcacaaagagggcacgctgcgagccctgccaggcccagcaggcccggggggcctcaatctcgcgcaagagttccgtccagagctgcacctgggaagtcagagccgccgagcaaaaggcctctgtccagcaagtcccaacagtctgttagtgccgaggacgatgaggaggaggatgccggtttttttaaaggaggcaaggaggatctgttatcttcatcagttccgaagtggcccagctctagcacccctcgaggagggaaggatgcggatgggtctctagccaaggaagagcgcgaacctgccatagctcttgcgcctagagggggcagcctggcccctgttaagcgccccctccctcctcctcctggctctagccctagggccagccacgtcccctccagactacctccgaggtcagctgccaccgttagtcccgtggctggcacacacccatggccccagtacacaacgagggcccccccaggccacttttcaactactcccatgttgtccctccggcagcggatgatgcacgctcgcttccggaatcccctgtctcggcaacccgccaggccctcttatagacagggatataacgggcggcccaatgtcgaaggaaaggtgttgccgggctctaatggaaagccaaacggccaacggattataaatggaccacagggtaccaagtgggtggtggaccttgacaggggcctggttctgaacgctgaaggcaggtacttgcaggattctcatggcaaccctctgcgtatcaagctcggaggggacgggaggactattgtcgaccttgagggaactccagttgtgtctcctgatggactgcctctcttcggacagggccggcacggaactccactggcaaatgcccaggataaacccatactgtccttgggagggaagcctctcgtcgggcttgaggttataaagaaaaccacacatccccctactaccaccatgcagcctaccactacaactacccccctccctacgacgaccacaccaagacctaccactgccacaacgaggcgcacaacaaccacaagaaggactaccactaggaggccaactaccacagtgcgcaccacaacgcggactacaacgacaaccactccaacccccactaccccaattcctacttgtcctcctggcacgctggagagacacgatgatgacggtaatctaatcatgagttctaatggcattccggaatgctacgctgaagaggatgaattttccggcttggaaacggatacagcagtgcccactgaagaggcctatgttatttatgatgaggactacgaattcgaaacatcccgacctccaacaacaacggagccatctaccacggcaaccacgcctcgggtcatcccagaggaaggcgcaatcagtagcttcccggaggaagagttcgatctggctgggcgaaagagatttgtcgccccctatgtcacttacctcaataaggacccttcggcaccatgcagcctaacagacgccctggatcactttcaggtggacagcctcgatgagatcattcctaacgatctaaagaagagcgatctcccacctcagcatgccccccgaaatatcactgttgtggctgtcgagggctgtcattcctttgttatcgtggactgggacaaggctacacctggagacgtggtaaccggttaccttgtttactctgctagctatgaggactttataagaaataagtggagcacgcaggctagctcagttacccatctgcctatagagaatttgaagccaaacacacgctattattttaaggtccaggcacagaatcctcatggctacgggccaatttctccctcagtcagtttcgtgacagagtctgataatcccctgctggtggtccgaccccccggcggcgaaccaatttggataccctttgcatttaagcacgatccaagctacaccgactgtcatgggcgacagtacgtcaagcgcacttggtacaggaagttcgtcggagtggtactgtgcaacagcctgcgctacaaaatctacctttcggataacctgaaggacaccttctactccattggggacagttggggcaggggcgaagatcattgccagttcgttgacagtcatctggacggtcgtactgggccccagtcttatgtggaggctctgcccactatccagggctattaccgtcaatatagacaggagcccgtgcgttttggcaacatcggatttggaacaccgtattattacgtcggctggtatgagtgcggagtgtctatccctggcaaatggtag

SEQ ID NO: 187885 - DNA, 5496 bp, synthetic construct
  misc_feature 1..5496: note = Description of Artificial Sequence: Synthetic coding sequence
  source 1..5496: mol_type = other DNA
atggcccccgaggccggcgccaccctgcgggccccccggcggctgagctgggctgcactcctgcttctcgcagccctgctaccagtggcatcatccgccgccgcgtcggtggaccatcctctgaaacctcgacatgtgaagctactgtcaactaagatgggcctaaaagtcacctgggaccctcctaaggatgcaacaagccgccccgttgaacattacaacattgcctacggaaaatccctcaagtccttgaaatatatcaaggtcaatgcagaaacctacagcttcctgatcgaggatgttgaaccaggcgtggtgtactttgtgttgctaacagccgaaaaccattcgggtgtgtccaggccggtgtaccgcgccgaatctccaccagggggggaatggattgagatcgatggctttccaatcaaaggccccggtccctttaatgagactgtgaccgaaaaggaggttcctaacaaacctctcagggttcgggtgcggagtagcgacgatagactgtctgtcgcgtggaaggccccccgattatcaggtgctaaatctccacggaggagcaggggattcctgctgggatacggcgagagcggccgcaaaatgaactatgttcccctgactcgggatgaaagaacacatgagataaaaaaattagcatcggaatctgtctacgtggtgtctctacaaagcatgaatagtcagggtcggtcccaaccggtataccgggcagcgcttaccaagagaaaaatttcggaagaggacgagctggacgtgcccgatgacattagcgtccgggtaatgagcagtcagtctgttctcgtgagttgggtcgaccctgtactcgaaaaacaaaagaaggtggtggcaagccgacagtacactgttcgctacagggaaaagggggaattagcgaggtgggactacaagcaaatcgccaacaggcgggtattaatcgagaaccttattccagatacagtgtacgagttcgctgtgagaatatcacagggcgagcgagacgggaagtggagtacaagcgtgttccagagaacaccagaaagtgcacccaccacagctcctgagaatctgaacgtttggccagtgaatgggaaaccaactgtcgtggcggcatcttgggacgctctgccagaaactgagggcaaagtaaaggctagcaaagctgacgttgaacaaaacacagaagataatggaaaaccagaaaagccagaaccttctagtccatcaccacgtgcacccgcatccagtcaacatccatccgtgcccgcttctccacagggaaggaacgcaaaggatctactgttggacttgaaaaataaaattctggctaacggcggggctcccagaaagccgcaactaagggccaaaaaggcagaggaactagatttgcagtccaccgagatcacaggcgaggaggagctaggttctagagaggacagccccatgtcacctagtgacacacaggatcagaagagaactctgcgacccccctctcgacatggccactcagtcgttgctcccggcagaacggccgtacgggctagaatgccagccctcccgcgacgggaaggagtggacaagccaggtttcagcctcgcaactcagccccggcctggggctcccccttcggcgtccgccagccctgcacaccacgctagtacacagggaacttctcacaggccttctctccccgcttccctgaatgataatgatctggtcgactcggacgaagacgaacgcgctgtcggatcacttcaccccaaaggggcctttgcccagccccgcccagcactgagcccgagcaggcagtctccctcttctgtactgcgagatcgcagctctgtgcaccccggtgctaagccggcgtcccccgcccgaagaacgcctcacagcggggctgccgaagaggacagttccgcttccgcccctccttctagactgagtcccccacatggcggaagctctcgcctgctgccgacccagccccacctgagttctccactgtccaaagggggcaaggatggcgaagatgctccagctacaaactccaatgcgccctctagaagcaccatgagtagtagcgtgtcaagccacctgagctcccggactcaggtgtctgagggggccgaggcgtctgacggcgagtctcatggagacggcgacagggaggatgggggaagacaggccgaagcaaccgcccagacgcttcgtgccaggccggcctcagggcatttccacctccttaggcataagccctttgccgccaatggccggtccccaagccggttctctattggccgcggaccgagacttcagccatccagcagtccccaaagcaccgtaccgtcacgggcccacccccgggttccttcacacagcgactcacatcccaagctctcctctggaatccacggtgacgaggaggacgaaaaacctttgcccgccaccgtcgtcaacgaccatgtcccgtcatcgtctagacagcccatttctaggggctgggaagacctgagaagatcaccacagagaggcgcaagtctgcacaggaaagagcctattcccgagaaccctaaatcgacaggcgccgatacacatcctcaggggaaatatagttcactggcctcaaaagctcaagatgttcaacagagcacagatgcagacacagagggacactcccccaaagcacagcctggatccaccgaccggcatgcctctccggctcggcctcctgccgcacgctcccaacagcacccatcggtcccgcggaggatgactccaggcagagccccacagcagcaacctccccccccagtcgccaccagccaacaccaccccggcccacaatctagggacgcaggccgttcgcctagccagccacgacttagtctgacacaagccgggcgacctagacctacgtcacagggccgtagtcactctagctccgatccctatactgccagcagcagaggtatgttacccaccgcacttcagaaccaggatgaagacgctcaaggtagctatgacgatgatagtacggaagtggaggcccaggatgtgcgcgccccagcacacgccgccagggctaaggaagccgctgcgtccctgccaaagcatcagcaagttgagagtccgactggcgccggcgctggaggcgaccataggagccagcgaggtcacgccgcaagccctgctagaccctcccggccaggaggacctcagtcccgcgcccgggtgccttcaagagcggcgcctggtaaatccgagccaccatccaagaggcccctttctagcaagagccagcagtcggtcagtgccgaggatgacgaggaggaggacgcagggttttttaaaggtgggaaagaagacctgctttcatcctcagtgcccaaatggccttcctcatcgacaccgaggggcggaaaggacgctgatgggagcctggcaaaagaagagagagaacccgccattgcactggcccccagagggggatctttagctcctgtaaagcgaccgttgccccctcctcccgggagttctccacgagcctcccatgtcccatctaggctgccaccgagatccgctgctacggtttctccggtggccggcactcatccctggccccagtacactactagggctccccctggccacttctccaccacgccgatgctgagtttaagacagaggatgatgcacgctcggtttcggaaccccttatctcgccaaccagcacgcccgagctacagacagggctacaatggtcgccccaatgtggaaggaaaggtcctgcctggcagcaatggcaagcccaatgggcagcgtattatcaatggccctcaaggcacgaaatgggttgtggacctagacagggggctggtgctgaatgccgaaggaaggtacctgcaggatagccacgggaatcctttacggattaaattagggggcgatgggaggactatcgtagatctggaggggacgccagtggtatcaccagatggactgcctctgttcggccaggggcgccacggtactccgcttgctaacgcacaggataaaccaatactgagcctcggaggtaaaccgctcgtgggactggaagtgataaagaagacaacccaccccccaacgactactatgcagcccactaccacgaccacacccctacccactaccactacccctcgtccaaccacagccaccactcgcagaacgacaaccactcgccgaaccacaactcgacgaccgacaaccactgtccggacaactacacgtactactaccacaactacccccactcctaccactccaatccccacgtgtccaccgggtacactggaacgacatgatgatgacgggaacctcatcatgagcagcaacgggattcccgaatgttatgccgaagaggatgagtttagtggattggaaaccgacaccgccgttcctacggaggaagcatatgtgatttacgacgaagattacgaattcgagaccagtagaccacctacaactactgagcctagtactacagcgacaaccccgagggtgatcccggaggaaggagctattagcagctttccagaggaggaattcgacctggcaggaaggaaaagatttgtggctccatacgtcacttacctgaacaaggaccctagcgccccttgctccctcactgacgccctagatcacttccaggttgacagcttggacgagatcattccaaatgacctcaagaagtctgacctgcctccacagcacgctcctagaaacattactgtggtggccgtggagggctgccacagtttcgtgatcgtggactgggacaaggcaaccccaggagacgtcgtgacaggctacctcgtgtacagcgcttcgtacgaagatttcattaggaacaagtggagcacacaggcttcctccgtcacccacctcccaatcgaaaaccttaaacctaacacccggtactattttaaagtccaggcccaaaacccccatggctatggaccgatttctccaagcgtgtcattcgtcacggagtcggacaacccattattggttgtgcggccaccaggaggcgagcctatctggattcctttcgctttcaagcacgacccttcctacacagactgtcatgggcgacaatacgtgaaacgaacgtggtatcgtaaattcgtgggggtcgtcctctgcaactctctacggtataagatatacctgtccgataacctgaaagacacgttctattctattggagacagctggggtagaggggaagatcactgccaatttgttgattcccacctcgatgggcggacgggcccgcagtcctacgtggaagcactcccaactatccaaggatattacagacagtaccggcaggagcccgttagatttggaaacataggcttcggaacaccatattactatgtgggatggtatgaatgcggggtcagcattccgggtaaatggtag

SEQ ID NO: 187886 - DNA, 3615 bp, synthetic construct
  misc_feature 1..3615: note = Description of Artificial Sequence: Synthetic coding sequence
  source 1..3615: mol_type = other DNA
atgtacgtgaccatgatgatgaccgaccagatccccctggagctgcctcccctgctcaacggggaggtggccatgatgccacacctggtgaatggagacgctgcgcagcaagtgattctggtgcaggtaaatcccggtgagacctttaccataagagccgaggatggaactttgcaatgcatacaagggcctgccgaggtgcctatgatgagccctaacggatcaattccaccaatccacgtaccccccggctacattagtcaggtaatcgaggactctacaggagtacgacgcgtcgtggtgacacctcaatctccggaatgctacccccctagctacccaagtgccatgagcccgacacaccatttgccaccctatctgacacaccatccccacttcattcacaactcccatactgcctactacccaccggtaacaggacccggagatatgcccccacagttcttccctcagcaccacctgccgcatacaatatatggcgaacaagaaataattcctttttacgggatgagcacgtacattaccagggaggatcagtattccaagcccccacataagaagttgaaggaccgccagatagatagacagaatcggctgaatagtcccccaagctcaatctacaaatcatcctgcaccaccgtctacaacggctacgggaagggccactcaggcggatcaggtgggggcggatctgggtcggggcccgggattaagaagacggagcggcgggcgcggtcctcacccaaaagtaacgatagcgatctacaggagtatgagctggaagtcaagagggtccaggacatcctaagcgggatcgaaaaaccgcaggttagcaatattcaggcccgggcagtggtcttgagctgggcccctccagtgggactgtcatgtggaccccattctggtctgtcatttccttatagttacgaagtggccttgtctgataaaggacgggacggtaagtataagatcatctacagtggcgaggagctcgaatgcaacctgaaagaccttcggcctgccaccgattatcacgtcagggtgtacgccatgtataactccgttaaaggctcttgttcagaaccggtctcatttacaactcacagctgcgctccagaatgcccatttccccccaagctcgcccacaggagcaagtcctcacttactcttcaatggaaggcacctatcgataacggatcaaagattaccaattatctgctagagtgggatgaagggaagaggaacagtggcttccgccagtgttttttcggcagccaaaagcactgcaagttgacgaaattgtgccccgctatgggttatacgtttcgccttgcagctagaaacgacattggcacttctggatattcccaagaagtggtgtgctacacgctgggcaatatcccacagatgcccagtgcaccacgtttagtcagggccggcattacctgggttacactccaatggtcaaagcccgagggatgttcacctgaagaagttatcacttatacactggaaattcaggaggatgaaaatgataacttgttccatcccaagtacacaggcgaagaccttacttgcacagtaaagaatctgaagcgaagtacccagtacaagttcagattgacagcatctaataccgaggggaagagctgcccatccgaggtccttgtgtgtactacaagtccagaccgtcctggtccccccacgcgaccactggtgaaaggccctgtgacgagccatggattctcggtgaaatgggatcccccaaaggataatgggggctcagaaatcctgaaatacctgttagaaattactgacggaaactcggaagcaaaccagtgggaagtggcgtactccggcagcgccaccgagtatacctttactcacctgaaaccaggtactttatataaattgagagcatgttgcatcagcactggcgggcattcacagtgctctgagagcctcccagtccgtaccctgagcatcgcccctggacagtgtcgcccaccacgggttttgggtagacctaaacacaaagaggtccaccttgagtgggatgtgcctgcctccgaatccgggtgtgaagtgagtgagtacagtgtcgagatgacggaaccagaagacgtcgcaagtgaagtttatcacggccctgaacttgagtgtactgttggaaacctgttgcccggaacggtgtatagattcagagttagggctctcaacgatggcggctatggaccatattccgatgtttcggagataacgacagcagccggcccccccggtcagtgcaaggctccctgcataagctgtacacctgatggttgcgtactggtgggatgggaatcacccgatagcagcggtgccgacatctccgagtaccgcctggagtggggcgaagatgaagagtcactggagctaatctaccacggtacagatacacggtttgaaatcagggatttactccccgccgcacagtattgctgtagattacaggccttcaaccaggcgggagctggcccttatagtgaactggtgctctgtcagacgccggcatctgcccctgatcctgtgtctacactatgcgttctcgaggaggagcctctggacgcctatccagacagtccgtccgcctgtctggtcctgaactgggaagagccctgtaataacggatcagaaatcctcgcatataccatcgacctcggagatacttctataaccgttggcaacaccacaatgcacgtcatgaaggacttactgccagaaacgacctaccgtatcagaattcaggccatcaacgagattggggctgggccattcagccaatttattaaagctaaaacccggccgctgccgcctcttccaccacgccttgaatgtgccgcagccggcccacagtcgcttaagctgaaatggggggacagtaatagcaaaactcacgccgcagaggacatcgtgtatactcttcagctggaagatcgcaacaaaagatttatatcgatttaccgggggccatcccatacatacaaagtccaacgcctgactgaattcacgtgctatagctttagaatccaagctgcctctgaggctggggagggaccatttagcgaaacatacactttttctacaaccaagagtgtccctccaacaattaaagccccacgagttacccaacttgaaggcaactcttgcgaaatactttgggagacagtacccagcatgaaaggcgatcccgtgaattatatcctgcaggtacttgttggccgggaatctgaatacaagcaggtgtacaagggggaagaagctaccttccagataagtggactccagacgaataccgactaccgatttagagtgtgtgcttgcaggcggtgtctggataccagccaggagctttctggagcttttagcccatcggcagccttcgtcctacagcggtctgaagtcatgttaacaggcgatatgggtagcctcgacgatcccaaaatgaaaagcatgatgccaactgacgagcagttcgcagcgataatcgtcctggggttcgccacactgtctattttgttcgcctttatcttacagtactttctgatgaaatag

SEQ ID NO: 187887 - DNA, 216 bp, synthetic construct
  misc_feature 1..216: note = Description of Artificial Sequence: Synthetic coding sequence
  source 1..216: mol_type = other DNA
atgtacgtgaccatgatgatgaccgaccagatccccctggagctgccacccctgcttaatggggaagtggcgatgatgccacacctggtgaatggagatgccgcgcagcaggtgattctagtgcaagtgaacccaggcgaaactttcacgattagggcggaggacggtaccctgcagtgcatccaggaagtcaacgtgaaaaggcattgcctctag

SEQ ID NO: 187888 - DNA, 3615 bp, synthetic construct
  misc_feature 1..3615: note = Description of Artificial Sequence: Synthetic coding sequence
  source 1..3615: mol_type = other DNA
atgtacgtgaccatgatgatgaccgaccagatccccctggagctgccccctttgttaaacggggaagtggctatgatgccgcacctggtgaacggcgacgctgctcaacaggtgatactggttcaggtgaatcctggtgagaccttcacaatccgggctgaggatgggacgctgcagtgtatccagggcccagccgaagtccctatgatgagcccaaatgggtccatcccacccatccacgtccctcctggttatatttcccaggtaatcgaggatagcaccggcgttcgtcgggtagtggtcaccccccaatcaccagagtgctatccaccatcctacccgagcgcaatgagccctacccatcaccttcccccttatctgacgcaccacccccatttcattcataactcacatacagcatactacccgcccgtgacaggccccggtgacatgccacctcaattcttcccgcagcatcacctaccccataccatctacggagaacaggaaattattccattttatggaatgtctacgtacattacacgggaagatcagtactcaaagccaccccacaagaagctcaaggaccgacagatcgaccgccagaacagactgaacagccccccctccagcatttacaaatcatcttgtactactgtatacaatgggtacggtaaggggcattcgggcgggtcagggggcggcggctctggctcaggccctggaatcaagaagactgagagacgcgcaagaagcagcccaaagtctaatgattctgatctgcaggaatatgagcttgaggtaaaacgggtccaggacatactttctgggattgagaaacctcaggtgtctaacattcaggctcgcgcagtggttctgtcttgggccccacccgtgggcctgtcttgtgggcctcactcaggcttgtcgtttccttattcctatgaagtagctctgtccgataagggcagagacgggaaatacaagattatctattctggggaggaactggaatgcaacttaaaggaccttcgccccgctaccgactatcatgttcgtgtctacgctatgtataactccgttaaaggttcttgctccgagcccgtgagctttacaactcactcttgcgcaccagagtgcccctttcctccgaaattggcacaccgctcaaaatcctctttaaccctccaatggaaagcaccaatcgacaacgggagtaagatcacaaattatctcctagaatgggacgagggcaagagaaactcaggatttagacagtgcttcttcgggagccagaagcactgcaagctcaccaagctgtgtcccgctatggggtatacattccggctcgctgctaggaacgatatcggtacctctggttactctcaggaagtcgtgtgctacaccttggggaatatacctcaaatgccatccgcccctcgacttgtccgggcgggcataacttgggttaccttgcaatggagtaaacctgaaggttgctccccagaggaagtgattacatatactctcgagattcaggaagacgagaatgataacctgttccatccaaagtacaccggagaggatctgacatgtaccgtcaagaacctcaagcggtcaacacagtacaaattcagattgacggctagcaataccgaaggcaagagctgcccatccgaggtcctcgtgtgtactacgtccccagatcgcccgggcccccccacaagaccattggtgaaagggcccgtgacttctcatggattctccgtaaagtgggatcccccaaaggataacggcggttctgaaattctgaaatatctcctcgagattaccgacggtaattccgaagccaaccaatgggaggtggcttactcgggtagtgccaccgaatacaccttcacacacctgaaacctggaacgctctacaagctgcgcgcctgttgtatatccacaggcgggcactcccagtgcagtgagagcttacccgtgaggaccttatccatcgcacccggccaatgccggcctccaagagtgcttggtcgccctaagcacaaggaagtgcatctggagtgggacgttcccgcatccgagtctggctgcgaggtttccgaatactccgtcgagatgactgaaccagaagacgtggcctctgaagtttatcacggccctgagctggagtgtacagtgggaaatctcctgccagggaccgtttacaggtttagagtcagagccctgaatgacggcggctatgggccttatagtgatgtgagcgagatcacgacagccgctggccctccgggccagtgcaaagccccctgtatctcatgcaccccagacggatgtgtgttagttggatgggagagcccagactcaagtggggcggatatcagtgaatacagacttgagtggggcgaagacgaagaaagtctcgagctgatctatcatgggacagacacaaggttcgaaatccgggatctgctccccgcggcacagtattgctgccggttgcaagcctttaatcaagcaggcgccggtccatattccgagctggtgctgtgtcaaacgccggcctctgcaccggatcctgtcagcaccttgtgcgtcctggaagaggagcccctagacgcctatcccgactctcccagcgcgtgcctagtgctcaattgggaagaaccttgcaataatggatccgagatcttagcttataccattgacctcggagacacatccattaccgtagggaataccactatgcacgtgatgaaggacttattacccgaaacgacctaccgtatcaggatccaggccatcaatgagattggcgcaggcccattctctcagttcataaaggccaaaaccaggcccctacccccgttgccgccacggcttgagtgcgctgccgctgggcctcaatctctgaaattgaaatggggagacagcaatagcaaaacccacgccgccgaggatatcgtatacacactgcagcttgaggaccgaaataagcgctttatctccatctatcggggaccctctcatacctataaggttcagagactaacggagtttacctgctatagtttcagaatccaggctgccagcgaggctggagagggcccattctcagagacctacacattttccaccactaaatctgtgcccccaaccattaaagcccctagagtaacgcagcttgagggcaattcttgtgaaatcctgtgggaaacagtccccagcatgaagggcgaccccgtgaattatatattacaggtcctcgtgggcagagaaagtgaatataaacaggtatataagggtgaagaagctacttttcagatttctggcttacagaccaatacggactacaggttccgcgtgtgcgcctgtagacgatgcctggataccagtcaggagctttccggagccttttctccttctgctgcgtttgtgctccaaagaagcgaggtgatgcttacaggagatatgggcagtcttgacgatcctaaaatgaagtctatgatgcccaccgatgaacagttcgccgcaattatcgtgctcggctttgccaccctctccatcctgttcgcctttatcctgcaatacttcctgatgaaatag

SEQ ID NO: 187889 - DNA, 3615 bp, synthetic construct
  misc_feature 1..3615: note = Description of Artificial Sequence: Synthetic coding sequence
  source 1..3615: mol_type = other DNA
atgtacgtgaccatgatgatgaccgaccagatccccctggagctgcccccgctcctaaatggcgaggtcgctatgatgcctcacctggtcaacggcgatgcagcccagcaggttatcctggtccaggttaatcctggggagacatttactatccgcgccgaagacggaacccttcagtgtatacagggccccgcagaagttcccatgatgtccccgaacgggagtatccctcccattcacgtcccccccggatacatctcccaggtgatagaagactcaaccggcgtacggcgggtagtcgtgacacctcagtcacccgaatgctatcctcctagttacccatctgccatgtctccgacacaccatctgcccccgtacctcacccatcacccccattttatacacaattcacatacagcatactaccctcccgtaaccgggccgggcgacatgccgccgcagtttttcccacagcatcacctgccacatactatctacggggagcaggaaatcattccattttacggcatgtctacctacatcacacgcgaggatcagtactccaagcctccacacaaaaagttaaaagatcggcagatcgacagacaaaaccggctaaattctccaccttcatccatttacaagtctagctgcaccaccgtgtataatggctacggcaaagggcacagcggaggcagtggaggcgggggatctgggtccggacccgggataaagaagacagaacgtagggctcgttctagccctaaatcaaatgattcagacctgcaagaatatgaattggaagtgaaacgagtccaggacatactctcaggcatcgaaaagcctcaggtgtcaaacattcaggcccgggccgtagtgctctcttgggcacctcctgtaggacttagctgcggcccccatagtggtctctcgtttccctattcctacgaagtagccctcagtgataaggggagagacggcaagtataagataatctatagcggagaggaacttgagtgcaatctcaaggacttacggccagcaacagattaccacgtgcgcgtttacgctatgtataatagcgttaaagggtcctgcagcgaacctgtctcttttaccacacattcatgtgcacctgagtgccctttccctccaaagttggcacatcgatccaaaagttcattgacgctccagtggaaagcacccattgacaatgggtccaaaattacaaattacctgctcgaatgggatgaagggaaacgcaattcaggctttcgccagtgttttttcgggtcgcagaaacattgcaagctgaccaagctgtgtccagctatgggctacaccttccgattggccgcccgaaatgacatagggaccagcggctattctcaggaagtagtttgttacaccttggggaatatcccacagatgcccagcgctcctcggctggtgagggcagggatcacctgggttacactgcagtggtcaaagcccgaaggctgtagtccagaagaggtgattacttataccttggagatacaggaggacgagaacgacaatctgtttcaccctaaatacaccggagaggacctaacatgtacagtcaaaaatctgaagcgatccacacaatacaagttcaggctcacagcatccaatacagaggggaagtcttgccccagcgaggtgctcgtgtgcaccacttcaccggatcgccccgggccaccaacaagacccctcgtgaaaggacccgtcacctctcatggattctcagtcaaatgggaccctcctaaggacaatggtggctccgagatcctgaaatacttgcttgagattactgacggcaattccgaggccaatcagtgggaagttgcctactctggcagcgccactgaatatactttcacacacctgaagcccggcacgctctataaacttcgagcatgctgcatatctacggggggacacagccagtgcagcgagtccctgcccgttagaaccttgagcattgcaccgggccaatgcaggccccctcgagtccttggacggcccaagcataaggaagtgcatctcgagtgggacgtgcccgcctctgagtcgggctgcgaggtgtctgagtattcagtcgaaatgaccgagccagaggacgtagcaagcgaagtataccatggcccggagcttgaatgtacagtggggaaccttttacccggcactgtgtacagatttagggtgagggccctcaacgatggaggctacggcccatacagtgatgtaagcgaaatcacaaccgcagctggtccgccgggtcagtgcaaggctccctgcattagttgtactcctgacgggtgcgtcctggtgggatgggagtcccctgatagttctggcgctgacatcagcgaatatcgcctagagtggggagaagacgaagagtctctggagctcatttaccacggcacagacaccaggtttgagatccgtgatctgctgccggctgcacaatactgctgcaggttacaagcgtttaatcaggccggagctggaccgtattcagagctcgtgttgtgtcaaactcccgcctccgctccggacccagtgtctactctttgtgtccttgaagaagagcctctcgacgcttatcccgacagcccgtccgcctgccttgttctcaactgggaagagccatgtaataacggttcagaaatcctggcgtatacaatcgacctgggcgacacttcaatcaccgtcggaaacactacaatgcacgtcatgaaggacctgctcccggaaactacttaccggatccgaatccaggctatcaacgagattggagctggtccattctcccagtttattaaggccaagaccagacccctcccaccacttcccccacgcctggagtgtgcagcagcgggcccgcagtcgctcaagctgaagtggggagattcaaacagtaaaactcacgcagcagaggatatagtctatacccttcaattagaggatagaaataagcggtttatatcaatctaccgaggccccagccacacatacaaggtccaaaggctaactgaatttacgtgctactcatttcggattcaggccgctagtgaagctggagagggtccgttcagcgagacctacaccttctccacaacgaagtctgtgcccccaaccatcaaagcaccaagggtgactcaactcgaaggcaacagttgtgagattctctgggaaacagtacccagcatgaaaggcgaccctgtgaattacatcctccaggtcttggtcgggagagagtcagagtataagcaggtatacaagggcgaagaagccactttccagatatctggcctgcagaccaacacagactaccgcttccgggtatgcgcctgtaggcggtgtctggacacatcacaggagctgtcgggcgccttctctccatccgcggcttttgtgttgcagcgctcagaggtgatgcttacgggagatatgggatctctggatgatcccaagatgaagtcaatgatgccaaccgatgaacaatttgccgctatcattgtgctcggctttgccactctgtctattctttttgccttcattctgcagtattttctgatgaagtag

SEQ ID NO: 187890 - DNA, 627 bp, synthetic construct
  misc_feature 1..627: note = Description of Artificial Sequence: Synthetic coding sequence
  source 1..627: mol_type = other DNA
atgttcaccaaggagaagatctggagcgaggtgatcctggtgcaggtcaatcccggggagacctttaccatcagggccgaggatggtaccctgcagtgcattcagggtccagcagaagtaccgatgatgagtcctaacgggtcgattcctcctattcacgttccccccggttacatctctcaagtcattgaggactctactggggtgaggcgcgttgtggtgaccccgcagagtcctgaatgttaccctcctagctacccttcagcgatgtcaccaacacaccatctccccccttatctcactcaccatccacacttcatccacaactctcatacagcatattatccacccgtcaccggtcccggcgacatgccaccgcagttctttccgcaacaccatcttccacatactatttacggcgaacaggagatcatacccttctatggcatgagtacttacataacacgtgaggaccagtattctaagccgcctcacaagaagctgaaggataggcagatcgatagacaaaaccgactcaactcacccccctctagcatttacaagtcttcatgtacaaccgtgtacaacggctacgggaaaggacattctggggggtcaggaggatag

SEQ ID NO: 187891 - DNA, 705 bp, synthetic construct
  misc_feature 1..705: note = Description of Artificial Sequence: Synthetic coding sequence
  source 1..705: mol_type = other DNA
atgcccagcggctgccacagcagcccccccagcggcctgcggggcgacatggctagtctcgtgccccttagcccgtacctttccccaactgtgctacttttggtatcttgcgacctaggcttcgtgcgcgcagatcgccctccttctccagtcaacgtgacagtgacccatctcagagccaactcggctactgtaagctgggatgttcctgagggaaatatcgtcataggatactccattagtcagcagaggcagaacggaccagggcagagggtgattcgggaggttaacactacgacacgcgcctgtgctctgtgggggctggccgaagactctgactacaccgtgcaggtccggtcaataggcctacggggcgaatctcccccgggaccaagggtgcattttagaactcttaaaggatctgaccgcctcccgagcaatagcagcagccctggcgatattactgtagagggcctggacggagagcggcccctgcagactggcgaggtggtgattatagttgtggtcctgttgatgtgggcagcagttataggactgttttgcagacagtatgatatcatcaaggacaatgacagcaataacaatcctaaagagaagggaaaaggaccagagcagagcccacagggccggccagtaggcacgaggcagaagaaatcgccctctattaatacgatcgatgtgtag

SEQ ID NO: 187892 - DNA, 2478 bp, synthetic construct
  misc_feature 1..2478: note = Description of Artificial Sequence: Synthetic coding sequence
  source 1..2478: mol_type = other DNA
atggtgggcaagagccagcagaccgacgtgatcgagaagaagaagcacatggcaatacccaaatcctctagccctaaggccacacaccggatagggaataccagcggaagtaaggggtcatatagtgctaaagcatatgagtctataagagtgagcagcgagctgcagcagacctggacaaaacgcaagcacggtcaggaaatgacgagcaagtcacttcaaaccgacacaatcgtagaagagaagaaggaggtaaagctggtggaggagacagtggttcctgaggaaaagtctgcagatgttagagaagccgcaatcgaactgcctgagtccgtgcaggacgttgaaatccctccaaatatcccatcagtgcagctaaagatggataggagccagcagactagtaggaccggctattggacgatgatgaacattccaccagtggaaaaggtcgacaaagaacaacagacctactttagtgagagtgaaatcgtagtcatctctcgacccgactcttcttctaccaaatctaaggaagacgcactgaaacacaaaagcagcggtaaaatcttcgcgagcgaacacccagagttccagccagccacgaactcaaacgaagagattggccaaaaaaacatcagccgcactagtttcactcaggaaaccaagaaggggcctcccgttctgctggaagacgagttgcgggaggaggtaaccgttcctgtggtgcaggaaggtagtgcagtgaagaaagtcgcttctgcggaaatcgagccaccctcaacggagaagttcccggccaagatccaacctcccctggtggaggaagccaccgctaaggctgaacctaggcccgccgaggagacacacgttcaagtccagccgagtacagaggagactccagatgctgaggccgccacggccgtggcggagaactcggtcaaagtgcagccacctccggcagaggaagcgcccctggtggagtttccggctgaaatccaaccacccagtgcagaagaatctccatcagtggaattattggccgagatcctcccaccctctgccgaggagtctccctcggaggagccaccagctgagatcttgcccccgcctgccgaaaagagtccttcagtggagctgttgggagagattcgctcccctagtgctcagaaagcacccatcgaggtccagccccttcctgctgagggcgcgctcgaggaagctccggcaaaagtggaacctcctacagtggaggagacactcgccgacgtgcagccgctgctcccagaagaggctccaagggaggaagcgagggagctccagctcagcaccgcgatggagacacccgcggaggaagctcctacagaatttcagagtccattgcccaaggagacaaccgctgaggaggcctctgccgaaatccagctgctcgccgcaacagagccgcccgcagacgagacacctgcagaggccaggagtccgttgagtgaagaaacatcagctgaggaggctcatgccgaagttcagagcccactcgcggaggagaccaccgcagaagaagcttctgccgagattcagctgctggctgctattgaggctcctgccgacgaaaccccagcagaagcccagagcccactctctgaggagacatccgcagaggaggcgcctgcagaagtccagtcaccatcagccaagggcgtgtcgatcgaagaagcccccctcgagctgcaacccccatccggcgaagagacgacagccgaggaggcgtccgccgccattcagttgctggccgctacagaagcttctgcagaggaagcacccgccgaggttcagccaccacccgctgaagaggcgcccgctgaggtgcaaccccccccggcagaggaagctcccgccgaggtgcaacctccccccgctgaagaggcccccgcagaagtgcagccacctcccgccgaggaagctcctgctgaagtgcagccacccccggccgaggaagccccggccgaagtgcagccgcctcctgcagaggaggccccagcagaagtacaatctcttcccgcagaggaaacacctattgaagaaaccctcgcggccgttcattctcctccagccgatgacgtcccagccgaagaggcctctgttgacaagcattcgcccccagcagacttgttgctaaccgaggaatttccaattggcgaagcgtcagccgaagtcagcccaccgcctagcgagcagacgcccgaagacgaggccctcgtcgagaatgtgtctacagagtttcagtccccccaggtggccgggatccctgctgttaaactggggtctgtagtgctagaaggggaggccaaatttgaggaggtgagcaaaatcaactcagtactcaaggacctctccaacactaacgacggccaagcccctaccctagaaattgagtccgtgtttcacatagagctgaagcagcgccccccggagctgtag

SEQ ID NO: 187893 - DNA, 2157 bp, synthetic construct
  misc_feature 1..2157: note = Description of Artificial Sequence: Synthetic coding sequence
  source 1..2157: mol_type = other DNA
atggtgggcaagagccagcagaccgacgtgatcgagaagaagaagcatatggcgatccctaaaagcagcagcccaaaagccacacaccgaattgggaatacctcagggagtaaaggtagctacagtgccaaagcatatgagagcatcagagtttcatcagaactgcagcagacatggaccaagaggaaacatgggcaggaaatgacgtctaagagtctccaaaccgacacgatcgtggaggaaaaaaaggaggtgaagcttgtcgaagaaacggtggtgccagaagagaaaagcgcagacgtccgcgaagctgcgatcgagttaccagagagcgtccaggacgtggagatccccccaaacattccttctgtgcagctgaagatggatcggagccagcaaacaagccgcacaggatattggactatgatgaacatcccgcctgtcgaaaaagtggataaagagcagcaaacctatttcagcgaatcagagatagtcgttatttctcgccccgattcctcctctacaaaatcgaaggaggatgccctgaaacacaagtcgtcaggtaagatctttgcttctgaacaccccgagtttcaacccgcaaccaatagcaatgaggaaattggacagaagaatatatcacgaacctctttcactcaggagaccaagaagggacctcctgtgcttctcgaagacgaactgcgggaggaggtgaccgtgcccgtagtccaggagggcagcgccgtaaagaaagtagcatctgctgaaatcgaacctccgtctaccgagaagttcccagctaagatccagccgccacttgtggaagaggctacagccaaagccgaacctcgccccgctgaggaaactcacgttcaggtacaaccttccaccgaggagactcctgacgcagaggcagctaccgctgtggctgaaaatagcgtgaaggtgcagccacctcctgctgaggaagcccctctggttgagttcccagctgaaatccaaccccccagcgccgaagagtcaccttccgttgagctactggcggaaatcttgccaccctctgccgaagagtctccgtccgaagagccgccagcagagatcctaccaccgcccgcagagaaatcaccaagcgtcgagctgcttggcgagattcggtctcccagcgcccagaaggcccctattgaagtgcaaccactcccggcggaaggagcgctcgaagaagctcctgccaaagtggaacctcccaccgtggaggaaaccctagccgatgtgcagccattactgcctgaggaggctcctagagaggaggcaagagaactccagctgagcacggccatggaaacacctgccgaagaggcaccaactgagtttcaaagtccactccccaaagagacaacggctgaggaggccagtgcagaaatccaattgctggccgccaccgagacttctgcggaggaggctccagcagaagttcagtccccctcagcggaagaagcgccagcggaggtgcagcctccacccgccgaagaagcccctgcagaggttcaacccccaccagcggaggaagcgccagcggaagtgcagcccccccccgccgaggaggcacctgccgaagttcagcctccacccgccgaggaggcgcccgcggaggtccagcctccacccgctgaggaagcaccagctgaggtccaacccccgcctgctgaggaggcgcctgctgaagtgcagagcctcccagccgaagagacccccatcgaggagactctggctgctgtccacagtcctccagccgacgatgtgcccgccgaggaggcgtcagtggacaagcatagcccacccgccgaccttttgctaacagaagagttcccaatcggagaggcaagtgccgaggtcagccctcccccatcggagcagaccccggaagacgaggccctagtggagaacgtttcaacagagtttcagtccccccaagtggctggcatcccagccgtgaaactgggcagcgtggttctggaaggggaagccaagttcgaggaggtgagcaaaatcaattctgtcctgaaagacctgagtaataccaacgatggacaggctccaactctggagattgaatccgttttccacatcgagctgaagcaaagaccacccgaactatag

SEQ ID NO: 187894 - DNA, 2052 bp, synthetic construct
  misc_feature 1..2052: note = Description of Artificial Sequence: Synthetic coding sequence
  source 1..2052: mol_type = other DNA
atggagcgggccgcccccagccggcgggtgcccctgcccctgctgctgttaggaggtctggcactgttggctgcaggtgttgacgctgatgttctgctggaagcgtgctgtgcagatggccacagaatggctacccaccaaaaagactgctctctgccatatgcaacagaaagcaaggaatgtaggatggtgcaggaacagtgctgccactcccagctggaagaacttcactgcgccacaggtatttctctggctaatgaacaggatcggtgcgcaaccccacatggtgacaacgccagcctagaagctactttcgtgaagcggtgttgtcactgctgcttattggggagggccgctcaggctcagggacagtcttgtgagtattccttgatggtagggtatcagtgcgggcaagtgtttcaggcgtgctgcgtaaaatcacaggaaacaggtgacctggacgtgggggggttgcaagagaccgacaaaattatagaggtggaagaggagcaggaagacccatacctcaacgacaggtgccgcggggggggaccatgtaagcagcagtgcagagacacgggcgacgaggtggtgtgttcatgcttcgttggataccagctgctttccgatggcgtgtcttgtgaggatgtgaacgagtgtataaccggatctcatagctgcaggcttggcgagtcttgtatcaataccgttggttccttcaggtgtcagcgggactcttcatgtggaaccggatacgaattgacggaggataatagctgcaaagatatagacgagtgcgagagcggaattcataattgcttgcctgactttatctgtcagaacacgttgggctctttcaggtgccgtccaaagcttcagtgtaagtctggctttatccaggacgcgctggggaactgcattgacattaatgagtgcctttctatatcagcgccttgtcctattggtcatacctgcataaacacggaaggctcctatacatgtcaaaagaacgtgcctaattgtgggcgcggataccacctcaatgaggagggcacacggtgtgtggacgtagacgagtgcgccccacccgcagaaccgtgtgggaaaggccaccgatgtgtcaattcccctggttcctttagatgcgagtgcaagacagggtactattttgacggcataagtcggatgtgcgttgacgtaaacgaatgccaaagataccccggaaggctttgtggacacaagtgcgagaatactcttggctcatatctttgctcatgtagtgttgggtttaggctgtcagtagatggccggtcttgtgaggatattaatgagtgttctagttctccttgcagccaggaatgtgctaatgtatacggcagctatcagtgctactgcagaagagggtaccagctttcagatgtcgatggcgtcacctgtgaagatattgacgagtgcgcgctacccaccgggggacacatttgctcctaccgctgtattaatatcccgggctccttccaatgctcatgcccgagttcaggataccggctggcacctaacggaagaaattgtcaggacatagacgagtgcgtgaccggaatccacaattgcagcattaatgaaacctgttttaatatccagggaggattccgctgcctcgcctttgaatgtcctgagaactaccgcaggagcgcagcaacgagatgcgagcggctgccatgccacgaaaaccgcgaatgcagtaagttaccactccgcatcacgtactaccatctcagttttccaactaatatacaggctccagcagtggtttttagaatgggcccctcatcagcggtgcccggcgactcgatgcaattggccatcacaggaggcaatgaggagggctttttcactacccgcaaagtgagccctcacagcggcgtggtggcactcactaagcccgtgcctgagccgagagatctgctactgaccgttaagatggatctgagtcgccatggcacagtttccagtttcgtggctaagctgtttatttttgttagtgcagaactgtag

SEQ ID NO: 187895 - DNA, 2112 bp, synthetic construct
  misc_feature 1..2112: note = Description of Artificial Sequence: Synthetic coding sequence
  source 1..2112: mol_type = other DNA
atggagcgggccgcccccagccggcgggtgcccctgcccctgctgttactgggtgggctggccttgctcgcggctggcgtcgatgctgacgtactgctggaggcgtgttgtgccgatggtcacagaatggccacacaccaaaaggactgcagtctgccatatgctacggagagtaaagagtgtaggatggtgcaagaacagtgttgtcatagtcaactcgaggaacttcactgcgccactggaatttccctggcaaacgaacaggaccgctgtgcaactccgcatggtgacaacgcttctttggaagccaccttcgtcaagcgttgttgccactgctgccttttgggcagggctgcccaggctcagggccagtcatgcgaatattctctgatggtcggctatcagtgtggacaggtattccaggcctgctgtgtcaagtcccaggagacgggtgaccttgatgtgggcggactgcaagaaaccgataagattatcgaggtggaagaggagcaggaggatccatacctgaatgacaggtgcaggggagggggaccatgcaaacagcagtgtagagacaccggagacgaggtagtctgcagctgtttcgttggctaccagcttctgtcggatggggtgtcctgcgaagacgtgaatgaatgtattacaggcagccactcttgtaggttaggggaaagctgtattaacacggtgggatcatttaggtgccaacgggattcgtcatgtggcactgggtacgagctaactgaggataattcatgcaaagacattgatgagtgtgagtcaggaattcacaattgtttaccagactttatttgccagaatacgctcggtagttttcgatgtcgtccaaagctgcagtgtaagtcaggattcatacaggacgcgctgggcaattgcattgacattaatgagtgcttgtccattagcgcaccctgccccattggccacacatgtatcaataccgaaggctcctacacgtgccaaaagaacgtccctaattgcggcagaggctaccatctgaacgaagagggaactcgctgcgtcgacgtcgacgagtgtgctccccctgccgaaccttgcgggaagggacacagatgtgtgaatagccctggatctttcaggtgcgagtgtaagaccggatactatttcgacggcattagtaggatgtgcgtagatgtgaacgaatgccaaagatatcctggtcgactctgcggtcacaaatgtgaaaacacgttaggctcttatctttgttcatgctccgttggattccgactttccgtagatgggcgtagctgtgaggacatcaatgagtgctcatcctccccgtgttcccaggagtgtgcaaatgtgtacggatcataccagtgctactgtagacggggataccagttgtcggacgtggatggcgtgacttgtgaagatatcgacgagtgtgccctcccaaccggtggacatatatgtagctaccggtgtataaacattcctggctcatttcagtgctcgtgtccatctagcgggtatcgtctcgccccaaatgggagaaattgccaagacatagatgaatgcgtgacagggatccacaattgtagcattaatgaaacgtgtttcaatattcaaggcggttttcgctgccttgcttttgagtgccccgagaattataggaggtcagccgccaccctgcaacaggaaaaaacagacaccgtgcgttgcattaaatcctgccgcccaaatgacgtcacatgtgtcttcgatcctgtccatactatttctcataccgttatttccctcccgacgtttcgagagtttacccgccccgaggaaatcatctttcttagggcaattactcctccccatcctgcgtcacaggcaaacatcatctttgatatcaccgaaggcaacctgagggacagttttgacataatcaaacgctacatggacggtatgactgtcggcgtcgttaggcaagtgcgcccaatcgttggcccctttcatgcagtcttgaagctagaaatgaattatgtggtggggggtgtggttagccatcgaaatgttgtgaacgtccacatctttgtaagcgaatactggttctag

SEQ ID NO: 187896 - DNA, 1701 bp, synthetic construct
  misc_feature 1..1701: note = Description of Artificial Sequence: Synthetic coding sequence
  source 1..1701: mol_type = other DNA
atggagcgggccgcccccagccggcgggtgcccctgcccctgctgcttctaggagggttagctctgctggctgccggagtggacgccgatgtcttgctagaggcctgttgcgcggatgggcaccggatggctactcaccagaaggattgttctcttccctacgccactgaaagtaaagaatgtcgtatggtgcaggagcagtgctgccattcccagctggaggaattgcactgcgccaccggaatttcattggccaatgaacaagaccgttgcgctacacctcatggagataatgccagcctcgaagccacatttgttaagcggtgctgtcattgctgcctgttgggacgcgccgctcaggctcagggccaaagctgcgagtatagcctgatggtgggctatcagtgcgggcaagtttttcaggcttgctgtgtcaaaagccaggaaacaggagatctcgatgtcggaggtctgcaagagaccgataaaattattgaagttgaagaggaacaagaagacccatacctaaacgatcgatgccgaggcggcgggccttgtaaacagcagtgtcgggatacaggagatgaggttgtgtgttcttgttttgttggataccaactcctttctgatggcgtgtcgtgcgaggacgtcaatgagtgcataaccggaagccacagctgtcgcctgggcgaaagttgcattaacacagtcggctcctttcgatgtcagagggactcttcatgtggtacaggctacgagttgactgaggataactcgtgtaaagacatcgatgagtgcgagtccggcattcacaattgtctgcctgactttatctgccagaatacactgggatcttttcgatgcaggccaaagctccagtgtaaaagtggttttatccaggacgccctgggcaattgcatagatattaatgagtgcttaagtatttctgcaccatgcccaattggacacacatgcatcaatactgagggcagctatacctgtcaaaaaaacgtgccaaattgcggtcgcggctatcatcttaatgaagaagggacccggtgtgtagacgtggacgaatgtgccccccctgccgagccatgtggcaaagggcacaggtgcgtgaactccccaggatccttcagatgcgagtgcaaaacaggctactacttcgacggaatctcgcgcatgtgcgtggacgtgaatgagtgccaacgctaccccgggcgtctctgtgggcacaaatgcgagaacacactgggctcctacctgtgttcttgcagcgtgggttttcggttgagcgttgacgggaggagttgcgaggacattaatgagtgctcttcttcaccgtgttcccaggaatgcgcgaatgtctatggcagctatcagtgctattgccggcggggatatcagctgagcgatgtcgacggagtgacgtgcgaggatatcgacgaatgcgccctccctacgggtggacacatttgttcataccgctgcatcaatattccgggatcattccagtgctcctgccccagctctggatacaggctggcgcccaacggcaggaattgtcaggacatagacgagtgcgtgaccggaatccacaattgtagtatcaatgagacctgctttaacatccagggcggcttccgatgtctagcctttgaatgccccgagaattaccgtagaagtgcagcaacatag

SEQ ID NO: 187897 - DNA, 2112 bp, synthetic construct
  misc_feature 1..2112: note = Description of Artificial Sequence: Synthetic coding sequence
  source 1..2112: mol_type = other DNA
atggagcgggccgcccccagccggcgggtgcccctgcccctgctgctgttaggaggactggctctgcttgcagccggggttgatgctgatgtgttactggaggcgtgttgtgcagatggccatagaatggccactcaccagaaagattgtagtctcccctacgcgaccgagtctaaggagtgtcgcatggtgcaagaacagtgttgtcactcccaattggaggaactgcactgcgctacagggatcagtctggcaaatgagcaggacaggtgcgctactccacacggcgataacgcgtctctcgaagccactttcgtgaagcgatgctgccattgttgtctcctcgggagggccgcccaggctcaggggcagtcttgcgagtattcgttaatggtaggctatcagtgtggccaggtgttccaggcatgctgtgtgaagtcgcaggaaaccggtgatctggacgtgggcgggttgcaggaaacagataagatcatcgaagtagaggaggagcaggaagacccctatctgaatgacagatgcagaggaggcggtccctgcaagcaacaatgtagggataccggggacgaggtcgtgtgttcttgctttgtggggtaccaactcctatctgacggggtgagttgcgaggatgtaaacgaatgtattacaggctcacactcatgccgcctgggcgagtcatgcataaatacagtgggatcatttcgctgccagagggatagctcttgcggcacaggatatgaattgaccgaggataattcctgtaaagatatcgacgagtgcgagtctggcattcacaactgcctaccagatttcatttgccagaatacactaggaagtttcagatgtagaccgaagttgcagtgtaagagcggttttattcaggacgccctggggaattgcatcgacatcaacgagtgtcttagcattagcgccccttgccccatcggacatacctgtataaacactgaaggatcgtacacctgccagaaaaacgtgccgaactgtgggaggggatatcatctcaatgaggaggggacaaggtgcgttgacgtggatgagtgtgccccccctgcagagccgtgcggtaaaggccacaggtgcgtcaacagtcctgggtcattccggtgtgaatgcaaaaccgggtactactttgacggaatttcgcgaatgtgcgtcgatgtcaatgaatgccagaggtacccaggtcggctgtgcggtcataagtgcgaaaacacgttgggttcatatctgtgctcttgcagtgtgggattccgcctatccgttgatggacgctcatgcgaagatataaacgagtgtagctccagtccttgttctcaagagtgtgccaatgtctatggctcgtatcagtgctactgtaggcgcgggtatcagttatctgatgtggatggtgtgacctgtgaagatatagacgagtgcgcgctgcccaccggaggacatatctgctcctaccggtgtattaacatacccggctccttccaatgttcgtgcccgagctctggctatagactggcccccaatggtaggaattgccaggatatagatgagtgtgtcactggaattcataactgtagtatcaacgagacctgctttaacatccagggtgggttcagatgtttggcttttgagtgtcctgaaaactacagaaggagtgctgctactcaaaaatctaaaaaaggaagacagaacacacctgcaggcagttccaaggaggattgtcgggtgctgccctggaaacagggtctggaggacacacacctggacgcatatctgccctgctgccggcgttttacgaggcccgaggaaattatattcttgcgagctatcacaccgcctcatcccgcatcacaggctaacattatattcgacattaccgaggggaacttacgtgatagctttgatattattaaaagatacatggacgggatgactgtgggggtggtcagacaagtgcgccctatagtcggaccatttcacgcagtcctgaagttagaaatgaactatgtggtgggtggggtggtatcccacagaaatgtggtcaacgtgcatatttttgtctccgagtactggttctag

SEQ ID NO: 187898 - DNA, 2166 bp, synthetic construct
  misc_feature 1..2166: note = Description of Artificial Sequence: Synthetic coding sequence
  source 1..2166: mol_type = other DNA
atggagcgggccgcccccagccggcgggtgcccctgcccctgctgctactggggggcctggcactgttagccgccggggtggacgctgacgttctgcttgaagcttgctgcgccgatggacataggatggccactcatcagaaagactgttctctgccctacgcgaccgaatccaaagagtgcagagcagtgggactcgcatccctgtgccaggatctgaacggcgcttgggctgtgtggaaggtcggccgggcatcacaggccgaggggacagcctctgcgagggcacaacgcagggggatggttcaggaacagtgttgtcacagccagctcgaggagcttcactgtgccaccggaatttccttagctaacgagcaggacaggtgcgccaccccccacggcgataatgcctccttggaagccacatttgttaagcggtgctgtcattgttgtttactgggaagggctgctcaggcacagggccagagttgtgaatacagtctgatggtcggctaccaatgcggccaagtgttccaggcgtgttgcgttaagagtcaagagaccggagatcttgacgtggggggcctgcaagagacggacaagatcatcgaagtcgaggaggagcaggaggacccatacttgaacgacaggtgccgcggtggcggaccttgtaaacagcagtgcagagataccggggacgaggtggtgtgtagctgcttcgtcggctatcaattgctctccgatggcgtcagctgcgaagacgtcaatgagtgtataaccggttcccatagttgtagactcggagaaagctgtatcaacacggttgggagcttccggtgtcagagggattcgtcatgcgggactggttacgagcttactgaggataattcctgtaaggatattgatgagtgcgaaagtggaattcataactgtctgccagattttatctgccagaacactctaggttcttttaggtgccggcccaaactgcaatgcaagagcgggtttatccaggacgctctgggcaattgtattgatatcaacgagtgcttaagtatatctgccccatgtcctattggccacacgtgcataaataccgagggtagttacacctgccagaagaacgtgcccaattgcggtcggggatatcaccttaacgaagaagggacgcgttgcgtcgacgtggatgaatgtgccccccctgcagaaccctgcggtaaaggccataggtgcgttaattctccaggatcctttcggtgtgagtgtaaaactggctactatttcgatgggatctcgagaatgtgcgtggatgttaacgaatgccagagatacccaggacgtttgtgtggacacaaatgtgaaaacactcttggcagttatttgtgtagctgttccgtgggatttagactgtccgtagatggcagatcttgtgaggatatcaacgaatgctcaagctccccatgctcccaggagtgtgccaacgtatacggttcttatcagtgttattgtcgccgaggctaccagctcagcgatgtggatggcgtcacatgtgaagacattgacgaatgcgccctccctaccgggggccacatctgttcgtacagatgcataaacatacccgggtcttttcagtgctcttgtcctagttccggataccgtctagccccgaacggccggaattgccaagacatcgacgagtgtgtcaccggcatccacaactgctctattaatgaaacctgtttcaacatccaaggaggattccgatgtctagccttcgaatgccccgaaaactatcgtagatcagccgcaacgagatgcgaacggttgccctgtcatgagaatcgagaatgcagtaaattacctctgagaattacctactatcacctcagctttcctacaaacatccaggcgcccgccgtggtgtttcggatggggccttcatctgcagtacccggggatagtatgcagttagccatcacaggggggaacgaggagggattttttacaacgcgtaaggtatcacctcattcaggagttgtggccctgaccaaaccagtgccagaaccccgagatctcctgctgacagttaaaatggacttgtcaagacacggtaccgtgagtagtttcgtggccaaactcttcatctttgtgtcagccgaactctag

SEQ ID NO: 187899 - DNA, 570 bp, synthetic construct
  misc_feature 1..570: note = Description of Artificial Sequence: Synthetic coding sequence
  source 1..570: mol_type = other DNA
atgaacagctacacccggggcagccggcggcccagcgccaaggccgctagccctgctgccagcgtgacgtctcgggtgtcacccagcggccctggcgtgcctgtggacgcagacgtcctgctggaggcatgctgcgcagatggtcaccggatggctacccaccagaaggactgcagtctaccctacgccaccgagtctaaagagtgtcggatggtccaggaacagtgctgtcattcccagctagaggagctgcattgtgccacaggcataagtttagccaacgagcaggatcgttgtgccacccctcatggagacaatgctagtctggaggccacctttgtaaaacggtgttgccactgttgtctgctgggccgggcggcacaggcccagggccaatcttgtgagtactctctaatggtgggttaccaatgtggccaggtctttcaggcctgctgcgtgaagagccaggaaacgggggacctggacgtgggcgggctacaggaaactgataaaataattgaagtagaggaagagcaggaagatccctatttgaacgaccgctgtaggtag

SEQ ID NO: 187900 - DNA, 81 bp, synthetic construct
  misc_feature 1..81: note = Description of Artificial Sequence: Synthetic coding sequence
  source 1..81: mol_type = other DNA
atggccacccaccagaaggactgcagcctgccctacgccaccgagagtaaagagtgccggatggttcaggaacagtgctag

SEQ ID NO: 187901 - DNA, 1806 bp, synthetic construct
  misc_feature 1..1806: note = Description of Artificial Sequence: Synthetic coding sequence
  source 1..1806: mol_type = other DNA
atggagcgggccgcccccagccggcgggtgcccctgcccctgctgctgttgggggggctagcactgcttgcagccggggtggatgctgacgtgctgctcgaggcttgctgcgccgacggacataggatggccacgcatcagaaagactgttcactcccttatgccactgaaagcaaggagtgtcgcatggtgcaagagcaatgttgccacagccagctcgaagagttacactgtgctacaggaatctctttggctaatgagcaggatcgatgcgcgaccccccacggggataacgcatccctggaggcaacatttgtgaagcgctgctgtcattgttgcttgcttggccgagctgcccaggctcaaggccaatcttgtgaatattcccttatggtgggataccagtgcggacaggtgtttcaggcttgttgtgtcaagtcacaggaaacaggtgatctcgacgtgggaggactgcaggagaccgacaaaatcatcgaggtggaggaggaacaagaagatccctatctgaatgaccgctgcagaggaggaggtccctgtaagcagcaatgccgggacacaggcgacgaggtagtgtgcagctgttttgtcggctaccagctcttatccgatggcgtctcatgcgaggatgtgaatgagtgtatcactggttcccatagttgtaggctgggggaaagttgcattaacactgtagggtcatttcggtgccagcgagacagcagctgtggcacggggtacgaactaacagaggataattcctgcaaggacattgatgagtgtgaaagtggcattcacaattgtttaccagatttcatttgccaaaatactttgggaagcttccggtgccgtcctaagcttcaatgtaagagcggctttattcaagacgccctcgggaactgtattgacattaacgagtgtctgagtatttccgccccatgcccaataggccacacatgcattaacaccgagggatcgtatacttgccagaagaacgttcctaactgtggacgcgggtatcaccttaacgaagagggcactcgctgcgtggacgttgacgagtgcgcacctcctgcagaaccatgtgggaaaggccaccgctgcgtgaattccccagggtcattccgctgcgagtgtaagaccgggtactactttgacggaataagtaggatgtgtgtggacgtgaacgaatgtcaaaggtaccccggtaggctgtgtgggcacaaatgcgaaaatactctgggctcctatttgtgttcgtgctccgtcggttttcgactttctgtagacggcagaagctgtgaggacatcaacgagtgtagtagttcaccctgctcacaggaatgcgctaatgtctacggcagctaccagtgttattgtagacggggataccagctctccgatgtcgacggtgtgacttgtgaggacattgatgagtgtgccctaccgaccggcggccatatttgcagctatcgatgtataaatattcctggttcattccagtgtagctgcccatcatccggctatcgactggccccgaacggacgcaactgtcaggatattgacgaatgcgttacaggcattcataactgcagtatcaatgagacatgctttaacattcaaggtggttttcggtgtttggccttcgagtgccccgagaattaccgacgcagcgccgccacacagaagtctaaaaaaggacgccaaaacacaccagcaggctcaagcaaggaggattgccgtgtgctgccctggaagcagggcttggaggatacacatctggatgcatag

SEQ ID NO: 187902 - DNA, 198 bp, synthetic construct
  misc_feature 1..198: note = Description of Artificial Sequence: Synthetic coding sequence
  source 1..198: mol_type = other DNA
atggccacccaccagaaggactgcagcctgccctacgccaccgagtccaaggagtgtcggatggtgcaggagcagtgctgccattcccagctggaggagttgcattgtgccaccggaatcagcctggccaatgaacaggatcgctgtgcaaccccccatggggacaatgcttcccttgaggcgacctttgtgaagtag

SEQ ID NO: 187903 - DNA, 546 bp, synthetic construct
  misc_feature 1..546: note = Description of Artificial Sequence: Synthetic coding sequence
  source 1..546: mol_type = other DNA
tgccggatggtgcaggagcagtgctgccacagccagctggaggagcttcattgcgcaactggcatctctctggccaacgaacaggacaggtgcgctactccgcacggagacaacgccagccttgaggccaccttcgtgaagcgatgctgccactgttgcctcctagggcgggccgctcaggctcaggggcagtcctgtgagtacagccttatggttggataccagtgtgggcaggtgttccaggcttgctgtgtgaaatcccaggaaacgggcgaccttgacgttggcggactgcaggagaccggaggcggcccttgcaaacaacaatgtcgagatacaggagacgaagtggtgtgttcgtgctttgtgggttaccagttgttgtccgacggggtatcctgtgaggatgtcaatgagtgtataaccggtagccactcctgtaggctgggtgagtcatgcatcaatacggtgggtagcttccggtgccagagggactctagttgcggcaccggctatgagctgaccgaggacaatagctgcaaatag

SEQ ID NO: 187904 - DNA, 420 bp, synthetic construct
  misc_feature 1..420: note = Description of Artificial Sequence: Synthetic coding sequence
  source 1..420: mol_type = other DNA
atggccacccaccagaaggactgcagcctgccctacgccaccgagtcaaaggagtgtagaatggtccaggaacagtgctgtcatagccagctcgaggagctgcattgtgcaacggggatatccctcgcaaacgaacaggaccgctgcgccaccccacacggtgacaatgcaagccttgaagctactttcgtgaaacggtgttgccattgttgtctgttgggacgtgccgcgcaggcacagggacaatcctgtgaatactcactaatggtgggctaccaatgcgggcaggtgttccaggcatgttgcgttaagtctcaggaaaccggtgacctggatgttggtggacttcaagaaacagacaaaattatagaagtggaggaagagcaagaggacccttacctaaacgataggtgccgctag

SEQ ID NO: 187905 - DNA, 519 bp, synthetic construct
  misc_feature 1..519: note = Description of Artificial Sequence: Synthetic coding sequence
  source 1..519: mol_type = other DNA
atggagcgggccgcccccagccggcgggtgcccctgcccctgctgctgctcggcggacttgcgttactggccgcaggggttgatgcggatgtgctgctggaggcctgttgcgccgatggccatcggatggccactcaccagaaggactgcagcttgccttacgctaccgagtccaaagaatgtcggatggtgcaagaacagtgctgccactcccaattggaggagctgcactgtgcgaccggcattagtctggcaaacgagcaagacaggtgcgctaccccacatggcgacaacgcaagcttggaagccaccttcgtcaaaagatgctgccattgctgtctcctgggacgggcagcccaggcccaaggacagtcctgtgagtacagccttatggtcggataccagtgtggtcaagtttttcaggcctgttgcgttaagtcccaggagaccggagatctggacgtcgggggcttgcaggagacgggcgggggcccttgtaagcagcagtgcagagactag

SEQ ID NO: 187906 - DNA, 3555 bp, synthetic construct
  misc_feature 1..3555: note = Description of Artificial Sequence: Synthetic coding sequence
  source 1..3555: mol_type = other DNA
atggtgctgctgtgggagcccgccggcgcctggctggccctgggcctcgcactcgcattaggcccaagcgttgcggccgccgctccacgtcaggactgtacaggggtcgagtgcccccccttggagaattgtatagaggaggccttggaacctggtgcttgctgcgccacctgtgtgcagcaggggtgtgcatgtgagggataccagtattatgactgcctccagggcggctttgtgcgcggccgcgtgcctgccggtcagtcgtactttgtggattttggatcaacggaatgctcttgtcccccgggtggggggaagatctcctgtcagttcatgctttgtccagaactgccaccgaattgcatcgaagctgttgttgtggccgattcctgcccgcagtgtgggcaagtgggttgtgtgcatgccggtcataaatatgctgctgggcataccgtgcacctgccgccttgtagggcctgccactgccccgatgctggtggcgaactgatatgctatcagctgcccggctgccatggaaacttctcagatgcagaggagggcgatcccgaaagacactatgaagatccatattcttacgatcaagaagtcgcggaggttgaggcagccacggcactcggtggcgaagtccaggccggcgccgtccaggctggggcaggaggaccaccggccgcgctgggtggaggcagtcagcctctgtcaaccatccaggcccccccttggcccgcagtgctcccgcgccctacagccgccgccgcactaggtccaccagctcctgtgcaggccaaagcgcgacgggtgaccgaagattcggaggaagaagaagaggaggaggaagagcgcgaagagatggcagtgactgaacagcttgcggccggcggtcatcggggacttgatgggctacctaccaccgccccagctggaccttcgctccccatccaggaggagcgggcggaggctggtgcccgagcggaggccggcgcccggcccgaggaaaacctgatactggacgcgcaggctaccagcagatcgacaggacccgagggcgtcacacatgccccaagtcttggtaaagccgccctcgttccaacccaggccgtgccgggtagcccccgcgaccccgtgaagccctccccacacaacattctctcaacatccctccccgacgcagcctggatcccaccaactcgtgaagttccaaggaagccacaggtcttgccacattcacacgtcgaagaggacacagacccaaacagcgtgcacagcataccccgctcatcccccgaaggctcgactaaggacctgatcgagacttgttgtgccgccggtcagcagtgggcaatcgacaacgacgagtgtctggagattcccgaatctggcacagaggacaatgtctgtaggactgctcaacgccactgttgcgttagttacctgcaagaaaagtcatgtatggcaggtgttctgggggccaaagagggggagacatgcggtgctgaagacaatgattcatgcgggatatccctatacaaacagtgttgcgattgctgcggcctcggattgagagtgcgggccgaaggtcagtcatgtgaatctaacccaaaccttggatacccatgcaaccatgtaatgttgagctgttgtgaaggtgaagagcctcttatagttccggaggtacgtagaccccctgaaccggcggccgcccctagaagggtaagcgaagcagagatggcaggccgggaggcgctgtcactcggtactgaggccgaactaccgaacagcttgcccggagatgaccaagatgaatgtctcctgctgcccggtgaactttgccaacatctgtgtatcaatactgtaggatcttaccactgtgcctgctttcccggcttttctctgcaggatgacggaagaacctgtcggcctgaaggacatcccccacagcctgaagccccacaggaacctgcactgaaatccgagtttagtcaggttgcctccaacacaatccccttaccattgcctcagccaaatacctgtaaggacaatgggccttgtaaacaggtatgttctaccgtcggcggctctgccatttgcagctgtttccctggctacgcaataatggcagacggagtgtcttgcgaggacatcaacgagtgcgtgactgatctgcacacctgctccaggggagagcactgcgtgaacacactgggttccttccattgttacaaagctctcacatgcgagccagggtatgctcttaaggacggcgagtgcgaagacgtggacgagtgtgccatgggcacgcacacctgccagcccggattcttgtgccaaaatacaaaggggagtttttactgtcaggccagacagcgctgtatggacgggtttctgcaggacccagagggtaactgcgttgatatcaatgagtgcacatccctgagcgaaccatgccgccccggctttagttgcatcaatacagtcggttcatacacttgtcaacgaaaccccctgatttgcgctcgaggttaccatgcatcggatgatggcacaaaatgcgtggacgtgaatgagtgtgagacaggagtgcatcggtgcggggaaggacaggtatgtcacaacctcccaggctcatatcgctgtgactgtaaggcaggctttcaaagggacgcgttcggcaggggatgtattgacgtgaatgagtgttgggcctcgccagggaggctgtgtcagcacacttgtgaaaatacacttggaagctatagatgctcctgcgcttccggctttctgttggccgccgatggcaagagatgcgaagatgtcaatgaatgcgaagcccaaagatgctcacaggaatgcgcaaacatttatgggtcttatcaatgctattgccgacagggctaccagttggctgaagacggccatacatgcactgacattgacgaatgcgctcaaggcgctggtatcctgtgtacgtttcgatgcttaaacgtgcctggctcataccaatgtgcttgtcctgagcagggatacacaatgactgcaaatggccggtcctgcaaagatgtggacgagtgcgctcttggcacacataactgttctgaagccgagacctgccacaatatccagggatccttcagatgtttgcgctttgagtgtccacccaattacgtgcaggtgagcaaaactaaatgtgaacgaacaacctgtcatgattttttggagtgtcaaaattcgcctgcacgaattacccattatcagctcaacttccagactggtctgcttgtgcccgctcacattttccgcataggtcccgctcctgccttcaccggagacacgattgccctaaatatcatcaagggtaacgaggagggctacttcgggacccgcaggcttaatgcctacactggcgtcgtctatcttcagcgagccgtcctggagccgcgagatttcgccctcgatgtggaaatgaaactctggcgacaaggttcagtcaccactttcctagctaagatgcacattttcttcacgaccttcgctttatag

SEQ ID NO: 187907 - DNA, 3696 bp, synthetic construct
  misc_feature 1..3696: note = Description of Artificial Sequence: Synthetic coding sequence
  source 1..3696: mol_type = other DNA
atggtgctgctgtgggagcccgccggcgcctggctggccctgggcctggctctcgccttgggaccgtccgtcgccgcagccgcgcctagacaggactgcactggtgtcgaatgtcccccgctcgagaactgcatcgaagaggcgctcgaaccgggcgcttgctgtgccacgtgcgttcagcagggctgcgcctgcgaaggataccagtactatgattgccttcagggagggttcgtacgcggaagagtgcctgctggtcagtcctattttgttgattttggctccaccgagtgtagctgcccaccaggaggtggaaagatctcatgccaattcatgctgtgccccgagcttccgcccaattgtatcgaagctgtggtcgtggcagattcttgccctcagtgtggccaggttggatgcgtccacgcggggcacaagtacgccgctggtcataccgtacatctgccaccatgcagggcatgtcattgtcctgatgccggaggcgagttgatttgctaccagctaccgggttgccacggcaacttttccgacgccgaagagggagatccggaacgacactacgaagacccttacagctacgatcaggaagtcgctgaggtcgaggcagctaccgccttggggggcgaagtgcaggctggtgccgtgcaggccggcgcaggaggcccacccgcggctctgggcgggggaagtcagccgctgagcaccattcaggcccccccatggccagccgttctgcctaggcccacggcggcagccgcgttgggaccgcctgcccccgtacaagccaaagcccgcagagttactgaagacagcgaagaggaagaggaagaggaagaagagagggaggaaatggcagtaacagaacagttagctgccggtggacacaggggtttggacggcctaccaactactgccccggccggacccagtcttcccatacaggaagaaagagccgaggccggcgccagggctgaggctggcgcccggcctgaggagaaccttatcttagatgcgcaggccacatctagatcaactgggccagaaggtgttactcacgccccatcactgggaaaagctgcactggtacctacacaagccgtgccaggtagcccaagagaccccgtgaaacccagtccacacaacattctgagcacatcactgcctgatgcagcatggatcccaccaactagggaagtccccaggaagcctcaggtgctgcctcactcacacgtcgaggaggataccgaccctaattcagtgcattctatcccaaggtcatctcctgagggctccacgaaagacctgatcgagacatgttgtgccgccggccagcagtgggctattgacaacgacgagtgcctggaaatcccggagagcggaactgaagataatgtctgccgcacggctcagaggcattgttgcgtatcttaccttcaggaaaaatcgtgcatggctggtgtgctgggggcaaaagagggtgaaacgtgtggtgctgaagacaacgatagttgtggcatttccttatataagcagtgctgtgattgctgtggcctggggctgcgcgtgagggcagagggacagtcttgcgagagcaacccaaacttgggctacccgtgtaatcatgttatgctaagctgttgcgaaggcgaagagccgctcattgtgcccgaggtccggagacctcccgaacccgccgccgcccctcggcgtgtttcggaggcagagatggccggacgagaggcattgtccttgggaacagaggccgaactgcccaacagtttgccgggcgatgaccaggacgaatgtcttcttctgcccggcgaactgtgtcagcatctgtgtataaacactgtggggtcctatcactgcgcgtgtttccctggtttcagcttacaggacgacggcaggacatgtaggccagaggggcaccccccgcaacccgaggcacctcaagagccagcactgaagtccgaatttagtcaggtggccagcaataccatccccctgccactcccacaacccaatacttgcaaggacaatggcccttgcaagcaggtgtgctcaacagtaggtgggagcgctatctgttcctgctttcctgggtatgcaattatggcggacggtgtctcttgcgaggaccaggacgaatgtttgatgggcgcgcatgactgcagccgccggcagttttgtgtgaacactctgggttcattctattgtgtgaatcacactgtgctgtgtgcagacggatacatcttgaacgcgcacaggaaatgcgtcgatattaatgagtgtgtgaccgacctacatacatgctctagaggagagcactgtgtcaataccctaggctctttccattgctataaagccctgacatgcgagccaggatatgcactcaaggatggcgagtgcgaagacgttgatgaatgtgccatgggaactcacacctgtcaacctggattcctctgtcagaataccaaaggttcgttttactgtcaagctaggcagaggtgtatggatgggtttctacaggaccccgagggcaactgtgtggatatcaacgaatgtacatccctgagcgagccttgtaggcctggattttcctgtattaacacagtgggctcctatacctgtcagcgcaacccccttatttgcgcccggggataccacgctagcgacgacggaactaagtgcgttgacgtgaatgaatgcgaaaccggtgtacatcggtgcggcgagggacaagtctgtcataatctgcccggctcatatcggtgtgattgcaaggcaggcttccagcgggatgctttcggtcggggctgtatcgatgttaacgagtgctgggcttctccaggaagattatgtcagcacacttgtgagaacacattaggatcttacagatgcagttgtgcctctggatttctgttggccgcagacggtaagcgatgtgaagacgtgaacgaatgcgaggcccagcggtgtagccaggagtgtgcaaacatctacgggagttaccagtgctattgtagacaggggtaccagctggctgaagacgggcacacttgcacagacattgacgaatgcgcccagggcgcgggaatcttatgcacctttcgttgtctgaacgtgcctgggtcctatcagtgcgcgtgccctgaacagggctatacaatgacagccaatggccgaagctgtaaggacgtggatgaatgcgctctgggtactcacaattgctctgaagctgaaacttgccacaatattcaaggtagctttaggtgcctcaggttcgaatgtcccccaaactacgtgcaggtgtcaaaaaccaaatgcgagaggaccacttgccacgatttcctggagtgccagaactcacccgctaggataacccattaccagctgaattttcagactgggctgttggtccctgcacacatcttcagaatcgggcctgcaccggcattcacaggcgacaccatcgctttaaacatcattaagggtaacgaagaaggctatttcggcactagaaggcttaacgcctataccggcgtggtttatctgcaaagggccgtgctcgagcctcgggactttgctttagatgtcgaaatgaagctatggagacagggatccgtcacgacctttctggcgaagatgcacattttctttacgacttttgccttgtag

SEQ ID NO: 187908 - DNA, 480 bp, synthetic construct
  misc_feature 1..480: note = Description of Artificial Sequence: Synthetic coding sequence
  source 1..480: mol_type = other DNA
atggtgctgctgtgggagcccgccggcgcctggctggccctgggcctggccctggcattaggccccagtgtggccgccgctgctccaaggcaggattgcacgggagtggagtgtcctcccctggagaactgtatagaagaagctctggaaccgggagcatgttgcgccacttgtgtacaacagggttgtgcgtgtgagggttatcagtattacgactgcctgcagggcggcttcgtaagaggccgcgtgccagctggacaaagttatttcgtcgacttcggatctaccgagtgttcctgtccccccggagggggtaagatcagttgtcagttcatgctttgcccagaactgccacccaattgtatcgaagcggtagtagtagccgactcttgtccgcagtgcgggcaggttggttgtgttcatgcagggcacaagtacgccgccggtcatacagtgcatttgcctccatgcagggcctag

SEQ ID NO: 187909 - DNA, 3696 bp, synthetic construct
  misc_feature 1..3696: note = Description of Artificial Sequence: Synthetic coding sequence
  source 1..3696: mol_type = other DNA
atggtgctgctgtgggagcccgccggcgcctggctggccctgggcctggcactggcgctcggcccctcggtagcagcggcggcccctaggcaggattgcaccggggtcgaatgccctccccttgagaactgtattgaggaggccttggagcctggggcttgctgcgctacttgcgtccaacagggctgcgcctgcgagggctatcagtactacgattgcctccaggggggctttgttagaggtcgagtaccagccgggcaatcgtactttgtggactttggctccacagagtgttcctgccccccaggtggcggaaagatttcctgtcagttcatgctttgtcccgagcttccccccaactgtattgaggccgtggtggttgcagattcttgccctcaatgtggccaggtcgggtgcgtgcacgctggccacaagtacgccgcagggcatacagtccatctccccccttgccgggcttgtcactgcccagatgctggtggggagttgatttgttaccagcttcccggatgtcatggcaactttagcgatgctgaggagggggatccagaacgccactatgaggacccatattcctatgaccaggaggtagctgaagtggaagcggcgaccgctctcggaggtgaggttcaagcaggggccgtgcaggccggagctggaggtcccccggctgcactgggcggcggttcccaaccactgtctaccattcaagccccaccctggccagcagtgctccctagaccaactgctgccgccgctctaggaccaccagcacccgttcaggcgaaagctagacgcgtgaccgaggattcagaagaggaagaggaagaagaggaggaaagagaagagatggctgtgacggagcagttagcagctggaggccaccgcggcctggacggattgccaacaactgcccctgccggtcccagcctcccaatccaagaggaacgcgctgaggcaggtgcccgtgccgaggcaggtgctaggcctgaagaaaatttgatactggacgcccaggctacatcccgatcaacgggccctgagggagtcactcacgctcctagtctgggaaaagccgcccttgtcccaacacaagcggtgccagggtctccccgcgatccagttaaaccctccccgcacaacatactgagtacgtcactgccggacgccgcttggatcccacccacacgagaggtgccaaggaaaccgcaagtgcttccccattctcacgtcgaggaggacacagatcccaattccgttcactcgatacctcggtcttctcccgaggggtctaccaaagacctcattgagacctgctgtgcggcaggtcagcaatgggccatcgataacgatgagtgtctggaaattcccgagtcgggcactgaggataacgtgtgtcggaccgcccagcgtcactgctgtgttagttacttacaggagaaaagctgcatggctggcgttttaggggctaaagagggagagacttgcggggctgaggacaacgatagctgtggcatttcgctgtacaaacagtgctgcgactgctgtggtttgggtttacgagtgcgtgccgagggtcagagctgtgagtccaatccgaatctcggatatccatgtaaccatgttatgttgtcttgctgcgaaggtgaagagccattgattgtcccggaggtgagaaggccccccgagcccgctgcagctccaaggcgggttagtgaggcggagatggctggcagggaggcgctctcacttggcaccgaagcggagctccctaatagcttacctggggacgaccaggatgagtgcctgctattgcccggagagctctgccagcacttgtgtatcaacacggtggggtcctaccattgtgcatgcttccccggtttctccctgcaggatgacggaaggacctgccgaccagagggtcatccacctcagcccgaggcccctcaagaacctgctctaaaatctgagtttagtcaggtggcctctaacacaattcctctgccactgcctcaaccgaacacatgcaaagataacgggccctgcaagcaggtgtgcagcaccgtgggcggcagcgccatctgctcctgtttccccggttatgccattatggcggacggagtttcgtgtgaagaccaggacgaatgcctgatgggagcacacgactgttctaggcgacaattctgcgtgaacaccctggggagcttctactgcgtgaaccatactgttttgtgtgcggacgggtacatcctaaatgctcataggaaatgcgtggacatcaacgaatgcgtcacagatcttcacacctgttcacgcggagagcactgtgtgaacactttgggcagcttccattgctataaggccctgacctgcgagccagggtacgctctgaaggatggggaatgcgaagatgtcgatgagtgcgctatgggaacgcatacttgtcaacctgggtttctctgccagaacaccaaaggatcattctactgccaggctcgccaacgctgcatggatggattcctgcaggatccagagggcaactgtgtggacataaatgagtgtacaagcctgagcgagccatgccgccctgggttttcatgcattaacaccgttgggtcatacacatgtcagcgcaatcccctaatttgcgctaggggctaccacgcctccgacgacggaactaaatgcgtggatgttaacgagtgcgaaaccggggtccaccgctgtggggagggccaagtatgccataaccttccaggttcttacagatgtgactgcaaagccggtttccaaagggacgcgttcggccggggctgtatcgatgtaaacgaatgctgggcaagccccgggcgtctttgccagcatacctgcgagaatactctgggctcctatcgctgctcatgtgcatcaggcttcctcttagctgccgacggcaaacggtgtgaggacgtgaatgagtgcgaagctcagagatgttcccaggagtgtgcaaatatctatggaagttaccaatgctactgcaggcagggttatcaattggcagaggacggtcacacatgtacggacatcgatgagtgtgctcagggagccggtattctgtgcacattccggtgcctgaacgttcccggaagttaccaatgcgcttgcccggaacaggggtacactatgaccgccaacggcaggagctgtaaagacgtggacgaatgtgccctaggcacccacaactgcagcgaagccgagacttgtcacaatatccagggtagcttccgctgcctgcgtttcgagtgcccccctaactatgtgcaggtgagcaaaaccaaatgtgaacggacaacatgccacgattttttggagtgccagaattcccccgcgcggatcactcactatcaactcaacttccaaaccggactcctggtgcctgctcacatattccggataggacccgcaccagcttttactggcgacaccatcgctctgaatattattaaaggcaatgaagaaggatacttcgggacaaggcggctcaacgcttacactggggtggtctacctgcagcgtgccgtccttgaacctagagattttgctcttgacgtggagatgaaactttggagacaggggtccgtgactacattcctagccaaaatgcacattttcttcacaacttttgccttgtag

SEQ ID NO: 187910 - DNA, 3633 bp, synthetic construct
  misc_feature 1..3633: note = Description of Artificial Sequence: Synthetic coding sequence
  source 1..3633: mol_type = other DNA
atggagaccagcctgagcctggagagcggccaccacggcagctaccgccgcggcgaccgtcctggactcgcctggaccatggttctgttatgggaacccgctggggcatggctcgctctgggactcgccctggcgctgggcccctctgttgcagcagctgctccacgtcaggattgtaccggcgtcgaatgcccaccactggagaattgcatcgaggaagccctcgagccaggggcgtgttgtgccacctgcgtgcaacagggctgcgcctgtgagggttatcagtattatgattgcctgcagggaggctttgtgaggggtcgagtgccggccggtcagtcctactttgtggatttcgggtcaaccgagtgctcttgtccgcctggaggagggaaaatttcctgtcagtttatgctctgcccagagctccctccaaattgcatagaggccgttgtggttgcagatagttgtccccagtgtggccaggtcgggtgtgtgcatgccggacacaagtatgccgccggacacacggtacaccttccaccgtgccgcgcctgtcactgccccgacgcgggtggcgaattgatatgttatcagttgccaggatgccacgggaactttagtgatgcggaggagggagatccggagcgtcactacgaagacccatacagttacgaccaggaagtggcagaagtggaggcagcgacggctttgggcggtgaggtacaggcaggcgcagtgcaggcaggcgcaggtggccctccagcggccctgggtggaggtagccagccactgtccactatccaggcaccgccttggccggcagtgctgccccggcccaccgcagcagctgctttaggacctccagctccagttcaagcaaaggctagaagagttaccgaagattctgaggaggaggaggaagaggaagaagagagggaagaaatggcggtgacagagcagctagccgcaggcggccacagaggactggacggcttgcctaccacagcccctgccggccccagtctgccgatacaggaagagagggccgaagctggtgctagagccgaagctggtgccagacccgaagagaatctgatcctggacgctcaggccactagcagaagtactggtcccgagggagtgacccatgcaccctcgctgggtaaagctgcgttggtccccacccaagcagtacccgggtccccacgggaccccgtgaagccatctccccacaatatcctttcaaccagtctgcctgatgccgcatggattccccccacacgggaggtgcccaggaagccgcaggttctccctcactctcacgtggaagaagacacagatccgaacagcgtccattccattccccgatcttcacccgaaggctcaactaaggatttgatcgagacctgctgcgcagcaggccagcagtgggccatcgacaacgatgagtgtctcgagatccctgaatctggtaccgaagacaatgtgtgtcgcacggcacagcgtcattgttgcgtgagctatcttcaggaaaagtcctgtatggctggcgttctgggcgccaaggaaggcgagacgtgcggtgcagaggacaatgatagttgcgggatctccctctataagcaatgctgtgattgctgcggactgggactccgtgtacgagccgaaggacaatcttgcgagagtaatcctaatctgggatacccgtgcaaccacgtcatgctgtcgtgttgcgaaggagaggagccacttatagtgcctgaagttcggcggccccctgagccagcagccgctcctagaagagtgtctgaagctgagatggcaggtagagaggctctctctctcggcactgaagcggagctgccaaattcgcttcctggagatgatcaggacgaatgtcttttgctgcccggagagctgtgccagcacttgtgcatcaacacagtcggatcctatcactgcgcctgctttccaggattctccttacaggatgacggtaggacgtgccgacctgaaggccacccacctcagccggaggccccccaagagcctgctttgaaaagtgaattcagccaggtggctagcaacactattcccctccccctgccccaaccgaatacctgcaaagacaacggaccttgcaagcaggtgtgtagcacagttgggggttccgcaatctgttcctgttttcctgggtatgctattatggctgacggggtttcatgcgaagatataaatgagtgcgtgacagatctccacacttgtagccggggggaacactgcgtgaataccctgggatcattccattgttataaggccctgacttgtgagcccggttacgcactcaaggacggcgagtgtgaggatgtggatgagtgcgccatgggcacacacacttgccagcctggctttctgtgccagaacaccaagggctctttctattgtcaggctagacagcggtgtatggatggatttctgcaggatcctgaaggaaattgtgtggatattaatgaatgcaccagcctatctgagccatgccgtcccggcttctcctgtattaacactgtggggtcctacacctgtcagcggaaccccctaatctgcgcccgcggataccacgcatctgacgacgggaccaaatgcgttgatgtaaacgaatgtgaaacaggcgtacatcgatgcggcgaagggcaagtgtgccataatctccctggctcttaccgatgtgactgcaaagctggatttcagagagatgctttcgggagaggttgtatcgacgttaacgagtgctgggcaagccccgggcgtctgtgtcagcacacttgtgaaaacactctcgggtcctatcgctgttcctgcgcctctggatttctccttgcagcagacgggaagagatgcgaagacgtgaacgagtgcgaggcccagaggtgcagccaggagtgcgccaacatctacggatcatatcaatgttattgtcgacagggctatcagttggccgaggacgggcacacgtgtaccgatattgacgagtgcgcccaaggcgctggtatcctttgtacgtttcgatgtctgaatgttccaggatcctatcaatgcgcctgccctgagcaagggtatacaatgaccgcaaatggacgttcgtgtaaggacgtcgatgagtgtgccttaggaactcacaactgttctgaggcagagacatgtcacaatatacagggtagctttagatgccttaggtttgaatgtccccccaactatgtgcaggtttccaaaacgaaatgtgaacggaccacttgtcacgatttcctggagtgccagaactccccagcccgaatcactcattatcaactgaatttccaaacaggactgctggtgccagcccatatcttccgtatcgggcccgcccctgctttcaccggcgataccatcgcattgaacattattaagggcaatgaggagggatacttcggtacgagaaggctaaacgcttatacgggtgtggtgtacctgcagagagccgtactggaaccaagagacttcgcgcttgacgtcgagatgaagctgtggcggcaaggcagcgttacaaccttcctggctaagatgcacatattttttactacgtttgctttgtag

SEQ ID NO: 187911 - DNA, 1347 bp, synthetic construct
  misc_feature 1..1347: note = Description of Artificial Sequence: Synthetic coding sequence
  source 1..1347: mol_type = other DNA
atgcccggcatcaagcggatcctgaccgtgaccatcctggccctgtgtctgcccagtccgggcaacgcacaagctcagtgcacgaatggattcgacctcgatagacaatctggccagtgtctagacatcgatgaatgtcgaaccattcctgaagcctgtcggggagatatgatgtgtgtcaaccagaacgggggctacctctgcattccaagaacaaacccagtctatcgaggcccttatagcaatccatactcaacaccgtactccggcccgtatcctgccgcagccccgccactttctgcgccaaattatcctacgatcagtcgacctctgatctgtcgatttggctatcaaatggacgaatcaaatcagtgcgtggacgttgacgagtgcgccaccgattctcatcagtgcaaccccactcagatatgcatcaacacggaggggggctacacttgctcctgcaccgacggatactggttgttggaaggccagtgcttggacatcgatgagtgcaggtacggatactgtcagcagttgtgtgccaacgtccctggctcttactcctgtacatgtaacccaggtttcacactcaacgaagatgggagatcatgccaggacgtgaacgaatgcgcaaccgagaatccatgtgttcagacctgcgtcaacacatatggctctttcatttgccgctgtgacccaggctacgagttggaagaggacggcgtacactgtagtgacatggatgaatgcagcttctctgaatttctctgtcagcatgagtgcgtgaatcagcccggaacctacttctgcagctgcccacctggctatatcctactggatgataaccggagttgccaggatattaacgaatgcgagcaccggaatcacacatgcaatttgcaacagacctgttataatcttcagggtggatttaagtgcattgaccctattagatgcgaagagccctacctgagaatcagcgacaacagatgtatgtgtcctgcagaaaacccaggttgccgcgatcaaccgtttacaatcctttacagagacatggacgtggtgagcggtcggtccgtgcctgcggatatattccaaatgcaggccacgacaagataccctggtgcctattacatcttccaaattaagtccggtaacgagggaagagagttctatatgcgccagaccggacctatttccgctacattggtgatgacccgccctattaagggacctcgcgaaatacagcttgacttagagatgatcaccgtcaataccgttatcaacttcagagggtcgagtgtgataagacttagaatctacgtttcacaatatccattttag

SEQ ID NO: 187912 - DNA, 276 bp, synthetic construct
  misc_feature 1..276: note = Description of Artificial Sequence: Synthetic coding sequence
  source 1..276: mol_type = other DNA
atgcccggcatcaagcggatcctgaccgtgaccatcctggccctgtgcttgccctctcccggaaacgctcaagcacagtgcacaaacggattcgaccttgatcggcaaagcggccagtgcctcgacattgacgaatgccgcactattcctgaagcatgccgtggggatatgatgtgcgttaatcagaatgggggatacctgtgcattccgaggaccaacccggtgtatcggggaccatactctaacccctactcaacaccttattctggcccctag

SEQ ID NO: 187913 - DNA, 1320 bp, synthetic construct
  misc_feature 1..1320: note = Description of Artificial Sequence: Synthetic coding sequence
  source 1..1320: mol_type = other DNA
atggtgcccagcagcccccgggccctgttcctgctgctgctgatcctcgcttgtcccgagcctcgcgcatcccagaactgcctttctaagcagcagctcctttcagctatcaggcagctccaacagttactgaagggacaggaaacgcgattcgcggagggcatccgccacatgaaatcacgcctagctgctcttcagaattctgtggggcgtgtcggcccggacgcacttcctgtatcgtgccccgccttgaacactccagcggacggtcgaaaattcggatccaaatacctggtggaccatgaggtgcatttcacatgcaaccccggctttcggctggttggtccgtcgtctgttgtgtgccttccgaatgggacctggacgggtgagcagcctcactgtagaggcataagcgagtgtagctcacagccatgccagaatgggggcacctgcgttgagggcgtcaaccagtaccggtgcatatgtcctccagggaggacaggaaaccgctgtcagcaccaggctcaaacagccgcccccgaaggcagtgtcgcaggcgatagtgcattttccagagcacccagatgtgcccaggtggagcgagcacagcactgttcttgtgaggctgggttccatctgtccggcgctgccggggatagtgtctgccaggacgtcaatgagtgcgagctgtacgggcaagagggccgcccccgcctatgtatgcacgcctgtgtgaacactcccggctcatatcggtgtacatgtcccgggggctatcggaccctcgctgatggcaaatcctgtgaggatgttgacgagtgcgtcggtctccaaccagtttgcccacagggtacaacctgcattaataccggtggtagcttccagtgtgtctctccagaatgtcctgaaggttctggaaacgtcagctatgttaaaacgagcccattccagtgtgaacgcaatccatgccccatggattctcgtccctgcaggcacctacccaagacaattagttttcactacctgagcctgcctagcaacctcaaaaccccaattaccctttttcgtatggccaccgccagtgcgccgggaagggccggtcccaacagcctcagattcggaatcgtggggggcaattcccggggccacttcgtgatgcagaggtccgacaggcaaaccggcgaccttatcctggtgcagaatcttgagggcccacagaccctggaagtggatgttgatatgagcgagtatctggatcggtctttccaggcaaatcatgtaagcaaagtaacaatattcgtaagtccatatgatttctag

SEQ ID NO: 187914 - DNA, 1182 bp, synthetic construct
  misc_feature 1..1182: note = Description of Artificial Sequence: Synthetic coding sequence
  source 1..1182: mol_type = other DNA
atggtgcccagcagcccccgggccctgttcctgctgctgctgatcctggcatgccctgagcctcgagcctcgcagaactgtttatcaaaacaacagctgctcagtgcaatccggcaactgcagcaactgctgaagggtcaggagactaggtttgcagagggtatccgccatatgaagagcaggttggcagcgcttcagaattctgtaggccgcgtggggcctgacgctcttcctgtgtcctgcccggccctgaataccccagccgatggcaggaaatttggatctaaatacctcgtcgaccacgaggtccacttcacttgtaatccgggcttccgccttgtgggcccttcctcagtcgtgtgtctcccgaatggtacatggactggcgagcagccccactgtcgtggaatcagcgaatgttcatctcagccctgtcaaaacggaggcacctgtgtggagggggtgaaccagtatcggtgcatctgtcccccgggccgcaccggtaaccggtgtcaacatcaagctcagactgatgtgaatgagtgcgagttgtacgggcaagaaggaaggcccaggttgtgcatgcacgcttgtgtgaatacaccagggagctacaggtgtacctgcccagggggctatcggactctcgctgacgggaagagctgcgaagacgtggatgaatgcgtaggcctccaaccagtgtgtcctcagggtactacctgcataaataccggtggatcgttccagtgcgtttcgccagaatgccctgaaggatccggcaacgtatcatacgtgaagacctcaccctttcagtgtgagcgcaatccatgtcccatggatagcagaccctgtagacacctgccaaagaccatcagtttccattatctttcactgccgagtaacctgaagacccccatcactcttttccgaatggccaccgccagcgcgcctggtcgggccgggccaaacagtttacggttcggcattgtgggcggtaattctcggggccacttcgtgatgcaaaggtctgataggcagactggtgatttgattctggtgcagaatctcgagggaccccagaccctggaagtggatgttgacatgagcgagtatctggataggtcatttcaagccaaccatgtctccaaggtcactattttcgtttcgccatacgacttctag

SEQ ID NO: 187915 - DNA, 942 bp, synthetic construct
  misc_feature 1..942: note = Description of Artificial Sequence: Synthetic coding sequence
  source 1..942: mol_type = other DNA
atggagctggaccgggccgtgggcgtgctgggcgccgccaccctgcttctctcctttcttggaatggcctgggccctgcaggcggcagatacgtgtccagaagtaaagatggtcggcctggaaggcagcgacaaacttacaatcttacggggctgccctgggctcccaggggctcccggcccaaagggggaggcgggtactaatggcaagcgcggtgagagaggtccccctgggccccccggcaaggcaggtcctccaggccccaatggggccccgggcgagcctcagccatgtcttactggtccaagaacatgcaaggacttgcttgataggggccacttcttaagcggctggcacacaatctacctgccagattgcaggcctttaactgttttgtgcgatatggacacagatggaggcgggtggacggtctttcaaaggcgggtggatggcagtgtggacttctatagagactgggcaacatacaaacagggcttcgggagccgactaggcgagttttggctgggcaacgacaacatacacgctttaaccgcgcagggcacctcagagctgcgcgttgacctggttgactttgaggacaattatcagtttgctaaatatagaagtttcaaagtcgccgacgaagccgagaagtacaacctcgtgctcggggccttcgttgaaggatctgcgggagattcactgacattccataataaccaatccttttccacaaaggaccaggacaatgacctcaataccggtaactgcgccgtgatgtttcagggtgcctggtggtacaagaattgccacgtaagcaatctgaatggaagatatctcaggggaactcacggcagcttcgcgaacggaataaactggaagtccggcaaagggtataactacagctataaggtatcagagatgaaggttaggcccgcctag

SEQ ID NO: 187916 - DNA, 828 bp, synthetic construct
  misc_feature 1..828: note = Description of Artificial Sequence: Synthetic coding sequence
  source 1..828: mol_type = other DNA
atggagctggaccgggccgtgggcgtgctgggcgccgccaccctgctactcagcttcctgggaatggcatgggctctacaggcggccgatacctgccctggggaacgcggacctcccggcccaccggggaaagcggggcctcctggacccaatggtgctcctggagagccgcagccatgtctaacagggccccgcacttgcaaagacctgctggacaggggacatttcctcagtggatggcataccatatacttacctgattgtagacctctgaccgtgctttgcgacatggatacagatggcggaggatggacagtgtttcagagaagagtggacggatcagtggatttttaccgggattgggctacgtacaagcagggttttgggtcgaggttgggtgagttttggcttggcaatgacaacatccacgctctgacagctcaaggcacatcagagctgcgggtggatcttgtcgatttcgaagataattaccagtttgctaaatatcgctccttcaaagtcgcagatgaagctgaaaagtacaatctggtactgggcgcttttgtggagggttcagccggcgatagcctcaccttccacaacaatcagtccttttctactaaggaccaggataatgacctgaacactggtaactgtgccgtgatgttccaaggtgcctggtggtacaagaactgtcacgtttctaacttgaatggaagatacctgagagggactcacggctctttcgcaaatggaatcaattggaagtccgggaaaggttataactattcttacaaagtgagcgagatgaaagtgagaccagcgtag

SEQ ID NO: 187917 - DNA, 564 bp, synthetic construct
  misc_feature 1..564: note = Description of Artificial Sequence: Synthetic coding sequence
  source 1..564: mol_type = other DNA
atggagctgagcggcgccaccatggcccggggcctggccgtgctgctagtgctatttcttcacattaaaaatctgccggcccaggctgctgacacatgtccagaggtgaaggtcgtcgggctcgaaggatctgacaagttaacaattctgcgggggtgtccgggattgccaggtgcaccagggcccaagggggaagcaggggtgattggtgagcgcggagagcggggcctaccaggggcacccggaaaggcaggtcccgtagggcctaagggcgacgcgggccaatcccaatcctgcgccaccggcccacgcaactgtaaggatcttctagacagaggctatttcctgagcgggtggcataccatttatctgcccgactgccgtccactgactgttctgtgtgatatggacactgatggcggcggctggaccgttttccaaaggcgcatggatggatcagtcgatttctaccgggattgggctgcttataagcagggctttggaagtcaattgggagagttctggctgggtaacgacaatatccatgctcttacagcccaatag

SEQ ID NO: 187918 - DNA, 981 bp, synthetic construct
  misc_feature 1..981: note = Description of Artificial Sequence: Synthetic coding sequence
  source 1..981: mol_type = other DNA
atggagctgagcggcgccaccatggcccggggcctggccgtgctgcttgtgctttttttacatatcaagaacctccctgcccaggctgctgacacctgtcctgaggtgaaagtggtcgggttggaaggaagcgataaactaacaattttgaggggctgtcctggtctgccaggcgcacccggtcccaagggggaggctggggtgattggagaaagaggcgaacggggactgcccggggcccccggcaaagcaggccctgtggggcccaagggtgatcgaggggagaagggcatgaggggcgagaagggagacgctggacagtcacagagctgcgcaacaggcccaaggaactgcaaggatctacttgatagaggctactttctgtcgggatggcatacaatctacctgcctgactgtcgccctctaaccgtgctgtgcgacatggacaccgatggaggcgggtggactgtgttccagcggagaatggatggaagcgttgatttttacagggactgggcggcttacaagcaaggatttggaagtcagctgggcgagttttggttagggaacgacaatatacacgcactgaccgcccaggggtccagcgaactgcgcgttgatctcgtggatttcgaagggaaccaccaatttgccaagtacaaatccttcaaggtggccgacgaagctgagaaatacaaactagtgctgggcgctttcgttggaggttccgccgggaacagtttgaccgggcataacaacaacttctttagtaccaaggaccaggacaatgacgtctcctctagcaattgtgctgagaaattccaaggggcctggtggtatgctgactgccacgcgagcaaccttaacggcctgtacctaatgggtccccacgaatcatatgccaacggcattaactggagcgctgctaaaggatataagtacagctacaaggtaagtgagatgaaagtccgccctgcctag

SEQ ID NO: 187919 - DNA, 1083 bp, synthetic construct
  misc_feature 1..1083: note = Description of Artificial Sequence: Synthetic coding sequence
  source 1..1083: mol_type = other DNA
atggagctgagcggcgccaccatggcccggggcctggccgtgctgctggtgttgttccttcacattaagaatctccccgcccaggcagccgatacctgccccgaagttaaggtagtgggcctcgaaggatctgataagctgaccattctgcggggatgtcctggcctgcccggcgctcccggcccaaaaggtgaggccggtgttataggtgagcgaggggagagaggcctccctggggctcctggcaaggctggcccagtgggtccgaaaggagaccggggtgagaaaggaatgcgcggcgagaagggagatgcgggtcagagtcagagttgcgccacaggccctcgcaactgtaaagatttgttggatcgcggttacttcttgtctgggtggcacaccatttatctgcccgactgtagaccactgactgtactgtgcgacatggacaccgatgggggcggctggacagttttccagcggcggatggacggctctgtggacttttaccgcgactgggccgcctacaaacaggggttcggttctcagactcactcgcacgacgcacactcatgcccgtttgctccctcttctgtgaagcccccccacgcccacaatttaacccgcggaagaattatgtttctcaacatgttcacattgggtcagaaaagctttacctcattcaatgtttgcttcctaaatacgtcaggttttgaccattttccggtgtcagtggctcgtcaggtttttccctggaatttggtctcgcgtgaagagagcggtcccctgttttctagatggcattataggtgttccggacgtttatctgacttctgcgaggactttccccctccggtcattgataccggccggtctagccccccacctccaagcctgccacatccacctatgccccattcgcagcactttacacttctggagaaaggtcactttggtgtgcagaagacactcaccaagaagggggagagtttggtgggaaccttcctgcttccgacaacagctgagttcatgctgtgggctggttggctcctgggaagagataagcatctcgctttgactaaatag

SEQ ID NO: 187920 - DNA, 900 bp, synthetic construct
  misc_feature 1..900: note = Description of Artificial Sequence: Synthetic coding sequence
  source 1..900: mol_type = other DNA
atggacctgctgtggatcctgcccagcctgtggctgctgctgctggggggacccgcctgcctgaagacccaggagcatccaagttgtcccggcccaagagaacttgaggcatccaaagtggtcctgctgccctcctgtccaggggctcccggttcgcctggagaaaagggagcccctgggccccagggcccacctggaccccccgggaaaatgggaccgaaaggggaacccggcgaccctgtgaatctcctgcgttgccaggaggggccgcggaactgccgagagcttttatcacagggcgctactttatcggggtggtatcatctttgccttccagaggggagggcgttgcctgtgttttgtgatatggacaccgagggcggtggctggctcgtgtttcagcgtcgccaagatggctccgtcgacttctttcgaagctggtctagctacagggctggatttgggaatcaggaatctgaattctggctgggcaacgagaacttgcatcagttgaccctccagggaaactgggagttgcgagtggaacttgaggattttaacggcaaccgcacctttgcccattatgccacatttcgcctgttgggagaggtggaccactaccagctggcactcggcaagttctctgagggcaccgcaggcgacagtctgagtctgcatagcggccgacctttcactacctatgacgccgaccacgattcaagtaattctaattgtgccgtaattgtgcatggggcctggtggtatgcctcctgctaccggtcgaatctgaatggaaggtatgcagtttcggaagccgccgctcacaaatacgggattgactgggcctcggggagaggagtgggacatccctataggcgcgtgaggatgatgctacgatag

SEQ ID NO: 187921 - DNA, 867 bp, synthetic construct
  misc_feature 1..867: note = Description of Artificial Sequence: Synthetic coding sequence
  source 1..867: mol_type = other DNA
atggacctgctgtggatcctgcccagcctgtggctgctgctgctgggaggacctgcctgcctgaagacgcaggagcatccatcatgtccaggacctagggagttggaagcatccaaggtggtgttactcccgagctgccctggtgcccctggaagcccaggcgaaaagggagcacctggcccgcagggcccccccggacctccgggcaagatgggccccaagggagaacctgggccccgcaattgtcgggaattgttatcacaaggtgccactttgtctggctggtaccacctgtgcctacccgagggacgggccctgcctgtgttctgcgacatggataccgagggggggggatggctggtctttcagcgacgtcaggacgggtccgttgattttttccgcagctggagtagttaccgagcaggattcggtaaccaggaaagcgagttttggctcggtaacgaaaacctgcaccaacttacactgcagggtaattgggaactgagggtagagctggaggacttcaatggtaatcggaccttcgctcattatgccacattccggttgctcggcgaggtcgaccactaccagctggcgctcggcaaattctctgaaggcaccgccggcgatagcctgtcattgcacagcgggcgacctttcaccacctacgacgccgaccacgatagtagcaattcaaactgcgccgtgatagtccatggcgcatggtggtacgcctcgtgttatcgctctaacctcaatggtaggtatgctgtgtcggaggcggccgcccataaatatggaatcgattgggcttcaggacggggagtgggccacccttaccgacgcgtgaggatgatgctgcgctag

SEQ ID NO: 187922 - DNA, 300 bp, synthetic construct
  misc_feature 1..300: note = Description of Artificial Sequence: Synthetic coding sequence
  source 1..300: mol_type = other DNA
atggacaccgagggcggcggctggctggtgttccagcggcggcaggacggctcagtcgatttcttccggtcttggagttcctatagggctggctttggtaaccaggagtccgaattctggctcggcaacgagaatctccaccagctgacactgcaaggtaattgggagctcagagtggagctcgaagatttcaacggcaatcgtacctttgcccactatgcaacttttagactgttaggcgaggtggaccactatcagctggctctgggcaagttctctgaaggaactgcaggcgaatag

SEQ ID NO: 187923 - DNA, 2094 bp, synthetic construct
  misc_feature 1..2094: note = Description of Artificial Sequence: Synthetic coding sequence
  source 1..2094: mol_type = other DNA
atggccgagaccagccccgagcccagcggccagctggtggtgcactcggacgcccactccgataccgttctggcctcttttgaggaccagcgaaaaaaagggttcttatgcgatatcacccttatcgtggagaatgttcattttcgggcacacaaagcattactggcggcttcctccgaatacttcagcatgatgtttgctgaggagggggaaatcggtcagagtatctacatgctggagggcatggtcgccgataccttcggcattttgctagagtttatctatacggggtaccttcatgcatctgaaaaatccacagaacagatcctggccacagcacagttcctaaaagtttacgacctagtcaaggcttacacagacttccagaacaaccacagcagccctaaacctaccaccctgaatacagcgggggccccagtggtagtgatcagtaataaaaagaatgatccacctaagagaaaacgggggcgacctaagaaggtgaacaccttacaggaagagaagagtgagcttgctgccgaggaagagattcagctacgagtaaataacagcgtgcagaatcgccaaaacttcgtggtaaagggagacagcggcgtattgaacgaacagatcgccgctaaggagaaggaagagtccgaacccacatgcgagccctcccgtgaagaggaaatgcccgtggagaaagacgagaactacgaccccaaaaccgaggacggtcaggcctcccaatctaggtactctaaaagacgaatttggaggtctgttaaactgaaggactacaaactcgtgggggatcaggaggatcatggttccgcaaaacgaatttgcggcaggcggaaacgaccgggcggcccagaggctcgatgcaaggattgtggtaaggtcttcaagtataaccacttcctcgctattcaccagcgttcccataccggggagcgccccttcaagtgcaatgagtgcgggaaaggatttgctcaaaaacactctctgcaagtccacacgcggatgcacaccggtgagagaccgtatacctgcacagtgtgctctaaagcgcttaccactaaacactcgctgctagaacatatgagtctacattcaggccaaaagtcttttacttgcgatcagtgtggcaaatacttctctcaaaatcggcagttgaagtcccattaccgcgtccacacaggccactccctgcccgaatgcaaagactgccacaggaagttcatggacgtttcccagctgaagaaacacctccgaacccacacgggggagaagccctttacttgcgagatttgcgggaaatcatttaccgcaaaaagctcgctgcagacccacatacggattcaccggggcgaaaaaccatattcttgtggaatttgcgggaagagtttcagcgactcctctgctaaaaggcgacattgcatactgcacacaggaaagaaacctttttcctgtccagagtgtaatctgcagttcgctaggctagataacctgaaggcccatctgaagatccactccaaggaaaaacatgcttctgatgcctcaagcatctccggctctagtaataccgaggaggtgcggaatattctacagttgcagccgtaccaactgtccacctcaggggaacaggagattcagctgctagtgacagacagtgtgcacaacattaatttcatgccagggccgtcccaaggcatttccatcgtgaccgccgagagcagtcagaatatgaccgccgaccaggcggccaacctgacactgttgacgcagcaacctgaacaactgcagaatctcatactgtcagctcaacaggagcagaccgaacatatccagtcacttaacatgatagaatcccagatggggccgtctcaaactgaaccagtgcacgtgatcacactctctaaagagacgctagaacacttgcacgcccatcaggagcagaccgaagagttgcacttagccaccagcacctctgatcctgcccagcacctgcagctcacgcaggagccgggaccacccccaccaacccatcacgtcccgcagcctacaccactcgggcaggagcagtcctag

SEQ ID NO: 187924 - DNA, 420 bp, synthetic construct
  misc_feature 1..420: note = Description of Artificial Sequence: Synthetic coding sequence
  source 1..420: mol_type = other DNA
atgggccagaagggcagcagcggcctgttccgggccgtgagcgcctttggggtggtcggctttgtgcggttccttgagggctactacatcgtgttgatcacaaagcgcaggaaaatggctgatataggtggtcacgcaatctataaggtggaggacaccaatatgatctatatccctaacgatagtgtcagggttacacacccagatgaagcgagatacctgcgcatctttcagaacgtcgatctctcaagcaacttctacttcagttattcttacgatctctcccacagcttgcaatacaatctgaccgtgctccgaatgcctctcgagatgctaaaaagcgagatgacccaaaacaggcaggagagctttgacatctttgaggacgagggcttgattacccagggcggatccggatag

SEQ ID NO: 187925 - DNA, 411 bp, synthetic construct
  misc_feature 1..411: note = Description of Artificial Sequence: Synthetic coding sequence
  source 1..411: mol_type = other DNA
tgactgttcgaggagctgtacgaggaccacggcgacaccctgagccttcaatacggcggcagtcagctggtacacagagtgaagacctatcggaagatcgccccctggactcaacactcgaaggacataatgcagaccctgtcacggtattatagcaacgcattttccgatgccgacaggcaggactctatcaatttgtttctgggcgtgttccacccgactgaagggaaacctcacctctgggagttgcctaccgacttttacctgcatcataagaacacaatgagactcttgcctactcggcggagctatacatactggtggaccccagaagtgattaagcacctacctctcccctatgatgaaggttttctagcacgctcccctgccaacttagagtgcagtaactag

SEQ ID NO: 187926 - DNA, 300 bp, synthetic construct
  misc_feature 1..300: note = Description of Artificial Sequence: Synthetic coding sequence
  source 1..300: mol_type = other DNA
atgaccagcagcgcccgggacttcatgcccaagaccgtgggcatcgatccttccccgttcacggttagaaaaccagacgaaaccgggaagagtgtccttgggaacaagtccaatcgcgaggaagccgtgctgcaacgcaagaccgcagcttccgctcctccacctccctccgaggaagcagttagttcctcctcggaggatgactcaggtaccgaccgcgaagaggaaggtagtgtttctcagaggtcaacacctgtgaagatgaccgatgcaggggatagcgccaaggtgacagagtag

SEQ ID NO: 187927 - DNA, 1806 bp, synthetic construct
  misc_feature 1..1806: note = Description of Artificial Sequence: Synthetic coding sequence
  source 1..1806: mol_type = other DNA
atgaccggctacctgcggatcttccagaacgtggacctgagcagcaacttctattttagttactcttacgacctgagccattctctgcagtataacctgacagtgcttcggatgccactcgagatgctgaagagtgaaatgacccagaatagacaggaaagtttcgacatctttgaggatgagggcctgatcactcagggaggctccgtggatcaggctgaccccttcgctcacgtggctgcgctgcatttcgaccaaatgtttcagcggttcggatctcctatcattattctgaacctggtgaaagagcgtgaaaaacgcaaacatgaacgaatcttgtccgaagaactcgtggctgccgtgacctatcttaaccaattcctgcctccagaacacaccatcgtttacattccttgggacatggcaaaatataccaaaagcaaactgtgcaatgttctggaccggctgaacgtaatagcagagtctgtggtgaagaagaccggcttctttgtgaatcggcccgacagctactgttctattctgcggcctgatgagaaatggaatgagctcggtggttgtgtaatacccacaggacggctacagactggtatactgcggactaactgtgtggactgccttgaccgcacaaatactgcacagtttatggtcggtaaatgcgccctggcctaccagttatatagcctggggctgatcgacaagcccaaccttcagttcgacactgatgccgtgcgtctttttgaggaattatacgaagatcatggggacactctgagtctgcagtacggaggcagccaacttgtacatcgcgtaaaaacctatcgcaagattgcaccatggacgcagcactcaaaggacatcatgcagacactctcaaggtactattccaacgctttttctgatgctgacagacaggacagtataaacctgtttctgggggtgttccatccaaccgagggtaaaccgcatctttgggagcttcccactgacttttacctgcaccacaagaacaccatgaggctgcttcctacgaggcgctcatatacgtactggtggacacctgaagtgatcaagcacctgcccttgccatacgacgaggtgatttgcgccgtcaacctgaagaagctgatcgtgaaaaaatttcacaagtatgaggaggagattgacattcataatgagttttttaggccgtacgagctgagttcctttgacgacaccttctgtctcgccatgacatcttcagcaagagatttcatgccaaaaactgtcgggattgatccaagtccatttacagttcgcaaacctgatgaaaccggtaagagcgtcttaggtaataagtcaaacagggaagaagccgtgttgcagcgtaaaacggccgccagcgcacctccccctcccagcgaggaagctgtgagctctagtagcgaagatgacagtggcactgatcgggaagaggagggtagtgtcagtcagagaagcacccccgtcaagatgacagacgcgggcgactccgccaaagtaactgagaatgtggtgcaaccaatgaaggagttatatgggataaacctgagcgatggactgtcagaagaggacttttccatctactctagaacgccgataagcgcgttctcgcaggacaacatctacgaggtgcagccccctcgggtggatcgcaaatcaacggagatatttcaggcccatattcaggctagtcaagggattatgcaacccctcggcaaagaggacagtagcatgtaccgcgagtatattcggaatcgctatctttag

SEQ ID NO: 187928 - DNA, 714 bp, synthetic construct
  misc_feature 1..714: note = Description of Artificial Sequence: Synthetic coding sequence
  source 1..714: mol_type = other DNA
atgcggtacttcctggtgggcagcaacaacgccgagaccaagtacagagtgctgaagatcgatcgcaccgagccgaaggatctcgtgatcatagacgatcgtcacgtgtacactcaacaggaagtacgcgagctgttggggcgactggatctgggaaatcgcacaaagatgggccagaaaggcagctctggtctgtttcgcgccgtgtccgcattcggagtcgtgggattcgtgcgcttcttggaagggtactatattgtactgatcacaaagcggcgcaagatggcagatatcgggggacacgctatttataaagtggaagacaccaacatgatctacatccctaatgactctgttcgagtaactcaccctgacgaggctagatatctccggattttccagaatgtcgacctttcctcaaatttttatttctcatactcgtacgatctgtcacactcccttcaatacaacttaacagtcttgaggatgcctctcgaaatgctgaagtctgagatgacccagaatcgacaggagagcttcgatatcttcgaggatgagggcctgataactcagggtggatcaggggtgttcggcatatgtagcgagccctatatgaaatatgtctggaatggcgaattgcttgatataatcaagtccactgtacaccgggactggctgttatatattatccacggattctgtggccaatcatag

SEQ ID NO: 187929 - DNA, 969 bp, synthetic construct
  misc_feature 1..969: note = Description of Artificial Sequence: Synthetic coding sequence
  source 1..969: mol_type = other DNA
ctgtaccaggtgagcacccacgagcagagcgagagcgcccacggcaggaccggcccatcaactggtggtcgacaaaggagccgacatgagcaagccagagactcttcaaggcacagtgcgtctcaggaaggtcaagacacaatcaggggacatccaggcagctcacggggtgggcgtcaggggtcacattacgaacagagcgtggattcctccggccattctgggtcccatcatagtcacacaacatcccaggagcgttccgatgtctcgcgcggacagagcggttctcgatccgttagccgccagaccaggaatgaaaaacagtcaggcgatggctctcggcattctggctctcgccaccatgaggcctctagccgcgcggactcgtccaggcatagtcaggttggacagggccaatcctccggccctaggacctctaggaatcagggctctagcgtatctcaggacagtgattcccagggtcattcagaggactcagaacgccgatccggcagtgcctcgaggaaccaccacggttcagctcaggaacagagcagggacggatccagacatcctcggtcccaccatgaagatagagccggccacggacatagcgccgagagttcacgtcagagtggaacccaccacgctgaaaacagtagtgggggtcaggctgcttcttcgcatgagcaagcccgcagcagcgccggcgagcgccacggttctcaccaccaacagtccgccgacagtagcagacactcagggatcgggcatggacaggcttcctctgccgtgcgtgatagtggtcaccggggatcctcgggatcacaggcttctgattcggaaggacacagcgaagattcagacactcagagcgtgtctgcccatggccaggctggcccccaccaacagtcccatcaggaatctacccgaggccggtctgctggccggagtggaagatcagggtag

SEQ ID NO: 187930 - DNA, 969 bp, synthetic construct
  misc_feature 1..969: note = Description of Artificial Sequence: Synthetic coding sequence
  source 1..969: mol_type = other DNA
ctgtaccaggtgagcacccacgagcagagcgagagcagccacggctggaccggaccaagtacccgcggccgacagggcagccggcatgagcaagcgcaggactccagccggcacagtgccagccaagatgggcaggatacaattagaggacatccggggtcatctcgaggagggagacagggttatcaccacgaacattccgtcgactcttctggacattctgggtcacaccatagccacactacttctcaaggacggtcggacgcaagccgcggccagagcggctctcgaagtgccagcaggaccactagaaatgaagagcagagcggagacgggagtcgacactctggtagccgtcaccatgaagcttccacccatgccgatatttctaggcactcccaagctgtacaggggcagtcggaggggtcgcggcgctctcggcgccagggttcttcagtgtctcaggatagtgactcagagggacacagtgaagattccgagaggtggtccggaagtgcctcccggaatcaccgcgggagcgtgcaggagcagtccagacatggctcccgccaccccaggagtcaccacgaggacagggccgggcacggacactccgctgatagaagcagacagtctggcaccaggcacgccgaaacaagtagcggaggccaggccgcatcatcccacgaacaagccaggagcagcccgggtgaacggcatggatcgaggcatcaacagtcagcagatagctctagacactctggtatccctcgagggcaggcctcctccgcagttcgagatagcaggcattggggttcttcgggatcacaggcctccgattctgaggggcatagcgaggaatcggatacgcagtcagtgtccggccatgggcaggctggaccccatcagcagagtcaccaggagtccgcaagggatcgctctggcgggagatcaggaaggtccggctag

SEQ ID NO: 187931 - DNA, 12186 bp, synthetic construct
  misc_feature 1..12186: note = Description of Artificial Sequence: Synthetic coding sequence
  source 1..12186: mol_type = other DNA
atgagcaccctgctggagaacatcttcgccatcatcaacctgttcaagcagtacagcaagaaagacaagaatacagataccctaagcaaaaaggagctgaaagaactgctggagaaggaattccggcagatcctcaagaatcccgacgatccagatatggtggacgtgttcatggaccatctggacattgatcacaataagaagattgacttcactgagtttctcctgatggtttttaaactcgcccaagcctactatgagtccacaaggaaggagaatctccctatttcgggccacaagcacagaaaacactcacaccatgacaaacatgaagacaacaaacaggaggagaataaggaaaataggaagcgaccctcatctctggaacggcgtaataaccgcaagggcaataaaggacgctcaaagagcccaagggagacagggggcaagaggcatgaatcttcctccgagaaaaaggagcgtaagggatactctccaactcatcgcgaagaagaatacgggaagaatcaccacaattccagcaaaaaggaaaagaataaaacagagaatacgaggctgggcgataaccggaagcgcctgagtgagaggctcgaagagaaggaagataacgaggagggcgtttatgattacgagaacacggggaggatgacccagaagtggatacagagcggccatattgctacttactatacaatccaggatgaagcttacgatacaaccgattccctgcttgaagagaataagatttatgaacgttctcgctctagcgacggtaagtcttctagtcaagtgaacagatccaggcatgagaatacctcccaagtgcccctgcaggaatcaaggacacggaagcggcgagggtcacgagtgagccaggatcgtgactctgagggccattcagaggattctgaacggcactccgggtctgccagccgcaaccaccatggaagcgcctgggagcagtcacgcgatgggtcccggcatccccggagtcatgatgaagatagggcctctcatggccattctgctgactccagcagacagagcggcactaggcatgcagagacaagcagcagaggacaaaccgcaagtagccacgagcaggcacgctcttccccgggggaaagacacggaagcgggcaccagcaatccgctgatagctcacgccatagcgcaactgggcggggccaggcttcttccgcagtctcagatcgtggacaccggggaagcagcggaagccaggcatccgacagtgaagggcattcagagaacagtgatacccagagtgtgtcggggcatggtaaagccggcctgagacagcagtcacatcaggagagtacacgcgggcggagcggtgaacggtctggccggtcagggtcctctctatatcaggtctccacccacgaacagcctgacagtgcccatggcagaaccggcacgtctaccggaggtcgccaagggtcccaccacgagcaggctcgcgattcatcccgtcacagcgcgagccaagagggccaggatactattcgagggcaccccggctcttctaggggaggacgccagggaagccaccatgaacaatctgtcaaccgcagtggccacagcggtagtcatcactcacacactacttcacagggaaggagcgacgccagccatggccaaagcggtagccgctctgcctctcggcagacacgcaatgaggaacagagtggggatggcacccggcattcagggtctagacaccacgaggcctcatcccaggccgatagctctaggcatagtcaggttggtcagggacagtcttccggcccccgtacatctaggaatcagggatccagtgtatcccaagatagcgactcccagggccattcagaagatagcgaaaggtggtctggcagcgcttccaggaatcatcatggttccgctcaggagcagagcagggacggatcgcgccacccaaggagccaccacgaagatcgggctggccatggtcactcggcagactcctcaaggaaaagtggcacacgacacacccagaatagctcctccggtcaggcagcttccagccatgagcaggctaggagctctgccggagagcggcacggcagtcggcaccagctccagtcagctgattctagccggcactcaggtactggacatggtcaggcgtcttccgctgtccgcgattctggccaccggggatcatccggctctcaggcaacagacagcgaaggtcacagtgaggactccgatacccagagcgtctcaggccacgggcaggccggccaccaccagcagagtcatcaagagtccgcccgagatcggtctggtgaacgttcacggagaagcggtagctttctgtatcaagttagtacacataagcagagcgagtcttctcatggatggaccggcccaagcaccggtgtccgacagggtagtcaccatgaacaggcaagggacaatagccggcactctgctagccaggacggccaggacaccatacgtgggcatccaggaagctctcggcgcggccgtcaaggctcacaccatgaacagtccgtggacaggtccgggcattccggctcacaccatagtcacactactagtcagggccggtccgacgcctccaggggacagtccggcagtcgttccgcctcaagaaccacaagaaacgaggagcagtctcgagacggctcacgccacagtggaagcagacaccatgaggccagcagccacgccgatataagcaggcacagccaggctggacaaggccagagcgaaggctctcgtactagtcgacggcagggttcatccgtgagccaagacagcgactctgaggggcactccgaggactccgagaggtggagtggtagtgcctcacgcaaccatcgaggatccgcccaggaacagagtcgacatggctcacgacacccccgctcacatcacgaagatagggccggccacgggcatagtgcagattcctctcgacaaagcggcactccccatgcagagactagctctgggggccaagccgcaagcagccacgaacaggcccggtcaagtcccggcgagaggcatgggagcaggcaccagcaatctgccgactcatctagacattcaggcatcccacggcgtcaggcttcatccgcagtgcgtgattctggtcactggggtagctctggaagccaggcgtctgattcagaagggcactctgaggagagcgatactcagtctgtgtctggccacggacaggacggcccacaccaacagagccaccaggaatcggcaagagattggtcaggtgggaggtctggtagatcaggctcatttatctaccaagtgtccacacacgaacaatccgaatctgctcatggtagaaccaggaccagcacaggtaggcgccagggaagccatcacgaacaggccagagattcttctcggcacagcgcgtctcaagagggccaggataccattcgcgctcaccccggctctcggagaggagggcgccagggatctcaccatgagcagtcggtagaccgttcggggcattccggcagtcaccactcccacactacctcacagggaaggtccgatgcgtcccacggccagtctgggtcgagaagcgcttcgaggcaaactagaaaagacaagcagagcggcgatgggtctagacattccggcagccgccaccacgaggctgctagctgggccgacagctctcgtcattcacaggtggggcaggaacagtcttctggatcacggacatcacggcatcaggggtcctcagtatcccaggatagtgatagtgaaagacactccgacgactcggaacggctgagcgggagcgctagcagaaaccaccatggatcctcccgagaacagtccagagacgggtcccgccatcccggcttccaccaagaggaccgtgccagccatggccactctgccgacagctctcggcagtcaggcactcaccacacagaaagtagcagccacgggcaggccgtatccagccatgagcaggcaagaagttctccgggagaacgccatggcagtaggcatcagcagagcgctgacagctcccgacactctggaatcggacatcgccaggcctcctcggccgtaagggactctgggcatagggggtctagcgggtctcaggtgaccaactctgagggacatagcgaagatagcgacacgcagagtgtctcggcccatgggcaggcggggccgcaccaacagtcgcacaaggagtcagccagggggcagtctggggagagctccggccgctcgcgctcgtttctttatcaggtcagctctcacgagcagtcagaaagcacccacggtcagaccgccccctcaaccggcggccggcaaggcagtcgacatgaacaggccaggaactccagccgtcattcggcttcccaggacggccaggatacgatccgcgggcaccccggcagctcgcgtgggggccgccagggctcttatcatgaacagtccgtggacagatcagggcatagcggataccatcactctcacaccactccgcaggggcggtccgacgccagccacggacagagcggaccaaggtctgccagtagacagacacggaatgaggagcagagcggcgacggctcaaggcatagcgggtcacggcaccacgaaccctcaacaagggccggtagcagtaggcatagtcaggtcgggcagggggaaagcgcaggatcaaaaacctcaaggcgccagggaagtagtgtttcccaagatcgggatagcgagggtcactcagaggactccgagcgtagatctgaaagtgcctcacgcaaccattacggcagcgcccgcgaacagtctcgacatggatcccgcaacccccgatctcaccaagaggatagggcctctcacggacactcagcagaatcgagtaggcagtccggcactcggcacgccgagaccagtagcggaggccaggccgcgagtagccaagagcaagcccggagctcaccgggtgagcggcacggctcgcgtcaccaacagagcgcagatagcagcactgactcgggaacgggccgacggcaggactcctcggtggttggggatagcggcaaccgaggtagcagtggttcccaggcttctgattccgaagggcacagcgaggagagcgatactcagagtgtcagtgcgcatgggcaagctggaccacaccagcagagccaccaggaatccaccaggggccagagcggagaacgctccggtcggtccggcagtttcttatatcaggtctctacacatgagcaatctgagtccgctcatggcaggacgggacctagtactggcggccgacagcggagccgccacgagcaggcacgtgattcaagccgtcactcagccagccaggaaggccaagataccataagaggacaccctggatccagccgcgggggccggcagggctcccactatgagcagtcagttgacagcagtggtcatagtggctcccaccacagccatactacctcccaggagcgcagcgacgtgtcccgtggacagagtgggagcaggagtgtctcccgtcagactcgtaacgaaaaacagagtggagacggcagtagacactccgggtctcgacatcacgaggcatcctcgcgggccgacagctccaggcatagccaagtcggacaggggcagtcctccggcccccggaccagcaggaaccaggggtctagtgtgtcacaagatagcgattcccagggacactcagaggattctgaacgatggagcggatcagcttcccgaaaccatctgggctctgcatgggagcagtcccgagatggaagcaggcatcctgggagccaccacgaagaccgcgccggacatgggcactctgcagatagctctagacagtcaggcaccagacacaccgagagctcttcaagggggcaggcggcttcaagccatgagcaggcccgcagcagtgctggcgagcggcacgggtctcatcaccagctgcaatctgccgattcatcacgtcatagcggcatcgggcacggccaggccagttctgctgtcagggattctggacacagaggatactccggaagtcaggctagcgattctgaaggccacagtgaggactctgacacacagagcgtgagcgcacaaggtaaggcggggccccatcagcagtcacacaaggagtccgcccgtggccagtcgggagagagttctggtcggtcgggctcgttcctgtaccaggtttctacccacgaacaatccgagtccacccatggacaatcggcaccaagcacgggtggcaggcaggggtcacattatgatcaggcacaggactccagcagacatagcgcatctcaagagggacaagataccataaggggccacccagggccatcacgcgggggaaggcaggggagtcaccaagaacagagcgtggaccgtagtggtcactctgggagtcatcactctcacacaacatcccagggccgctctgatgcatccagaggccagagtggctctagatctgcaagtagaaaaacttacgataaagaacagagcggtgacgggtctcgacattctggctcacaccatcacgaggcatcgtcttgggctgactcatctcgtcactccctggtgggccagggtcagagcagcgggccacggacctctagaccccggggcagctctgtaagtcaggactccgatagcgagggacacagtgaggacagcgaacgccgctcaggctccgcttctcggaaccaccacgggagtgctcaggagcagtcaagagatggctctcgacacccgcgctctcatcatgaggaccgcgccggtcacggacactcagccgagagcagtcgacagtcagggactcaccatgcagagaactcctccggggggcaggctgcctcttcacacgagcaagcgcgctcctcggccggcgaaagacacggtagtcaccatcagcaaagtgctgactctagtcggcattcgggcatcgggcatgggcaggcgagctccgcagtaagggatagcggccacaggggcagttccggctcccaggcatctgacagtgaaggacacagcgaagattccgacacacagagcgtcagcgctcacggccaggcaggacctcatcagcagtcccaccaggagagcacccggggacggtccgccggaagaagtggccgcagtggttcctttctgtaccaggtgtccacacacgagcagagtgagagtgcccatggtcgaacaggaacatccacggggggaaggcagggcagccaccataagcaggccagagactcttctcggcacagcacttctcaggagggccaggacacaatccacgggcaccctggctcgtcaagtggcgggcgccagggctctcactacgaacaattggtagatcgatccggccacagcgggtcacatcacagccataccacttcccagggcaggtctgacgcctctcatgggcactctggatccagatctgcctctagacaaactaggaacgatgaacagagtggggacggctccagacattccggttctcgccatcacgaggcatcaagccgggcggattcatctgggcacagtcaggttggtcaaggacagtctgagggtcctagaaccagccggaactggggtagctccttttcccaggactccgattcacaggggcacagcgaggacagcgagagatggtcagggagtgcctcccggaatcatcatggaagcgctcaggagcagctccgagatgggagccgccaccctcggtcacaccaagaggatcgggctggccacggacacagcgcggatagcagtcggcagtctggcacacgccatacacaaacctctagtggaggacaggccgcgagcagccacgaacaggcgcggtcctctgcaggggaaaggcatggcagccaccatcaacagtccgccgactcttcaagacactcaggaatcggacatgggcaggcatcttctgctgtgagagattccggccataggggttatagcggatcccaagcatccgataatgagggtcattccgaagactcagacactcagagcgtcagcgctcatgggcaggcaggcagtcaccaacaaagtcatcaggagagtgccaggggccgcagcggagagaccagcggccacagcggaagcttcttgtaccaggtcagtacgcacgagcaatctgaatcctcacacggctggaccggcccctccacaaggggaaggcagggcagcaggcacgaacaggctcaggattccagccgccattcagcgtctcaggatgggcaggacaccatcaggggccaccccggtagtagcagggggggccggcagggatatcaccacgagcacagcgtagattcttcgggccactcaggcagtcaccactcccacacaacctcccagggtagatcagacgcgagccgaggtcaaagcggcagccggtccgcttcacggaccacacggaatgaagagcagtcaggagatggaagcagacattctggcagtagacaccatgaagcctccactcacgcggacatctctagacattcacaggcggtgcagggccagtccgaaggcagcagacggtcacggcgccagggcagctcagtcagccaggactcagactctgaagggcacagcgaggactccgagaggtggtctggaagcgctagcaggaaccaccatgggagcgcccaagaacagctaagggacgggtcacgccacccccgctctcaccaggaggacagggcagggcacggtcattctgcagattcttctcggcagtccggaacgcgacatacacagacttctagcgggggccaagccgcctcaagtcacgagcaggctcggtcttctgcaggagagagacacggcagccatcatcagcagtccgctgactcatcccgccatagcgggatcggacacggtcaggctagcagcgcagtacgagatagcggccacagaggctactcagggtcacaagcatccgacaacgaagggcacagcgaggattctgatacccagagtgtctccgctcatggccaggctggaagccaccaacagtcccaccaggaatctgctcgaggacgtagcggcgagacttcaggccatagtggctcctttctgtatcaggtgtcaactcacgagcaaagtgagtcatcccatggttggacggggccttccactcggggccgacagggctccagacacgaacaagcccaagatagctctcggcactcggcgtcacaatacggccaagataccatcagagggcatcccggatccagccggggtgggcgccaggggtatcaccatgaacactcggtggacagttctggacattccggctcccaccatagtcatactacctctcaggggcgctcggatgccagtcgcgggcagtcaggatccaggtctgcaagcagaacaacccggaatgaggagcagagcggtgacagctccaggcactcggtgtctaggcatcatgaggcctctacacacgctgatatttcaaggcactctcaagccgtccaaggacagagcgaaggatccagaaggtctcgcagacagggatccagcgtgtcccaggattctgacagtgaaggccattccgaagattcggagcggtggagcggttccgcttccaggaaccataggggcagtgtacaagagcaaagtcggcatgggagccgacatcccagaagtcatcatgaggatcgggcggggcacggccactccgcggaccgatcgagacaatccgggacccgccatgctgaaaccagtagcggcggtcaggctgcatcgagtcacgaacaggcgaggagcagccctggcgagagacacgggtcccgtcaccaacagagcgcggacagctcaaggcattctggcattcctagaggccaagcaagttcagcagtcagggacagtcgtcattggggatcttcaggcagccaggcctctgattcggaggggcacagcgaggaaagcgacactcagagcgtgagtgggcacggtcaagcagggccacaccaacagagccaccaggagtccgcgcgagaccggtcaggcggcaggtcgggaaggagcgggtcgttcttgtaccaggtcagcacccacgagcagagcgaaagcgcccacgggcgtacccggacatcaacgggaaggcgccaaggaagtcatcacgagcaggcccgtgatagctccagacattccgcctctcaagaaggtcaagacaccatccgcgggcacccaggtagcagccgtcgggggcgacaggggtctcattacgaacagtccgttgacagatctggacatagcggatcccaccacagccacaccacgtctcagggacgctctgatgcatcaagggggcagtccggcagtaggtccgctagtaggcaaaccaggaacgacgagcaaagtggggatggatccagacactcttggtctcatcaccacgaggctagcactcaggcggattcaagccgtcactcccagtctggtcaggggcagtcagctgggccccgcacctctagaaaccagggttcctccgtgtctcaggattcggactcccagggccattcagaagatagcgagagatggtccgggtcggcaagccgcaatcaccgggggagtgcgcaggagcagtccagggatggcagccgtcatcccacatctcatcacgaagatcgggcgggacacggccactctgccgaatcctcacgacagtccggtacccaccatgctgaaaactcctccggcggtcaggcggcatcaagccacgagcaagccagatctagcgcaggtgagaggcacgggagccaccaccagcagagcgcagacagtagtcggcactccggaatagggcacgggcaagcctcctcggccgttagggacagtggacaccgcgggtcctctggaagccaggcttccgactccgaagggcatagcgaagacagcgacacacagtctgtgtcggcccacggccaagctgggccacatcagcagtcacaccaggagagcacacgcggccggtccgctggccgcagtggtaggtcaggcagtttcctgtaccaggtcagcactcatgaacagagcgagagcgctcacgggcgcgctggtccgtccacaggtggacgtcaggggtcgcggcacgagcaggcccgcgactccagccgccattccgccagtcaggagggacaggataccattagaggccatccgggatcacgtagaggcggaagacagggctcttaccacgaacagtcagtcgatagaagcggacactccggctcccaccacagtcatacaactagccaaggcagaagtgacgccagccatgggcagagcggctctagaagcgcatcaagggagacgcgaaatgaagagcaatcgggtgatgggtcccgccactctggctcccgccaccacgaagcttccacacaagctgacagctctaggcatagtcagtccggacagggggagagtgctggcagtagacggtctagacgacaaggctcatcggtttcccaagattccgattcagaagcctatcccgaagacagtgaaagaaggtctgaaagcgcctcccgaaaccaccacggaagctcacgggagcagagtagagacgggagccgccatcccggttcttcccacagggacactgccagccacgtccagtcctcacccgtgcagagcgacagcagtactgccaaggagcacggccatttcagtagtctttctcaggactctgcgtaccatagtggcatccagagcagggggagcccccatagctcctcttcataccactaccagtcagaggggacggaacgccagaagggtcaatcaggcttggtctggagacatggtagctacggcagtgctgactacgactacggggagtctggcttccgtcatagccagcacggtagcgttagctacaacagtaatcccgtggttttcaaggaaaggtccgatatttgcaaagcatctgccttcggaaaggaccaccctagatactatgcaacttacataaacaaggatcccggactctgcggccactcgtccgacataagtaagcagctcgggttcagccagtcccagaggtattattattacgagtag

SEQ ID NO: 187932 - DNA, 969 bp, synthetic construct
  misc_feature 1..969: note = Description of Artificial Sequence: Synthetic coding sequence
  source 1..969: mol_type = other DNA
ctgtaccaggtgagcacccacgagcagcccgacagcgcccacggccggaccggcacaagcactggcggacgacagggctctcaccatgagcaggcccgcgactcaagccgacacagcgcctctcaggaagggcaggataccatccgaggccaccctggaagttcacgtgggggaagacagggtagtcatcatgagcagtctgtcaataggagtggccactccggttctcatcattcgcacaccacatcccagggccgtagcgatgcctcgcatggccaatccggcagccgtagcgcgtctcgccagacaaggaatgaggagcagagcggggacggtactaggcacagtggttccaggcaccacgaggcatcctctcaggctgatagtagccggcactcccaggcggggcaggggcagagcgaaggaagccgtacaagccgtagacaaggatcctctgtgtcacaagactccgactctgaaggccacagcgaggattcagaaagatggagcggatcagcatcacgtaaccatcgcgggagtgcacaggaacagagcaggcacggctcccgccatccaaggtcccaccacgaagacagggccggccatggccactccgcagatagtagccgccaaagcggaaccccacatgcagagacatcctccggtggacaagccgcatcttcacatgaacaggcccgtagttccccaggggagcgacacggcagtagacaccaacaatccgccgatagttcaaggcattccggcattccgcgcaggcaagctagctccgctgtccgggattctgggcactggggatcctccggctcccaggcaagcgacagcgaaggtcatagcgaagaatctgacacacagtctgtcagcggacacggacaagacggaccccaccagcagtcccaccaagagtccgccagggactggagcggcggacgcagtggacgcagcggctag

SEQ ID NO: 187933 - DNA, 3402 bp, synthetic construct
  misc_feature 1..3402: note = Description of Artificial Sequence: Synthetic coding sequence
  source 1..3402: mol_type = other DNA
atgcggagccggggcagcgacaccgagggcagcgcccagaagaagtttccaaggcataccaagggccacagcttccagggacccaagaatatgaagcataggcaacaggacaaagattccccctcagaatcagacgtcatactaccatgtccaaaggctgagaagccccattccggcaatggccatcaagccgaggatctgagccgcgatgatctcctgttcttgttgtccatacttgaaggcgaactgcaggctcgtgatgaagtgatagggatccttaaagctgagaagatggatctggccttattagaggcacagtatggatttgtgacccccaagaaagtgttggaagcactgcagagggatgcatttcaggcaaagagtactccttggcaggaggacatctacgagaaaccgatgaatgaactcgataaagttgttgagaaacataaagagtcctacaggcggatattggggcagctgctggtggccgagaagtctcggcgccagacaattttggagctggaggaagaaaagcgcaaacacaaagagtacatggagaaatcagatgagttcatatgcctattagaacaggaatgtgagcgtctcaagaagctaatcgatcaggagataaaatcccaggaagaaaaagaacaggagaaggagaaacgggtgactacactgaaagaagaactcaccaagctgaagtcttttgcactgatggtggtggatgagcagcagcggctaaccgcacaactgactctacaacgtcagaagattcaggaactcactaccaacgctaaggagactcacacaaaactggccctcgcagaggctcgggtgcaggaagaagagcaaaaggctactcgtctagaaaaagagctccagacgcagacaacaaagttccaccaggatcaggatacaatcatggctaaactgacaaacgaggattcacaaaaccgacagttgcagcaaaagttagccgccttgagtaggcagatcgatgagcttgaggagaccaatcgttctctgcggaaggccgaggaggaactgcaggacattaaagagaaaatcagtaaaggagagtacggcaatgcaggtatcatggctgaggtggaggaactccgtaagcgggtgctggatatggagggcaaagatgaggagctgattaaaatggaggagcagtgtagagacctgaacaagaggcttgaaagagaaactctgcaaagtaaggatttcaagctggaagtggagaaactatcaaaacgcatcatggcactggagaaattggaagacgccttcaacaagtcaaaacaagaatgttatagcttaaagtgtaatcttgagaaggaaaggatgaccactaaacaactatctcaggagttagagtcattgaaagtacgaatcaaagaactggaggcaattgagagcaggcttgaaaagaccgagttcacgctgaaggaggacctcaccaaactcaagaccctgaccgtgatgttcgtcgatgagaggaaaacaatgtcagaaaagcttaaaaaaaccgaggacaaactgcaggcagcctcctcacagttgcaggtggagcagaacaaggtcacgactgttaccgaaaagctcattgaagaaacaaagcgcgcgctgaagagcaagaccgacgtggaggaaaagatgtactctgtgaccaaggagagggatgatttaaagaacaagttgaaagcagaggaagaaaaaggtaacgatctcctcagccgcgtgaatatgctgaagaataggctccagagtctggaagctatcgagaaggactttcttaagaataagttgaaccaagatagcgggaaatccaccacagccctccaccaagagaacaataaaattaaggaactttctcaggaagtcgaaagactgaagctgaaacttaaggacatgaaagccattgaggacgacctgatgaagaccgaagacgaatatgagaccctcgagcgacgctacgccaacgagcgcgacaaagcccagtttcttagcaaggagctcgagcatgtgaagatggaacttgccaagtacaagttagccgaaaagacagagacatctcatgaacagtggctgtttaagcggttgcaggaggaggaggcaaagtcaggacacctgtctagagaagtggatgcgttgaaggaaaagatccatgaatacatggcgaccgaggacctgatatgtcatctccagggcgaccattccgtcctgcagaagaagctgaaccaacaggaaaacagaaatcgggacctcgggcgtgagattgagaacctgacaaaagagctggagaggtataggcatttttcgaaatcattgcggccctccttgaatgggcggcggataagcgaccctcaggtgtttagcaaagaagttcaaacagaggcagtggacaacgaacctccagattataaatctctgataccactggagagggcagtgataaatggacagctatacgaggaaagtgagaaccaggacgaggatccaaacgatgaggggagcgtactgtcctttaagtgtagccagtccacaccatgtcctgttaataggaagttgtggatcccgtggatgaaatccaaagagggccaccttcaaaacgggaagatgcaaacgaaaccgaatgctaatttcgtacagcctggcgatctggtgctgtcgcatacacccggccagcctcttcacatcaaggtcactccagaccacgtacagaatacagccaccctggaaatcacaagccccactaccgagtcgccccactcgtacaccagcaccgccgtcatcccaaattgtggaactcccaagcaaagaataaccatccttcagaacgcctccataacacctgtaaagtcaaaaaccagcacagaggacctgatgaaccttgaacagggcatgtctcctatcacgatggcgaccttcgctagagcacaaactccagaatcctgcggcagcctgacccccgagagaacgatgtccccaatacaggttttggcggtgaccggctccgcctcaagccccgagcagggccgaagtccggagcccaccgagatcagtgccaaacacgccatattccgggtgtccccggacagacagtcctcctggcagttccaacgatctaactctaattcctcctcagtaataaccacagaagacaataagatccacatacacttaggatcgccgtacatgcaggccgtagcgtctccagtcaggcctgcatctccctccgcccccttgcaagacaacagaacgcaaggcctgataaacggcgccctgaacaagaccactaacaaggttacatccagtatcaccattactcccactgcgacccctctcccacgtcagtctcaaattaccgtaagcaatatatataactag

SEQ ID NO: 187934 - DNA, 3408 bp, synthetic construct
  misc_feature 1..3408: note = Description of Artificial Sequence: Synthetic coding sequence
  source 1..3408: mol_type = other DNA
atgcggagccggggcagcgacaccgagggcagcgcccagaagaagtttcccagacacaccaaaggccactccttccagggacccaagaatatgaagcatcgccagcaggacaaggactccccgtctgagtcagacgtaatcctcccttgtcccaaggccgaaaagccacacagcgggaatgggcaccaggcggaggacctttcgcgggacgatttgttgtttctcttgtctattcttgagggggaactgcaggcaagagacgaggtgatcggaatcctcaaagcagagaagatggacctggctctgttagaagcgcagtatggcttcgtgaccccaaagaaggtcctggaggcactccagcgtgacgcctttcaagccaagtctaccccttggcaggaagacatttacgaaaagcccatgaatgagctggacaaggtggttgagaagcataaggaatcctataggcgtattcttggccagttgctcgtggctgaaaagagccgcagacagacaattctggagctcgaggaggagaaacgtaagcataaggagtacatggagaagagcgatgagttcatctgtttactagaacaggaatgcgaacgacttaagaaactgattgaccaggagatcaaatctcaggaagagaaagagcaggagaaagagaagcgagtcactacgttgaaagaagagctgaccaaactcaagtcgttcgctctcatggtggtggacgagcagcagagactgaccgctcagctgaccttgcagcgccagaaaattcaagagttgaccacaaatgcaaaggaaactcacacaaaactggccctagcggaggcccgcgtgcaggaagaggaacagaaagctaccagactggagaaggaactgcaaacccagacaaccaaattccaccaagatcaggacacaataatggcaaagctgaccaacgaggatagccagaacagacagctgcaacagaagcttgctgcactttccagacaaattgacgagctggaggagactaataggtccctacgtaaggcagaagaggagcttcaagatatcaaagagaaaataagcaagggtgagtacggaaacgctggaattatggccgaggtcgaagaacttagaaagcgtgtgctcgatatggagggcaaggacgaagaactcatcaagatggaggaacagtgtagggatctcaataagagacttgagagggagactttgcagtcaaaggattttaagctagaagtagagaagctttctaagcggatcatggcattggaaaagctggaagacgctttcaataaatcaaaacaggaatgttactcactgaagtgcaacctggagaaagagaggatgacaactaagcagctgtcccaggagcttgaaagtttgaaagtgcgcattaaggagctggaggccatagagagcaggcttgaaaagaccgaatttacgctgaaggaggacttgactaagctgaaaacattaaccgtgatgtttgtggatgagcgtaagaccatgagcgagaagcttaagaagacggaagataaactccaggccgcatccagtcagttacaggttgagcagaataaggttaccactgttacagagaagcttatagaagagactaagcgcgcccttaagagcaagacagacgtcgaggagaagatgtactcggtgaccaaggaaagagacgaccttaagaacaaactgaaggctgaggaggaaaagggaaatgatctattatctcgggtaaatatgctgaagaacagactgcaatctttggaagccatcgagaaggattttctcaaaaacaagctcaatcaggatagcggaaagtccaccacagcattacaccaggagaataacaagatcaaggagctcagccaggaagtcgaacgcctgaaactgaaactgaaggatatgaaggcgatagaagacgatctaatgaagaccgaagatgagtatgaaactctggaaagaagatacgccaatgagagggacaaagcccagtttctgagtaaagaactggaacacgtgaagatggaactcgctaaatacaagcttgccgagaagacagaaacgtcacacgagcagtggttgtttaagcgcctgcaagaagaggaagccaagtccggtcatctttccagagaggtggatgcattgaaggaaaagatccatgagtatatggcaaccgaagatcttatatgccaccttcaaggtgatcacagcgttctgcagaaaaaactcaatcagcaggaaaaccgaaaccgggacctagggagggaaattgagaacttgaccaaggaactcgagcggtaccgccatttttccaaaagtcttagaccgagtctgaacggcagacgcatctctgatccacaagtctttagcaaggaggtgcagactgaggccgtcgataatgagcctcccgactacaagtctctcatacccctggaacgcgccgtgattaacggccaactctacgaagaatccgagaatcaggatgaagaccctaacgatgaagggagtgtgctaagcttcaaatgcagccagtctaccccatgccccgtgaaccgaaagctgtggatcccgtggatgaagtctaaagaggggcacctacagaacggaaagatgcaaacaaagcctaacgctaactttgtgcagcctggggatctggttttgagtcacacccctgggcagccacttcatatcaaggtgaccccagaccatgtccagaatacagctacattggagattaccagcccaactactgagagcccacatagctacaccagtactgccgtgattccaaactgcggaactcccaagcagagaatcactatccttcagaatgcctccatcacccctgttaaaagtaagacctccactgaggacctgatgaaccttgaacagggcatgagtccaatcacaatggctacattcgccagggctcagacccctgagagctgcggctcgttaacccccgaaagaactatgtctcctatccaagtgttagccgtcactggctctgctagtagcccagagcagggaaggtctcccgagcctaccgaaatatcagctaagcacgctatttttcgggtatcccccgacaggcagagcagctggcagtttcagaggagcaacagtaattctagcagtgtgatcaccacagaagacaacaaaattcatattcatttgggcagtccatacatgcaggctgtggcatcccctgttaggccggcctccccttcagccccattgcaggacaatagaacccaggggctgattaatggggcccttaataagaccactaataaagtcacatccagtatcacaattacacctaccgcaaccccccttccccgccaatctcagatcacagtcgaacccctgctgctgccccactag

SEQ ID NO: 187935 - DNA, 2682 bp, synthetic construct
  misc_feature 1..2682: note = Description of Artificial Sequence: Synthetic coding sequence
  source 1..2682: mol_type = other DNA
atggtggtggacgagcagcagcggctgaccgcccagctgaccctgcagaggcaaaagatccaggaattgaccacaaatgctaaggagacccatactaagctcgctttagcagaagctcgcgtccaggaggaagagcagaaggccactcggttggaaaaagagttacagacacaaaccactaagttccaccaggaccaggatacaataatggcaaagctcacaaatgaagactctcagaaccgccagctacagcagaagctggcagcgctgtctcgccaaattgacgagctggaggagaccaaccgaagcctgcggaaggctgaagaggaactccaggacattaaagagaaaatcagtaagggggagtatgggaatgctgggattatggccgaggtggaggaactgcgaaagagagtactagacatggaaggaaaggacgaagaacttatcaaaatggaggaacagtgcagagacctcaataagagattggagcgcgaaacactccaaagtaaagacttcaagcttgaggtggagaagctgtccaagcggatcatggcattggagaaactcgaggacgcttttaacaaaagcaaacaggaatgctacagcttgaaatgcaatctcgagaaggaacgcatgactaccaagcaactgagtcaggagttggagtcacttaaagtgcgtattaaggagctggaggccatcgaatcaaggttggagaaaaccgaatttaccctgaaggaggaccttactaagcttaagacccttaccgtgatgttcgtggacgagcgcaaaacaatgtccgaaaagctgaaaaagactgaggacaaactccaggcagcatccagtcagctccaggttgagcaaaataaagttaccacagtaacagaaaaattaattgaggagactaagagggccctgaagagcaaaactgacgtagaagaaaaaatgtactctgtcacaaaagaaagagacgatctgaagaataaactcaaggccgaagaagagaaagggaatgacctgctgtctcgggtgaacatgctgaaaaatcgcctgcagtcacttgaggccattgaaaaggattttcttaaaaacaaactaaaccaagactctggcaagagtactacagctctacatcaggaaaataataagatcaaagaactctcacaggaagtcgaacgccttaaactcaaattgaaggatatgaaagcgattgaagacgacctgatgaagacggaagacgagtacgagacgttggagcgacgttatgcaaacgagcgcgataaggctcagttcctgagcaaggaacttgaacatgtgaaaatggagttagccaagtacaaactggcagagaagaccgagacctcccatgagcagtggctgtttaagcggctgcaggaggaggaagctaaatcaggtcatctgtcacgggaggtcgacgcgttgaaagagaaaatccacgaatatatggcaacagaggatctgatttgccatctccagggcgaccactccgtcttacagaaaaaactgaaccagcaggaaaaccgtaaccgggacttaggcagggaaattgaaaatttgaccaaagaattggagcggtacagacatttctcgaaatcactcaggcccagtctgaacggacgccgtatctcagatccccaagtgttctccaaagaagtgcagaccgaggcagttgacaatgaacctcccgattataaaagtctgattcctttggagcgcgcagtgattaatgggcagctgtatgaggagtctgagaaccaagacgaagatcctaacgacgagggttcagtgctgtcctttaagtgctcgcagtccacaccctgtcccgtgaaccgcaaactgtggataccatggatgaagagcaaagaggggcacctgcagaatggcaaaatgcagacaaaaccgaatgcaaatttcgtccagcccggtgacctcgtactgtcccatacacctggccagcctctgcatattaaggtgactccggaccatgtccaaaatacagccaccctggaaattaccagtccaactacagagagcccccacagctacacctctacagctgtgattcccaattgtggcacccctaagcaacgcatcaccattttgcagaacgcctcaataactcccgtaaaaagtaagacctccactgaggacctaatgaacctagagcagggcatgagtcctatcactatggccacctttgctcgcgctcagacacctgagtcttgtggaagcctgactccagaacgcaccatgtcccccatccaggtgctcgccgtgacgggcagcgcgagctctccagaacagggacgaagtcccgagcccactgaaatttcggcgaaacacgccatcttcagagtctcaccagataggcagtccagctggcagttccagcgttccaattcgaactcctcgtcggtgataaccacagaagacaacaaaattcacatacatctgggaagcccttacatgcaagctgtcgcgagtcccgtgaggccagccagcccgtccgccccccttcaggacaacagaacacagggactgatcaacggggctcttaataagacaactaataaagtcacctcaagtattaccatcactcccaccgccactccactgccaaggcagagtcagatcaccgtctctaatatatataattag

SEQ ID NO: 187936 - DNA, 768 bp, synthetic construct
  misc_feature 1..768: note = Description of Artificial Sequence: Synthetic coding sequence
  source 1..768: mol_type = other DNA
atgcggagccggggcagcgacaccgagggcagcgcccagaagaagttccctagacatacgaaaggccactcattccagggccccaagaacatgaagcatcgtcagcaggataaggattctccctctgagtccgatgtgattcttccctgtcctaaggccgaaaagccacactccggtaacggacaccaagccgaagatctgtcaagggacgacctgttatttctcctgagcatcctggagggggaactgcaggcacgagatgaagtaatagggatcctgaaagccgagaaaatggatctcgcactcttggaggctcagtacgggttcgtcacccctaaaaaggtgctcgaggcccttcagagggacgcctttcaggctaaaagtactccgtggcaggaagacatctacgaaaagcctatgaatgagctagacaaggttgtcgagaagcacaaggagtcctaccgcagaattcttgggcagctgcttgtagctgagaagtccaggaggcagacgatcctggaactggaagaggaaaagcgaaagcataaggagtacatggagaagtctgacgagttcatctgcttgcttgagcaagaatgtgagagatggtcgcttgcccttttgccgcggttagagtgcaacggtatgattctggcccactgcaatttgtgtctgctgggctcctccgattcccctgccagcgcctttcaggtggccggtataacagggacccgtcaccacgcccagctggtcttcgtgtttctctag

SEQ ID NO: 187937 - DNA, 2640 bp, synthetic construct
  misc_feature 1..2640: note = Description of Artificial Sequence: Synthetic coding sequence
  source 1..2640: mol_type = other DNA
atggtggtggacgagcagcagcggctgaccgcccagctgaccctgcagcggcagaaaattcaagagctcacgacaaacgcaaaggagacgcacactaaattagcattggcggaggcccgcgtgcaggaagaagagcagaaagccacccgactcgaaaaagagttgcagacacagactacaaaatttcaccaggatcaggatacaatcatggctaaactcactaatgaagactcccagaaccggcagctgcagcagaagctggctgcccttagccggcagatcgacgagctcgaggagaccaatcgaagtctgaggaaggctgaggaggaacttcaggacattaaagagaaaatctcaaagggtgagtacgggaatgcaggtatcatggccgaggtggaggaactgattaagatggaagagcagtgcagggatctgaacaaacgtttggaacgggagacattgcagagcaaagattttaagctcgaggtggaaaagctgagcaaacggataatggcactggaaaagttagaggatgcctttaataagagcaaacaggaatgctattctctgaagtgcaatctcgagaaagaaagaatgacaaccaaacagttgtcacaggagttagagagcttgaaggtccgaataaaggagctcgaggccattgaaagccgcttggaaaaaaccgagtttacattgaaagaagacttaaccaaactgaaaactctgaccgtgatgttcgtcgacgaacgcaaaaccatgagcgaaaagcttaaaaagacagaggataaactccaggcggcttcttcgcagttacaggtggaacagaacaaggtgactaccgtcacggagaaactgatcgaggagacgaaaagagccctgaagtcaaagactgacgtggaagaaaaaatgtattcagttaccaaggaacgcgacgatctgaagaacaagctgaaggccgaagaagagaaggggaacgatcttctcagcagagtaaatatgctcaaaaatcgcctacagtccctcgaggctatcgaaaaagattttctgaaaaataaactgaatcaggattctgggaaaagcaccaccgccctgcatcaggaaaataacaaaatcaaggagttgtcccaggaagtcgagcggctaaagctgaagcttaaagatatgaaggccatcgaagatgatttaatgaagactgaggatgagtacgaaactctagaacgaaggtacgctaacgagagggacaaggctcagttcctgtcaaaagagctcgagcatgtgaaaatggagctcgcaaagtacaagctcgctgagaaaactgaaacatctcacgagcagtggctattcaaacgactgcaggaggaggaagctaagagcggccacctgtccagggaagtggacgccttgaaggaaaaaattcatgaatacatggctacagaggacctgatctgtcacctgcaaggagatcactcagttctgcagaaaaaattgaaccaacaggaaaatagaaaccgagatctggggagggagattgagaacctcacaaaggagctggaaagatacagacacttctccaagagtctgagaccttcattaaatggacggaggatctctgacccacaggtgttctccaaagaggtgcagaccgaggctgtggataatgagcctcctgactacaagtccctgatcccactagagcgggcagtcattaacgggcagctctatgaagaatctgagaaccaggatgaagatcccaatgacgaaggttctgttttgagcttcaagtgttctcagagtacaccttgtccagttaatcgaaaactttggatcccatggatgaagtccaaggaggggcacctgcagaacggcaagatgcagaccaagccaaacgcaaacttcgtgcagccgggcgacctcgtactgtcccacactcctgggcagccgttgcatattaaggtgactcccgatcatgttcagaatactgcgacgctggagattacatctcctactactgaatctcctcatagttacactagtactgccgtgatccccaattgtggcacgcccaagcagagaattaccatactccagaacgcgtccattacgcctgtgaaaagtaagacctccaccgaggatctgatgaatttagaacaggggatgtcgcccatcaccatggctaccttcgcccgggcccagacaccagagagctgcggcagcctcacccctgagagaaccatgtcccctatccaggttctggccgtgaccggaagcgcatccagccccgagcaagggcgtagccctgaacccaccgaaatcagcgctaagcatgctattttccgtgtgagcccagaccgtcagagctcctggcaatttcagcggtccaatagtaatagctcaagcgtgatcactaccgaggacaacaaaatacatatccatctcggatccccctacatgcaggcggttgcttctccagtgcggccggcgagcccctcagccccactccaagacaataggacacaaggcctcattaatggcgcacttaataagacaaccaacaaggtcactagctcgatcactattactcctaccgcaactcccctgcctcgccagtcgcagatcaccgtgagcaacatctacaattag

SEQ ID NO: 187938 - DNA, 2688 bp, synthetic construct
  misc_feature 1..2688: note = Description of Artificial Sequence: Synthetic coding sequence
  source 1..2688: mol_type = other DNA
atggtggtggacgagcagcagcggctgaccgcccagctgaccctgcaaagacagaagatacaggagttgactacaaacgccaaggaaacccacacaaaattggcactcgccgaggcaagagtccaggaggaggagcagaaggccacaaggttggaaaaggagcttcaaacccagacaactaagttccatcaagatcaggacacaataatggcaaaactgacaaatgaggactcccagaatcggcaactgcaacagaaactggcggctctgtctaggcagatcgacgagctggaggaaaccaatagatccctgcggaaagctgaggaagagctgcaggacattaaagaaaagattagtaagggcgagtatggcaacgctggcatcatggccgaggtagaggagctgaggaagcgggttctggacatggagggcaaggatgaagagctgatcaagatggaggagcagtgtagagatttgaataagaggttggaaagggaaactctgcaatctaaagatttcaagttggaagttgagaaactgtctaagcgtataatggcactggaaaagttggaagacgcattcaataaaagcaagcaggaatgctactcgctgaaatgtaacctggagaaggaaagaatgacaactaagcagctgtcccaggagttggagagcctgaaagtgcggatcaaggagctcgaggccatcgaaagccgcctcgaaaaaaccgaatttacattaaaggaagacctgacgaaactgaagactctgactgtcatgtttgtagatgagcgaaagacaatgagcgagaaactcaagaaaaccgaagataagctccaggccgcgtcaagccagctgcaagtggaacagaataaagtcactacagtgaccgagaagctgatcgaagagactaagcgggctctgaaatccaagacggatgtcgaggagaagatgtactccgtaaccaaggagcgggacgatctgaagaacaagctcaaagccgaagaggagaaggggaatgacctgctgagccgggtgaatatgctgaagaacagactgcagtctctggaggcaatcgagaaggacttcctgaagaataagctcaaccaggacagcgggaagtcgaccaccgccctgcatcaggagaataacaaaataaaggagctctctcaagaagtggaacggttgaaactaaagttgaaggatatgaaggcaatcgaggatgatctgatgaagacagaagatgagtacgagaccctggagaggcgctacgccaacgagcgcgacaaagcgcagttcctgagcaaggaactggagcacgtaaaaatggagctagccaagtacaagctcgccgaaaagacggaaacctctcatgagcagtggttattcaaaagactacaagaagaggaggcgaagagcgggcacctaagtcgcgaggtggacgccctgaaggagaagattcacgaatacatggccactgaagatctaatttgccatttacaaggcgatcactcagtcttgcagaagaaattaaaccaacaagaaaataggaaccgggacctgggccgagagattgagaaccttacgaaggagctggaacgctaccgccatttctcaaagtctcttcgcccgagtctgaacggaagaaggattagtgaccctcaggttttcagcaaagaggtgcagaccgaagctgtggataatgaacctcctgactacaaatcactcattcccctcgagcgtgccgtaatcaatggtcagctgtatgaagagtctgagaaccaagatgaagaccctaacgacgagggatctgtgctgagcttcaagtgctcccaatctacaccttgtccagtgaacagaaaactgtggattccatggatgaaatccaaggaaggccatctgcagaatgggaaaatgcaaacgaagcccaatgcgaatttcgtccaacctggcgaccttgtcttgagtcacactcctggccagcctctgcacattaaagtgactccagatcatgtccaaaatacagcaactctagaaataactagtcccaccaccgagtccccacacagttatacatccacagccgtgatccctaactgtggcacacctaagcagagaataactattcttcagaatgcgagcattactcctgtgaagtcaaagaccagcaccgaggacttaatgaatcttgagcaggggatgagccccattacgatggcaacatttgcgcgggcccagacaccggagagctgcggctctttaacccctgaacggactatgagcccaattcaggttctggccgtcacgggctccgcatcctccccagaacagggaaggagtccagaacctacagagatctctgcaaaacatgcaatattccgggtcagtccagatagacagagttcatggcagttccagcgctcaaacagtaatagctcttctgtcattacaaccgaagataataagatccacatccacctgggcagtccgtacatgcaagccgttgcgagcccagtgcgtccagccagccccagtgcacctctgcaggacaatcgcacccagggtctgattaatggcgctctgaacaaaactacaaacaaagtaacatcctcgattacgatcacgcctaccgcgacccccctgcctcgccaaagccagatcactgtcgaacctcttcttctcccccactag

SEQ ID NO: 187939 - DNA, 2136 bp, synthetic construct
  misc_feature 1..2136: note = Description of Artificial Sequence: Synthetic coding sequence
  source 1..2136: mol_type = other DNA
atggccctggagaagctggaggacgccttcaacaagagcaagcaggagtgttactccctgaagtgtaatttggagaaggaacgaatgaccactaaacagctgagtcaggagctggagagccttaaggtgcgcatcaaggagttagaagcaattgagtcacgcctggagaaaaccgaatttactttgaaagaggatctgactaaactgaagacattgactgttatgttcgtggacgagcgaaaaaccatgagcgagaagctgaaaaaaacagaggataagcttcaagccgctagctcccaattgcaggtcgagcaaaataaagtgacaactgtgactgagaagctgatcgaggaaaccaaacgggcactaaaatctaagactgacgtggaagaaaaaatgtattcagtcacaaaagagcgggatgacctgaaaaataaactgaaggcggaggaggagaaaggtaacgatctgcttagcagagtgaatatgctgaagaatcgcctgcagtctctggaggctatcgagaaagattttcttaagaacaagttgaaccaggatagcggtaaatccactacagcactccatcaggaaaacaataagattaaagaactgtcccaggaagtcgagagacttaaactgaagctcaaagacatgaaggcaatcgaggatgatcttatgaaaactgaggatgagtacgagactctggagcgccgctatgccaacgagcgggataaagctcaattcttgtccaaagagctggagcacgtaaaaatggagttggctaaatacaagctggctgaaaaaactgagacctctcacgaacagtggctctttaaacgcttacaggaggaagaagctaaatctggccaccttagccgcgaggttgacgccctcaaggaaaagattcacgaatatatggcaacagaggatctgatttgccatctgcagggggatcacagcgtcctccaaaaaaaacttaatcagcaagaaaataggaatcgggatctgggcagggaaatcgagaatctgaccaaagaactggaacgctacagacatttcagtaagagtctccgaccaagcctcaatgggagacgcatcagtgacccacaagtgtttagtaaggaagtccagaccgaggctgtggataatgagccccccgattataagtcccttatacccctcgagcgagcagtcattaacggccagttatacgaagagtcagagaatcaggatgaggaccctaacgatgaagggtcggtgctctcgttcaaatgttcacaatctacaccctgccccgtgaaccggaaactgtggattccctggatgaagtcgaaagagggccacctccagaacggcaaaatgcagactaaaccgaacgctaatttcgtccagcctggtgacctggtcctatcccatacgcccggccaaccattgcatataaaagttactcctgatcatgtgcagaatacagcgaccttagagattacatcccctacaacagaatcccctcacagttatacaagcactgcggtgattcccaattgcgggacgcctaagcagcggatcacaatcctccagaacgcttctatcacccctgtgaaaagtaaaacttccaccgaggatctgatgaatctggaacaaggcatgagccccattaccatggccacatttgctagggcacagactccagagagctgcggttccttgacaccagaaaggactatgtcccccattcaagtgttagccgttacaggtagtgcttcaagcccggagcaaggtcgctcaccagagccaacagaaatatcagccaaacacgccatatttagagtgagccctgaccgacagtctagctggcagttccagcgcagtaactccaactcgagctcggtgattaccactgaggacaataagattcatattcacctcggaagcccatatatgcaggccgtggcttccccagtccgaccagcctctcccagcgccccactgcaggataaccgcactcagggcttaatcaacggcgcacttaacaaaacaaccaacaaggtgactagttctattaccattacaccaaccgctacccctttgccccgtcaaagccagatcacggtggagcctctgttgctgccacactag

SEQ ID NO: 187940 - DNA, 2514 bp, synthetic construct
  misc_feature 1..2514: note = Description of Artificial Sequence: Synthetic coding sequence
  source 1..2514: mol_type = other DNA
atggtggtggacgagcagcagcggctgaccgcccagctgaccctgcagcgacagaaaattcaggagctcaccacaaacgcgaaggagactcatactaagctcgctctggccgaggccagggtacaggaagaagagcagaaggctacccgcctcgaaaaagaacttcagactcagactacaaagttccaccaagaccaagacacgatcatggctaaactgacaaatgaagactcacaaaacagacagctccagcaaaaactggcagccctcagccgacagatcgacgagctggaggagacaaaccgaagtctgagaaaggctgaagaagagctgcaggatattaaggagaaaattagtaaaggcgagtacggaaatgcgggaatcatggccgaagtagaagagctgagaaagcgtgtgctagatatggaggggaaggatgaagagcttatcaaaatggaagaacaatgtcgcgacctcaataagcgccttgagcgagaaacgctccaaagcaaggactttaagttggaggtcgagaagctgtctaagaggatcatggctctagagaaattggaagatgcttttaataaatccaagcaagaatgttacagtttaaagtgtaatttggaaaaagaacggatgactaccaaacagctctcacaggagctggaatcactgaaggtccggattaaggagctggaggccatagagtccagactggaaaagaccgagtttaccctaaaagaggaccttaccaagctaaagacgcttaccgtaatgtttgtggacgagcgcaagactatgtccgagaagttgaagaagaccgaggataagctgcaggcagcatcgagtcaacttcaggtggagcagaacaaggtcacaacagtgaccgaaaagctgatcgaagaaaccaagagagcactcaagagcaaaaccgatgtcgaggagaaaatgtatagcgtgactaaggagagagacgacctgaaaaacaagcttaaagcagaagaggagaaaggtaacgacctgctctccagggttaacatgcttaagaaccggttgcagtcgctggaagctatcgagaaagatttcctcaagaacaaactcaaccaggattccggcaagtctaccactgctctgcaccaggaaaataacaagattaaagaacttagccaggaggtagagcgcttaaagttgaagctgaaggacatgaaagctatcgaggatgacctgatgaaaacagaagatgagtacgagacattagaacggcggtatgccaatgagagagacaaggcacagttcctgtccaaagagttagagcacgtaaaaatggaactcgccaagtacaagctcgccgagaaaactgaaacatcacacgaacagtggctgttcaagcgactgcaagaagaggaggccaaatctggtcacttatccagagaggtggatgctttgaaagaaaagatccacgagtacatggccaccgaggacctcatctgccatctccagggtgaccattctgttttgcaaaagaaactcaatcagcaggagaatcggaaccgcgacctcggacgcgagatcgagaatttgactaaggagttggagaggtaccgtcacttcagcaaatcgctgaggccgtcgctgaacggacgcagaatatctgatcctcaggtgttttctaaggaggtgcagacagaagccgtcgataacgaacctcccgactataagtccctgattcccctggaacgcgcggttatcaatggccagctttacgaggaatcagagaatcaggatgaggacccaaatgacgaaggcagcgttctgtcgttcaagtgtagccagagtacaccttgcccagtgaacaggaagctgtggataccatggatgaagtccaaggaaggtcatttacagaatggtaagatgcagacaaaacctaatgccaattttgtacagccgggggacctggtgctaagtcataccccaggccagccactccacattaaggtcacccctgaccatgtgcagaatacggcgactctcgaaattactagtcccacaaccgaaagcccacactcctacacttcaaccgcagtaattcctaattgcgggactcccaagcagaggatcacaatcttgcagaacgctagtattacacccgttaaatcaaagaccagtaccgaagaccttatgaatttggaacaagggatgagccctattaccatggcaactttcgccagggctcagaccccagagagctgcgggtcacttaccccagagagaacaatgtcgcccattcaagtgctggccgttactggatcagcaagcagccctgagcaggggcgctccccagaaccgacagagatctctgctaagcacgctatattcagagtatcccccgaccgacagtctagctggcagtttcagaggagcaactctaattctagctctgtgataactactgaggacaataagatccacattcatcttggttctccatacatgcaggccgttgccagcccatag

SEQ ID NO: 187941 - DNA, 7944 bp, synthetic construct
  misc_feature 1..7944: note = Description of Artificial Sequence: Synthetic coding sequence
  source 1..7944: mol_type = other DNA
atgagcagcagccacagccgggccggccagagcgccgccggcgccgcccccggaggtggcgtggacacaagggacgcggagatgcctgccaccgaaaaagatttggctgaagatgccccgtggaagaagatccagcagaacaccttcaccagatggtgcaacgaacatcttaaatgtgtgagcaaaaggatcgctaatttgcaaacagacctatccgatggactgcggctgattgccttactggaagtgctgtcgcagaaaaagatgcacaggaaacacaatcaacggcccacatttaggcaaatgcaactagagaatgtaagtgttgctctggagttcttggatagagagtccattaaactggtgtcaatcgactcaaaggcgattgtagacggtaacctaaagctgatacttggccttatttggacattgatactccattatagcatttcaatgcccatgtgggatgaagaggaagacgaggaggctaagaaacagactccgaaacagcgactcttggggtggatccagaataaattgccgcaacttcccatcaccaatttcagtcgtgattggcagtccggccgggcactcggagctctggtggactcctgtgctcctggcctctgtccagactgggactcatgggatgcttcgaagccagttacgaacgcgagggaagccatgcaacaagccgacgattggcttggaattcctcaggtgatcaccccagaagagattgtggaccctaacgtcgatgagcactctgtgatgacttaccttagccaattccccaaggctaaactgaagcccggtgcacccctgcgtcctaagctcaacccaaaaaaggccagggcttacgggcctgggattgagcccaccggcaatatggttaagaaacgcgccgagttcactgtcgagacgcggtctgctggccagggtgaggtccttgtctatgttgaagatccagctggccatcaagaagaggccaaagtgaccgcgaacaatgacaaaaaccggactttctctgtgtggtacgtgccagaggtgaccgggactcataaagtgactgtcctgtttgcagggcagcatatcgccaagtcccctttcgaggtgtatgttgataaatcacagggtgacgcaagtaaggtcaccgcccaaggcccaggtctggaaccaagcggcaatatcgcaaacaagaccacttactttgagatctttacggcaggcgcgggtacaggggaagtggaagttgtaatccaggaccccatgggtcagaagggcaccgtcgagccgcagctggaagcccgaggagactccacgtaccgctgctcctatcagcctaccatggagggcgttcacacagtccacgtcacattcgctggggtgcccatcccacgctccccctacactgtcactgtgggccaggcatgtaatccttccgcttgtagagcagtggggcgggggctccagccaaaaggcgtcagagtgaaggagacagcagatttcaaggtctatacaaagggggctggttcgggagaactgaaggttaccgttaagggacccaagggcgaggaaagagttaagcagaaagaccttggagatggggtctacgggttcgagtactatcccatggttccaggcacctacatcgtcactataacttgggggggacaaaacattggtcgatcaccctttgaggtaaaggttggcaccgaatgcggtaaccaaaaagtgcgtgcttggggccctggtttagagggcggcgtcgtcggcaaatctgccgacttcgtggtcgaggctatcggcgacgatgtgggcacgttaggattctcagtggagggcccaagccaggcaaaaattgagtgcgatgacaaaggcgacggctcatgtgacgtcaggtactggccgcaggaggccggtgagtatgccgtccacgtactttgcaattcagaagacattagactgtccccattcatggcagatatccgtgacgctccccaagatttccaccccgatcgagtcaaggcccggggtcccggcctcgagaagaccggagttgccgtgaacaaaccggctgaattcaccgtggacgctaaacacggaggcaaagctcccttacgggttcaggtgcaggataatgaaggctgtccagtagaagccctggtcaaagataacggaaacggcacctattcgtgtagctatgtcccacggaaacctgtgaagcacaccgcaatggtttcatggggcggtgtctcaatccctaacagcccttttagagtaaacgttggggcaggatcacaccccaataaggtgaaggtttacgggccaggggtggcaaagactggccttaaagcccatgaacctacctactttaccgtagactgtgcagaggccggccagggagacgtttcaattgggattaagtgtgctcctggagtggtagggccagccgaagcagacattgattttgatatcatccgcaatgataatgatacgttcaccgttaaatacacccccaggggtgccggaagttacacaatcatggtgctgttcgcagatcaagcgactcccacatcacccatccgcgtcaaagtagagccttcgcacgatgccagtaaagttaaggcagaaggtcccggcctgtctcgtaccggtgttgaacttgggaagcccacacacttcaccgtgaacgctaaggccgcaggcaagggcaagttggacgttcaattctctggactcaccaaaggagatgctgtcagggacgtggacattatcgaccaccatgataacacatacaccgtcaagtatacccccgtgcaacagggccccgtcggcgtaaacgtaacctacgggggagatccaattccaaaaagccctttcagtgtagccgtgtctcccagcttggatctgtcaaaaatcaaagtgtccggtctgggggagaaagtagatgtgggcaaggaccaggagtttaccgtaaaatctaaaggcgccggcggacaagggaaagtcgcttcaaaaattgtgggtccaagcggggctgctgtgccctgtaaggtcgagccagggctaggggcggataactcggtggtacggtttctcccacgggaggaaggcccctacgaggttgaggtgacgtacgacggcgtgccagtccctggaagtcccttccctctggaggcagtggccccgactaagccttccaaagtcaaggctttcggaccaggcctccaaggaggctctgctgggtcgcctgcaaggttcacaattgatactaagggggcaggtaccggggggctcggcctgacagttgagggtccctgcgaggcacagctggagtgcctggacaatggagatggcacatgttcagtatcatacgtgccaaccgagccaggggactataacatcaatattttgtttgctgacacgcatatacctgggtcaccatttaaggctcatgtggtgccttgtttcgacgctagcaaagtaaaatgctcaggaccagggttagagcgcgctacagccggggaagtgggtcagttccaagttgattgttcttccgctggctctgcagagttgaccatcgaaatatgttctgaggctggcttgcccgcagaggtgtatattcaggaccacggcgacgggactcacactattacctacatccccctatgccctggagcctatacagtcaccatcaagtacggcggccaacctgtgccaaacttccccagcaaacttcaggtggaacctgcagtcgatacctcaggagtgcaatgctacggtcctggcatagaggggcagggagtcttcagagaggctaccactgagttttcagtggacgcccgtgcactcacgcagaccggggggccccacgttaaagcccgcgtggcaaacccatctggaaatctaaccgaaacatacgtgcaggacaggggagatggcatgtataaagtggagtacaccccatatgaagaaggactacattctgtggacgtaacatacgatggaagccctgttcccagctctccctttcaagtgcccgtgaccgagggctgcgacccatcccgagttagagtccacggcccaggcatccagagcggcaccaccaataaaccaaacaagtttactgtcgagacacgcggggcagggacaggtggtctgggcctcgctgtcgaaggaccttccgaagctaaaatgtcatgtatggataacaaagacggatcttgcagtgtggagtatatcccctacgaagctggaacatatagcctcaacgtaacatatggcggccatcaagtgcctggctcccctttcaaggtgcctgtgcatgacgtgactgatgcttcgaaggtgaagtgttctggtccgggactatcaccaggaatggtgagagccaacctgccgcagagcttccaggtggacacaagtaaggcgggtgttgcacctctccaagttaaggtccaggggcctaaggggctggtcgagcctgtagatgtggtggataatgcggatggcactcaaacagtaaactacgtgccttccagggagggcccctacagcatctcagtcctctatggggacgaggaagtaccgcggagcccgttcaaggtcaaggttctgccgacccacgatgccagcaaggtcaaagcgtcaggcccgggcctaaatactactggagtacccgcaagtctgcctgtggaattcaccatcgacgcaaaagatgcaggtgaagggttgttggcagtgcaaatcacagatccagagggaaaaccgaaaaagactcatattcaggataatcacgatggaacatacaccgttgcatacgtgcccgatgtgacgggcaggtatacaatcttaattaagtatgggggggatgagattccatttagtccctatcgggtgcgtgcagtaccaacgggcgacgcctccaagtgcactgtgaccgtatctatcgggggacacggccttggtgccggtatcggcccaactattcagatcggagaggagacagtcattacggtcgacacaaaagccgcaggcaagggcaaagtcacttgcaccgtgtgtacccccgatgggtcggaggttgacgttgacgtggtcgagaatgaggatggcacttttgatatattttataccgcaccccagccaggtaagtatgtgatttgcgttcggttcggcggtgagcatgtgcctaatagtcccttccaggtgacagctctggccggggaccaacccagtgttcagccgccgctacggtctcagcagcttgcgccgcagtatacatatgcccagggcggccaacagacctgggcacctgaaagaccgcttgttggtgtgaatggccttgacgtgacatccctgcgtcctttcgaccttgtgattccctttacaatcaagaaaggtgaaattacaggcgaagttcgtatgccctccggaaaggtggcgcagccaacgattactgacaataaagacggaacagtcaccgtgcgttatgcgccgtccgaggccggcttgcatgagatggacatcagatacgataacatgcacattcccggaagcccccttcagttttatgttgattatgtgaactgcggacacgtcactgcctatggccccggcctaacacacggcgttgtgaacaagccagcgaccttcactgtgaacaccaaagacgccggcgagggtggtctgtccttagcaattgagggtcccagtaaggccgaaatctcatgtaccgataatcaagatggtacctgctccgtgtcttacttacccgtcctcccgggcgattactccatcctggtgaaatataatgaacagcacgtgcctgggagcccttttacagcaagggtaacgggtgacgattcaatgaggatgagccacttaaaagtagggtctgccgccgacatccccatcaacatatccgagacggacttatcactccttacggctaccgtggttccaccaagtggccgcgaggagccatgcctgcttaagaggctccgcaacggacacgtcgggatttccttcgtccccaaggaaactggtgagcatctagtgcatgtaaaaaagaacggccagcacgtggctagttcccctatcccggtggtgatctcacagtccgaaatcggtgatgcttccagggtgcgcgtatcaggccaaggactgcatgagggccatacctttgagcccgccgaatttataatcgacacccgcgacgccggctacgggggcctgagtctaagcatcgaaggcccttctaaagttgatatcaatactgaggatctggaggatgggacttgccgagtcacctattgcccgactgaaccaggcaactacatcattaatattaagttcgccgatcagcacgtgccgggatctccatttagtgtgaaagttaccggggagggccgcgtgaaggagtctataaccaggagaaggagagcacctagcgtggccaatgtgggctcacactgcgatctctcactgaagatccccgagatctcaattcaagatatgaccgcccaggtcaccagcccgtcgggaaagactcatgaagcggaaattgtggaaggcgagaaccatacctattgtatcagatttgttcctgcagagatgggaacacacacagtctcggttaaatataaggggcagcatgtacctgggagcccgtttcagttcacagttggcccccttggcgagggcggggcccataaggtcagagctggcgggcccggattagaacgagcggaggcaggtgttccagccgagttctcaatatggacccgcgaggccggagcgggggggctggcgatcgcagtcgagggccccagcaaagcggagatttcatttgaagaccggaaagacgggtcttgtggagttgcttatgtcgttcaagaaccaggcgattatgaagtctctgtcaagtttaacgaggaacacattcctgattcaccgttcgtggttcctgtcgcgtctccatcaggggatgctaggaggctgaccgtatcatctctgcaggaatctggcctgaaggttaaccagccggcctcttttgccgtgtctttgaacggggccaagggagctattgatgccaaagtgcatagcccctccggtgcgcttgaagaatgctatgttaccgagatcgatcaggacaaatacgccgtgcggtttattcccagagagaatggcgtgtatctgatcgatgtgaaatttaatggaacccacatacctggttcacccttcaaaatacgcgtgggtgaaccggggcacggaggtgaccctggtttggtgtccgcctatggagctggcctggagggtggcgtgaccgggaatccggctgagttcgtggttaacacttcgaatgcgggggccggtgccctgtccgtgacaatcgacggcccttcaaaagtaaagatggattgccaggagtgtcctgaaggctatagggtcacgtatacgcctatggcaccaggtagctacctgatcagcatcaaatacggcgggccataccacatcgggggatcaccttttaaggctaaggtaacggggcctcggctcgtgtctaaccatagcctccacgaaacgagcagtgtgttcgtggacagtctgacgaaagccacatgcgctcctcagcacggggctcccggccctggcccagctgatgcctccaaagtagtggcaaagggccttggactgtccaaagcatacgtgggtcagaaatctagctttacagtggattgtagtaaagctggtaacaacatgctcttggttggagtgcatggcccccgcactccatgtgaggagatactggtaaagcacgtcggtagtcgtctgtacagcgtatcctaccttcttaaggacaagggggagtacactttggtcgtgaaatggggcgatgagcatattccaggaagtccttatcgtgtcgtggtgccttag

SEQ ID NO: 187942 - DNA, 6948 bp, synthetic construct
  misc_feature 1..6948: note = Description of Artificial Sequence: Synthetic coding sequence
  source 1..6948: mol_type = other DNA
atgcccgccaccgagaaggacctggccgaggacgccccctggaagaagattcagcaaaacacttttacgcgctggtgcaatgaacacctcaagtgtgtgtctaaacgtatcgccaatctccagacagacttaagtgatggcctgcgattgattgccctgctggaggtcttatcgcagaagaagatgcacagaaagcataatcagcgacctacctttagacagatgcagttagaaaacgtgtcagttgctctggagtttctagatcgtgagtctattaagctcgtctccatcgactccaaggctatcgttgacgggaacttaaaactgattttaggcttaatctggaccctcattctccattatagcatatcaatgcccatgtgggacgaagaggaagatgaagaggctaaaaaacagacccccaaacagaggctcctcggatggatacagaataaactgcctcaacttccgattaccaatttctcccgcgactggcagagcggacgagcgctgggcgccctagtcgattcttgcgccccaggactctgcccggattgggattcttgggacgccagtaaaccggttacaaacgcccgcgaagctatgcagcaagccgacgattggctggggattccccaagtgatcacacccgaggagatcgtagaccccaacgttgatgagcacagtgtcatgacttacctgagccaattccccaaggctaagttaaagcccggtgctccgcttcgcccaaaactgaacccaaagaaagctcgggcctatggcccaggaatcgaaccaacaggtaacatggtgaaaaagagggcagaattcaccgttgaaacgaggtctgcaggacaaggagaggtgctggtctacgttgaagaccctgcaggccaccaagaggaggccaaggtgactgcgaataacgacaaaaacagaactttcagcgtgtggtacgtgcccgaagttaccggcactcacaaggtgacggtcctgtttgctgggcaacacattgccaagagtccatttgaggtctatgttgacaagtcccagggggacgcgagtaaagtgaccgctcagggaccgggtttggagccttccgggaacatagcaaacaagactacttactttgaaatatttaccgcgggtgctggaactggggaagtagaagtcgtgatccaggatccaatggggcagaagggtaccgttgagccacagctagaggcccgtggtgactcgacatatagatgttcctaccagcccaccatggaaggagtgcacacagttcacgtgacttttgccggcgtgcccattcccaggtctccgtacacggtgaccgtgggccaggcctgcaacccctcagcctgtcgtgctgttggccgtggcttacagcccaagggcgtgcgggttaaagagacggccgatttcaaagtttacacgaaaggcgccggcagtggggaactgaaggtgacggttaaagggcctaaaggcgaggaacgggtcaaacagaaggatctgggagatggggtttatggctttgagtattaccctatggtacctggcacctacatcgttaccattacttggggcggccagaacattggaagatctccatttgaagtaaaggtgggcaccgaatgcggcaaccagaaagttagagcttgggggcctggactggagggaggcgtggtgggaaaatccgctgatttcgtcgtcgaggctattggggacgacgtgggcactttaggattctccgttgaggggccctctcaggctaagatcgaatgtgatgataagggcgacggctcttgcgacgtgcggtactggccacaggaagccggcgagtacgccgtgcatgttctctgcaattcagaggatattagactgtccccattcatggcagatatcagagacgcccctcaggattttcaccctgacagagtaaaagcccgggggccaggcttagagaaaactggcgtggcagtgaacaaaccagccgaatttacagttgatgctaagcacggtggtaaagcccctctgcgagtgcaggtgcaggataatgagggctgccccgtggaagccctggtgaaagacaatggcaatggtacttacagctgctcctatgtgccacgcaagccagtgaagcatactgcaatggtatcatggggcggcgtttctatccctaactctcctttcagagtgaacgtcggtgctggctctcaccctaacaaggtgaaagtgtatggcccgggggtggcaaaaaccgggctgaaggcccacgaacccacttactttacagtggactgcgcagaggccgggcaaggagatgtgtccatcggcatcaagtgtgcgcccggagtggtcggtccagcagaggccgacatcgacttcgatatcataagaaacgataatgacactttcacagtgaaatacactcctcgtggggcggggagttacactattatggttctcttcgcagatcaggcaactcccactagccccatccgagtgaaagtagaaccctctcacgacgccagcaaggtaaaggcagaggggccaggtctcagccgcaccggagttgaactgggaaagcccactcatttcactgttaatgccaaggccgctggtaaggggaagctggatgtccagttcagcggtttgaccaagggggacgctgtgcgcgacgtggatattatcgatcatcatgacaatacctataccgttaaatacaccccagtgcagcagggtccagtcggagtgaacgttacatatggcggcgacccaatacctaaaagcccatttagcgtggcagtgtctccaagcttggacttgtctaaaatcaaggtgtcaggtctgggtgagaaagtcgatgttggaaaggaccaggagtttacagtgaagagtaagggcgctggagggcaggggaaagtggcaagtaaaatcgtaggcccgagtggagcggcggtgccatgtaaagttgaacctggcctcggggcagataattccgtggtccgattcctcccacgggaggagggcccatacgaggtggaggtgacttacgatggcgtgccagtgcctggctctccatttcctcttgaggcagtagcacccacgaagccttcgaaggtgaaagcatttggcccaggactgcagggcggatctgccggaagcccagcaaggttcaccattgatacaaagggagctgggactggaggccttggccttacagtggagggtccctgtgaagctcagctggagtgtctcgacaacggggacggcacttgcagcgtgtcctatgttccaacagaacccggcgattataatataaatatcttattcgcagacacacacatccccggctctccattcaaagcccacgtagtcccgtgcttcgatgcttccaaggtgaagtgctcaggcccaggtttggagagggccactgccggagaagttggacaatttcaggtggactgttcttcggcaggatcagccgagctgaccatcgagatttgctcagaagccggtctacccgccgaagtttacatccaggaccacggcgacggcactcacacaataacctacattccactgtgcccaggggcttacacagtcaccatcaagtatgggggccaacctgtgcccaatttcccctcaaagctgcaagtagagcccgccgtggacaccagcggggtccagtgctatggtcccgggatcgaggggcagggtgtgttccgggaagcaaccactgagttttcagttgatgcgcgggcccttacccagaccggcgggccccacgtcaaggcacgcgtggccaatcccagcgggaacctcaccgaaacatacgtgcaggacaggggtgatggtatgtacaaagtggagtatacaccgtacgaggagggcctccatagcgtggatgtgacctacgatggatctcccgtcccaagctcacccttccaggtgccagtgacagaaggttgtgacccttccagggtgcgtgtgcacggaccagggattcagagcgggacaacaaacaagcccaataaattcacagtcgaaactcggggcgccggaacgggcggtctagggcttgctgtagaaggcccatcagaggccaagatgtcatgtatggacaataaagacggaagctgcagtgtagagtacatcccctatgaggctggaacctacagtcttaacgtgacttatggtggacaccaggtaccaggctcgccattcaaggtcccagtccacgacgtgacagatgcatcaaaagtaaaatgctccggacctgggttgagcccgggaatggttcgagccaacttgccacagagtttccaggtggatacctcaaaggctggtgtggccccactgcaggtgaaggtccagggcccaaagggacttgtggaaccagttgacgttgtcgataacgctgatgggacacagactgtgaattacgtgccaagccgagagggtccatactccatctccgttctctacggggatgaggaagtgcctcggagccccttcaaggtgaaggtgctccctacacacgacgctagtaaagtcaaggcgtccggacctggcttgaacaccacaggcgtgcccgcatcactccccgtcgaatttacaatagacgcaaaagacgcaggtgagggactccttgccgtgcagattaccgatcccgaaggtaaacccaaaaagactcatatacaggacaaccatgacgggacatacactgtggcctatgtcccagatgtgactggaaggtacaccattctgatcaaatatggcggagatgaaattcccttcagcccttacagagtgagagctgtccctacaggggatgcaagcaaatgtaccgtgacggtttcaattggcggtcatggcctgggggccgggataggcccgactatacagatcggagaagagacagtcattacagtggacacaaaagcggcagggaaagggaaggtaacttgcacggtgtgtactccagatggctccgaggttgacgtagacgtggtggagaacgaggacggcactttcgacatattctacactgctccgcagccaggcaaatacgtgatctgcgtgcgttttgggggggaacatgtgcctaactcccccttccaggtcacggccctggctggagaccagccctctgttcaacctcccttgcggagccaacagttagccccccagtatacttatgcccagggaggccaacagacctgggcccctgagaggccacttgtgggggtgaatgggctggatgtgacttccctgaggcctttcgacctagtgatcccctttacaattaaaaaaggcgaaatcactggtgaagtgcgaatgccgtcagggaaagttgctcagcccactattaccgacaacaaagacggtacggtgactgtccgctatgctccctctgaggccgggctgcacgaaatggacataaggtacgataacatgcatatcccaggttcccctcttcaattttatgtggactacgtaaattgcggtcacgttaccgcctacggccctgggctgacacacggagtggtaaacaaacctgctacctttaccgtgaacactaaggatgccggagaaggcggcctcagcctcgccatcgaagggccgagcaaagccgagatttcttgcactgataatcaggacgggacctgctccgtgagttacctgccagtgctacccggggattatagcatcttggtcaaatataatgagcagcacgtcccgggatctcccttcacagcccgcgttacgggagacgactccatgcgcatgtcccacctcaaggtgggatctgccgcagatatcccaattaacatttccgaaatctccttcgaggatcgaaaggacggaagctgcggcgtagcgtacgtcgtgcaggagccaggcgactacgaggtatcggtcaagttcaatgaggagcatatccccgattcacctttcgtcgtcccagtggccagcccctctggggatgctcgcagactgactgtgagcagcctgcaggaatcagggctcaaagtgaatcagcccgcctcatttgcagtgagcctgaacggagcgaagggggcgattgacgcaaaagtacactcaccttctggtgctctggaagaatgctatgtgactgaaattgaccaggataagtatgcagtgaggtttattccccgggagaacggcgtgtacctcatcgacgtcaagtttaatggaacccacattcccgggtccccattcaaaatacgcgttggagaaccgggacatggcggtgatcctggactagtgagtgcctacggggccggcttagaaggtggggtgacgggcaatcctgcagagttcgtggtcaacacatctaatgccggcgcaggggccctgagcgtgactatcgacggtccctcaaaggtgaaaatggattgccaggagtgtcctgagggatatagggtgacgtatactccgatggctccagggtcatacctcatttctattaagtacgggggcccataccatatcggcggtagtccttttaaagctaaggtaacgggcccaaggctcgtatctaatcacagtttacacgagacttcttcagtctttgtggattcccttacaaaggccacatgtgcccctcagcatggtgctccagggccagggccggcggatgctagcaaagtggttgcaaaaggactgggtctgtctaaagcctacgtcggccagaaatcctcctttaccgtggattgttctaaggccggaaataatatgctgctcgtcggcgttcatggccctaggacaccctgcgaggagattctcgtgaagcacgtgggctcgcgcctgtatagtgtgtcttaccttttaaaggacaaaggcgagtacacgttggtggtgaagtggggtgacgaacacattcccgggtccccctatagggtagtagtgccctag

SEQ ID NO: 187943 - DNA, 2343 bp, synthetic construct
  misc_feature 1..2343: note = Description of Artificial Sequence: Synthetic coding sequence
  source 1..2343: mol_type = other DNA
atgcccagcggcaaggtggcccagcccaccatcaccgacaacaaggacggcactgttacagtgcggtatgcaccttccgaagccggcttacatgaaatggacataaggtacgacaacatgcatatccctggaagccctctccaattctatgtggattatgtgaactgcgggcacgtcactgcatatggcccgggcctgacgcacggagtggtgaacaagcccgccacattcacagtcaataccaaggacgccggggaaggcgatgattctatgaggatgagccatctgaaggtcggctctgctgctgacattccaatcaatattagcgaaactgacctgtcattactgacagctacggttgtacctccctccggtcgggaggaaccctgtctactgaagaggttgcggaatggccatgtggggatttcgttcgtccccaaggagacaggcgagcacttggttcacgtgaagaaaaatggacaacatgtggctagctcgccaataccagtcgttatcagccagtccgaaattggcgacgccagcagagtgcgagtgtctggccagggcttgcacgaggggcatactttcgaacccgcagaattcatcatcgatacaagggacgcaggatacggaggcctctccctgtctattgagggtcccagtaaggtggatatcaacactgaagatcttgaagacgggacttgtcgagtgacctattgtcctacggagccgggcaattacattattaatattaagtttgcagatcagcacgtgccaggatcacctttctctgtgaaggttacaggagaggggcgagtgaaggagtctatcacccggcgacggcgggctccctccgtggcaaatgtaggttcgcactgtgacctctccctgaaaatcccagagatttccattcaagacatgactgctcaagttacttcgcccagtgggaagacacacgaggccgagatcgtcgagggcgaaaaccacacctactgtatacgctttgtgcctgccgagatgggaacccataccgtatctgtaaagtacaagggtcagcacgtccctggcagcccttttcagtttactgttggtcctttgggggagggaggggcccataaggtgcgggcgggtggacccggtctcgagcgcgcagaggctggagttccagctgaattttctatttggaccagagaggccggggctgggggcctggccattgcggtggagggcccaagcaaggccgagatttctttcgaggatcggaaggacgggtcatgcggggtggcttacgtggttcaagaacctggggattacgaggtgagtgttaaattcaatgaggagcacatcccggattccccttttgttgtacccgtcgcctccccaagcggtgatgctcggcggctcacagtgagcagcctccaagagtcgggattaaaagtgaatcagccggcatcttttgcagtgagtctgaacggtgccaagggagcgattgacgcgaaagtacacagtccctccggcgcactcgaggaatgctacgtgacggagatcgaccaagacaaatatgctgtgcgtttcatccccagagaaaacggggtctatttaattgacgtgaaattcaatggcacacatattcctggatctccttttaagatccgcgtaggcgagcccggccacgggggcgacccagggttggtcagcgcgtacggggctggtttagagggcggggttactggcaatcccgccgaattcgtggtgaacaccagtaatgcaggcgcgggtgccctgagtgtgaccatcgatggcccatccaaagttaagatggattgtcaggaatgtccggagggttatcgggtgacgtacaccccgatggctccaggaagttatctcatcagcataaagtacggcggtccctaccacatcggcggatctccctttaaagccaaagtgacgggcccgcggctggtatctaaccacagcctacacgagacgtcctccgtgtttgtagactcgttaaccaaggcaacctgcgcaccccagcatggcgctccaggccctggccctgcagacgctagcaaggtggtggccaagggcctgggactgtcaaaagcatatgtgggccagaagtcttcatttactgtcgattgcagcaaagccggaaacaatatgctgctagtcggcgttcacgggcctagaacaccgtgcgaggaaatcctggtgaagcacgtgggctcccgcctatacagcgtcagttatctcttgaaagacaaaggggaatacaccttggtggtgaagtggggtgacgagcacatccccggcagcccttatcgggtcgtggtgccctag

SEQ ID NO: 187944 - DNA, 7920 bp, synthetic construct
  misc_feature 1..7920: note = Description of Artificial Sequence: Synthetic coding sequence
  source 1..7920: mol_type = other DNA
atgagcagcagccacagccgggccggccagagcgccgccggcgccgcccccggaggaggtgtagacacacgcgacgcagagatgcctgccaccgaaaaggaccttgcagaggacgccccatggaagaagatccaacaaaacacattcactcgctggtgtaacgagcatcttaagtgcgtctctaaacggatcgcgaatttgcagaccgacttgagtgacgggcttagactgatcgccctcctggaagttctttctcagaagaaaatgcacaggaaacataaccaaagacctacttttaggcagatgcagctggagaacgtttctgttgcactcgaatttttggatcgtgaatccatcaagctagtttccatcgatagcaaagccatagtggatgggaacctgaagctgatcctcggcctcatatggacactcatcttgcattatagtatctcaatgcctatgtgggacgaggaagaggatgaagaggccaagaagcagaccccaaagcaacgactgctgggatggatccaaaataaactccctcagctgcctatcacgaactttagtcgggactggcagtccggacgggcacttggagcccttgttgatagctgtgctccaggcctctgtcctgattgggattcctgggatgcgtcaaagcccgttactaacgctagagaggcaatgcagcaggcagacgactggctcggcattccacaagttattacacctgaagagatcgtggaccccaacgtggatgagcactcagtcatgacgtacctgagtcagttccctaaggctaaactgaagcccggtgctccactaaggcctaaactgaacccaaagaaagcgagggcgtacggacccggcatcgagccgacaggaaacatggttaagaaacgtgcggaatttaccgtggaaacacgctccgctgggcaaggagaagtgttggtttatgttgaagaccctgcagggcatcaggaagaggcaaaggtcactgccaacaacgataaaaatagaaccttctcagtgtggtacgtgcccgaagtaactgggacccacaaggtaactgttttatttgccggccagcacattgccaaatctccctttgaggtctacgtcgataaatcacagggcgacgcgtctaaggtgactgcacaagggcccggactagagccttccggcaatattgctaacaaaacaacttattttgaaattttcacagcaggcgctgggactggagaagtcgaagtggtgatacaggacccgatggggcagaaaggcactgtcgaacctcagctggaggccaggggcgactcaacctatagatgctcttatcaacccactatggaaggagtccacactgtccacgtgacctttgccggcgttccaatcccaagaagtccatacactgtcactgtcgggcaagcttgtaacccatctgcttgccgggccgtcgggcgagggctccagcccaagggcgtgcgagttaaggaaacagcagatttcaaggtttacaccaaaggcgctgggagcggagagttaaaagtgacagtgaagggtccgaaaggggaagagcgagtgaagcaaaaagacctgggcgatggagtctacggctttgagtactatccaatggtcccaggaacctatattgtcacaatcacctggggtggccagaatatcggaagatcgccctttgaggtgaaagtaggaactgaatgtggaaaccagaaggtgcgggcatggggacctggtctggaagggggcgtcgtcggtaagtcagccgattttgttgttgaagcaattggagacgacgtcgggaccctgggtttctccgttgagggcccttcgcaggccaaaatcgaatgcgatgataagggtgacggcagttgtgacgtcagatactggcctcaggaagctggcgagtacgctgttcacgttctatgtaatagcgaagatatccgtctttcgcctttcatggctgacattcgggacgcacctcaagatttccaccctgaccgagtcaaggcgcgcggcccaggcctggaaaagacgggcgtagccgtcaataagcctgcagaattcaccgtcgatgctaagcacggtggcaaggctcctctcagagtgcaagtgcaggataatgagggctgccccgtcgaagccctggtcaaggataatggcaatggcacctattcatgcagctatgtgccgcggaaacccgtcaagcataccgcaatggtctcctggggcggagtctccatcccaaactcacctttccgcgtcaatgtaggagccggttcacatccaaacaaagtcaaggtttacgggcctggtgtagccaagaccggtttaaaagcgcacgagcctacttacttcaccgtggactgtgcggaggctgggcagggtgacgtgagcattggtattaaatgcgctccgggggtcgttggtcctgcagaggctgatatagattttgatattatacggaacgataacgacacattcacagtgaagtacacgccaagaggcgccgggtcttataccatcatggtactgtttgccgatcaggccacccccactagccctatccgggtcaaagtggaaccttcgcatgatgcatccaaggtaaaagctgaaggacctgggctgagccgaaccggtgtggagctagggaaaccaacacactttaccgtgaatgccaaagccgcgggaaagggtaagctggatgtgcagttttcgggccttacaaaaggcgacgctgtgcgggacgtagacatcattgatcatcatgacaatacctacacagtgaaatataccccggttcagcaggggcccgtgggggtgaatgtcacgtacggcggggaccccatccccaaaagcccattctccgttgccgtatctccatctctcgatctgagcaaaataaaggtctccggtcttggcgaaaaagtggatgttggcaaagaccaggagttcacagtaaaatcaaagggtgctggagggcagggcaaggtagcttcaaaaattgttggaccatccggcgcagctgtaccatgcaaggtcgagccggggctgggcgctgacaactcggttgtgcgttttctgcctagagaggaaggtccttatgaggttgaagtgacgtacgacggcgtgccggtgccaggtagtcccttccctcttgaagctgtggcaccgacgaaacccagcaaggttaaagccttcggtccgggactgcaagggggatccgcaggatccccggctcgcttcacaatcgataccaagggcgcgggcacaggcggactggggcttacggtggagggcccttgcgaagcccagttggagtgcctggacaatggggacggcacatgttccgtgagctatgtgcccactgaaccaggggattacaatatcaatatcttgtttgccgatactcatatccctgggtctcccttcaaggcccacgtggttccctgtttcgacgccagtaaggtgaagtgcagtggacctgggctggagcgcgcgacagccggtgaggttgggcaatttcaggtcgattgctccagcgccggctcggctgaactgaccattgaaatatgttctgaagctgggttaccagccgaggtttatattcaggaccatggtgatggcacccacaccataacttacattccactgtgtcccggcgcatacacagtgacaattaagtatggaggccagccagtgcccaattttccgagcaagctgcaggtggaacctgctgtagacacctcgggggtacagtgctacgggcctgggatagaggggcagggagtgtttcgcgaagccaccaccgaattctctgtggacgctcgagccctcactcaaaccggaggcccacacgttaaggcaagagttgccaatcccagtggcaacttaacagagacctatgtccaggaccgtggggacggcatgtacaaagtcgagtacacaccctatgaggaaggcctgcacagcgtggatgtcacctacgacggttcacccgtcccatcatctccttttcaagtacctgtgaccgagggctgcgatccgtctagggtgcgtgttcacgggcccgggatccaaagtggcacaaccaataagcccaacaaattcacagtagagaccagaggggcaggcactggtgggcttggcctggcggtggaaggccctagcgaagctaagatgagctgcatggacaataaagacggcagttgtagtgttgaatacattccctacgaagccggaacctatagtctaaacgtgacatacggaggccaccaggtgccaggttcacctttcaaagtgccagttcacgatgtcacggacgcctccaaggtcaaatgtagcggcccaggtctgtcaccaggaatggtgcgggccaatttaccccagtccttccaagtggacacctctaaggctggcgtggcccccctgcaggtcaaggttcaagggccaaagggcttggtggagcccgtcgacgtggttgataacgcagatggcacacagaccgtgaattacgttccctcacgcgagggtccctattccattagcgtcctgtatggcgatgaggaggttcctcggtctcctttcaaggttaaggtcttgcctacacacgacgcctcaaaggttaaagctagcgggcccggcctgaacacaactggcgtgcccgcttctctcccggtggagttcaccattgatgcaaaggacgcaggagagggcctactggctgttcagatcaccgatccggaagggaagcccaagaagacacacattcaggacaatcacgacggcacatacaccgttgcctacgtacctgacgtcactggacgctacacgattcttataaaatatggaggcgacgaaattccattcagcccataccgcgtgagggctgtgcccactggggatgccagcaaatgtacagtgaccggagctggcataggcccaacaatccagataggggaagagactgttatcacagtagatacaaaggccgcaggaaagggcaaagtgacctgcactgtttgtactccagacggaagcgaagtggacgtggacgtcgttgaaaatgaagacggcactttcgacatattctatacggcaccccagcccggaaaatacgtaatttgcgtgagatttggcggagagcacgtgccgaattctccctttcaagtgacagccctggctggcgaccaaccctccgtgcagccacctctcagaagccagcagctggcacctcagtatacctatgcccagggaggacagcagacctgggcccccgagaggcccctagttggggtcaatggcctggatgtcacgagcctccgcccttttgatctggttattcctttcaccatcaaaaagggagagatcactggtgaagtccgcatgccttccggtaaagtcgcgcagcctaccatcactgacaataaggatggtaccgttaccgtgagatatgcaccgtcggaagctggcctgcacgagatggacatacgttacgataatatgcatatccctgggtctccattgcagttctatgtcgactacgtgaattgcgggcacgttaccgcctacgggcctggattgacccacggcgtggtgaacaagcctgccaccttcaccgttaatacgaaagacgcaggcgagggtggactttcacttgctatcgaaggaccctcgaaagccgagatttcgtgcaccgacaaccaagacggtacttgcagcgtgagctatctaccggttcttcccggagattactccattctcgtaaagtacaatgagcagcacgtcccagggagccccttcaccgctcgcgtcacaggagacgactcgatgagaatgagccatctgaaagtgggaagcgctgcagacattccaataaacatttctgagaccgatttgagcttactgactgccacagtcgtgccacctagtggtcgagaggaaccttgtctattgaagcgcttgagaaacggacatgttggtatcagttttgtacccaaggagacaggggagcacctcgtgcacgtcaagaagaacgggcagcacgttgcatccagtccaatccccgtagtgatctcccagagcgagataggggatgcctcaagagtgcgggtcagtggacagggcctacacgagggccatacatttgaacctgccgaatttatcatcgacacaagagacgccggatacggtggtctgagtctctctattgaggggccctcaaaggtggacataaatacagaggatctcgaagatggcacgtgccgcgttacttactgcccaaccgagccagggaactatatcatcaatatcaaattcgcagatcaacatgttcctggtagtccctttagtgtgaaggttaccggggagggccgagttaaggagagtatcacccggcggcggagggcaccttccgtggcaaatgtgggaagtcattgtgaccttagcctcaaaatcccagaaatctctatacaggacatgacagcacaggttacctccccttcaggtaaaacccatgaagctgaaattgtcgagggcgaaaaccatacgtattgtatcagattcgttcctgctgagatgggcacccacacagtttcagttaaatacaagggccagcacgtccctgggtccccctttcagttcacagtagggccactgggtgaaggaggagcccacaaggtgcgggctggtggtcctggacttgagagagccgaagcaggcgtgccagctgaattctctatttggacccgtgaggctggtgctggcggcctcgccatcgccgtggagggtccaagcaaagccgagatttcattcgaagatcgaaaagatgggtcttgcggcgtggcttatgttgttcaggagccaggtgactacgaagtgtctgtgaagtttaacgaagagcacattcctgactcccctttcgttgttcccgtggccagcccttctggagatgctcgcagattaaccgtgagctccctgcaggaaagtgggttaaaggtcaaccagccagcgtctttcgcagtgagcctgaacggcgcgaagggtgccatcgatgccaaggtgcatagtccgtctggagccctggaagagtgctacgtaaccgaaatcgaccaggacaagtatgccgtgcgctttatcccacgcgaaaatggggtctacctgattgatgtcaagtttaatggaactcatatccccggaagcccattcaaaataagagtcggggaaccaggccacggcggagatcccggcctcgtgagcgcgtatggagccggactggaagggggcgtgacaggcaaccccgctgaatttgttgtgaacacctcaaacgccggagctggagcactgagtgtcaccatagatgggcctagcaaggtaaagatggactgtcaggaatgcccagaagggtaccgcgtcacatacacccctatggcaccaggttcataccttatctccatcaaatatggcggaccttaccatataggcggctctcctttcaaagcgaaagtgaccggccctaggctggtttctaaccacagcttgcatgagacctccagcgtgttcgttgattccctgaccaaggccacttgcgccccacagcatggcgctccagggccaggcccggccgatgcgtccaaagtggtcgcgaaggggctaggtttgagcaaggcctacgtgggccagaagtcttcttttactgtggactgcagcaaggccgggaataacatgctgctggtcggagtgcacggccccaggacaccttgcgaagagattctcgtaaaacacgttggctccagactatacagcgtgtcatatcttctgaaggataagggagagtatacgctcgtcgtaaagtggggagatgaacacattccaggctccccttaccgggtggttgtgccttag

SEQ ID NO: 187945 - DNA, 7809 bp, synthetic construct
  misc_feature 1..7809: note = Description of Artificial Sequence: Synthetic coding sequence
  source 1..7809: mol_type = other DNA
atgcccgtgaccgagaaggacctggccgaggacgccccctggaagaagatccagcagaacacgttcactaggtggtgcaatgagcatcttaagtgcgttaacaagcgcattggcaacttacagactgaccttagcgacggattgaggttaatagctttgttggaggtcctgagtcagaagaggatgtatagaaaatatcaccagcggcccacttttcgtcagatgcagctcgaaaacgtctctgtggcgctcgaattcctcgaccgggaatcaatcaagttggtttctatcgactctaaggccatcgttgacggtaatctcaaacttattcttggtctggtgtggactttgatccttcactatagtatctctatgcccgtctgggaggacgagggagatgatgacgcaaaaaagcaaacccctaaacagcgtctgctgggatggattcagaacaagataccctacctgcccattactaactttaaccaaaactggcaggacggtaaagctctgggggctctggtcgacagttgcgcaccaggactgtgtccggattgggaatcctgggacccgcagaagccggttgataatgctcgggaagctatgcagcaggcagacgattggctcggggtgccacaggttattactcctgaggaaattattcatccagatgtggatgagcactccgtgatgacctatctgagtcaatttcctaaggctaagctgaagcccggggccccactgaagcccaaactcaatccaaaaaaggctagagcctatggcaggggcatcgagcccacaggaaatatggttaaacagcccgctaagttcaccgtcgacacgatctcagctggccaaggagatgtgatggtcttcgtagaagacccagagggaaacaaagaagaggcacaggtgacacctgatagtgacaaaaacaaaacctacagtgtcgaatatttaccaaaggtcactggacttcacaaggtgaccgttctgtttgcaggccagcatattagcaaaagcccatttgaagtcagcgtcgacaaggcacagggggacgcctcaaaagttaccgcgaaaggcccaggcctcgaagcagtgggaaacattgctaataagcctacctattttgacatatacactgcaggagccggtgtcggcgatataggggtcgaggtggaagacccccaaggtaagaacactgtggagttacttgtggaagataagggaaatcaggtatatcgatgtgtgtataaacctatgcagccgggcccgcacgtcgtgaaaatcttctttgccggtgatactataccaaagagccctttcgtggtgcaggtcggtgaggcctgtaatcctaacgcatgccgggcctcgggtcggggtctgcagcccaaaggggtccgcatccgggagaccacagatttcaaggtcgacacaaaagccgccggatccggagagctgggagtgacgatgaaagggcccaaaggcctggaagaactagtgaagcagaaggattttctggacggggtttacgcctttgagtactatcccagcacccccggccgatactctatcgcaatcacctggggcggccaccacatcccaaagagcccatttgaggtgcaagtgggacctgaagctggcatgcaaaaggttagggcttgggggccaggactgcacgggggcattgttgggcgttccgcagactttgtcgttgagagcatagggtccgaggtcggctccctcgggttcgctattgaaggcccatctcaagccaaaatagaatacaatgatcagaacgacggatcttgcgatgtaaaatattggcctaaggagccaggggagtatgctgtgcacataatgtgcgacgacgaggatattaaagattcaccatatatggcttttatccatccagcaacgggaggatataacccagatctggtgcgagcctatggtccaggtctggaaaaatctgggtgtattgtcaacaatctggctgagttcactgtcgacccaaaagatgctggcaaagcccctcttaagatttttgcacaagatggcgaaggtcaaaggattgacatccagatgaaaaatcggatggacgggacatatgcgtgctcatatacgcccgtgaaggccatcaagcacacgattgcagtggtgtgggggggggtcaatatcccacacagcccttacagagtgaatatcggacaggggagtcaccctcagaaggtcaaggtctttggacctggtgtggaaagaagtggcttaaaggctaatgagcctactcactttacagtcgactgcaccgaagcgggcgagggagacgtgtcagttgggatcaagtgcgacgctagggtgctgagtgaggacgaggaggacgtggacttcgatattatacataatgcaaacgacacttttacagttaagtacgtaccaccagctgctggtagatacacaattaaagtcctgtttgcctcgcaggaaatccctgccagccccttcagggtgaaggtcgacccttcacacgatgctagtaaagtcaaggcagagggccctggtctgtctaaggctggagtggagaacggcaaaccaactcattttacagtgtacaccaagggcgctggcaaggctccgttaaatgtgcagttcaatagtccccttcccggtgacgcagtaaaagacctggacataattgataattatgactattcccacaccgtaaaatacacgcctacacagcaagggaatatgcaagtactggttacctacggcggggatccaatcccaaaaagtcccttcacagtgggggtcgctgctcccctggatctgtccaaaataaaactgaacggtctagagaatagagttgaagtcggcaaagatcaagagtttacagtcgataccaggggagccgggggccagggcaaactggacgtgaccattctctccccatcaaggaaagtagtgccctgccttgtaacccctgtgaccggaagagagaactccacagcaaagtttattccacgcgaagaaggtctctatgccgtggatgtcacatatgacggtcaccctgtccccggcagtccatatacagtggaagcgagtttaccacctgacccatccaaggtgaaagctcatggacccggactcgagggaggcctggtgggaaaaccagctgagtttactatcgacaccaaaggagccggcacaggtggcctgggactgactgtggaaggcccatgcgaggccaaaatcgaatgcagtgataatggcgacggaacctgttctgtgtcttacctgcctaccaagcctggagagtactttgtgaatatcctgttcgaagaggtgcatatccccggctcgccgttcaaagctgacatcgaaatgccgttcgacccttctaaagttgtggcctctggcccaggcttagaacacggtaaggtgggggaggccggactcttatccgtagactgttccgaggccgggcccggtgccctcggattggaagccgttagcgatagcggtactaaagcggaggtatcaattcagaacaacaaggacggaacctatgcagtgacgtacgtacccctaactgccggaatgtataccctgacaatgaagtacggcggggaactcgtcccacatttccccgcacgcgtgaaagtggaacctgcggtggatacaagccgcataaaagtgtttggccccgggatcgagggcaaagatgtcttccgggaggccacgaccgatttcacagttgatagcagacccctgactcaggttggaggagatcatataaaggcccacattgcgaatccttcaggcgcttctactgaatgtttcgtgacagacaacgctgatggaacctaccaggtggagtacacaccattcgaaaagggcctgcatgttgttgaagtcacatacgatgacgttccaatccctaatagcccattcaaagtggccgtgactgagggttgtcagccctccagagtgcaggcccaaggccccggtcttaaagaggcatttaccaacaagcccaacgtattcacagtcgtgacacgcggggccggcatcggcggcttgggcattaccgtcgaaggtcctagcgagagcaagatcaactgccgggacaacaaggacggatcctgcagcgccgaatacatcccctttgccccaggagactatgatgtaaatatcacatacggaggcgcccacatcccgggatcacccttccgcgtgcctgtcaaggacgttgtggaccctagcaaagtaaagattgcgggacctgggcttggtagcggagtccgcgctagagtacttcagagtttcactgtcgactctagcaaggccggtctcgctcctcttgaggttagggtgctcggacctaggggactggtggagcctgttaatgtcgtggacaacggggatgggacacacacagtaacgtataccccttcacaggaggggccctacatggtatccgtgaaatacgccgacgaggaaattccgcggtccccctttaaagtcaaagtcctgccgacctacgacgcctcaaaggtgaccgccagtggacctggattgtcttcttacggggtgcccgcctctttgccagtcgactttgcaatcgatgcgcgggacgcaggcgagggcctactggccgtccaaatcactgaccaagaaggcaaaccaaaacgggctatcgttcacgacaataaggacggcacctacgctgtaacctacattcctgataaaaccggccgctacatgattggcgtgacatacggaggtgacgacatccccctttcaccctatcggattcgggcgacacaaaccggcgacgcatctaagtgcctcgcgacaggtcccggtatcgctagcaccgtcaaaacaggggaggaggtgggctttgtggtggacgctaagactgccggaaagggaaaggttacttgcaccgtgctgacacccgacggcactgaggccgaggcagatgtcatagaaaatgaagacggcacgtacgacattttttacactgcggccaaacctggcacatacgtgatttacgttaggtttggcggggtggacattccgaactcaccttttactgttatggccacagacggtgaagtgaccgccgttgaggaagcaccagtcaatgcttgtcctcccgggttccgaccctgggttaccgaggaagcttacgttcccgtgtccgacatgaatgggctaggcttcaagccattcgatctagtaattcctttcgccgtgaggaagggcgaaattacgggcgaggttcacatgcccagtgggaaaaccgccacacctgagatcgttgacaataaagatgggaccgtgacagttagatatgctcccaccgaggtcggattgcacgagatgcatatcaaatatatgggtagccatattccagaaagcccacttcagttctacgtgaattatccaaactctggatctgtttcagcctacggccctggactggtatacggggttgccaataagacggctacatttaccatcgtcactgaggacgccggagaaggtgggctggacctcgctatcgagggcccttccaaggctgaaatttcttgtattgataacaaagatggcacgtgcactgtcacttatcttccaacactccctggcgactatagcatcttggtgaaatacaacgataagcacataccaggctctccctttacggctaaaatcacggacgactcccggagatgttctcaggtcaagcttggcagcgctgccgacttcctgttggacataagcgagacagacttgagctcattgaccgcctccatcaaagctccttccggtcgggatgagccttgcctcctgaagagacttccaaacaaccacattgggatctcattcatccccagggaagtgggagaacatctggtgtccattaaaaaaaatggaaaccatgtggcaaatagcccggtgtctataatggtggtacagagcgagattggcgacgcgcggcgggccaaagtttacggtcgggggctaagcgaaggccgcactttcgagatgtccgattttatagtggatacacgcgatgccgggtatggcgggatctccctggcggttgagggcccttccaaggtggatattcagaccgaagatctcgaggacggcacctgtaaagtgagctactttcctaccgtgcctggcgtgtacattgttagtaccaaattcgccgacgagcacgtgccgggtagcccgtttactgttaagatctctggggaaggcagagtgaaggaaagcattactagaacctcacgagcccccagcgtggccaccgtggggtccatctgcgacctgaacctgaaaatccccgagatcaactctagcgatatgagcgctcatgtgacatcaccctccggtagagtgacggaggcagagatcgtgcctatgggcaagaactctcactgcgtcaggtttgtccctcaggagatgggcgtacacaccgtgagcgtgaaatatagaggtcagcatgtgactggctcacccttccagtttacagtgggacctctgggtgaagggggcgcgcataaggtgcgcgccgggggccccggtttggaacgaggagaagccggcgtgcctgccgagtttagcatatggaccagagaggccggggccggcggactgtccatcgctgtagagggcccttccaaagccgagatcacttttgatgatcacaagaacgggtcatgcggtgtctcctatatcgcacaggagcctgggaattatgaggtgtcgatcaaatttaatgatgagcatatccccgagtcgccctacctggtgcccgtgatcgcaccaagtgacgatgcccgcagattgaccgtgatgagcctccaggaatctggcttaaaggttaaccagcctgcttcattcgctatccgactgaatggcgccaagggaaagattgatgccaaggtgcacagtccgagcggagccgtagaagaatgccatgtgtcagagctggagcccgacaaatatgccgttcggtttatccctcacgagaatggggtgcacacgatcgacgttaagtttaacggctcgcatgtcgtggggagcccgtttaaggttagagtaggcgagcccggccaggcagggaaccctgcactggtgtctgcctacggcacagggctggaaggcgggacgacaggtattcagagcgagttctttattaatactactagggccggtcccggcacattgtccgtcaccatagagggcccctcaaaggtcaaaatggattgtcaggagaccccagaggggtataaggtgatgtacaccccaatggccccagggaattacctcataagcgtcaaatatgggggaccaaatcacatcgtgggctcaccgtttaaggctaaagtgacagggcagagattggtaagtccgggctctgcgaatgagacttcttcaatcctggtggagagcgtgacgaggtcatccactgagacctgttacagtgctatacccaaagcctccagtgacgccagtaaggtcacgtccaagggagctggcctgagcaaagcattcgtcggccagaaaagctctttccttgtggattgctccaaggcgggctctaacatgctcttgataggcgttcacggccctacaaccccatgcgaggaagtatctatgaaacacgttggcaaccagcaatataatgtgacctatgtcgtcaaagaaaggggcgactacgtgctggcagtgaaatggggggaggagcatatcccagggtctccattccacgttacggtgccttag

SEQ ID NO: 187946 - DNA, 7686 bp, synthetic construct
  misc_feature 1..7686: note = Description of Artificial Sequence: Synthetic coding sequence
  source 1..7686: mol_type = other DNA
atgcccgtgaccgagaaggacctggccgaggacgccccctggaagaagatacaacagaacacatttacacgatggtgcaatgaacacttgaaatgcgtcaacaagcgcatcggcaatctccaaaccgatctgagcgatggtctgcgtctgatcgcgctcctcgaagtcctttctcagaagagaatgtatcggaagtaccatcagaggcctacttttcgtcagatgcagctagagaacgtctctgttgctctggaattcttggatagggagagcatcaagctcgtctccatcgactctaaagctatcgtggacgggaacctcaaactgatcctcggcctggtgtggacactgattctccactactcaatttccatgcccgtgtgggaagacgaaggagacgatgacgccaagaagcagacccccaagcagaggctcttgggatggatccagaataagatcccatatctacctattacgaattttaatcagaattggcaggacggcaaggcactgggcgcattggtggacagttgtgctcctgggctgtgtcccgactgggaatcttgggacccgcagaaaccagtggataacgctagagaagctatgcagcaagctgatgactggctcggcgtgccgcaggtgatcaccccagaggaaatcatccatcctgatgtggatgaacactccgtcatgacttatcttagtcaatttcccaaggccaaactgaaaccaggcgcccctctgaaacccaaactaaatccaaagaaggcccgcgcttacggaaggggcatagagcctaccggcaacatggtaaagcagccggccaagtttaccgtcgatacgatttccgctggtcagggcgacgtgatggtgttcgtggaggatcccgagggcaacaaggaggaagctcaggtcacccctgacagcgacaagaacaaaacatactccgttgagtacctgccgaaagtcaccggccttcacaaagtaaccgtgctattcgctgggcagcacatcagtaagtctccatttgaagtatctgtggacaaggcccagggtgacgctagcaaggtcaccgccaaggggcccgggctagaggctgtgggaaatatagctaataaaccaacatattttgatatttacaccgctggagcaggggttggggacatcggtgtcgaggtggaggatcctcaagggaaaaacaccgtcgagcttcttgtggaggacaagggaaaccaggtgtataggtgtgtatacaagcccatgcagcctgggccccatgttgtgaaaattttttttgcaggcgacaccattcctaagtcgccttttgtcgtccaggttggggaagcttgtaatcccaacgcatgccgggcttctggacgggggctccaacccaagggcgtgcgaattcgggaaactacggactttaaggtggataccaaagcagcaggaagtggagaactgggggtgaccatgaaaggccccaagggccttgaagagttggtgaagcagaaggattttttggacggtgtgtacgcttttgagtattacccctccacccccgggcgttattctattgcaatcacgtggggcggtcatcatattcccaagagcccgttcgaggttcaggtgggtcccgaggccggaatgcagaaagtgcgggcctgggggcccggtctgcacgggggcatcgtaggcagaagtgctgacttcgtggttgaaagcataggttcagaagtgggaagtctgggatttgccattgaaggtccctctcaggcaaagatcgagtataatgatcaaaacgatggcagttgtgatgtgaaatattggccaaaagagcccggcgagtacgcggttcacatcatgtgcgacgatgaggacatcaaggattcgccatacatggcctttatccatcctgctactgggggttataaccccgatcttgtgcgggcctacgggcctggtctggaaaagagtgggtgcatcgtgaacaatctggcggagttcaccgtcgatcctaaagatgctggcaaagccccactgaagattttcgcgcaggatggagagggacagaggatcgatatacagatgaaaaatcgcatggacggcacatacgcatgctcatacaccccagttaaggctatcaaacatactatcgccgttgtgtggggtggagtcaacatccctcactctccgtaccgagtgaacatcggacaggggtcccatccccagaaggtgaaagttttcggcccaggagtcgaaaggtccgggctcaaggctaacgaaccaacccatttcactgtggactgcaccgaggccggggaaggcgatgtgagcgtgggtataaagtgcgacgctcgcgtactgtcagaggatgaggaagatgtcgatttcgacatcattcacaatgcgaacgatacttttactgtcaagtacgtgccacctgctgccggccgttacaccatcaaggtactttttgcatcgcaggagattccggcgtcaccatttcgggtgaaggtcgaccccagccacgatgcgtcaaaggtgaaggccgagggacctggactgagcaaggcgggagtggaaaacgggaagcctacccacttcaccgtgtacaccaagggggccggtaaggcccccttgaatgtgcaattcaacagcccgttgcccggggatgccgtcaaggatttggacattatcgataattatgattattcacacaccgtcaagtatactccaactcagcaggggaatatgcaggtgcttgtgacctacggaggcgaccccatccctaaaagtcccttcactgtgggggtggccgcaccccttgatttgtccaagatcaagctgaatggccttgagaacagagtcgaagtgggcaaggaccaggaattcactgttgacaccagaggagctggagggcaaggaaaactggacgtcacaatcctctcacccagccgtaaagtggtcccatgccttgtgacacccgtcacaggccgcgaaaatagcacagcaaaattcattccgcgagaagaggggttgtacgccgtagacgtgacatacgacgggcacccagtgccaggttccccatacaccgtcgaggcgagccttcccccggaccccagcaaggtgaaggcccatggtcccggattagagggcgggctggtgggtaaaccagctgagttcacaattgatacaaaaggcgccggcacgggtgggctcggattgaccgtggaaggtccttgtgaggcaaagatagaatgttccgacaatggtgatggcacctgtagtgtttcctatctcccaaccaaacctggagaatactttgtcaatatactgtttgaagaggtgcacatcccgggaagtcccttcaaagcggacatagaaatgcctttcgacccgtctaaagtggtggctagcgggcctggtctcgaacacggcaaggtgggggaagcagggttgctttctgtcgattgctccgaggcaggtccgggagctctgggcttagaagccgtaagtgacagcgggacaaaggccgaggtgtccatccagaacaataaggatggaacctacgccgtgacctacgtcccactgaccgcgggcatgtacaccctcactatgaagtatggtggcgaactggttcctcacttccccgcaagagtgaaggtggaacccgcagtggatacttcccgcataaaagtcttcggccctggaatcgaggggaaggacgtattccgtgaagccaccacagactttaccgttgacagcaggccgctaacacaggtaggtggagaccatattaaagctcacattgcgaatccttccggggcaagtaccgagtgtttcgtgacggacaatgctgatgggacttatcaagtggagtatactcctttcgaaaagggcttgcacgtagttgaggtcacctatgacgacgtgcctatccccaatagccccttcaaggtggctgtgacagaaggctgccagccatctcgggtgcaagcacaaggtcccggcctgaaggaggcattcaccaataaacccaatgtgttcaccgttgtgacccgtggcgcgggaattgggggtctgggcatcaccgtagaaggcccatccgagtctaagattaattgccgggacaacaaagacgggtcttgcagcgctgaatacataccatttgcccccggggactatgacgttaacatcacatacggcggtgcgcacattcccgggtcccctttccgagttccggttaaggatgtggtcgatccctccaaagtcaaaatcgccggccctgggctcggatctggcgtaagggcgagggtgttgcagtctttcaccgtggattcctcgaaggctggcctagccccattagaggtgcgggtactggggccaagggggctggttgagccagtgaacgtcgtggataatggtgacggaactcacacagtgacctacacgccatctcaagaagggccttatatggtgagcgtcaagtatgctgacgaggaaatccccagatctccattcaaggtcaaggtgctcccgacgtatgatgcaagcaaggtgaccgcttccggccctggcctgagtagctacggtgtcccagcctctctgccggtggatttcgctatagacgcacgcgatgccggggagggcttgctcgcagtgcagatcactgaccaagaggggaagcctaaaagggccatcgttcacgataataaggatggtacttatgcggttacctacataccggataagacaggtcgatacatgatcggtgtaacatatggtggcgatgatattcctctgtcaccctaccggattagagccacacagaccggagacgcctccaaatgtctcgccaccggccctggcatagccagtacagtgaaaacaggagaggaggtagggtttgtggttgatgccaaaactgcaggaaaaggcaaggtgacatgtactgtgctgacccctgacgggaccgaggctgaggccgatgtgatcgagaatgaggatggtacgtatgatatcttttacacagcggccaaacctggcacgtatgtcatatacgttaggttcgggggggtcgacattccaaacagtccattcactgtgatggccactgacggcgaggtcacggctgtagaagaagcacctgttaacgcctgtccacccggttttagaccatgggtaactgaagaagcttacgttccagtctcagatatgaacggactgggattcaagcctttcgatctggtaattcccttcgcagtccgaaagggtgagattacgggtgaagttcatatgccgtccggtaagaccgctactcccgaaatcgtggataataaggatggcaccgtcactgtgagatacgctccgaccgaggtcggcctccacgagatgcacatcaagtatatggggtcacatatacccgagtctccgctgcagttttacgttaactatcccaacagcggtagtgtgagcgcttacggcccaggcctggtgtacggcgtggctaacaaaactgctaccttcactattgtcacagaagacgctggagagggcgggctcgatttggctattgagggtccaagcaaagccgaaatcagctgcatagacaataaggatggtacatgcactgttacttatttaccaactctccccggagactattcaattctggtgaaatacaatgataaacacattcctggaagcccttttacagcgaaaatcaccgacgatagcagacgctgtagtcaggtcaagctgggctccgctgccgatttccttctcgacatctctgaaactgacttgtcaagcctgactgcgtctattaaggccccatctggacgtgacgagccctgccttcttaagcggctcccaaataatcatatagggatttcattcattccgcgcgaggtaggggaacatctggtatccatcaaaaaaaacggaaaccatgtggccaactcccctgtgagcattatggtggtacagagtgagattggggacgctcgtcgagcgaaagtgtacggtagaggactctcagaaggtcgcacattcgaaatgagcgactttattgttgatacaagggacgcaggatacggagggatatccttggcagtggagggtccgtccaaagttgatatacagaccgaagacttagaggatggaacctgcaaagtgtcctacttcccaactgtgcctggagtttacattgtatctacgaaattcgccgacgaacacgtccccgagatcaattcatccgacatgagcgcccacgtcacttcaccctcagggcgcgttacggaagcagaaattgtgcccatgggcaaaaacagtcattgtgtgcgatttgtgcctcaggagatgggcgtacataccgtcagcgtcaaataccggggccaacacgtaaccggttcaccctttcagttcactgtggggccacttggcgaaggcggggctcacaaggtgagagccggagggcccgggctggagaggggggaggccggtgtgcccgccgaattcagtatctggactagggaagccggggccgggggcctgtccatcgccgttgaaggaccttctaaggccgagatcacctttgacgaccacaagaacggatcctgcggcgtctcctatatcgcccaggagccgggaaactacgaagtatcaatcaagtttaatgacgaacatattcccgagtccccttacctcgtcccagtgattgccccctccgacgacgcgaggcgcctgaccgtgatgtcattgcaggagtcaggcctgaaagtgaatcagcccgcatctttcgccataagactcaacggcgcgaaagggaagatagacgcgaaggtgcactccccatccggggccgtggaggagtgtcatgtctcagagttggaacctgacaagtatgcagttcggttcatccctcatgagaacggagtccacactatcgatgtgaagtttaatggctcccatgtagtcggctccccatttaaggtgcgggtaggcgagccagggcaggccggcaatcccgccctggtgagtgcctatgggactggcttggaggggggaactaccggtatccagagcgagttcttcattaacactacgagggccggcccaggtaccctcagcgtcactatcgaaggtcccagcaaggtcaaaatggattgccaggaaacgcccgagggatataaagttatgtacactcccatggctcccggcaattacctgatcagcgtgaaatacggaggaccaaaccacattgtggggagcccttttaaggccaaggttactgggcagcggctggtgtcacctggttctgcgaacgagactagctccattctcgtggagtccgtgacacgtagtagcacagaaacctgctactccgctatccccaaggccagtagcgatgccagcaaagtaacttccaagggtgccggcctgtctaaagcattcgtggggcagaagtcttccttcctggtcgactgctccaaagccggcagtaatatgctgctcattggcgtgcatggccccactacaccctgtgaggaagtttctatgaagcacgtcggcaaccaacagtataacgtgacttacgttgtgaaggaacggggcgattatgtgctggcggtaaaatggggggaggagcatattccagggtctcctttccacgtgaccgtgccatag

SEQ ID NO: 187947 - DNA, 6453 bp, synthetic construct
  misc_feature 1..6453: note = Description of Artificial Sequence: Synthetic coding sequence
  source 1..6453: mol_type = other DNA
atgcccgtgaccgagaaggacctggccgaggacgccccctggaagaaaatacaacagaacaccttcacacggtggtgcaacgaacaccttaagtgtgttaacaaacggatcgggaacttgcagaccgatctctctgatggcttgcggctcattgcgctgctagaggtgttgagccaaaagcgcatgtaccgcaagtaccaccagagaccgacctttaggcaaatgcaactggagaatgtctcagttgccctggagtttctagatcgagagtcaatcaagctggtgagcatcgattctaaggccatcgtggacgggaatctcaagcttattctagggctggtctggaccctcatcttgcactactctatttcaatgcccgtttgggaagacgagggcgacgacgatgctaaaaagcagacacctaagcaaaggctcctgggctggatccagaacaagattccttatctgcccatcaccaacttcaatcagaattggcaggacggtaaagcactgggggccctggtggatagttgtgctccaggattgtgtcccgactgggaaagctgggaccctcaaaagccggtggacaatgctagggaggcgatgcagcaggctgatgattggcttggtgtgccacaggtgattactcccgaagagatcattcacccagacgtcgacgagcactctgtgatgacttatctgagccaattccccaaggcaaaattgaagccaggggccccattaaaaccaaaactaaatcctaaaaaggcgcgggcctacggaagagggattgaaccgaccggaaacatggtgaaacagccggcaaagttcaccgtggacaccatttccgctggccagggagacgtgatggtgttcgtggaagatccagaaggcaataaagaagaagcccaggtgacccccgattccgacaaaaataagacctatagcgtggagtacctccccaaagttacaggacttcacaaggttaccgtcctctttgcaggccaacatatttccaaatcccctttcgaggtcagcgttgataaggctcagggcgacgcctccaaagtgacagccaagggcccaggactggaggccgtgggcaatatcgcgaacaaacccacctacttcgacatttacactgctggagctggggtgggtgacattggcgtcgaagtggaggacccccaggggaagaacacggtggagttacttgtcgaagataaaggcaaccaggtgtacagatgcgtatataaacctatgcaaccaggtccccacgtggtcaaaatttttttcgctggggacaccattcctaaaagcccattcgtcgtgcaagtaggagaagcctgcaatcctaacgcttgtagggcctctggtcggggtctgcagccaaaaggcgtgagaataagagaaaccacggacttcaaagtggacacaaaggccgccggaagcggggaactgggcgtcacaatgaagggccctaagggactagaagagttagttaagcaaaaggatttcctcgatggggtgtacgcctttgagtactatcctagcacaccaggcagatattccatagccattacctggggtggccatcacatccccaagagtccatttgaagtccaggtcgggcccgaagccggaatgcaaaaggttagagcctgggggcctggcctccacgggggaatcgtgggccggagcgccgactttgtagtggagtctatcggatcagaggtgggaagtttaggttttgctatcgagggaccttcccaggcaaagattgagtataacgaccaaaatgacggttcctgcgacgtaaagtactggccaaaggaacccggtgaatacgccgtccacattatgtgtgacgatgaggatatcaaagactctccttacatggccttcatccaccccgcaacaggaggatacaatccagatttggtccgggcatacgggccaggactagaaaagagcggatgcatcgttaacaacctggccgagttcacagtggatcccaaagatgctggcaaggccccactcaagatctttgcacaagacggggaaggtcagagaattgacattcagatgaagaaccgtatggatggcacctacgcttgcagctacacgcccgtgaaggccatcaagcacaccattgcggtggtgtggggcggcgtgaacattccccatagcccgtatcgcgtgaacatcgggcaggggtcgcatccccagaaggttaaggtgtttggaccaggagtggaacggagcggactgaaggccaatgagcctacccattttactgtggattgcactgaagcgggagagggtgacgtgtccgtcggaatcaaatgcgacgctcgggttttatctgaggatgaagaggacgtggacttcgacatcattcacaacgctaacgatacttttaccgtgaagtatgttccaccggcagcaggccgctacacaattaaggtgctcttcgccagccaggaaatccctgcgtctccatttagagtgaaagttgacccttctcatgatgctagtaaagtaaaggccgagggccccggcctgagcaaggcaggcgtagagaatggtaagcccacacacttcactgtgtatactaagggggccgggaaagccccactgaacgtacagtttaattcccctctgccaggtgacgcagtgaaggatctcgacatcatagacaactatgactacagccatacggtgaagtatactccaacacagcagggaaacatgcaagtcttggttacttacggcggagacccaatcccaaaatcgccatttactgtcggagtcgcggcccctttggatctgagcaagatcaagctaaatggcttagaaaaccgggtcgaggtgggtaaggaccaggagtttactgttgatacacgaggagcgggcggccaggggaagttggacgtcacaatcctgtcccccagcagaaaggtggtcccatgtctggttacacccgtgaccgggagggagaattcgactgcgaagttcatccccagggaagagggtctctacgcagtagatgttacatatgacggacacccagtacccggttctccttacaccgtagaagcgtccctgccccccgaccctagtaaggtgaaggctcatggccctggactcgagggcggcctggttggaaagcctgctgagtttacgatcgacacaaagggcgcaggtacaggggggctcggactgaccgtagaggggccctgtgaggctaaaattgaatgttcagataacggagatggtacttgcagtgttagctatttacccacaaaacccggggagtacttcgtgaatatcctgttcgaggaggtgcatattcctggctccccgtttaaggccgacatcgaaatgccctttgaccccagcaaagtcgtggccagtgggcccggattggagcatggaaaggtcggtgaggccgggctgctgtctgtcgattgtagtgaggccggtcccggagctctcggcttggaggcagtgtcagattccggtaccaaagccgaggtttcaatccaaaacaacaaagacggcacttatgctgtgacatatgtgcctctcaccgccgggatgtatacactgactatgaagtacggcggcgaactggtgccacacttccccgcgagggtcaaggtggagcctgccgtcgacacctcacgaattaaggttttcggtcctggcatcgaaggtaaggatgttttccgcgaggcaaccacggacttcactgtggactcccgacctctaacccaggtgggtggtgatcacattaaggcacacatcgctaatccatcaggggcgtccactgagtgctttgtgaccgacaacgcagacggaacctatcaggttgagtacacgccatttgagaaaggcctacacgtggtggaagtgacttatgatgatgtccccatccctaactctccatttaaagtcgccgttaccgagggctgccagcccagcagagtccaggcccagggccctggactgaaagaagccttcacaaacaagcctaatgttttcactgtagtgaccagaggggccggcattggcggtctgggcatcaccgtggaaggtccttccgagtctaagatcaactgtagagacaacaaggacggcagttgctcagccgagtacatcccgttcgcccccggagattacgacgtgaatataacctatggcggcgcccacatccccggctcccccttcagagtacccgtgaaggatgttgtggatccgtctaaggtgaagattgccggccccggattgggctctggagtgcgcgccagggtcctgcagtcgtttactgtcgacagtagcaaagcaggtctagcgcccctagaggttagagtgctcgggcctcgcggcctagttgagccggtcaatgtagttgacaacggagacggcacgcacacagtgacttatactcctagccaggagggtccatacatggtaagcgtgaaatatgccgatgaggagatacctaggtcaccctttaaggtaaaggttctgcctacatatgacgcgtccaaagtgacagcaagcggccccggcctgagcagctacggagtccccgcatctctgcctgtagacttcgctatcgatgcaagagacgcaggagagggcttgctcgccgtccaaatcacagatcaggagggtaagccaaaacgcgccattgtgcatgacaataaagatggaacttatgctgtgacatatattccagataagacaggcaggtatatgataggcgttacctatggcggcgatgacataccattatccccgtacaggattagggcgactcaaacgggcgatgcatcaaagtgccttgcgaccgggcctggcatcgcctctaccgtgaagaccggcgaggaagttggttttgtggtcgacgccaagacagcaggcaagggaaaggtcacttgcactgtgttgacccctgatggcacagaagccgaggctgatgttattgaaaatgaagatggcacgtatgatatcttctacaccgcggcgaagccggggacgtatgtgatctatgttagattcgggggcgtcgacattccgaacagtccgtttacagttatggcaaccgacggcgaagttaccgcagttgaggaggctcccgtgaacgcatgtccccctggattcagaccttgggtaaccgaggaggcatatgtccccgtgtccgatatgaacggtctgggcttcaagccttttgatctggtgataccctttgccgtgcgaaagggcgagatcacaggcgaggtgcatatgccaagcgggaagaccgcaacacccgagattgtggacaacaaagacggcacggttactgtacgctacgctccaacagaggttggattacacgaaatgcacattaaatacatgggcagtcatattccagagtcccctctgcagttctatgtgaattatccgaattccggcagtgtgagcgcatacggtcccggcctggtgtatggcgtagcaaacaagacagcaacgtttacgattgtaacagaggacgccggggaaggcgggctcgatcttgctattgagggaccctcaaaagcagagatttcttgcattgataataaggacgggacctgcacagtgacctacctgcccactctgccgggggactattccattctggtgaagtacaatgacaagcacatccctgggtctcccttcaccgccaaaattactgatgatagcaggcgctgctctcaggtgaagcttggatctgccgcagattttctgctcgacattagcgagacagacctctcctctctgaccgccagcatcaaggcccctagtgggagagacgaaccgtgccttctgaaaaggttaccgaacaaccacatcggtatcagctttattccgagagaggtcggagaacacctggttagtattaaaaaaaatgggaatcacgtggccaacagcccggtttccatcatggttgttcaatcagagattggcgatgcacgaagagcgaaggtgtatgggagggggctgtccgagggccgcacattcgaaatgtctgacttcatcgtggatacaagggatgccggctacggtgggatcagcctggctgtcgaaggcccgtccaaggtggacattcagacggaggacttagaagatgggacatgcaaagttagctacttcccgaccgtccccggggtctacatcgtgtctacgaagtttgctgacgagcacgtgccaggatccccattcacagtcaaaatctcaggcgaggggagagtaaaagaaagtattacaagaacatcacgggcacctagcgtcgcgacagtgggatcaatctgtgacctgaatttaaaaataccaggggtgcgagtgatgaactgctcagcccagatattgtggggctggagagtgcagtttcatacaggatcccgtaaccaacagcagtag

SEQ ID NO: 187948 - DNA, 7737 bp, synthetic construct
  misc_feature 1..7737: note = Description of Artificial Sequence: Synthetic coding sequence
  source 1..7737: mol_type = other DNA
atgcccgtgaccgagaaggacctggccgaggacgccccctggaagaaaatccaacagaatactttcaccagatggtgtaacgagcacctgaagtgcgtgaataagaggatcggcaatctccagaccgacctatccgacggcttacggctgatcgcactgctggaggttctttctcagaagcggatgtatagaaagtatcaccagcgccccacgtttagacagatgcagttggagaatgtaagcgttgctctggagtttttggaccgggagtccataaaattggtgagcatagactctaaggcgatcgtcgacggtaacctgaaactgatcttaggactggtgtggacgcttatactgcactacagcatttcgatgccagtttgggaagatgaaggcgacgatgatgcaaaaaagcaaactcctaagcagcgactacttggttggattcagaacaagattccatatctgccgattacaaatttcaatcagaattggcaagatgggaaggcgttgggcgccctagtggacagttgcgctcccggactgtgtcctgactgggaatcctgggacccccagaagcctgtcgataatgcgagagaagccatgcaacaagccgacgactggcttggagtgccacaagtcattaccccggaggaaataattcaccccgacgtagacgaacatagtgtgatgacgtacctgagtcagttccccaaagcaaaactcaaacccggagctccactaaagcccaaacttaatcccaaaaaagctagagcatatggcagaggtatagagcctaccggtaacatggttaagcagccggccaagttcaccgtcgatactattagcgctggccagggcgatgtgatggtgttcgtggaggatccggaagggaataaagaggaagcgcaagtcacaccagactctgataaaaataaaacctacagtgtggaatacctacccaaggtgaccggtctgcacaaggtcacagtgctgttcgcaggtcagcacatatcgaaatctcccttcgaggtttcagtggataaggctcagggcgacgcctctaaggtaacggccaagggcccagggcttgaggccgtaggcaatattgctaacaaaccaacgtacttcgatatatacaccgcaggcgctggggtcggcgacatcggagtggaagtggaggacccacagggcaaaaatactgtggagctgcttgtggaagataaggggaatcaagtgtacaggtgcgtgtacaaaccaatgcagcctggtccacacgtggttaagatattctttgcgggcgacactatccctaaatccccttttgttgtgcaggtgggtgaagcttgtaatccaaacgcatgtcgcgcctcgggcagaggcttacagcctaagggggtgcggataagagagacaacagactttaaggttgataccaaggctgccggttctggagagctgggagtgactatgaaggggcctaagggcctcgaagagttggtgaagcaaaaggacttcctggatggagtttatgccttcgagtattaccctagcacccccgggaggtacagcatagctattacatggggcgggcatcacattcccaaaagccctttcgaggtgcaggtcggacctgaagccggcatgcagaaggtgcgagcttggggccccggcctccacgggggcattgtgggccgttcggcggattttgtggtggagtccattgggtcagaggtaggctctctgggtttcgccatagagggaccctctcaggcaaaaatcgagtacaacgatcagaatgacgggagctgcgatgttaagtattggcctaaagagcccggcgaatacgcagtacacattatgtgcgatgatgaggatattaaagactctccttatatggcatttattcatcccgcaaccgggggatacaaccccgacctcgtccgggcctatggaccaggcctggaaaagagtggatgtatcgtcaacaatctggccgagtttactgtggacccaaaggatgcaggaaaggctccgcttaaaatttttgcccaggatggcgaagggcaaagaatcgacatccaaatgaaaaaccggatggatggcacgtacgcctgttcatacacccctgtgaaggcaatcaagcacacaatcgctgttgtgtggggcggggtgaacatcccacactcgccttatagagtcaacattgggcagggatctcacccacagaaggtgaaggtttttgggcccggcgtggagcggtcgggtttgaaagccaacgagcctacacacttcacagtagactgtacagaggctggcgagggggacgtctcagttggaatcaaatgcgacgcaagggtgctcagcgaagatgaggaggatgtggactttgacatcattcacaacgccaacgatactttcacagtcaaatacgtccccccagccgccggaagatacactatcaaggtccttttcgcttcacaggagatacccgcgagcccgtttagggtcaaagtcgatccttcacatgacgcttctaaggtaaaggccgagggccccgggctcagcaaagccggcgtggaaaatggtaaaccaacacatttcaccgtgtacaccaaaggtgccggtaaagccccactgaatgtccagttcaacagtccactgcctggagatgcagtcaaagaccttgacataatcgataattatgattattcccacacagtgaagtatacacccacccagcagggaaatatgcaggtgctcgttacatacgggggcgacccaattcctaaatctcccttcactgtcggagtggccgcacctctcgatctgagcaaaataaagctaaatggcttagagaaccgggtggaggtgggcaaagaccaagaattcactgtcgataccaggggagcgggaggccaggggaaacttgacgtaacaattctgtctccttctcgcaaggtggtgccctgtttggttacgcctgttactggacgcgaaaactccactgcgaagtttataccccgggaggaggggctgtacgcagtcgacgtcacatatgatggacatccagttcccggcagtccatacaccgtggaagccagtctgccgcccgatccttcaaaggtcaaggcgcacggacccggcctcgaaggaggcctggtcggtaagccagccgaatttacgattgacaccaaaggagccggcaccgggggcctggggctcacagttgaagggccctgcgaggccaaaatcgagtgctcggacaacggtgatgggacttgcagcgtgtcatatctgcctaccaagcccggagagtacttcgtgaatattctgttcgaggaggtccatattcccggatcaccgttcaaggccgacatcgagatgccattcgatccctcaaaagtggttgcctcagggccagggctagaacacggcaaagtcggggaggccggtctcctctctgttgactgcagtgaggccggacctggtgctcttggtttagaagccgtctccgatagcgggacaaaggcagaagtgtcaattcagaataacaaagacggcacgtacgctgtgacatatgtgcccctcacggccgggatgtacacccttactatgaagtacgggggtgagctagtccctcatttccccgccagagtgaaggttgagccggcagtggacacatccaggatcaaggtttttggacctgggatcgaaggaaaagacgtatttagggaggccactacagattttaccgtcgacagtcgacccctaacacaggtgggcggagaccatatcaaggcccacattgccaatccgagcggcgcctcgactgagtgttttgtgactgacaacgcggacggaacgtaccaggtggagtatacacccttcgagaaaggactgcatgtggtggaggttacttacgacgacgtgccgattcccaatagcccttttaaggtggcagtcaccgaaggctgtcaaccttctagggtgcaggctcagggccccgggctcaaggaggcctttaccaataagcctaatgtttttactgtcgtcacaaggggggctgggattggcggcctcggtatcaccgtcgagggccctagcgagtctaaaatcaattgccgcgacaataaagatggatcatgtagcgccgaatatatcccctttgctcctggggactacgatgtgaatatcacatatggaggagcccatatccccggatcccctttccgtgtgcctgtgaaggacgtggtcgacccaagcaaagttaagatcgcagggcctgggctgggatcaggtgttcgcgcacgggtattacagtccttcactgtggacagcagcaaggcgggtcttgcccccctggaggtccgggtactcggccctcgtggactggtagagccggttaatgtggtcgataatggggatggaactcacactgttacatacacgccatctcaggagggcccttatatggtgtcagtaaagtacgccgacgaagagattccaaggagtccctttaaagttaaggttttaccaacctatgatgcctctaaagtgacagctagtggccctggcctgtctagctacggggtccccgctagcctaccagttgacttcgctattgatgctagggatgcaggggagggcctgctggccgttcagattaccgaccaggagggtaaacccaagcgggcaatcgtccacgataataaggacggaacatacgcagttacttatatacctgacaagacaggcaggtatatgatcggggtgacttatggcggcgatgacatccccctgtcaccttataggattcgtgctactcagaccggggacgctagtaaatgcctcgccactggcccgggaattgcctcgactgttaagacaggcgaagaagtgggcttcgtcgtagacgcaaaaaccgccggtaaggggaaggtcacatgcaccgttctgacccctgacggaaccgaggccgaagcagacgttatcgaaaatgaagacggcacgtatgatatcttctacacagccgctaaacccggcacctatgtgatatatgtccgatttggaggtgtcgatattcccaactcaccgttcaccgtgatggtgacagaggaagcctacgtccccgtgagcgacatgaacggcctgggattcaagccatttgatctggtgatcccattcgcagtgagaaagggcgagattactggggaagtgcacatgccttccgggaagactgcaacacccgagatcgtggataacaaggacggaaccgtcaccgttaggtacgcccccaccgaagtggggttgcacgaaatgcatataaagtacatgggatcacacatccccgaaagccctctgcagttctatgtcaattatcctaactccggatctgtctctgcctatgggccaggcctagtgtacggggtggcaaataagacggcaacgttcacaatcgttaccgaagacgccggcgaggggggtctggacctggcaattgaagggccaagcaaggcagagatctcttgcatcgacaataaggatggcacttgcacagtgacttaccttcccaccttgccaggcgattattccatacttgtcaagtacaatgacaagcacattcccggatcgcccttcacagccaagattaccgatgacagccggcgatgctcgcaggttaaactgggtagtgcggcggacttcctacttgatatctccgagacggacttgagctcactgactgcttccattaaggctcctagcggccgggatgagccttgtctgctaaagcgtcttcctaacaatcacatcggtatttcttttatcccacgggaggtcggagagcacctggtgagcatcaagaagaacggcaaccatgttgcgaactcacctgtttctatcatggtcgtgcaaagcgagattggcgacgccaggcgagctaaggtgtatggccgcgggctctccgaggggcgcaccttcgagatgtcagatttcattgtggatactcgtgatgctggttacggtggcattagcctggctgtagagggaccgagtaaggttgatattcagacagaggacctagaggacggaacgtgcaaggtctcgtattttcctacagtgcccggcgtttacatagtgtctaccaagtttgcagacgaacatgtacctggttcaccctttaccgtgaagatttcaggagagggacgcgtaaaagaatcaatcaccagaaccagccgagccccctccgtggccaccgttggttctatatgtgatctgaacctgaaaatcccggagataaacagttctgacatgtctgctcatgtcactagcccttcagggcgcgtgacagaggctgagatagtgccaatggggaagaacagccattgtgtaaggttcgtcccacaagagatgggggtgcacaccgtatcagttaagtaccgagggcagcacgtaactggcagccctttccagttcaccgtcggcccactaggagaaggcggggcacataaggtgagggccggagggcccggcctggagcgcggtgaggccggagttcctgctgagttcagcatttggacaagagaagccggagccggtgggctgagcattgcagtggagggcccatctaaggccgagatcactttcgatgatcacaagaatggcagctgcggcgttagctacattgcgcaggaaccaggcaattatgaggtctccatcaagtttaacgatgaacatatcccggaaagtccatatttggtgccagttatcgcacctagcgacgacgctcgtaggctgaccgtcatgagcttacaggagtcagggctcaaggttaatcagcctgccagtttcgccattcgccttaatggagcaaaaggaaaaattgacgctaaagttcacagccccagtggggctgtggaagagtgtcacgttagtgagctggaacctgataaatatgccgtgcggttcatccctcatgaaaatggtgtgcacactattgacgttaaatttaatgggagccatgtggtgggttcaccatttaaggtgcgtgtgggggaacccggccaggcgggcaaccccgccctggtgtcagcctatgggacaggcctagaggggggaactaccggtattcaatctgagttctttatcaacacaactagggccggcccagggaccctgagcgtgaccatagaggggcctagtaaggtcaaaatggactgtcaggagacacctgaagggtacaaggtgatgtatacaccgatggcccccggaaactacttgatcagcgttaaatatggaggccccaaccacatcgtggggagccctttcaaggccaaggttacggggcagaggctggtctcccccggcagtgctaatgaaacatcatctatcctggtcgagagtgtcacaaggagttctacagaaacctgttattcggctatccccaaagccagctccgatgcctccaaggtgacctctaagggagctggtctgtccaaggcctttgtggggcaaaaatcttcctttcttgtagactgctccaaggccgggtctaacatgctgcttatcggggtccacggtcctactacaccttgtgaagaagtttctatgaagcacgtcggcaaccaacagtataatgtgacttatgtcgtgaaagaacggggggattatgtgctggccgtaaaatggggggaggagcacattcccggatcccccttccacgtgactgtgccctag

SEQ ID NO: 187949 - DNA, 7269 bp, synthetic construct
  misc_feature 1..7269: note = Description of Artificial Sequence: Synthetic coding sequence
  source 1..7269: mol_type = other DNA
atgcaggagcacagcacccggcggcggagcctgagcctgtgccccgattgggagagttgggatcctcagaaacccgtagacaatgctcgcgaagccatgcagcaggctgacgattggttaggagtgcctcaggtgatcacccccgaggagatcatccaccccgacgtggacgaacacagtgtgatgacctatctatctcagttccccaaggccaagctgaagccgggagctcctttaaagccaaaattaaatcccaagaaggccagagcctatggaagagggatagaacccaccggtaatatggtgaaacagcctgcgaaatttactgtagatacaatctcagccggccaaggcgacgtgatggtgttcgtggaagatccagaaggcaacaaagaggaagcccaggttacccccgatagcgacaagaacaagacctattccgtggagtaccttcctaaagtgaccgggctacataaagtcaccgtcttgtttgcaggccagcacatcagcaagagtccttttgaggtgtccgtggataaagcccaaggagacgctagcaaagtgactgccaaggggcccggcttggaggctgtagggaacatcgctaataaacccacttacttcgacatttacacggcaggtgccggcgtaggagacatcggtgttgaggttgaagacccccaaggaaagaatactgtggagctgctcgtagaggacaagggaaatcaggtgtaccggtgcgtgtacaagccaatgcagcccggccctcacgttgtgaagatcttcttcgccggagacacaatccctaaatctcccttcgtggtccaggtcggcgaggcctgcaacccaaacgcttgccgagcctctggccgcggtctgcaaccaaaaggggtgaggattcgcgagaccaccgactttaaggtagatacaaaagccgctggaagtggagagctgggggtgacaatgaaagggcccaagggcctcgaggaattggttaaacagaaggattttctcgatggggtgtacgcttttgagtactacccttcaacacccggtaggtactcaatcgccatcacgtgggggggacatcacattcccaagagcccattcgaagtgcaggtgggcccagaagcggggatgcagaaagtgagagcatgggggcctggcctacacggcggcatcgttggcagaagcgccgattttgttgtggagtccattggtagcgaggtcgggtccctgggctttgctattgaaggtccatctcaagcgaagattgagtataatgaccagaatgacggctcctgtgatgtgaagtactggccaaaggaaccgggcgaatacgccgtacacatcatgtgtgacgatgaggacatcaaggacagtccctacatggcttttatccaccccgccactggcgggtataacccagatttagtccgcgcgtatggcccggggctcgagaaatctggttgtatcgtcaataatctggccgagtttaccgtcgatccaaaagatgctgggaaggccccactgaaaatcttcgcccaagatggtgaggggcaaagaattgatatccagatgaagaatcgcatggatggcacttacgcatgttcatacacccccgttaaggctattaaacataccattgcagtggtgtggggcggcgtaaatattccacatagcccttatagagtgaacatcggtcagggatcccatccacagaaagtgaaagtgttcggccctggagtcgagcgctcggggctcaaagcaaacgagccgacacactttacggtggattgcaccgaagccggagaaggcgacgtctcggtgggaataaagtgtgacgcccgcgtgctgtctgaggacgaggaggatgtggacttcgacatcattcacaatgcaaacgacacctttacagtcaagtacgtgcctccggctgcggggcgatacactatcaaggtgctcttcgcttcgcaggaaattcctgcctcccctttcagagtcaaggtggacccttctcacgatgcaagcaaggtgaaagccgaaggccccggcctgagcaaagcaggagtagaaaatgggaagcctacccacttcaccgtttatactaaaggagctggcaaggcacctctcaatgtgcaatttaactcccctctgccgggggacgctgttaaggatctcgatataatcgataattacgactattctcacaccgtgaaatacacacccactcagcagggaaatatgcaggtgctcgtgacatatgggggtgatcctattcctaaaagcccattcacagtaggcgtggccgcccccttagacctgagcaagattaaacttaacggacttgagaatcgggtggaggtcgggaaggatcaggagttcaccgtggacacaagaggagcagggggacaggggaaactagacgtgacaattctgtctcctagccgtaaggtggtcccatgcctggtcactcctgtgacaggtcgggagaactctaccgctaagttcataccacgggaggaaggtttgtacgcagtagatgtcacatacgatggtcatccagttcccggctctccatacactgtggaagccagcctacctccagaccctagcaaggtgaaagcccacggtccaggattagagggcggattagtcggaaagcctgccgaattcactattgacaccaaaggagccggcactggcggtctgggcctgactgtagagggtccatgtgaggctaagatagagtgctcagacaatggtgatggcacatgctccgtttcctatttgcctaccaagcccggcgagtactttgtgaacatcctattcgaagaggtccatatcccggggagcccctttaaggcagatatcgagatgccatttgatccctcaaaagtggttgcctcaggccccggcctggagcatggaaaggtaggtgaggcaggcctgttatcggtggactgctccgaggcgggaccgggtgctttaggccttgaggccgtgtctgattcaggaaccaaggcagaggtgtccatccaaaacaacaaggacggcacatatgccgtgacgtacgtaccacttaccgctgggatgtacactcttactatgaagtacggcggtgaactggtcccccatttccctgcccgggtgaaagtggagcccgcggtggacacgagtcgtattaaggttttcggccctggaatcgagggaaaggatgtgtttagagaggctactacagatttcaccgtcgactctcgcccgctcactcaggtcggcggagaccacatcaaagcacatatagctaatcctagcggcgcttcaactgaatgttttgtgaccgacaatgccgacggaacataccaggtggagtacacccctttcgagaagggcctgcatgtggtggaagtgacatatgacgatgtgcctatcccgaattccccgttcaaagtcgcagtgacagaaggatgtcaaccatcccgggtgcaagctcaggggcccggcctgaaggaggcctttactaataagcccaatgtgttcacagttgttacccgcggggccggcattggaggcctgggtattaccgtggaaggtccttccgaaagcaagataaactgtcgagataacaaagacggcagctgtagcgccgagtacattccattcgctcctggagattacgacgtgaatatcacctatggtggggcccatattcctgggtccccatttagggtacccgtcaaggatgtagtggacccgtctaaagtgaagatcgcaggccccggactgggctcaggggtgagggcacgcgtactccaaagcttcaccgtggacagtagcaaggctgggctcgccccgctggaggtcagggtcctagggcccagaggcctcgtggaacctgtcaacgtcgtagacaatggcgacggtacgcatactgttacctacaccccctcgcaggaagggccttacatggtttccgtcaagtatgcggatgaggagataccgcggagtcccttcaaggtgaaggtgcttccgacctatgatgcatccaaggtcaccgcttcaggtcccggactatcttcttacggggtgcccgcatcgctgccagtggattttgctattgatgcgagggacgccggagaaggtctgctggccgtgcagataacggaccaagaagggaagcccaagagggctatagtccacgacaataaggacggaacctacgcggtgacttacattcccgacaaaaccggccgatacatgataggcgtgacatacggaggggatgacattcctctgtccccgtataggatcagagcaacacaaaccggagatgcctccaagtgcctggcgactgggcccggcattgccagcacggtcaagaccggggaagaagtaggcttcgtcgtcgacgcaaaaactgccggaaaaggtaaagtgacgtgcaccgtgttgacgccagatggcacggaggcagaggcggacgtcatcgagaacgaggacggcacttacgacatcttttacacagctgccaagccaggtacttatgtcatctatgtcaggttcggaggggtggatatcccaaattctccatttaccgttatggctaccgatggagaagtgacagccgttgaggaagctccagtaactgaggaggcatacgtgccagtgtccgacatgaatggacttggctttaagccctttgacttagtgataccgttcgccgtcagaaaaggtgagatcacgggtgaagtccacatgccgtctggtaagactgctacgccagagattgtcgacaacaaagatggaacagtcactgttagatacgcacctaccgaggttggcttgcacgagatgcacatcaagtacatggggtcccacatccccgagtcccccctccagttctatgtcaattatcccaactctgggagcgtgagcgcttatggccccggtttggtctatggagttgcaaacaaaaccgccacattcacaattgtgactgaggatgctggcgagggcggcctcgacctggcaatcgaaggcccttccaaagccgagatctcctgtatcgacaacaaggacgggacgtgtacagtgacgtatctacctaccctgccgggagattacagtattctcgtgaagtacaacgacaaacatattcctgggtctccttttactgccaagattaccgatgattctcgccggtgtagccaagtgaaactggggagtgctgcagatttccttttggacattagtgagaccgacttgagttcactcaccgcttccataaaagcccccagcggccgggatgagccctgtctcctgaagcgtttgcccaataaccatatcggtattagttttatcccgcgagaagttggagaacatctcgtaagcataaagaaaaatgggaatcatgttgccaatagccctgtgtccatcatggttgtccagagcgagatcggggatgcccggagagcaaaagtgtacggccggggcctctctgagggacgaacttttgaaatgtctgacttcattgtcgacacccgcgatgcgggctatggaggtatctctttagcagttgaaggcccgtctaaagtggatatccagacagaggacctggaagatggtacatgcaaagtgtcatatttcccaaccgtgccaggcgtgtacattgtttcaactaagttcgccgacgaacacgtaccgggcagtcccttcactgtaaagatttcaggggagggacgcgtcaaagagagtatcaccaggactagtcgcgcccccagcgttgcgaccgtggggtctatatgcgatctgaacctgaagataccagagattaactcatctgacatgagtgcccacgtgacctcaccctctgggcgagtgacagaggcggagatcgtgcccatgggtaaaaactcacactgtgtacgctttgtcccacaagagatgggagttcacacagtttctgtgaagtatagaggccaacatgtaacaggcagccccttccaattcacagtaggtcccctcggcgaggggggagcgcacaaggtgcgggccggcgggccaggacttgagaggggagaggctggcgtaccagccgagttttcaatttggacgagggaggcaggtgccggagggttaagcatcgccgttgagggacccagtaaggcagagattacattcgacgatcacaagaatggaagttgcggtgtctcctatattgcgcaagaacccggcaactacgaagtgagcattaagtttaatgatgaacatatccccgagtccccctatttggtcccggtaatcgcgccctctgacgatgccaggaggctgactgtgatgtcactgcaggagtccggcctgaaggtgaaccaacccgcctcctttgcaattagattaaacggagcgaaagggaaaattgacgccaaagtacattccccaagtggggccgtggaagagtgtcacgtgagcgagctggaaccagataaatatgcggttcgatttatcccacacgaaaatggagttcatacgatagatgtcaagttcaatggctcccatgtggtggggtcaccatttaaagtcagggttggcgaaccaggacaagccgggaatccagctctcgttagcgcgtacggaactgggctggagggagggacaaccgggatccagagtgaatttttcatcaacacaacccgcgctggccctggaaccctttctgtcacgattgaaggaccctccaaggtgaagatggattgccaagagacccccgaaggatacaaggtgatgtatacacctatggctccaggaaattatctcatttctgtgaagtatggtggaccaaaccacatcgtgggtagcccttttaaagcgaaggtgactggtcagaggctcgtgagtcccgggagcgccaacgaaacatccagcatcctggtcgagtccgttacgagatcttccacagagacttgctattcagccattccaaaggcgtcaagcgacgcgtccaaggtcacctccaagggcgctgggctgagcaaagcctttgtgggacaaaaatcaagctttcttgtggactgttccaaagccggcagcaacatgctgctgatcggcgttcacggtcctacaaccccgtgtgaagaggttagcatgaagcatgtcggtaaccagcagtataatgtcacttacgttgtcaaggagcgaggggattatgtgctcgccgtcaagtggggtgaagagcatatacctgggtccccattccatgtgacagtgccttag

SEQ ID NO: 187950 - DNA, 7776 bp, synthetic construct
  misc_feature 1..7776: note = Description of Artificial Sequence: Synthetic coding sequence
  source 1..7776: mol_type = other DNA
atgcccgtgaccgagaaggacctggccgaggacgccccctggaagaagattcagcagaataccttcacgagatggtgtaatgagcacttgaaatgtgttaacaaaaggattgggaacttacaaacagatctgtccgatggtctgagactgatcgcactgctagaagtactttcacaaaaaaggatgtatagaaagtaccaccagagaccaacctttagacagatgcaactggagaatgtctcagttgcgctcgagtttcttgatcgggagagcattaagttagtgtccatcgactcgaaggctattgtcgatggcaacctgaaattaatccttggcctggtgtggactctgattctccattactctatctccatgcctgtgtgggaggatgagggagatgacgacgccaagaaacaaacccctaagcagagactactgggctggatccagaacaaaatcccttacctgcccatcacgaatttcaaccagaattggcaggatggcaaagccctgggagctctagtggattcttgcgccccgggtctctgccccgactgggagagttgggacccacagaaaccagtcgacaatgcccgcgaggccatgcagcaggccgatgactggctgggtgtgcctcaggtaatcacccccgaggaaattatccatccagacgtggatgagcactctgtcatgacatacctctctcagtttccaaaagcaaagctgaaacctggggctccacttaaaccgaagttaaacccgaagaaggccagggcctacggaagaggcattgaaccgaccgggaacatggtgaaacagcccgcaaagttcacagtcgacacgatatctgcgggacagggcgacgtcatggtgttcgtggaagacccggaaggaaataaggaagaggcccaggtcacccccgattccgataagaataaaacgtatagtgtggaatatttacccaaagtgactggtctgcacaaggtgaccgtgttgtttgctggtcagcatattagcaagagcccatttgaagtctccgtcgacaaagcccagggcgacgccagtaaagtcacagctaagggacctgggttagaagctgtcggcaacattgcaaacaaaccgacttatttcgatatttacacagccggagctggggttggtgatatcggggttgaggttgaggacccccagggcaaaaacacggtggagcttttggttgaggacaagggaaaccaggtatatcgatgtgtctataaacctatgcaacctggcccacatgttgtaaagattttctttgcaggtgacactattcccaagagcccctttgtggtgcaagtcggcgaagcttgcaatcccaatgcttgccgggcttccggccggggcctgcaacccaagggtgtgcggatccgcgagactactgatttcaaagttgacaccaaggccgccggtagtggtgaattgggagtgacgatgaaggggcccaagggtctagaggaactggttaagcagaaagacttcctggatggagtttacgccttcgaatattatccttcaacacccggacgctatagtatcgctatcacgtggggcgggcaccacattccaaagtcaccctttgaggtgcaggtggggccagaggccgggatgcaaaaagtccgcgcatgggggcctggcctacacggaggtattgtggggcgtagcgcggactttgttgtggagtccataggaagcgaggtgggttcactcggcttcgcaatcgaggggccatcccaggccaagattgaatacaatgatcagaacgacggctcctgtgatgtgaagtattggcctaaagagccaggtgagtacgctgtgcatatcatgtgcgatgatgaagacataaaggactctccatatatggcctttattcatcctgcgactggcggttataatcctgatctcgtacgagcctatgggccaggcctggagaaaagtggctgtatcgtaaataaccttgcggaatttaccgtggatccaaaggacgctggcaaagcacctctcaaaatcttcgctcaggacggcgagggacagcgcatcgacatccaaatgaagaaccggatggacggaacgtacgcctgtagctatacccctgtaaaagccatcaagcatactatagccgtggtgtggggaggagtgaacatccctcacagcccatatcgcgtcaacatcgggcaaggatcacaccctcaaaaggtgaaggtctttgggccgggcgtggaacgaagcgggctgaaagcaaacgagcccacgcatttcacagtagattgcaccgaggcgggcgaaggagatgtgagcgtcgggatcaagtgcgacgcccgggttctgtctgaagatgaggaagatgtagacttcgacatcatccataatgccaacgatacttttaccgtcaaatacgtgcctcctgctgccgggaggtatacaatcaaggtgttattcgctagccaggagattccggccagtccatttagagttaaggtcgaccctagccacgacgcatctaaggtgaaggcagaggggcctggcctctccaaggccggcgtagaaaatggcaaacccacccattttacagtctacaccaaaggagccggtaaggcgcctcttaatgtccaatttaacagtcccctgcccggagatgccgtgaaggatctcgacatcattgataactatgactattctcacaccgtcaagtatacaccaacacagcagggcaacatgcaggtgctagtgacatacgggggcgatccaatccccaagtcccctttcacagtaggagttgccgcaccccttgacctgagcaagatcaagctgaatgggcttgaaaaccgcgtcgaggtgggcaaagatcaagaatttacagtcgatactaggggggctgggggccagggtaagctggacgtgaccatattgagcccttccagaaaggtagtgccatgtctggtgacacctgttaccggcagagaaaacagcaccgcgaagtttattcctcgggaggagggcctgtatgctgtggacgttacctacgacgggcatcctgtaccagggagcccctatacagtggaagcctcccttccccccgatccttcaaaggtcaaagcccacgggcctggactggaggggggtctagtggggaaacctgcagaatttacaattgataccaaaggcgccggcaccggcgggttaggtctgactgtagaggggccatgcgaggctaagatcgagtgctccgataacggcgatgggacctgttctgtgagctacctgcccacaaagcctggcgaatattttgtcaacatcctcttcgaagaggtccatatcccgggatcaccctttaaggcagacattgagatgccttttgacccttcaaaagtcgtagcttcagggccgggcctggagcatgggaaggtgggggaggccggattgttaagcgtagattgtagcgaggccggcccaggagccctgggccttgaagctgtgtctgactctggcacaaaagccgaagtatctatacagaacaacaaagatggaacgtacgccgtcacctacgtgccactgactgccggtatgtacaccctgacaatgaagtacggaggggaactcgtaccccacttcccagcacgagtaaaggtcgagccagcagtggacacatctcgtatcaaggttttcggacctggaattgaaggcaaagacgtgtttagggaggccactactgattttaccgtggattcaagaccactgacccaggtgggaggcgaccatataaaggcccacattgctaatccttcaggcgcatccacggaatgcttcgtcacagacaatgcagatggcacttatcaggtcgagtatactccctttgagaaaggattgcatgtggtggaggtgacgtacgacgatgtgccaataccaaattccccgtttaaggtcgcagtcactgaggggtgccagccttctcgtgtgcaggcacaagggcctggtctgaaggaggcctttaccaataagcctaatgttttcacggtagtgacaaggggcgcaggcatcggtgggctcgggatcacagtggagggcccttcggaatccaagatcaactgcagggataacaaagatggctcttgtagcgccgaatacattccttttgcccctggtgattatgatgttaatatcacttatggaggtgctcatatccccggttctccgttccgcgtacctgtgaaggatgtggtggacccctccaaggttaaaattgctggacctggactaggctccggcgtgagggcccgagttctccagagtttcaccgtggattcctccaaagcaggtctcgccccactagaggtccgagtattgggaccccgagggctggtcgagcccgtcaacgtcgtcgacaatggtgacggaactcacaccgtgacatacactcctagtcaggagggaccatacatggtgtcagtaaaatatgctgatgaagaaatcccccgtagcccctttaaggtgaaagtgctacctacatacgacgcttcaaaagtcaccgcaagtggacctggactttctagctacggagtgccagcaagcctgcccgtggacttcgctattgacgcaagagacgcgggcgaaggactgttggcagtacaaattaccgaccaggagggaaaacccaaaagggccatcgtccatgataacaaggacggaacttatgcagtcacttacatcccagataagaccggccgatatatgataggtgtgacctacggaggggatgacatccctctatccccctaccgtatcagagctacccaaaccggtgatgcctctaagtgcttagcaactgggccgggcatcgccagcactgtcaagactggggaagaggtcggatttgtcgtcgacgccaaaactgctggcaaaggtaaggtaacttgcacagtactgactcctgacggaacagaggccgaggccgatgtgatcgagaatgaagatgggacctacgacatattctatactgccgctaaaccaggcacttatgtgatctacgtaagattcggaggtgtcgatataccgaattctccttttaccgtgatggctactgacggcgaagttactgcagtggaggaggcacctgtgaccgaggaagcctatgttcccgtctctgacatgaacggactggggtttaaaccctttgatctcgttattccattcgccgtccggaagggggagatcaccggtgaggtgcatatgccttcgggcaaaactgcaacccccgaaattgtggacaataaagatggaacggtgacggtgaggtatgctccaacagaggtggggcttcacgagatgcatatcaaatatatggggagccacatcccagagtcccctctccagttttacgtgaattaccccaattcaggctcagtgtctgcgtacgggccgggcctggtgtacggggtagccaataagactgccacttttaccattgtgacagaagacgccggagagggcggcctagacctagccatcgagggaccgtccaaagcagagatctcttgcatcgataataaagatggtacttgcacagtcacgtaccttccaactctgccaggggattactcaatcttagtaaaatacaacgataagcatatccccggctcaccatttaccgcaaagattacagacgactccaggcggtgctcccaggttaagctcggctccgccgcggacttcctcctcgacatctccgagaccgaccttagctcattgaccgcctctatcaaagcccccagtggccgggatgaaccatgtttgttgaagcgccttccaaataaccacatcgggatatcgtttatccctagagaggttggtgagcaccttgtgagtattaagaagaatggtaatcatgtggctaactccccagttagtattatggtggtccagtccgaaatcggagacgcacggcgcgcaaaagtgtacgggcggggactgagcgaagggaggaccttcgagatgtccgacttcatcgttgacacccgggacgctggctacggtggcatatcactggcggtggagggccctagcaaagtggacatccagaccgaggacctagaggatgggacctgcaaggtgtcatatttccccacagtgcctggcgtgtacatcgtttccactaaattcgctgatgagcacgtgccagggagcccgttcaccgtcaagatttctggggagggtagagttaaagaaagcattaccagaacctctcgggcaccctctgtcgctaccgtgggctctatttgcgaccttaatctcaaaattcccgagatcaattctagcgatatgtccgcccatgtaacctcaccgtccgggagagtgactgaggcagaaatcgttcccatgggcaagaactcccactgcgtgcggtttgtcccccaggagatgggtgtacacacagtctcagttaagtatcggggacaacatgtgactgggtctcccttccagttcaccgtaggaccgctgggtgaaggaggcgcccacaaagtgcgcgctggtggccccggactcgaaagaggcgaggcaggagttcccgcagaattttccatctggacacgggaagccggggccgggggcctctccattgctgtggaaggcccgtcaaaagcagaaataacgtttgatgatcacaaaaacggtagctgtggcgtatcatatattgctcaggagcccggcaactacgaagtttcaattaaattcaacgacgagcacatacctgaaagcccataccttgtgcctgttatcgccccctccgacgacgcccggagactcacagtcatgtcccttcaggaaagtgggctgaaagtcaaccagccagcttctttcgcgatccgcctcaacggagcaaaaggaaagatcgacgccaaagtccactccccctcaggtgctgtcgaggagtgtcatgtgagcgagctggagccagacaagtacgccgtgcggtttatccctcatgagaatggtgtccacacaatagacgttaagtttaacggaagtcacgtggttggatccccctttaaagtgcgcgttggtgagcccggccaggctggcaaccctgctttagtttcagcctatggaaccggcctcgaaggagggactactggtattcaaagcgagttttttatcaatacaactcgggctggacccggcaccctgtcggtaactatagaaggaccttctaaggttaagatggactgtcaagaaacgccggaaggatacaaggtgatgtacactccaatggctccgggaaactatctgattagtgttaagtatggggggccaaaccatatcgttggctctcctttcaaagccaaggtgaccgggcaacggttagtatcaccgggctccgctaatgaaacatcttctatcttggtggagtcagtaaccagatcaagtaccgagacctgctattctgccataccaaaggctagtagcgacgccagtaaagtgacatccaagggcgccggtttgtctaaagcctttgtggggcaaaagtcgagctttctggtcgactgttctaaggcagggtcgaacatgctattgattggggtccatggccccaccactccatgcgaggaggtgtccatgaagcatgtgggaaaccagcagtacaatgtcacatacgtggttaaggagagaggcgactatgtacttgcagtcaagtggggagaggagcacatcccaggcagcccctttcacgtgaccgttccttag

SEQ ID NO: 187951 - DNA, 408 bp, synthetic construct
  misc_feature 1..408: note = Description of Artificial Sequence: Synthetic coding sequence
  source 1..408: mol_type = other DNA
tgactggccgtggagggccccagcaaggtggacatccagaccgaggacttggaggacggtacgtgcaaggttagctacttccctacagttcccggcgtctacatcgtctcgaccaaattcgcggatgaacatgtccccgaaattaactcaagcgacatgtccgcacacgtgaccagcccgagcggtcgggttaccgaggctgaaatagtccctatgggaaaaaatagccactgcgtgcgttttgttccccaggaaatgggagtacacacagtgtccgttaagtatcgcggtcagcatgtgaccgggtcccctttccagttcacagtgggacccctgggcgaaggcggagcccacaaagtaagagcaggtggtcctggtcttgagaggggcgaggctggcgtcccctag

SEQ ID NO: 187952 - DNA, 7902 bp, synthetic construct
  misc_feature 1..7902: note = Description of Artificial Sequence: Synthetic coding sequence
  source 1..7902: mol_type = other DNA
atgcccgtgaccgagaaggacctggccgaggacgccccctggaagaaaattcagcagaacacttttacgcgctggtgcaatgaacatctgaaatgcgtcaacaagcggattggaaacttacaaacagatctgagtgacgggctgcggctgatcgcattgttggaggtgctctcacagaagcgtatgtaccggaagtatcatcagcggcccaccttccgtcagatgcagctagaaaacgtctcagtggccctcgaatttctcgacagagaatctatcaagctcgtaagtatcgattctaaggcgatcgtggacggtaatctcaaattgatcctagggttggtatggaccctgatacttcactactccatttctatgccagtctgggaggatgaaggggatgatgacgctaagaaacagacgccaaaacagagactacttggctggatacagaataagatcccctacctgcctatcacaaactttaaccagaactggcaggacgggaaggccttgggcgccttggttgattcctgtgcacctgggctgtgccctgactgggaaagttgggatcctcagaagcccgtcgataatgccagagaggcgatgcagcaggccgacgactggctcggggttcctcaggtgattacccctgaggagatcattcaccccgacgtggacgagcattcagtaatgacttatctgtcacagttccccaaagctaagctgaaaccaggtgctcctctcaaaccgaagctgaatcccaagaaagcccgtgcatatggcaggggcattgagccgacagggaacatggtgaaacagccagcaaagtttaccgtagatacgatcagtgcaggacaaggagatgtcatggtgttcgtggaggatcctgagggcaacaaagaggaggcgcaggttactccggattccgacaagaacaagacttattcagtggaatatctgccaaaggtgacgggcctgcacaaagtgactgtcttgtttgcaggacagcatatctccaaatctccttttgaggtttcggttgataaagcccaaggggatgcaagtaaggtgaccgctaaaggcccgggcctggaagccgttggcaacatcgcaaataagccgacctactttgacatctataccgctggtgccggcgtcggggatatcggcgtggaggtcgaggacccacagggaaagaatactgtcgagctgctggtcgaggacaaggggaatcaggtgtatagatgcgtatacaagcccatgcagccaggacctcacgtcgtaaagattttctttgccggcgacaccatccccaaatcacccttcgtcgtccaggttggcgaggcttgcaacccaaatgcttgccgagcatccggtcgaggactccagccaaaaggagtgcgaatccgagaaacgacagacttcaaggttgacaccaaggccgccggtagcggagaactgggcgtgaccatgaaaggtcccaagggtctggaagaactggtgaagcagaaggattttctggatggcgtctacgcatttgagtattatccaagtactcccggcaggtacagcatagccattacgtggggtggacatcatattcccaaatccccttttgaggtgcaagttgggccagaggctggcatgcagaaggtccgggcttgggggcccgggctgcatggggggattgtcggaagatctgctgatttcgtggtcgagagcataggcagcgaggtcggatccctgggtttcgcaatcgagggaccatcccaagctaagatagaatataatgaccagaacgatggcagctgtgatgttaagtattggccaaaggagcctggcgagtacgcggtccacatcatgtgtgacgacgaggacattaaggatagtccatatatggcgtttatacatccagctaccggaggttacaatccagacctggtgagggcttatgggcccggcctcgaaaaatcagggtgtatcgtgaacaatctggcagagttcactgttgacccaaaagacgctggaaaagcacctttaaaaatcttcgctcaggacggcgaggggcagaggattgacattcagatgaagaacaggatggacgggacctatgcctgcagctatacaccagtaaaggctattaaacacaccatcgctgtagtgtggggaggcgtaaacatacctcacagcccctatcgggtaaacatcggacagggctcccatcctcagaaggtcaaggtgttcggaccgggcgtcgagagatctggcctgaaggctaatgagcctacccattttacggtggactgtaccgaggccggtgagggcgacgtgagtgtgggcataaagtgtgatgccagagtgctgtcagaggatgaggaggatgtggacttcgacattatccacaatgccaacgacacctttaccgttaaatatgtacctcctgccgccggacgatacacaatcaaagttctgttcgctagccaagaaattccagcatccccctttagagtaaaagtggacccaagtcatgacgcctcaaaagtcaaggctgagggacctggcctgagtaaagctggcgtcgagaatggaaagcccacccatttcaccgtttacacgaagggcgctggcaaagccccccttaatgtgcagttcaacagcccacttcccggagatgcagtcaaagacctggatataattgataactacgattattcacacacagtcaagtatactcctacgcagcaggggaatatgcaggttctggtcacttacggcggcgaccctattcccaagtccccattcactgtaggggtggctgccccgctggacctcagtaaaattaagctcaacggccttgaaaacagggtggaggttgggaaagaccaggagtttacagtggatactcgcggggccggcgggcagggcaaactcgacgtgactattctgagtccctcgcgcaaagtggttccttgcctagtgacccccgtgactggccgggaaaatagtacagctaagttcatccccagggaggagggcctttacgctgtggatgtgacatacgacggccacccagttcccggctccccttatacggttgaggcaagccttcctccagacccttcaaaggtgaaggcccacggccccggactggaggggggcctggtcggcaagcccgccgagtttacaattgacaccaaaggagccggcactggaggtttaggcctgacagtggagggtccctgcgaagccaagatagaatgttctgataatggggatggcacgtgctcagtctcctacttacccacaaagcccggagagtattttgtcaacatactgtttgaagaggtgcacattccaggctcacctttcaaagcggatattgagatgccattcgatccaagcaaggtggtggcctcgggccctggtctggagcatggtaaagttggtgaggcggggctcctgtcagtcgactgcagcgaagccggacctggcgcattgggactcgaagctgttagcgacagtggtacgaaggccgaagtcagcatccagaacaacaaagacggtacctacgcagtgacatatgtcccgctgacagccggaatgtacacacttacaatgaagtacggaggcgaactggtgccacacttcccagcaagggtcaaggtcgagcctgcggtcgatacatccaggatcaaagtgtttggaccgggaatcgagggcaaggatgtgttccgcgaggcaaccacagatttcaccgtcgatagcagacctttaacacaggtcggcggtgatcatataaaggcccacatcgctaatccttcaggcgcctccaccgagtgttttgttaccgacaatgctgacggcacctatcaggtggagtatacaccgtttgaaaaggggctccacgtggtggaagtgacctacgatgatgttcccattccaaatagcccatttaaagttgctgttacggagggatgccaaccttcaagagtacaggcccagggcccaggactgaaggaagcttttaccaacaagcccaacgtctttaccgtggttacccggggggctggtattggcggtctgggcatcaccgtcgaagggccatctgagtcaaagatcaactgccgcgataataaggatggatcttgctccgccgagtatattcccttcgcacccggtgattacgacgttaatattacctatggcggcgctcacattcctggaagtccctttcgcgttcccgtaaaggacgtcgtcgacccaagtaaggtcaagatcgcagggccaggcctgggatctggagtgcgggcaagggtgctccaatccttcaccgtcgattcctcaaaggcgggcctggcgcccctcgaagtccgcgtgctgggccccagggcggacgataccgacagccagtcttggagatcgcctctgaaggccctaagcgagttctttaagggtgaccccaagggggatttcaacaaaacaggcctggtcgaacccgtgaatgttgtggataatggcgacggaactcacaccgtgacatacactccatctcaggaggggccgtacatggtgagtgtcaaatacgccgacgaggaaatcccccgaagccctttcaaggtgaaagttctaccgacctatgatgcatcaaaagtgactgcctccggaccaggcttgagctcatatggtgtgcctgcttcactgcctgtggattttgctattgatgccagagatgctggcgagggcctgttggctgtgcaaatcacagatcaggaaggcaagcccaagcgcgctattgtgcatgacaataaggacggcacctacgccgtgacatacatcccggataagaccggaagatacatgataggcgttacatatgggggtgacgacatcccgctttctccttatagaattagggctactcagactggagacgcttctaaatgcttggctacgggacctggcatcgcatccaccgttaaaacaggcgaggaggtgggattcgtcgtcgacgcgaaaactgccggcaagggcaaagttacttgtaccgtgctcaccccagatggaaccgaggcagaggccgatgtcattgagaacgaagacggaacctacgatatcttctacacggctgccaaaccgggaacctatgtgatttacgtgaggtttgggggagtggacatcccaaatagtccgttcaccgtgatggccaccgatggggaggttaccgccgttgaggaagcaccagtgaatgcctgccctcctggttttaggccgtgggtcactgaggaggcctacgtccctgtctcagatatgaatggactgggctttaagcctttcgacctggtgatccccttcgccgtcaggaagggcgaaattactggagaagttcatatgcctagcggaaagaccgcaactcctgaaatcgttgataataaagacgggacggttacagtccgctacgctcctacggaggttgggctgcacgagatgcacataaagtacatgggaagccatatccccgagtctccacttcagttttatgtgaactaccccaacagcggatcagtaagcgcttatgggccaggcctggtctatggagtggccaacaagactgccactttcacaatcgtgaccgaagacgcaggtgagggtgggctagacctagccattgagggccccagcaaagctgagattagttgtattgacaacaaggatggcacttgtactgtgacatacctgcctacgttgcccggtgattactccatccttgtgaaatataatgacaagcatatcccgggctctccctttaccgctaagattaccgatgacagccgccgctgctctcaagttaagctgggctcagccgccgacttcctcctggatatctccgagactgatctgtcatccttaactgcctcaataaaggctccatccgggcgggacgagccatgtctgctcaagcgattacctaacaaccatattgggatctccttcatcccaagagaggtcggcgagcacttagtgagtataaagaagaacgggaaccacgtagcaaatagccctgtaagtatcatggttgttcagtctgagatcggcgatgcgaggcgggccaaggtgtacggtcgcgggttgtctgaagggcgcacattcgagatgtccgattttatcgtggatacccgcgacgcaggttatgggggtatttcactggcagtggagggaccaagtaaagtggacattcagaccgaagatttggaggatggaacctgtaaagtcagctatttcccaactgtgccaggcgtctacatcgtgagcacaaagttcgctgacgagcacgtacctggatccccctttaccgttaagatatccggtgaaggcagggtcaaggagtcaattaccaggacatcacgcgctcccagtgtggccactgtcggctccatatgtgacctgaatctaaaaatccccgagatcaatagcagcgacatgtccgcccacgtgaccagcccttccggacgggtcacagaggctgagatcgtcccgatgggcaagaacagtcactgtgttagatttgtgcctcaagagatgggcgtgcatacagtgagcgtgaagtataggggacagcacgtgacgggcagtccgttccagttcactgtaggcccactgggcgaggggggagcacataaagtgagggccggcggccctggcctggagcgaggagaggccggggtgccagcagagtttagcatttggaccagagaggcaggagctggcggactatctatcgcagtggagggaccgagcaaagccgaaatcacattcgatgaccataaaaatggaagctgcggagtatcatacatcgcgcaagagcctgggaactatgaggtctccatcaagttcaacgatgagcatataccagaatcaccttacttagttcctgttatagcaccaagtgatgacgctaggaggctcacggtgatgtcgctccaggagtccggacttaaagtaaatcagccagcctcctttgccataagactgaacggcgcaaagggaaaaatagacgctaaggttcactcccctagtggggcagtcgaggagtgtcacgtgagtgagctggaacccgataagtacgccgttcggttcatcccgcacgagaatggggtgcacacaatcgacgtcaagttcaatgggtcccacgtggtcggatctccttttaaggtgagagtgggagagccaggccaggccggcaacccggccctggtctctgcatatggcaccggactggaaggcggcacaacaggtattcagtcggaattctttataaacacaacaagggctggtccgggcacattatcggtgaccatcgaaggaccttccaaagtaaagatggattgccaggaaacgcccgagggttacaaggtcatgtacacacccatggctccagggaactaccttatctccgttaagtatggaggaccgaatcacatcgtgggtagcccttttaaggccaaggtgaccggccagagattggtatccccaggctctgccaatgaaacaagctcaatcctcgtggaaagcgtaactcgcagttccacagagacctgttacagcgcaatccccaaagcttctagcgacgcctccaaagtgaccagcaaaggcgcagggctcagtaaagcatttgtcggacagaaatcttcttttctcgtggactgcagcaaggccggatccaacatgctgctgataggcgtgcacgggcccaccacgccgtgcgaagaagttagcatgaagcacgtggggaatcagcagtataacgttacatatgtggttaaggagcggggagactacgtcctggcagtgaaatggggtgaggagcatatcccaggatctcctttccatgttactgtgccctag

SEQ ID NO: 187953 - DNA, 8178 bp, synthetic construct
  misc_feature 1..8178: note = Description of Artificial Sequence: Synthetic coding sequence
  source 1..8178: mol_type = other DNA
atgatgaacaacagcggctacagcgacgccggcctgggcctgggcgacgagactgacgaaatgccatcaaccgagaaggacctagcggaagatgcaccatggaagaaaatccagcagaatacttttacccgctggtgcaatgaacacttgaaatgtgtgggaaagcggctgacagatctccaacgcgacttaagcgatggcctgcggctgatcgcgctgctagaggtcttgtctcagaagaggatgtataggaaattccaccctcgaccaaatttccgccagatgaaactggagaatgtgagcgttgcattggaattcctggaacgggagcacattaagcttgtctcaattgattccaaagctatcgtagatggaaacttaaagctgattttgggcctgatctggacactgatactccattactccataagcatgcctatgtgggaggatgaagacgatgaggacgctcggaagcagacaccaaagcaaaggttactgggatggattcagaataaagtgccccaacttcccatcaccaattttaacagagactggcaggacggcaaagccctgggggcactggtggacaactgtgcaccaggactgtgcccagactgggaagcctgggacccaaatcaacccgtggagaacgccagggaggccatgcagcaagctgacgactggctcggcgtcccgcaagtaatcgcgccagaagagattgtcgatccaaatgtggacgagcacagtgtgatgacttatctaagccagttccccaaggccaagctgaagccaggggccccagtccgatctaaacaactcaacccaaaaaaagcgatcgcgtatggtcccgggatcgaacctcaaggtaatactgtcttgcaaccagcccattttacggtccaaacagtcgatgcaggggtcggagaagtgcttgtgtacattgaagaccctgagggacacaccgaagaggccaaggtggtccccaacaatgacaaagaccgaacctacgcggtgtcctatgtgcccaaggtagccggcctgcacaaagtgacggtcctatttgccggccaaaacatcgagcgatcccctttcgaagtcaacgtgggtatggccctgggggatgcgaacaaagtttccgctcgaggccccggccttgagccagtgggtaatgtggcgaataagcctacctacttcgacatttataccgccggagccgggacaggcgatgtagccgttgttattgtcgatccacagggacgcagggatactgtcgaggtggcactggaggataaaggagatagtacattccgctgcacttacagacccgccatggaggggccacacacagtgcacgtcgcattcgcgggagcacctatcaccagatccccgtttccagtacatgtctctgaagcgtgtaatccaaacgcatgtcgggcttccgggcgcggactgcagcctaagggggtgcgcgtcaaagaggtggcagatttcaaggtcttcactaagggagccggaagcggcgagttgaaagttacagtgaaaggcccaaagggaaccgaagaacccgtgaaggtgagggaggcaggggatggcgtgtttgaatgcgaatattatccagtggtgcccggcaaatacgtggtgactatcacatggggcggctacgccatcccacgctcaccatttgaggtgcaggtatcccctgaggccggtgtacagaaggtacgtgcttggggaccggggctggagaccggacaggtgggcaagtccgccgattttgttgtcgaggctatcggcactgaggtaggtacactgggctttagtatagaaggtccgagccaggccaagatcgagtgcgacgataagggagatggctcctgcgacgtgcgttattggccaactgagcctggagagtatgctgtgcatgtgatctgtgacgacgaagatattcgggattcaccttttattgcccacatcctgcccgctccacctgattgttttccggataaagttaaggcatttgggcccgggctcgaacccacggggtgcatcgtcgataagccagctgagtttaccattgatgcgagagcagcgggcaagggggatctaaagctgtacgcccaggatgctgatggctgccccatcgatattaaggtgataccaaatggagacggtacctttcgatgcagctacgtgcctacgaaacccataaagcacaccatcatcatctcctggggaggagttaacgtgcctaagtctccattcagagtcaatgtgggcgagggatcccatcccgaacgcgttaaggtgtacggacccggtgtagaaaaaaccgggctgaaggccaacgagccaacatacttcactgtggattgttcagaggccggccaaggggatgtttctatcgggatcaagtgtgcccccggagtagtaggtccggccgaagccgatattgacttcgatattatcaaaaacgacaatgacactttcaccgtgaagtacaccccacctggggcaggcagatataccatcatggtgctgttcgctaaccaggaaattccagcctccccgttccacataaaagtcgatccatcccacgatgccagtaaggtgaaggccgaaggccccggcctgaatcgcactggggtcgaagtgggtaagccaacccacttcaccgtattaaccaagggtgctggcaaagccaaactcgatgtgcaattcgcgggaacagcaaaaggtgaagtagtcagggacttcgaaatcatcgataaccacgactattcctatacagtgaagtatactgccgtccaacagggcaatatggccgttaccgttacctatggcggcgaccctgttcctaagagtccttttgtcgttaacgtcgcacctcctctcgatttgagtaagatcaaagtgcagggactaaattcaaaggtggccgtggggcaggagcaggcattcagcgtcaacacaagaggtgccggaggacaaggacaactcgatgtgagaatgacgagcccttctagaagacctattccctgtaaactggaaccgggcggaggcgccgaagcccaggctgtcagatatatgccgcctgaagagggtccatataaggtggacataacctacgatggccatcccgtgcccggcagtccttttgctgtggagggcgttttacctcctgacccaagcaaggtgtgcgcctacgggcctggtctgaaaggcgggctggtcggaacacccgcaccgttctctattgatacaaagggtgcgggcactggcgggttagggcttacagtggaggggccgtgtgaagcgaagatcgagtgtcaggataatggtgatggcagctgtgcggtcagctatttgcccaccgagcctggggagtataccatcaatatcctttttgccgaggcgcatatacccggctctccattcaaggctacgattcgccctgtcttcgacccgtccaaggtgagggccagtgggcctggcctagagcgaggaaaggtcggggaggccgccacttttaccgtggattgctcagaggcaggcgaagcagaactgactattgaaattttgtccgatgccggggtgaaggctgaggtcctgatacacaacaacgccgacggcacgtatcacatcacatacagccccgcgtttccaggcacttatacaattacaatcaagtacggcgggcatcctgtccctaagtttcctacaagggtgcatgttcaaccagctgtagatacatccggggtgaaggtgagcggtcctggcgtcgaaccccacggagtgcttcgtgaagtgaccaccgagtttactgtggacgccagatctttaactgctaccggggggaaccacgtaaccgctagagtgctgaaccccagcggcgccaagacagatacctacgtcaccgacaatggggacgggacctaccgggtgcaatacaccgcctatgaagagggagtgcacctggtggaggtgctgtacgacgaggtggccgtgccaaagtccccgtttagggtaggcgtcaccgaggggtgtgatcctacacgcgtgagggcattcgggccaggacttgagggcggtctagtgaacaaagccaatagatttacagtggaaacgagaggcgctgggacaggggggctgggtctggccattgaaggtccttctgaagccaagatgtcctgcaaagataacaaggatggaagctgcactgtggaatatatacctttcactcccggtgattacgacgtgaatattacttttggcggacgccctatccccggctctccattccgggtgcctgtaaaggatgtcgtggaccccgggaaggtcaagtgttccggcccgggactgggtgcaggagttagagctcgggtgcctcaaacctttacagttgactgcagtcaggctggaagagcccctctccaggtagcagttcttggccctaccggagtggcagagccagtggaggtccgagacaacggcgacggaacccacaccgttcattatacacctgctacagacggtccatatacagtggctgtgaagtacgccgaccaggaggttcctcgcagccccttcaagatcaaggtactacctgcacacgacgcttcaaaggtacgtgcgtccggacccggtttgaatgcaagcggtatccccgccagcttacccgtggaatttaccatcgacgcccgtgacgccggggagggattgctcacagttcagattttggatcccgaaggaaagcccaagaaggccaatattagagataacggggatgggacgtacaccgttagctacttgcccgacatgtccggcagatatacgatcactataaagtatgggggcgatgaaatcccctactccccatttcgcatacatgccttgcccactggcgacgcctccaagtgcctagtgaccgtgagcatcggcggacacgggcttggagcatgccttggaccaagaattcaaatcggacaggagaccgtgatcactgtggacgcgaaagccgcaggggaaggcaaagtcacatgtaccgtgagtactcctgatggcgccgagctcgacgtggatgttgtggaaaatcacgatggcactttcgatatctattataccgcacctgaacccggaaaatacgtgattacgatccggtttggcggtgagcacatccccaacagtcctttccacgtcttggcatgtgatccgctccctcacgaagaagagccatctgaagtccctcaactaagacagccctacgcccctccaagacctggggccaggcccactcactgggcaaccgaagagcccgtggtgcccgttgagcctatggagtccatgctgagacctttcaacctggtgataccatttgccgtacaaaagggggagctgacaggcgaggtgagaatgccatcaggtaagacagcacgccctaatataacagacaataaggacggaacaatcacagtccgctacgctcctacggaaaaaggattacaccaaatgggtatcaaatacgatgggaaccatattcctggtagccctctacagttctacgtggatgctataaacagcaggcacgtttccgcctacgggccaggcctatcacacgggatggtcaacaagccagccacctttacaattgtaacaaaggacgcaggcgagggtggattgagcttagccgtagagggacctagcaaagctgagattacgtgtaaggacaataaggacggtacatgcacagtaagttatctgcccacagcccccggagattattccattattgtgcggtttgacgataagcatatcccgggcagtccatttactgccaagataacaggggacgattccatgaggacaagccaactgaatgttggaacaagcaccgatgtgagcttaaagataactgagtcagacctgagccaattaactgctagcatcagagctcctagcggcaacgaagagccatgtttgctgaaacggttaccaaaccgccacatcggcatctcgttcacacccaaggaggtaggcgaacatgttgtcagtgtgcggaagtcaggcaagcatgtgactaatagtccctttaagattctggttggcccctctgaaattggcgatgcctccaaagtgagagtgtgggggaaaggcctgagcgagggacatacgtttcaggtggccgagtttattgtggatacacggaatgcaggttacggaggactcggtttgtccatcgagggaccgagcaaggtggatatcaattgtgaggacatggaggacggcacctgcaaagtgacctactgcccaacagagccggggacttatattattaatataaagttcgcggataagcatgtgccaggttccccttttacagtgaaagtgaccggcgaaggcagaatgaaggagagcattactcggagacgtcaggctccttccatcgctacaattggatctacatgtgacctcaacctcaaaattcctgggaactggttccagatggtctccgcgcaggagcggttaacacgcacctttaccaggagcagccacacatatacccgaactgagagaactgaaatctcgaaaacacgcgggggagaaacgaaaagagaagtgcgggtagaagagtcaacacaggtggggggtgatccatttcctgccgtatttggagatttcctcggtagagagcggttaggaagttttggcagtattacacgtcagcaagagggtgaagcatcctcccaggacatgaccgctcaggttacctctccgtccggcaaagtggaggcagctgagatcgtcgagggggaagactcagcctattctgtgcggttcgttccacaagagatggggccacacacggtggcagttaaataccggggacagcatgttccgggcagtccctttcaattcaccgtggggcctctcggagagggtggcgctcataaggtgcgcgcaggcggcaccgggctggaacgtggagtcgccggcgtgcctgccgagttctcgatatggacacgagaagcgggcgcaggaggattatcaatagccgtggaaggccctagtaaggctgaaatcgcgtttgaggaccggaaggacgggagctgtggggtgtcctatgtggtgcaagagcctggggattatgaggtcagcatcaaattcaatgacgaacacataccagactccccattcgttgtgcctgtggcttctctgagtgatgacgcccgccgccttactgtcaccagtttgcaagagaccggcctgaaggtcaaccagccagcatcatttgcagtgcagctgaacggggcgcgcggagtcattgacgccagggtgcacaccccatccggcgccgtcgaagaatgttacgtgtctgagctggatagcgacaaacacacaatccggtttattcctcacgaaaacggtgtgcactccattgacgtcaagtttaatggagcacacatccctggttccccatttaagattagggtcggcgagcaatcacaggccggcgacccggggctagtatctgcttatggccccggactggagggcggcaccacaggggtcagcagtgagtttatagtgaatactctcaacgcaggcagtggtgcattatccgtaacgatcgacgggccttctaaagtacaactggactgcagggagtgcccagagggccatgttgtcacctatacacccatggctcctggcaattacctgatcgcgattaagtacggaggaccacagcatattgtgggatccccctttaaggctaaggtgacaggccctcggctgtcgggtggacattccctgcatgaaacttctacagtgctggtggaaaccgtcacaaagagctcttccagccgaggcagttcttactcctccatacccaagttctcttccgacgcatccaaggttgttaccaggggccccgggctcagccaggcctttgtgggccaaaaaaactcgttcactgtcgactgttccaaggccgggacaaacatgatgatggtaggagttcacgggcctaagacaccatgtgaagaggtgtatgttaagcatatgggcaaccgtgtgtataatgtgacctatacagtcaaagagaaaggtgactacatactcatcgtcaagtggggggacgaaagcgtccccggatcgccctttaaggtgaaggtcccgtag

SEQ ID NO: 187954 - DNA, 8079 bp, synthetic construct
  misc_feature 1..8079: note = Description of Artificial Sequence: Synthetic coding sequence
  source 1..8079: mol_type = other DNA
atgatgaacaacagcggctacagcgacgccggcctgggcctgggcgacgagactgatgaaatgccttcaaccgagaaagatctcgccgaagacgccccatggaagaagatccaacagaatacatttaccaggtggtgcaacgagcacctcaaatgtgtggggaaacggctgacagatctccaacgcgacttgagtgatggcctccggctgatcgctctcctggaggtgttgtctcagaaaaggatgtaccggaagttccacccgcgtccaaacttccgccaaatgaagttagagaacgtctcagtggcactggagtttttggaacgcgagcatataaaactcgttagtatcgatagcaaggccatcgtcgacgggaatctcaagcttatcctgggtcttatttggactctcatcctccactattctatctcaatgcccatgtgggaggacgaagatgatgaggatgctagaaagcagactcccaaacaacgacttttaggatggatacagaacaaagtgcctcagctgcctataaccaatttcaatcgcgactggcaggacgggaaggccttgggtgccctcgtggataactgcgcaccgggactttgtcccgactgggaggcctgggatcctaaccagcctgtggaaaatgcccgggaagctatgcagcaggcagatgattggctgggcgtaccgcaagtcatcgcccccgaggaaatagttgatccaaacgtggatgaacattctgtcatgacctacctgtcgcaattccctaaagccaaactcaagccgggcgcccccgtcaggtcaaaacagttgaaccccaaaaaggccatcgcatatggcccgggcatagagcctcagggaaataccgttttgcagcccgctcatttcacggtccagacggtggacgctggagtcggagaagtgctcgtatacattgaagaccctgaaggccatacggaagaagccaaggttgtgcctaataacgataaggaccggacatatgctgtcagctatgtgcccaaggtggccggactgcacaaagtcaccgtgctgttcgccgggcaaaacattgaacgctctcccttcgaagtaaatgtcggcatggccttgggcgacgcaaataaagtttccgcccgcggccccggcctggagccggtgggcaatgttgcaaataagcccacttactttgatatctataccgcaggagctgggacaggcgatgtagccgtggtaattgtcgaccctcagggcaggcgagataccgtagaagtggctctcgaggataagggagattccacctttcgctgtacataccggccagctatggaaggcccccatactgttcacgttgcattcgccggagcacccatcacccgttccccctttccagtgcacgtgtctgaagcatgcaatcccaacgcttgtcgcgcttcggggaggggcctacagccaaagggtgtgcgtgtgaaagaggtggcagacttcaaagtttttaccaaaggcgctgggtcaggggagctgaaggtgacagtaaaagggccaaaagggacagaggagccagtaaaagttcgagaggcaggtgatggagtgtttgaatgcgaatattatccagttgttcccggaaaatatgtcgtcacaatcacatggggtggctacgccattcctagatctcctttcgaagttcaagtgtcccccgaagctggagtgcagaaggtaagggcttgggggcctggcctggaaaccggtcaggtgggtaaatcggctgacttcgtggtggaggcaattggaacagaggtgggcacactgggtttttctattgaaggaccctcacaggcgaagatcgagtgtgacgacaagggagacggctcctgcgacgtgagatactggcctacagaacccggtgaatacgcagtgcacgtcatatgtgatgacgaagatattcgcgattctcccttcatagctcacattctcccggcaccccctgattgtttccctgacaaggttaaggcctttggacccggacttgagccaaccggctgtattgtggataaaccggccgagtttaccatcgatgcgcgggccgctggcaaaggtgacctgaaactttatgcacaggacgctgatgggtgtcccatcgacatcaaagtcatccccaatggcgacggaaccttccgctgctcttacgtgccaaccaagcccatcaagcacactataataattagctggggcggggtcaatgttcctaagtcaccattcagggtgaatgtgggcgaagggtcccacccagagcgcgtgaaggtctacgggcccggggttgagaaaaccggcctgaaagccaatgagccgacttatttcacagtggattgttctgaggcaggacagggggacgtttccattggtatcaagtgcgccccgggcgtcgtcggcccagccgaagccgacatcgattttgatatcatcaagaacgataatgacaccttcaccgtaaagtacacgcctccgggcgctggacgttacactatcatggtattatttgccaatcaggaaatacctgctagcccattccatataaaagttgacccgagtcacgacgctagcaaggtcaaggcagagggtccaggcctgaataggactggggttgaggttgggaagcctactcatttcacagtgcttacaaaaggggcgggcaaagctaagctggacgttcagtttgctggtactgctaagggagaggtggtcagagacttcgagatcatcgataatcacgactattcttacactgttaagtacacagcagtgcagcaagggaacatggccgtgactgtgacttatggaggagacccagtccccaagtctcctttcgtagtgaacgtggctcctccattagacttgtccaagatcaaagtccaagggctgaattcgaaggttgcagtcgggcaggagcaggctttcagcgtcaataccaggggggctggcggccaagggcagctggatgtgcgtatgacctcccccagccgaagacccatcccatgtaagctcgagcccggtggaggggccgaagcacaggctgtgcgatatatgcctcccgaagaagggccttacaaggttgacattacgtacgatggtcatccagttcctggttccccatttgctgtggaaggggttctgccgcctgaccccagtaaggtgtgtgcctacggaccaggcctgaaaggcgggctggtcggtactcctgcccctttctcaatagacactaaaggcgccggaaccggtggtctgggactaactgtcgaaggcccctgtgaagctaaaatcgagtgtcaggacaacggggatggctcgtgtgccgtatcttatctgcccaccgaacccggtgaatacacgatcaacatactgttcgccgaggcacacatccctggcagtccattcaaagccacaatccgccctgtcttcgatcccagcaaagtcagggcttcaggccccgggctggaacgcggcaaggtaggcgaagccgccactttcacagttgactgctcagaagcgggagaggcagagctcacgatcgaaatcttatctgacgcaggggtaaaagctgaggtgcttatccataacaatgccgatggaacatatcatatcacctactcacccgccttcccaggcacatacacaataacaatcaaatacggaggacatcccgtgcccaagtttcccacgcgggttcatgtacagcccgccgtggataccagcggagtgaaagtgagcggtccaggcgtcgagcctcacggggtgctaagagaggttactactgaatttaccgtggacgctcggtctctgaccgccaccggtggcaaccacgtcacggcccgagtgctcaatccttccggagcgaagaccgatacgtatgtaacagacaatggcgatgggacctatagagtccagtacaccgcctatgaggaaggagtgcaccttgtcgaagtgctctatgacgaagttgcagtgccaaaaagccctttccgggttggcgtgactgaaggctgcgatccaacaagagtacgtgcgtttggccccggattagaggggggcttagtaaataaggctaatcgtttcaccgtggagacgcgcggtgccgggaccggcggtctgggactcgcaattgagggccctagtgaggctaaaatgagctgcaaagataataaggatgggagttgcaccgtggagtatattccctttacacccggtgactacgatgtaaatatcactttcgggggcaggcctattcctgggtcccctttccgcgtccctgttaaagacgtcgtcgaccccgggaaggtcaagtgcagcggccctggactcggagcgggcgtgagggcacgagtccctcagacatttaccgttgactgctctcaggccgggcgcgccccactgcaggtggcagtcctcggccccaccggggtcgcggagcccgttgaggtgagagacaatggtgatgggacacacacagtccattacacacctgccactgatgggccctataccgtagccgtgaaatacgcagaccaggaggtcccccgcagcccgtttaagataaaggtactgcccgcccatgacgcgagtaaggttcgggcaagcgggccagggttgaatgcaagtgggatccccgccagcttgcctgtagagtttaccatcgatgcccgagatgctggcgagggactactcacagtccagattttggaccccgaagggaagcccaagaaggcgaatattagagataatggggacggcacatatacggtcagctatctgcccgacatgagtgggcggtatacaatcacaatcaaatacggaggggatgaaatcccctactcacctttcaggatacacgctctgcctacaggcgacgcctctaaatgtcttgtgactgtaagtatcgggggtcacggattaggagcgtgtttaggaccaaggattcagatcggccaggagaccgtgattaccgtggacgcgaaggcagccggagaaggcaaagtcacttgtactgtctcaacgccggacggcgccgagctggatgtcgacgtcgttgagaaccacgatggaaccttcgatatatattacaccgcgccagaaccggggaagtatgtcatcactataaggtttggcggggagcacatccccaattccccgtttcacgtgcttgcaacagaggaaccagttgtgcccgtggaacccatggagtcaatgttacggccttttaatctagttataccctttgccgtgcagaagggagagctcaccggcgaggtacgcatgccaagcggcaagactgctagacccaatatcaccgacaacaaggacgggaccattactgtgagatatgcgccgactgaaaaaggcctccaccagatgggcatcaagtatgacgggaatcacattcccggcagtccactccagttctacgtggatgccatcaacagccgccatgtatctgcatacgggcccggactatcacacggcatggtgaataagccagctaccttcactatcgtgaccaaagatgctggggaaggaggactgagcctggcagtggaaggaccgtcaaaagccgagataacttgcaaggataataaagacgggacttgcacagtctcttatttacccacggccccaggggattattctatcattgtcagattcgacgataaacacattcccgggtctcctttcaccgcgaaaattactggtgacgacagtatgcgcacctcccaacttaacgttggtaccagcactgatgtgtcccttaaaatcacagaaagcgacctgtctcagcttacggctagcatccgggccccttccggaaatgaggaaccctgcttgctgaagagattgccaaaccgccacattgggataagcttcacccccaaggaggtaggcgagcacgtggtctctgtgcggaaatcaggtaagcatgtaactaattcaccctttaaaatcctcgtggggccaagtgaaatcggagacgcaagcaaggtgcgggtctggggcaaaggtctgagtgagggtcacacttttcaggtcgccgagttcatagtcgataccaggaatgcaggctacgggggattaggtctgtcaattgagggaccttctaaggtggatataaattgtgaagatatggaggatggtacttgtaaggtaacttattgccccaccgagccaggaacatatatcatcaacatcaagtttgccgataaacacgtcccagggtcgccttttacagtgaaggtgaccggcgaaggccggatgaaggagtctataacccgcaggcgtcaagcccccagcattgcaacaataggctcaacatgcgacctcaatctcaaaatccccggcaactggtttcagatggtgtctgcccaggaacgcctgactaggaccttcacccgttcttcccacacctacactagaacggagcgtactgagataagcaagacccgggggggagagaccaaacgcgaggtgagagtggaagagagcacacaagtgggtggtgaccctttccccgctgtttttggtgacttccttggaagggagcgcttgggctcgttcggcagcattaccagacagcaggaaggcgaagcgtcttcacaggacatgactgcgcaggttacgtcccctagtgggaaggtagaggctgctgaaatcgtggagggtgaggatagcgcatattcagtgcgctttgttccgcaggagatgggcccacacaccgttgccgtgaagtatagaggacaacacgttccagggagcccatttcagtttactgtgggccccctaggggagggtggcgcacataaagtccgcgctgggggtaccggtctggagagaggagttgcaggggtgcctgctgagttttcgatctggactcgcgaggcgggggctggtggcctatcaatagccgttgagggaccctccaaggctgagatcgcattcgaggacagaaaagatggctcctgtggggttagctacgtcgtgcaggaacccggtgactacgaagtgtccattaaattcaacgacgagcacattccggacagtccgttcgttgtgccggtggctagtctgtcagatgacgctcggcgcctcaccgtaacctctctgcaagaaacggggctgaaggtcaatcaacctgctagctttgcagtccagctgaatggagcaaggggggtgatcgatgctcgggttcataccccaagcggagcagtggaggaatgctatgtgtcagagctggatagcgacaaacataccattaggttcatacctcatgagaacggagttcactccatcgacgtgaaatttaacggggcacatatccccggctcccccttcaagatccgcgtcggtgaacagagtcaggctggagatcccggcctggtgtccgcctacggacccggtctggagggtgggactaccggggtaagcagtgagtttatcgtgaatacattgaacgccggctctggggccctttccgtcaccatcgatgggcctagcaaagtgcaactggactgccgcgaatgccctgagggacacgttgtcacctatacccctatggcaccagggaattatctgatcgcaatcaaatacggcggccctcagcatattgtggggagcccctttaaagccaaagtgacagggccgcgtctgtccggcggccattctctgcatgaaactagtacagttctggtggagacagtgaccaaatccagctcatcacgaggctccagctactcctcaatccctaaattttccagcgacgcatctaaagtcgtgaccaggggccccggactgtcccaggctttcgttggtcagaagaatagcttcaccgtagactgttcgaaagctgggactaatatgatgatggtgggagtgcatggtcctaagacaccctgtgaagaggtttacgtgaaacatatggggaatagggtctataacgtgacctatacggtgaaagagaaaggagattacattctcattgtcaaatggggtgatgaatccgtgccaggctcccccttcaaagtgaaggtcccatag

SEQ ID NO: 187955 - DNA, 264 bp, synthetic construct
  misc_feature 1..264: note = Description of Artificial Sequence: Synthetic coding sequence
  source 1..264: mol_type = other DNA
atgcagctgttcgtgcgggcccaggagctgcacaccttcgaggtgaccggacaggaaaccgtggcccagattaaggcccatgtggcatctctggagggtatcgcgccggaagatcaggtggtccttctggctggtgctcccctcgaggacgaggcgacactgggccagtgtggggtggaggcccttacaacattggaggtcgcagggagaatgttaggagggggccagacgggggaggaggaagaggaagaccgcagcggttag

SEQ ID NO: 187956 - DNA, 228 bp, synthetic construct
  misc_feature 1..228: note = Description of Artificial Sequence: Synthetic coding sequence
  source 1..228: mol_type = other DNA
atgcagctgttcgtgcgggcccaggagctgcacaccttcgaggtgacaggccaggagactgtggcccaaatcaaagcccacgtggcatcactggaaggtatcgcaccagaggaccaggtcgttttgctggcgggagcgccattagaagatgaagctactctgggccagtgtggagtggaggcactaacgacactggaagtcgctggccgcatgctcgggggcgagtag

SEQ ID NO: 187957 - DNA, 297 bp, synthetic construct
  misc_feature 1..297: note = Description of Artificial Sequence: Synthetic coding sequence
  source 1..297: mol_type = other DNA
atgcagctgttcgtgcgggcccaggagctgcacaccttcgaggtgactggtcaggaaacagtggcacagatcaaagcgttgaccaccctggaggtagctggcagaatgctgggaggaaaagtgcacggatcccttgctagagctgggaaagtccgtggacagacccctaaggttgctaagcaggaaaagaaaaagaaaaagaccgggagagcgaaacgtagaatgcagtacaacaggcgcttcgttaacgtggtcccaactttcggcaagaaaaaggggcccaacgccaatagctag

SEQ ID NO: 187958 - DNA, 330 bp, synthetic construct
  misc_feature 1..330: note = Description of Artificial Sequence: Synthetic coding sequence
  source 1..330: mol_type = other DNA
atgcagctgttcgtgcgggcccaggagctgcacaccttcgaggtgaccgggcaggaaacagtggcacagatcaaggcccacgtggcaagccttgagggcatcgccccagaagaccaagttgttctcctggccggtgccccactggaggatgaagccactttgggccagtgcggtgtcgaggctctgaccacactagaggttgcaggaagaatgctcggcggaaaagtgcacggctctctggcacgtgcggggaaggttagaggccagacccctaaagtcgccaagcaggaaaagaagaagaagaagaccggaagagccaagcgtcggtag

SEQ ID NO: 187959 - DNA, 402 bp, synthetic construct
  misc_feature 1..402: note = Description of Artificial Sequence: Synthetic coding sequence
  source 1..402: mol_type = other DNA
atgcagctgttcgtgcgggcccaggagctgcacaccttcgaggtgacaggccaggagaccgtggcacagatcaaggcacacgtggcctctctggagggcattgcaccagaagatcaggtggtcctcctggccggcgcccctctggaggacgaggccaccctgggccagtgcggggtggaagccctgacgacactggaagtcgcaggccgaatgttgggaggtaaagtgcatggcagtctggctcgagcggggaaagtcagaggacaaacacccaaagtcgccaagcaagagaaaaagaaaaagaagactggacgagccaaacgtaggatgcagtataatcgaagattcgtcaacgtcgtacccacattcgggaagaagaaagggccaaacgcgaatagctag

SEQ ID NO: 187960 - DNA, 228 bp, synthetic construct
  misc_feature 1..228: note = Description of Artificial Sequence: Synthetic coding sequence
  source 1..228: mol_type = other DNA
atgcagctgttcgtgcgggcccaggagctgcacaccttcgaggtgacagggcaggagaccgttgctcagattaaggctcacgtggccagccttgaaggaattgcccccgaagaccaggttgtccttctggccggcgcccccttggaagatgaagctaccctggggcagtgcggcgtggaggccctgacaactctggaagtcgcaggtagaatgctgggcggtgaatag

SEQ ID NO: 187961 - DNA, 402 bp, synthetic construct
  misc_feature 1..402: note = Description of Artificial Sequence: Synthetic coding sequence
  source 1..402: mol_type = other DNA
atgcagctgttcgtgcgggcccaggagctgcacaccttcgaggtgactggccaggaaaccgtagcacaaatcaaagcccacgtagcctcactcgaaggcatagcacctgaggaccaagtcgtgctgctggctggcgctccactggaagacgaggccactctgggacagtgcggtgtagaagctttaacgaccttggaggtggccggtcggatgctgggaggaaaggtgcatggcagtctagccagggctggaaaggttagaggccaaaccccaaaggttgccaagcaggagaagaagaagaagaagactggaagagccaagcggcgaatgcaatacaacaggcggtttgtcaatgtggtcccaacctttgggaagaagaagggcccaaacgcgaactcttag

SEQ ID NO: 187962 - DNA, 402 bp, synthetic construct
  misc_feature 1..402: note = Description of Artificial Sequence: Synthetic coding sequence
  source 1..402: mol_type = other DNA
atgcagctgttcgtgcgggcccaggagctgcacaccttcgaggtgactgggcaggaaaccgttgcacagattaaagcacatgtagcatccctggagggtattgcacctgaggaccaggtggttctgctggcgggggcccccctggaagatgaggcaacccttgggcaatgcggtgtggaggccttaaccacactcgaagttgctggccggatgttgggaggaaaggtgcacggaagtctggcgagagcagggaaggtgcgcggccaaacacctaaagtcgcaaagcaagaaaagaaaaagaaaaagacaggccgggcgaaacggagaatgcagtacaatcggcgttttgtgaacgtagtccccacattcggaaagaagaaagggcccaacgcaaatagttag

SEQ ID NO: 187963 - DNA, 1563 bp, synthetic construct
  misc_feature 1..1563: note = Description of Artificial Sequence: Synthetic coding sequence
  source 1..1563: mol_type = other DNA
atgagcgccggcgaggtggagcggctggtgagcgagctgagcggcggcacaggtggcgatgaagaggaagagtggctgtacggggatgaaaacgaagtggaaagacctgaagaggaaaacgccagtgcaaaccccccctcagggatagaagacgaaacagccgagaatggagtgcccaaacctaaagtaacagagacggaggatgacagcgattccgatagcgacgatgatgaggacgatgtgcacgtaaccatcggcgatattaagacgggagcacctcagtacggatcttatggcacagcacctgtgaacctgaacataaagaccggggggcgcgtttacggtaccacgggtaccaaggttaaaggagtggacctggatgcccctggatcgatcaacggcgtgccactgttggaagtggatctcgattcattcgaagacaagccttggcgcaaacccggcgcagacctatctgattacttcaactatggcttcaacgaagacacctggaaggcctattgcgagaaacagaaaagaattcggatgggcctggaggtcatccccgtgacttctacaactaacaagataacagtccagcagggacgtaccggtaactcagagaaagaaaccgctcttccgagcactaaagccgagttcacatcaccaccaagcctatttaaaacaggcttacccccgagcagacgactcccaggagccatcgacgtcattggacagacaataaccatttcccgggtggaggggcggcgtcgagcaaacgagaattctaacatacaagtactgagcgaaaggtccgcaacggaggtggacaacaacttcagcaagccaccccctttcttccccccaggcgcccctcctactcacctgcctccgccaccctttctacctcctccacctacagtgtccactgccccacctctgatcccccccccagggttccctccaccgccaggagctccccctccctcactgattcccacgatcgaatcagggcactcatcaggatacgatagtagaagcgcgcgcgccttcccatatggaaatgttgcttttcctcaccttcccggtagtgccccatcctggccgagtctggtggacacatcaaagcagtgggattattatgcacgtcgggaaaaggaccgagaccgtgaacgggacagagaccgtgaacgtgatcgggaccgggaccgagagcgggagcgaacgcgcgaacgggagagagaaagagaccacagtcccaccccttccgtgttcaacagtgatgaggaacgctataggtacagagaatacgccgagcgcggttatgagaggcatcgtgccagtcgggagaaggaagaacggcacagagagaggcggcatcgtgagaaggaggagaccagacataaaagttcaagaagtaattctcgcaggcggcacgagtccgaggagggcgacagtcaccggcgtcacaagcacaaaaagtcaaagcgctctaaggaggggaaagaggccggctccgagccagctcccgagcaggagtctacggaagccacgccggctgaatag

SEQ ID NO: 187964 - DNA, 1785 bp, synthetic construct
  misc_feature 1..1785: note = Description of Artificial Sequence: Synthetic coding sequence
  source 1..1785: mol_type = other DNA
atgagcgccggcgaggtggagcggctggtgagcgagctgagcggcggtactggtggcgacgaggaggaggagtggctgtatggcggaccatgggatgtgcatgtccactccgacctggctaaagatctggatgaaaacgaagtcgaacggccagaagaggagaatgcttccgccaatcctcccagtgggattgaagacgagacagccgagaatggcgtcccgaaaccgaaagtgactgagaccgaggatgatagcgactcagactccgatgatgacgaggatgatgttcacgtcactatcggcgacatcaaaactggggccccccaatatggctcctacggaactgctccagttaatctgaacatcaaaacgggtggccgcgtgtacggtaccacgggaacaaaagtgaagggggtcgacctggacgcacccggcagcataaacggtgtccccctgctggaagtggacttagattcatttgaggataagccttggcgaaagcccggcgcagatctatccgattattttaattatgggttcaatgaagacacctggaaagcttactgcgagaagcagaagcgaattcggatggggctcgaagtgatccccgtgacatccacaacgaacaagattactgcagaggattgcactatggaggttacccctggcgccgagattcaggatgggcgcttcaacctgtttaaggtgcaacagggtcggaccggaaactcagagaaagagactgcactcccttccacaaaggccgaatttacatcaccaccgtccctgttcaagacggggctgcccccttcaagaaattcgacaagcagccaaagccagacaagcaccgccagcagaaaggctaatagctccgtggggaagtggcaggaccggtacggcagagccgagtcccccgatctcaggaggctgcctggtgcaatcgatgttatcggccagacaattactatttctagagttgaaggaaggagaagagccaacgaaaattctaacatacaagtgttatctgaacggagcgccacagaagttgacaataactttagcaaaccacctcctttttttccacccggggccccgcccacccatctaccccccccccctttcctgccgccaccaccgaccgtgtctactgccccaccacttattccacctcccggctttccccccccccccggcgcaccccctccaagcctcataccaacaatcgagtccggacactcctccggatacgattcccggagcgctcgggcgttcccttatggcaatgttgctttccctcatctgccaggttcagcaccctcttggccaagcttggtggacaccagtaagcagtgggattactatgctaggcgcgagaaagatcgcgaccgggagagggacagggatcgcgagagagaccgagaccgcgaccgcgaacgggagcggacaagggaaagggagagggaacgcgatcactccccgaccccttctgtctttaattctgacgaagagcgctacagatatagagagtatgctgagcgggggtatgaaagacaccgtgcctcaagggagaaagaggagcgacaccgggagaggcggcatcgggagaaggaagagacccggcacaagtcctcaagatcaaacagcagacggcggcatgaatccgaagagggtgattctcaccgccggcacaaacataagaaatctaaaagatccaaagagggcaaagaggccggcagcgaaccagcccctgaacaggagagcactgaggctactcccgccgagtag

SEQ ID NO: 187965 - DNA, 1767 bp, synthetic construct
  misc_feature 1..1767: note = Description of Artificial Sequence: Synthetic coding sequence
  source 1..1767: mol_type = other DNA
atgagcgccggcgaggtggagcggctggtgagcgagctgagcggcggtactggcggcgatgaggaagaggagtggctgtacggggacgaaaatgaggtcgagcgtcctgaggaggagaacgcttccgccaatccaccatcaggtatcgaagacgagacagcggagaacggcgtgcccaaaccaaaggtgacggaaaccgaggacgacagcgactctgactcagacgatgacgaggatgatgtgcacgtcaccatcggtgatatcaagacaggcgccccgcagtatggcagttatggcaccgcacctgttaatctgaatattaaaaccggagggcgtgtgtacggcactaccggaaccaaagtgaagggagtggacctcgatgcccctgggtctatcaacggggttccgctgttggaagtggacctcgactctttcgaggataagccctggcgcaagcccggcgccgatttgtccgattatttcaattacggctttaacgaagacacatggaaggcctattgtgagaaacaaaagcggatcaggatggggctggaagtgattccagtcacctccaccacaaataagattacagctgaggactgcaccatggaagtcacacctggggctgagatccaggatggacggtttaatctctttaaagtgcaacagggcagaaccggaaattccgagaaagaaactgcactgcccagcaccaaggccgaattcacctcccccccatctctcttcaagaccggactgccaccaagtagaaactccacctcatctcaatctcaaacgtcaaccgccagtagaaaggccaactcctccgtggggaaatggcaggacaggtatggtcgagcagagtcccccgacctccggcggctgccgggggccatcgacgtaataggacagactatcacaatttcccgcgtggaggggcgtcgtagggccaatgaaaactcaaacatccaagtcttgagcgagagatccgctactgaagttgataataatttttccaagcccccacctttctttccccccggtgcgccccccacccatctgccacccccaccatttttgcctccccctcccactgtctccaccgcaccacccctgatcccacccccaggaatccctatcacagtacccccccctggtttccctccaccacccggcgcccctcctccctccctcataccgacaattgagtctggccactcttcagggtacgattcccgttccgccagggcctttccttatggtaacgtagcctttccccacctacccggcagtgctccgagctggccctccttggtcgatacctctaaacaatgggattattatgcccgacgggaaaaagatagggacagggagcgggatcgcgacagagagcgcgacagagatagggaccgcgagcgagagcgcacacgcgaacgggaacgggagagggatcacagtcctacacccagtgtattcaacagtgacgaggagcggtacagatatagagagtacgctgaaagaggttacgagcgccacagagcgagtagggagaaagaggagcgccaccgtgaaaggcgacaccgggaaaaggaggagacccggcataagtcgtcacgcagcaatagccgccggagacacgagagcgaggaaggggacagccatcgtcggcataagcacaagaagtctaaaagatctaaagagggcaaggaagccggcagcgaaccagctccagaacaggaatcgacagaggctacacctgccgaatag

SEQ ID NO: 187966 - DNA, 366 bp, synthetic construct
  misc_feature 1..366: note = Description of Artificial Sequence: Synthetic coding sequence
  source 1..366: mol_type = other DNA
atggtggacatgatggacctgccccggagccggatcaacgccggcatgctggcccagtttatagacaagcccgtctgctttgtcggacggttagaaaaaattcacccgacaggtaagatgtttattctgtccgacggcgaggggaaaaatggcacgatagagcttatggaacctctggacgaagaaatcagtggaatcgtagaggtcgtgggacgtgtgacagctaaggctacaatcctgtgtaccagctacgttcagttcaaagaagattctcacccctttgacctgggcctgtataacgaagccgtgaaaattattcacgacttccctcagttttacccgctgggcatcgtgcagcatgattag

SEQ ID NO: 187967 - DNA, 1413 bp, synthetic construct
  misc_feature 1..1413: note = Description of Artificial Sequence: Synthetic coding sequence
  source 1..1413: mol_type = other DNA
atgttccccgccggcccccccagccacagcctgctgcggctgcccctgctgcagctgctgctcctggtggttcaggcagtgggccgagggctgggccgagcatcaccagctggcggacccctcgaagacgttgttatagagcgctatcatattcctcgtgcctgtccaagggaggtacaaatgggcgacttcgttcgctaccattacaacggcacattcgaagatgggaagaagttcgattcctcttacgacagaaatacattggtggctatcgtcgtcggagtgggcaggctgataaccggcatggaccgcgggttgatggggatgtgtgttaacgagaggaggagactcattgtgcccccacacctggggtatggttccattggcttggcaggcctaatccctccagacgctaccctctattttgatgttgttctgctggatgtatggaataaagaggatactgtgcaggtcagtactctgctgcgccctccccattgcccccgaatggtgcaggacggagattttgtgagatatcactataacggcacgctacttgacgggacctcattcgatacgagctactcaaggaaccacacatacaatacatacatcggtcagggctacatcattcctgggatggaccaaggcctacaaggcgcatgcatgggtgaaagaagacggatcacaattccacctcatttggcttacggggaaaatgggaccggggataagatacccgggagcgctgttcttattttcaacgttcatgtgatcgatttccataaccctgctgacgtggtggaaattaggaccctgtctagaccgagtgaaacatgtaatgagaccacaaaactaggagatttcgtgcgttaccactacaactgttccctattggatggaactcagctgtttacaagccacgattacggggccccgcaggaggccaccctcggtgccaataaggtgattgagggcttagacactgggcttcaggggatgtgtgtaggcgagaggaggcaacttatcgtgcctccgcacctcgcccacggcgaatctggggcacggggggtgccggggtcagccgtgttgttgttcgaggtggagcttgtaagccgcgaggatggcctccctacgggctatctgttcgtctggcataaggacccgccggccaatctgttcgaggacatggacctaaacaaagatggggaagttccacctgaggaattctccacttttatcaaggcacaggttagcgaaggcaagggcagactcatgcctggccaggatccggagaagacgatcggcgacatgttccaaaatcaggataggaaccaggatggcaagattaccgtggacgaactgaaactcaagagtgatgaggacgaagaacgggtccacgaggaactatag

SEQ ID NO: 187968 - DNA, 1749 bp, synthetic construct
  misc_feature 1..1749: note = Description of Artificial Sequence: Synthetic coding sequence
  source 1..1749: mol_type = other DNA
atgttccccgccggcccccccagccacagcctgctgcggctgccccttcttcagttgcttcttctagtcgtgcaggctgtgggcaggggactgggccgcgccagtccagcaggcggacccttggaggatgtggtgatagagaggtaccatattccccgcgcctgtccccgggaggtacagatgggagatttcgtgcgttatcactataatggcacattcgaggacggcaagaaattcgactcctcctatgataggaatactctcgtggctattgtagtgggagtgggtcggctaataacggggatggacagggggctaatgggtatgtgcgtcaacgagcgcaggcggctgatcgtgcccccccacctaggatacgggagtatcggattggcggggctgatcccccctgatgctacactctattttgacgtcgtgctgctggacgtttggaacaaggaagatacagtacaggtctccactctcttgcgccctcctcattgccctcgcatggtccaggatggcgactttgtcagatatcactataacggtactttgctggatggaacgtcttttgacacttcctacagcaagggagggacttatgatacgtatgtgggatcagggtggctgatcaaggggatggatcaggggctgctgggcatgtgtcctggggaacggagaaagattatcatccctccctttctggcgtacggcgagaaaggctatggaactgtgatccctccccaggcttctctggtgttccatgtactgctgatcgacgtgcacaacccgaaggatgctgtccagttggaaaccctcgagttaccgccgggatgcgttcgacgggcaggtgccggagactttatgagataccattataacggctccttgatggacggcaccttatttgattcttcgtacagcaggaaccacacctacaatacctacatcggtcagggatacatcatcccagggatggatcagggtttacagggcgcatgcatgggggaacggcggaggattaccattcctcctcatttggcctacggagaaaatggaaccggtgataagatacccggctcagcagttcttatttttaacgtccacgtaattgatttccataaccctgctgatgtcgtcgaaattcgtaccctctcccggcctagtgaaacgtgtaacgaaaccacaaaactcggagacttcgtacggtatcactacaactgcagtttactggatggcacccagttgttcacttcccacgactacggtgcaccccaggaggcaacacttggagccaataaggtgatagaaggcctggatacaggcttacagggaatgtgcgtgggggagcgccgccagctgatcgtgcccccccaccttgcacatggcgaatcaggggcacgcggcgtgccagggtctgcagttctgttatttgaagttgaacttgtatccagggaagatgggttacccacagggtacctgttcgtatggcacaaggatccccccgccaacttgtttgaggacatggacttaaacaaagacggcgaggtccccccagaggaattctccacctttattaaagcgcaagtgtccgagggaaagggaaggctcatgccagggcaggaccccgaaaaaacaataggggatatgtttcagaatcaggaccgcaaccaggatggtaagattacagtggacgaactaaaactgaagtcagatgaggatgaggagcgtgtgcacgaggaattatag

SEQ ID NO: 187969 - DNA, 1629 bp, synthetic construct
  misc_feature 1..1629: note = Description of Artificial Sequence: Synthetic coding sequence
  source 1..1629: mol_type = other DNA
atgttccccgccggcccccccagccacagcctgctgcggctgcccctcttacagttgttactgttagtcgtgcaagccgtcggacgcggattgggaagggcctccccggccggaggaccgttggaagacgtggtgattgagaggtatcacataccaagagcatgccccagggaggtccaaatgggagactttgtaagataccactacaacggcacttttgaagatggaaagaagttcgactctagctacgataggaacactctcgttgcaatcgtggtcggtgtcggcaggctgatcacgggcatggataggggtttaatgggtatgtgtgtgaatgagcgaagacgtctcattgttccacctcacctaggttacggatcgattggcctggccggactgatcccacccgatgctactctttacttcgatgttgtgcttctcgatgtttggaacaaagaagataccgtgcaggtttcaaccctactgcgaccaccccactgtccaagaatggtgcaggacggagacttcgttcggtatcattacaacggaaccctgcttgatgggacctcgttcgacacttcgtactccaagggtgggacctacgacacctacgtaggctcgggatggctgattaagggcatggatcagggattgctgggtatgtgccctggagagcggcggaaaatcatcattccaccctttctcgcttacggggagaaaggctacggcaccgtcattcctccgcaggctagtcttgtcttccacgtccttctaatcgatgtacataaccctaaggacgccgtccaactggaaacactggaactaccacctggctgtgtgcggagagctggggcaggagacttcatgagataccattacaacggttctctgatggacggtaccctcttcgactcttcctactctcgcaaccacacatacaatacatacattgggcagggctacattatcccaggaatggaccagggactgcagggcgcgtgtatgggggagcggagaagaattaccataccccctcatcttgcctatggggagaacggtactggcgataagattcccggatcagccgtgctgatattcaacgtccatgtcatagacttccataacccagccgatgtcgtcgaaatcagaaccctaagccgcccgtcggaaacgtgtaatgagaccactaaattgggagacttcgtgcgataccattacaattgcagtttgcttgacggcacccagttatttaccagtcatgactacggagcaccccaggaggctactttaggagctaacaaagtgattgagggactcgatacgggcctgcagggaatgtgtgtgggcgagcgccgtcaactgattgtgcctccccatctcgcacacggcgaatccggggcccgtggcgttcccggctccgccgtgcttctcttcgaagtggagctggtgagcagagaggatgggctgcccactggatatctcttcgtttggcacaaggacccgccagccaacttgttcgaggacatggatctcaataaagatggtgaggtccccccagaagagtttagcacttttattaaggcccaagtatcagaaggcaaaggcccccacgcttgggcggggccttag

SEQ ID NO: 187970 - DNA, 246 bp, synthetic construct
  misc_feature 1..246: note = Description of Artificial Sequence: Synthetic coding sequence
  source 1..246: mol_type = other DNA
atgggcgacttcgtgcggtaccactacaacggcaccttcgaggacggaaagaagtttgacagctcttacgatcggaatactctggtggccatcgtggtgggggtggggagactgattacaggcatggacaggggcttgatgggaatgtgcgttaacgaacgccgcagactcattgtgccaccccacctggggtacggatccatcgggctggcgggcctgatccctcccgacgcaaccctgtactag

SEQ ID NO: 187971 - DNA, 1161 bp, synthetic construct
  misc_feature 1..1161: note = Description of Artificial Sequence: Synthetic coding sequence
  source 1..1161: mol_type = other DNA
tgaatcgacgtgcacaaccccaaggacgccgtgcagctggagaccctcgagttgccacccggctgcgttcggagagctggggccggcgatttcatgcggtaccactataacggttccttgatggatggcacactgttcgactcttcctattcacggaaccatacctacaacacatacattggccaaggctatattatcccgggcatggatcaggggttgcagggggcatgtatgggcgaacgtcgacgaattaccatcccaccacacctggcctatggtgaaaacggtacagattctatcggctttcttcagggatctgccccacttagaccattccgctctggagagggacaaccatctcttgggagagaagggggttacggcaagacagaacccgcctaccctcaagacccagcagtcttgggcgctagcgtctcatctcctgtgaagtgggcctcccacgccgatccacagggtgataagattcctggcagtgcggtacttatttttaatgtccacgtgatcgactttcataacccagctgatgtagtcgaaattcggaccttgtcacggccatccgagacatgtaacgagaccaccaagctgggtgatttcgtgcgttaccactacaattgcagtttgttggacggcacccagctctttacttcccacgattatggtgctccacaggaggcaacgttaggggcgaataaggtgatcgagggcctcgacacagggctgcagggcatgtgtgtcggtgaacggcggcagttgatcgtgcccccccacctcgcgcacggcgaaagcggtgcccgcggggttcccggatccgctgttctgctcttcgaagtggaactcgtcagccgcgaagacgggctcccaaccggttatctgtttgtctggcacaaggatccacccgctaatttgtttgaggacatggacctgaataaggacggcgaagttccacccgaagaattcagcacttttataaaggcacaggtgagcgagggaaaaggaaggctgatgcccggacaggaccccgaaaagaccatcggtgatatgtttcaaaaccaggaccgcaatcaggacggcaagattactgtcgacgaactgaagctgaaaagtgacgaggatgaggagagagtccacgaggagctctag

SEQ ID NO: 187972 - DNA, 1068 bp, synthetic construct
  misc_feature 1..1068: note = Description of Artificial Sequence: Synthetic coding sequence
  source 1..1068: mol_type = other DNA
atgcggtaccactacaacggcagcctgatggacggcaccctgttcgactcctcttactcccggaaccacacttacaacacatacatcggacaaggctacattatcccaggcatggaccaaggactgcaaggcgcgtgtatgggcgagagaaggagaatcacaatcccaccccacctcgcatacggcgagaatgggactgatagcatcggcttcttgcaagggagcgcacctctgagaccatttcgatcaggagagggccaaccaagcctgggccgcgagggggggtatggcaaaactgagcccgcttatccacaggatcctgctgtgctgggagcatcagtcagtagtcctgtcaaatgggccagtcacgccgaccctcagggcgacaagatccccgggagcgcagtgcttatttttaatgtccatgtaattgattttcacaatcctgccgacgttgtggaaattaggactctctcaagaccaagcgaaacttgtaacgaaaccaccaagctaggggatttcgtccggtaccattacaactgttctcttttggatggaactcagctcttcactagtcacgactatggagctcctcaggaggctaccctaggtgccaataaagtgatagaagggttagacacgggcctgcagggcatgtgcgtgggggagcgacggcagctgatcgtgccacctcacctggcccatggggagtccggagcgaggggggtcccagggtcagccgtactcctgttcgaagtcgagctggtgagccgtgaagacgggctgcccacaggctatctctttgtgtggcacaaggacccacctgccaacctttttgaagatatggatcttaataaagacggggaagtcccaccagaagagttttctacatttattaaggctcaggtttccgagggtaagggtcggctgatgcctgggcaggaccctgagaaaaccataggagatatgtttcagaatcaggacaggaatcaagacggaaagatcactgtagacgagctcaaactgaaatcagatgaagatgaagagcgcgtgcacgaggagctctag

SEQ ID NO: 187973 - DNA, 327 bp, synthetic construct
  misc_feature 1..327: note = Description of Artificial Sequence: Synthetic coding sequence
  source 1..327: mol_type = other DNA
atgggcgtggagatcgagaccatcagccccggcgacggccggacctttcccaaaaaagggcagacttgtgtcgtacactatactggcatgctgcagaatggtaagaaatttgattcctcacgagatcggaacaaaccgttcaaatttcgcataggaaagcaagaggtcatcaagggcttcgaagagggcgccgcccagatgtccctcgggcaacgcgctaagctgacttgcacccccgacgtagcctacggggcgacaggtcatcccggtgtcatcccccccaacgcaactcttatcttcgatgtagagctgcttaacctcgaatag

SEQ ID NO: 187974 - DNA, 243 bp, synthetic construct
  misc_feature 1..243: note = Description of Artificial Sequence: Synthetic coding sequence
  source 1..243: mol_type = other DNA
atgggcgtggagatcgagaccatcagccccggcgacggccggacctttcctaagaagggccagacatgcgtggtgcactataccggaatgctgcagaatgggaaaaaatttgacagcagccgggatcgtaacaaacccttcaaattccgcattggcaaacaggaggtcattaagggcttcgaggaaggcgcagcccagctaggaccattgtctcccctcccaatttgtccccacccatgctag

SEQ ID NO: 187975 - DNA, 429 bp, synthetic construct
  misc_feature 1..429: note = Description of Artificial Sequence: Synthetic coding sequence
  source 1..429: mol_type = other DNA
atgcggctgagctggttccgggtgctgaccgtgctgagcatctgcctgtccgcagtcgcaactgcaaccggagccgagggaaagagaaagttgcaaatcggagttaaaaagcgggttgaccactgtcccataaagagccggaagggggacgtcctccacatgcactacaccggcaagctcgaagatggcaccgagtttgattcgtctttaccccaaaaccagcccttcgtgttttccttgggcactggccaggtcatcaaaggatgggatcagggccttttaggcatgtgcgaaggcgagaaaagaaaactggtaatcccaagcgagcttggatacggagaacgcggtgctcctcctaaaatcccaggcggggctactctggtcttcgaggtggaactgctgaagatcgaacggagaactgagctctag

SEQ ID NO: 187976 - DNA, 429 bp, synthetic construct
  misc_feature 1..429: note = Description of Artificial Sequence: Synthetic coding sequence
  source 1..429: mol_type = other DNA
atgcggctgagctggttccgggtgctgaccgtgctgagcatctgcctgtcagctgtagcgacggccactggcgctgagggcaaaaggaagctgcagatcggtgtcaagaagcgggtggatcattgtccaattaagtctagaaaaggcgatgtgctgcacatgcactacactggcaagctggaagatggaacagagttcgactccagcctgccacagaaccaacccttcgttttctctctcgggactggccaggtcatcaaaggatgggaccaggggcttttggggatgtgcgagggagaaaagcggaagctggtgatccctagcgagctcggctatggcgaaaggggggcaccacccaagataccaggaggcgccacacttgtgtttgaagttgaactactgaagattgaaagaagaaccgagctgtag

SEQ ID NO: 187977 - DNA, 429 bp, synthetic construct
  misc_feature 1..429: note = Description of Artificial Sequence: Synthetic coding sequence
  source 1..429: mol_type = other DNA
atgcggctgagctggttccgggtgctgaccgtgctgagcatctgcttgagcgccgttgctacagctacaggcgccgagggaaaacgtaaattgcaaattggcgtgaaaaagagggtggaccattgtccaatcaaaagccgcaagggcgatgtgctgcatatgcactacactggaaagttggaagatggtactgaatttgactcttccttgccacagaaccagcctttcgtttttagtctcggcaccggccaggttattaagggttgggaccagggcttactcggaatgtgcgaaggagagaagaggaaactggttatccctagtgaactgggatacggtgaacggggtgctccccctaaaatcccgggaggggccactttggtgtttgaggtagaacttttgaagatcgagaggaggacggaactgtag

SEQ ID NO: 187978 - DNA, 309 bp, synthetic construct
  misc_feature 1..309: note = Description of Artificial Sequence: Synthetic coding sequence
  source 1..309: mol_type = other DNA
atgcggctgagctggttccgggtgctgaccgtgctgagcatctgcttgtctgcagttgctaccgcgacaggcgcggaagggaagagaaagctccagatcggcgtgaagaaaagagtcgaccactgccctattaagtccaggaaaggagacgtgcttcatatgcattatacaggaaaactcgaagatgggacagagttcgactctagcctgccccagaaccagcccttcgtgttttccctgggtacaggccaggttattaaaggatgggaccagggactgctggggatgtgcgaaggagaaaagcgctag

SEQ ID NO: 187979 - DNA, 3144 bp, synthetic construct
  misc_feature 1..3144: note = Description of Artificial Sequence: Synthetic coding sequence
  source 1..3144: mol_type = other DNA
atggccgtgaccctggacaaggacgcctactaccggcgggtgaagcgcctgtattccaattggaggaaaggtgaggacgagtacgccaacgtggatgccatagtggtgtccgttggggtggacgaggagatcgtctatgcgaagtcaaccgccctacagacatggctgtttggctatgaactcaccgacacaattatggtgttttgtgatgataaaatcatcttcatggcctccaagaaaaaagttgaatttctgaaacaaatcgcaaataccaagggcaacgaaaacgccaatggcgctcctgccattacgcttctcatacgtgagaaaaacgagagtaataagagctccttcgacaaaatgatcgaggcaatcaaggaatccaaaaacggcaagaagattggcgttttctcaaaagacaaattcccgggtgagttcatgaaaagttggaacgactgtctgaataaagagggattcgataagatcgacatctccgcagtggttgcctatacaatagctgtgaaggaagacggtgaactgaacttgatgaagaaagcagcaagcataacatcagaagttttcaacaaattttttaaggaacgcgtgatggaaatagtggacgcggacgagaaggtccggcattccaagttggccgaaagcgtggaaaaagctattgaggaaaagaagtaccttgctggagcagacccatctactgttgagatgtgttaccctcccattatccagtctggtggaaattataatctgaagttctctgtcgtttccgataagaatcacatgcattttggtgccattacctgcgcaatgggcattaggttcaaatcttactgttcgaacctggtgcggacactcatggtggacccctcacaggaagtacaagagaattacaactttctcctccagctccaagaggagcttctcaaagaactgaggcacggggtgaagatctgtgatgtatacaacgctgtgatggacgtagtgaaaaagcagaaaccagaacttctcaacaagattaccaagaacttgggcttcggtatggggatcgaatttcgcgaaggatcattggtgatcaatagcaagaaccaatacaaattaaaaaaaggtatggtattctctattaatctgggcttttctgatctcaccaataaggaagggaaaaaacccgaagaaaaaacgtatgccttgttcatcggtgataccgttcttgtcgacgaagacgggccggcaacggtgttaacatccgtgaagaagaaagtaaaaaacgtcggcatattcttaaagaatgaggacgaggaggaggaggaggaagagaaggacgaagccgaagacctgctcgggaggggatcccgtgctgcattattgacagaaagaaccaggaacgaaatgacggccgaggagaagcgccgcgcgcaccagaaagagttagccgctcagctcaacgaggaagccaagaggcgattaacagaacagaagggggagcagcagatccagaaggccagaaagtccaatgtatcttataagaatccctcactgatgcccaaggaaccccatatccgagaaatgaagatttacattgacaaaaaatatgagactgtcatcatgcctgtgttcggaatcgctaccccgtttcatatagctacaattaaaaatatcagcatgtctgttgagggtgattatacatatctccgcatcaatttttactgtcctgggagcgccctcggtcggaatgagggcaatatcttccctaaccccgaggcgaccttcgtcaaggaaatcacatatcgcgcctctaatatcaaggcacctggagaacagactgtacccgctctgaacttacaaaacgccttccggatcatcaaggaggtgcagaagaggtacaagacgagagaggcagaggagaaggagaaggaaggcatcgtgaagcaggatagccttgttatcaacctgaatagaagcaatcccaagctgaaagatctgtatatcaggccaaatatcgcgcagaagagaatgcagggttcattggaagcccatgttaatggattccgctttacttccgttcggggcgataaagtggacatattgtacaataacataaagcacgcactgtttcagccttgtgatggtgagatgatcattgtcctacatttccatctaaagaacgctattatgttcggaaaaaagcgtcatacagacgtgcagttctacacggaggtcggcgagatcaccaccgacttgggaaaacatcagcatatgcacgacagggacgacctgtatgcagagcaaatggagagggagatgaggcacaagttaaagaccgcctttaaaaattttattgagaaagtggaggcccttacaaaggaggaacttgaattcgaagtaccatttcgcgatcttggctttaatggggcaccttaccggtcaacttgcctgctgcaacctacttcatcagctctagtgaacgccacagagtggcctccctttgtagttacgctcgacgaggtggaactgatccattttgagcgagtccagttccatttgaaaaatttcgacatggtgatcgtatataaagattactccaagaaggtaacaatgatcaatgctatcccagttgcctctttggacccaatcaaagaatggcttaactcctgtgatcttaaatataccgagggcgtgcaatcattgaattggaccaagatcatgaagacgatcgtagacgatcccgaaggtttttttgaacagggtggatggtcctttctggagcccgagggcgagggttctgacgctgaggaaggcgactcagaatccgagatcgaagacgagactttcaatccttctgaagatgactatgaggaggaagaagaagatagcgacgaagattacagttccgaggctgaggagtccgattatagcaaagagtcattggggtccgaagaagagtccggcaaagattgggacgagttagaagaggaagcacgcaaagctgatcgcgaaagtcgctacgaggaagaggaagaacagagccgcagcatgtcccggaaacggaaggcttctgttcattcctccggacgagggtcaaaccgtggctcccggcattcgagtgctccacctaagaaaaagaggaaatag

SEQ ID NO: 187980 - DNA, 675 bp, synthetic construct
  misc_feature 1..675: note = Description of Artificial Sequence: Synthetic coding sequence
  source 1..675: mol_type = other DNA
atggccgccgccgtgccccagcgggcctggaccgtggagcagctgcgctctgaacagcttcctaagaaagatattatcaaatttctgcaagagcatggatccgacagtttcttagcagagcacaagctgctgggaaacatcaagaacgtcgccaagacggctaataaagatcacctggtgactgcctataatcacctgtttgaaaccaagcggtttaagggcaccgagagcatctctaaagtgtcagagcaggttaagaatgttaaactgaatgaggataagccgaaggagactaagagcgaggagacgctcgacgaggggccacccaaatacaccaaatcagtcctgaaaaaaggcgacaagactaacttccctaagaagggcgacgtggtgcattgttggtacacaggcactcttcaggatggaaccgtttttgacactaacatccagacttctgcaaaaaagaaaaagaacgcgaaacctctttcctttaaggtcggtgtggggaaggttattcggggatgggatgaagcgctgctgactatgtctaagggggaaaaagcccggctggaaatcgaacctgagtgggcctatggcaagaagggccagccagatgcaaaaataccccccaacgctaaattgacatttgaagtggaattggtggatatcgactag

SEQ ID NO: 187981 - DNA, 1374 bp, synthetic construct
  misc_feature 1..1374: note = Description of Artificial Sequence: Synthetic coding sequence
  source 1..1374: mol_type = other DNA
atgaccaccgacgagggcgccaagaacaacgaggagagccccaccgcaacagtggcagagcagggggaggacataacttccaaaaaggataggggcgtcctgaaaattgttaagcgcgtggggaatggggaagaaacccccatgataggggacaaggtatacgtccactataagggaaaactgtcaaacggaaagaagttcgattcttcccatgatagaaacgagccattcgtattctctctgggaaagggacaggtgataaaagcctgggacattggggtggcaacaatgaaaaaaggcgagatttgccatctgctctgcaagcccgaatatgcctatggcagcgcaggtagcctcccaaagataccatccaacgcgacactcttctttgaaattgaattactggactttaagggtgaagacctgtttgaggatgggggtatcatccgccggactaaacgcaagggggaagggtatagcaatcctaacgaaggtgcaaccgtggagatacatctagagggacggtgcggaggccgcatgttcgactgccgcgacgtggcattcacagttggtgagggggaggatcacgatatcccaatcggaatcgataaggctctggagaagatgcagcgagaagaacagtgtatcttatacctcggaccccgctacggcttcggggaggccggaaaacccaagttcgggattgagccgaacgctgaactaatttatgaggtcaccctgaagagctttgaaaaagctaaggaaagttgggagatggatactaaagaaaagctggagcaggccgccatcgtgaaagagaaggggaccgtttattttaaaggtggtaagtatatgcaggccgtaatccagtatgggaagatcgtgagctggctcgaaatggaatatggcctgtccgaaaaggaatcgaaggcaagcgagagctttctgctggccgccttcctgaatctggccatgtgctacctgaaactgcgcgaatacactaaggccgttgagtgctgcgacaaggccctggggctggacagcgcgaacgagaagggactgtacagacgaggcgaggcacagcttctcatgaacgaattcgaatcagctaaaggcgattttgagaaggtgttggaggtcaacccgcaaaacaaggcggctcggctgcagatatccatgtgccagaagaaagctaaagaacacaatgagcgtgacaggaggatctatgccaacatgtttaagaaatttgccgaacaggacgccaaagaagaagcgaataaagctatgggaaagaaaacatccgagggcgttaccaacgagaaaggaactgattcccaggcgatggaggaggaaaaaccagaagggcacgtctag

SEQ ID NO: 187982 - DNA, 1374 bp, synthetic construct
  misc_feature 1..1374: note = Description of Artificial Sequence: Synthetic coding sequence
  source 1..1374: mol_type = other DNA
atgaccaccgacgagggcgccaagaacaacgaggagagccccaccgccacagtcgcggagcagggtgaagacatcactagcaagaaagaccggggcgtacttaagattgtcaagagagtggggaatggtgaggaaacacccatgatcggagacaaagtgtacgttcactacaaggggaaactgtccaacggcaagaagtttgatagttctcacgatagaaatgagcctttcgttttctccctggggaaaggacaggtgatcaaagcatgggacatcggagtagcaacaatgaagaagggcgaaatttgccacctgctctgtaaaccagagtacgcttatggcagcgctggttcactgcccaagatcccaagtaacgcgacattattttttgaaatcgaattactcgattttaagggcgaagatctattcgaggacggggggattatccgaagaacaaagaggaaaggggaagggtattctaaccctaatgagggagcaacggttgaaatccatctggagggccgttgcggtggaaggatgttcgactgccgcgatgtcgcattcacagtgggagaaggggaggatcatgatattcccattggtattgataaggcacttgagaaaatgcaacgagaggagcagtgtattctctatctgggccctagatacgggttcggtgaggctggcaaaccgaaatttggaatagaacccaatgctgaactgatctacgaagttaccctcaagtccttcgaaaaggcaaaagagagctgggaaatggatacaaaggaaaaactcgaacaggcagccatcgtcaaggaaaagggcaccgtttattttaaggggggcaagtacatgcaagctgtgatccagtatggcaaaatcgtcagctggcttgagatggaatacggcctgtcagaaaaagagagtaaagcatccgagtccttcttgctcgctgccttcctgaatctcgcgatgtgttatctcaaactccgtgaatatacaaaagcagtggagtgttgtgacaaagctctgggcctggattctgcgaacgaaaaagggctctaccgtaggggggaagcccagttgctcatgaatgagtttgagtccgccaagggcgactttgagaaggtattggaggtgaacccccagaacaaggccgcacgcctgcagatttccatgtgccagaaaaaagcaaaggaacataacgagcgcgaccggcggatttacgctaacatgtttaagaagttcgcagaacaggatgctaaggaggaagctaataaggcgatgggcaagaagacctcagagggagtaaccaacgagaaggggacggattcccaggcaatggaggaggagaagccagagggccacgtgtag

SEQ ID NO: 187983 - DNA, 801 bp, synthetic construct
  misc_feature 1..801: note = Description of Artificial Sequence: Synthetic coding sequence
  source 1..801: mol_type = other DNA
ctgctgatgaaggtgccccggaccatgaagaaggccccccagcccctgctgctatcacgagagcggattctccctcccaaggaccgtggggtcctgaagatagtaaagcgcgtgggtaatggagaggaaacccctatgatcggcgacaaggtgtatgtgcattacaagggcaaactgtctaacggaaaaaagttcgattctagccatgacaggaatgagcctttcgtgttttccctggggaaaggacaggtgattaaagcgtgggacattggggttgcgaccatgaagaagggagagatctgccatttactttgcaagccagagtatgcttatggatccgctgggagcttacctaagatcccctcaaacgcaaccttgtttttcgaaatcgagctactcgacttcaagggggaggatctcttcgaagacggcggaattattcgccgcactaaaaggaaaggtgagggatacagtaaccccaatgagggggcaaccgtggagatccatctggagggtaggtgcggtggacggatgttcgattgcagggacgtggccttcacagtaggcgagggtgaggaccatgacataccgatcggcatcgacaaagcgctggaaaagatgcagcgggaagagcagtgtattctgtatttgggtccccggccgaagaatccaggacgctggattcccaaaaaaaattggagccgtttaccgttaagtaaaagaagggaaccttataccagtcgctgcgtgtccccatacgccattctgagtattagcaaaaatcttttcaagtgctggtag

SEQ ID NO: 187984 - DNA, 1374 bp, synthetic construct
  misc_feature 1..1374: note = Description of Artificial Sequence: Synthetic coding sequence
  source 1..1374: mol_type = other DNA
atgaccaccgacgagggcgccaagaacaacgaggagagccccaccgctaccgtggctgagcagggggaggatattacgtcaaagaaggatcggggggtgttgaaaatcgttaagcgggtcggcaacggggaagagacccccatgattggtgacaaggtctacgtccactacaaaggcaaactttccaacggcaaaaaattcgacagctcccacgaccgtaatgagccctttgttttcagtctcggcaaaggccaggtaatcaaggcgtgggacatcggcgtggccacaatgaagaaaggagaaatttgtcatcttctctgcaaaccagaatatgcgtacggatctgctgggtctctgcccaagatcccatctaatgccacacttttctttgagatcgagctgcttgacttcaagggagaagacttgttcgaagacggggggattatcaggaggacaaagagaaaaggcgagggctatagcaatcctaatgagggagcaactgtcgagatacacttagaaggtaggtgtgggggacgcatgttcgactgccgcgacgtggccttcaccgttggcgaaggggaggatcatgatattccaatcgggatagacaaggcacttgaaaagatgcagagagaagagcaatgtattttatatctcggaccacgatacggatttggtgaagccggcaagcctaagttcggcatcgaacctaatgcggaattgatctacgaagtgactcttaaatcgtttgaaaaagctaaagaaagctgggagatggacactaaagaaaaactagaacaagcagcaatcgttaaagagaaaggaactgtgtactttaaaggtggcaagtacatgcaggcagtgattcagtacggcaagattgtgagctggctcgaaatggaatacgggctgtctgaaaaggaatccaaggcgagcgaatccttcttgctggcagcctttctgaatctagcaatgtgctacctgaagttaagagagtacacaaaggcggtggagtgctgcgataaggctctagggctcgatagcgccaatgaaaagggactgtacagaaggggtgaggcccaattacttatgaacgaatttgagagcgccaagggagactttgagaaagtgttggaggtgaatcctcagaataaagccgcgagactgcagatcagtatgtgtcagaaaaaggccaaagagcacaacgagagggataggaggatttatgcaaacatgttcaagaagttcgccgagcaggacgccaaggaggaagcaaataaagcaatggggaagaagacaagcgaaggcgtcacgaacgaaaagggcactgactcccaggccatggaagaggagaagccagagggtcacgtttag

SEQ ID NO: 187985 - DNA, 1374 bp, synthetic construct
  misc_feature 1..1374: note = Description of Artificial Sequence: Synthetic coding sequence
  source 1..1374: mol_type = other DNA
atgaccaccgacgagggcgccaagaacaacgaggagagccccaccgcaaccgtggccgaacagggcgaggacattacttctaagaaagatcggggcgtgctaaagatcgttaaacgagtgggcaacggcgaggagacacccatgattggcgacaaggtctatgtacactacaaggggaaactgtccaatggcaagaagtttgactcttctcatgacaggaacgagcctttcgtgttctctctcggaaagggacaggttattaaggcgtgggatattggcgtggctacgatgaagaaaggggaaatctgtcacctactctgcaaaccggaatacgcttatgggtcagccgggtcactccctaaaatcccctcaaacgccacgttgttttttgagatcgaactgctcgacttcaagggagaggacctatttgaagatggcggaatcatccgccgaactaaacggaaaggcgaggggtatagcaatcccaacgagggcgcaaccgtggagattcacctcgagggaaggtgcggcggtagaatgttcgactgtcgggatgtggcctttacggtaggggaaggcgaggaccacgacatcccaatagggattgacaaggcactggagaagatgcagagggaagagcagtgcatcctatatctcggacctcggtacggtttcggcgaggcgggtaagccaaaattcggcattgaaccgaacgcggaattaatatacgaggtgaccctcaaaagctttgaaaaagcgaaggagtcttgggagatggatacaaaggagaaactggagcaagccgctattgtgaaagagaaaggcaccgtctacttcaagggaggtaaatatatgcaggctgtgattcagtacggcaaaattgtatcatggctagagatggagtacggcctgagcgagaaggagagcaaggcttccgagtcttttttgttagccgctttcctgaacctggctatgtgttacctaaaactccgagaatataccaaagcagtggagtgttgcgacaaagctctcggcctggacagtgcaaacgagaaaggcctttacaggcgcggtgaggctcagctgcttatgaatgagtttgaatcagcaaagggagactttgaaaaggtgcttgaggttaatccgcaaaacaaggctgctcgattgcagatttctatgtgtcagaagaaagctaaagaacacaatgagcgagatcgtaggatctatgcaaacatgtttaagaagtttgctgagcaagatgcaaaagaagaagcaaacaaagcaatggggaaaaaaacctccgagggggtcaccaatgaaaaaggtacagacagccaggccatggaagaggaaaagcctgaaggtcatgtgtag

SEQ ID NO: 187986 - DNA, 837 bp, synthetic construct
  misc_feature 1..837: note = Description of Artificial Sequence: Synthetic coding sequence
  source 1..837: mol_type = other DNA
atgttcgactgccgggacgtggccttcaccgtgggcgagggcgaggaccacgatatcccgatcggtatcgataaggcgctggaaaaaatgcaaagggaggagcaatgtatcctctacctcggccctcggtacggcttcggcgaggcaggaaaaccaaaattcggaatcgaaccaaatgccgagctcatctacgaggtgaccctcaaaagcttcgaaaaggctaaggagtcatgggagatggacacaaaggaaaagcttgagcaggctgcgatcgttaaggagaagggcaccgtgtattttaaaggaggcaaatatatgcaggccgttatccaatacgggaaaattgtttcctggctggaaatggaatatggcctgtccgagaaggaatcgaaagcctccgagtcttttttactagctgctttcttgaatttggctatgtgctacttgaaacttcgggaatacacgaaggccgtagaatgctgtgacaaagccctggggcttgattcagcaaacgagaaagggctttaccgaagaggggaggcacagctgttgatgaacgaattcgaatcggcgaagggtgatttcgagaaagtgcttgaggttaacccacagaacaaggccgcacgcctgcagatctcaatgtgccagaaaaaggccaaggaacacaacgaacgtgaccgccgaatttacgctaacatgttcaaaaaatttgccgaacaggacgcgaaggaggaggccaacaaggctatggggaaaaaaaccagcgaaggcgtgaccaacgaaaagggcacagatagccaagccatggaggaggagaaacctgaaggccacgtgtag

SEQ ID NO: 187987 - DNA, 807 bp, synthetic construct
  misc_feature 1..807: note = Description of Artificial Sequence: Synthetic coding sequence
  source 1..807: mol_type = other DNA
atgaccaccgacgagggcgccaagaacaacgaggagagccccaccgcgactgttgctgaacagggggaagatatcaccagcaagaaagaccgcggtgtcctcaaaatcgtgaaaagagtcggtaacggagaggagacacccatgattggcgataaggtgtatgtccactacaaaggtaagctgtcaaatggaaagaagtttgattcctcacacgataggaacgagccctttgttttttctttgggaaagggacaggtgattaaagcatgggatataggggtggccacaatgaagaagggtgagatctgccacctgctgtgtaaaccggagtacgcgtatggaagcgcaggatccctccctaagattccaagcaacgcaacattattctttgaaatcgagcttctggacttcaaaggcgaggacctgtttgaggacggcgggatcatcaggagaacaaagaggaaaggggaaggctatagcaaccccaacgaaggtgcgacggtcgagatacatcttgaggggcgatgcggaggacggatgtttgattgtagggatgttgcattcaccgtgggggagggagaagatcacgatatccccatcgggatcgataaggctctcgagaagatgcaacgggaggagcagtgtatcctgtatctggggccccgccccaaaaacccagggcgctggattcccaagaagaactggtctcgcctcccactgagcaagaggcgggaaccatatacatcaaggtgtgtgtctccatacgcaattctgtccattagcaagaacctcttcaaatgctggtag

SEQ ID NO: 187988 - DNA, 1263 bp, synthetic construct
  misc_feature 1..1263: note = Description of Artificial Sequence: Synthetic coding sequence
  source 1..1263: mol_type = other DNA
atgaccaccgagcagggcgaggagacccccatgatcggcgacaaggtgtatgtccattataaaggcaagctgagtaacggaaagaaattcgacagttcccacgatagaaatgagccttttgttttttccctggggaagggtcaggtgatcaaggcctgggacatcggagtggccacaatgaagaagggcgaaatctgccacctactctgcaaacctgaatacgcttatggtagtgctggtagcttaccaaagattccatccaatgcaaccctgttctttgaaattgaattgctggatttcaaaggggaagatttgtttgaggatggcgggataatccgacgaactaaaagaaagggcgaaggctattccaaccccaatgagggggcgaccgttgaaattcacttggaggggcgctgcggtggcaggatgtttgactgtcgagacgtagccttcactgtgggagaaggtgaggaccacgacatacccataggcatagacaaagctcttgaaaagatgcagagggaggaacaatgcatcctgtacttgggcccacgctatggtttcggcgaggccggcaagcccaagtttggcatcgagccaaacgccgaattgatttatgaagtcaccctcaagagcttcgaaaaagcaaaggaaagttgggagatggacaccaaggaaaaactggagcaggccgccatcgtcaaggaaaaaggtacagtgtacttcaaaggaggcaagtacatgcaggctgtaatccagtacggcaaaattgtgagttggctcgagatggagtatggcctgtccgagaaagaaagcaaggcatccgaatcatttctgctggcagcttttttgaatctggcaatgtgctacctcaagttgagagaatacaccaaggctgtcgaatgttgtgacaaggccctgggcttggatagtgcaaatgagaaggggctctatagaaggggcgaagctcagcttcttatgaacgagtttgagagcgctaagggtgattttgaaaaggtccttgaggtcaatccccagaacaaagccgccaggttgcagatttcaatgtgccagaaaaaagctaaagagcacaatgagagggatagacgaatctacgcgaatatgtttaaaaaatttgcggaacaagatgctaaggaagaggccaacaaagctatgggaaagaaaaccagcgagggcgtcacaaatgaaaaggggacagacagccaggcaatggaggaagagaagccagaaggccatgtgtag

SEQ ID NO: 187989 - DNA, 984 bp, synthetic construct
  misc_feature 1..984: note = Description of Artificial Sequence: Synthetic coding sequence
  source 1..984: mol_type = other DNA
atgggcggcagcgccctgaaccagggcgtgctggagggcgacgacgcacctggacaatcgctttacgaacggctgagccagagaatgcttgacatcagtggtgatagaggcgtcttaaaggacgtcatcagggagggcgcaggcgatctcgtggctccagacgcttcagttttggtcaagtatagcggatatttggagcatatggatcggccttttgattcaaactacttccgcaaaacaccccggttaatgaagctgggggaagatattaccctgtggggaatggagttaggtttgctgagcatgcgtcgaggcgaactcgctcgctttttattcaagccgaactacgcatacggcaccctgggatgcccccccctgattccccccaacaccactgtcctgtttgaaatagaactgcttgacttcctggattgtgccgagagtgataaattttgcgcccttagcgctgagcagcaggaccaattccctctgcagaaggtgctgaaagtggccgccaccgaacgtgaattcgggaactatctctttaggcagaaccgcttttatgacgccaaagtccgctacaaaagagccctgctactgctacgcaggagatctgccccgccagaggaacagcacctggtagaggccgccaagctgcccgttcttctgaatctgtctttcacgtatctgaaactcgacaggcccactattgcactctgctacggcgaacaggcactgataattgatcaaaaaaatgcaaaagccctcttcagatgtggccaagcatgcctgttacttaccgaatatcagaaagcaagggactttctggtcagggctcagaaagagcagccctttaaccatgatattaataatgaactcaagaagctggcaagttgctaccgtgactatgtagataaggagaaggagatgtggcatcggatgtttgctccctgcggtgatggaagtaccgcgggtgagtcctag

SEQ ID NO: 187990 - DNA, 969 bp, synthetic construct
  misc_feature 1..969: note = Description of Artificial Sequence: Synthetic coding sequence
  source 1..969: mol_type = other DNA
atgagcgccagcagctggccccagaacggcatgccccccagcagcctttatgagcggttatcacagagaatgttggatatttccggagatagaggagttttgaaagacgtgattcgggagggggccggggacctggttgctccagacgcctccgttctggttaaatacagcgggtatttggaacacatggatcgacccttcgacagcaactacttccgcaagacccctagactgatgaagctcggggaagacattacgctctgggggatggagctgggactgctttcaatgagacgaggagaactagctagattcctgttcaagccaaactacgcctacggaaccttgggttgtccaccactgatcccccctaatacgaccgtgttattcgaaatcgagctgctagatttcttagactgcgccgaaagtgataaattctgcgctttgagcgcagaacagcaagaccagtttccgctgcagaaggtgttgaaggtcgcagccacagagcgcgagttcgggaactatctttttagacagaataggttttacgatgctaaagtccgctacaaacgcgcgctgttactactgcggagacggagcgcgccgcctgaagaacaacacctggtggaggcagcgaaactgcccgtgctcctgaatctgtcctttacctacctgaagttggatcggcccactattgcgctttgttacggcgagcaggctttgattattgaccagaaaaacgctaaggcactgtttaggtgtggtcaggcttgcctgcttctgacggagtatcagaaggcaagagattttcttgttcgcgcccaaaaagagcagcctttcaaccacgacatcaataacgagctgaagaaactggcttcatgttaccgagactacgttgacaaagaaaaagagatgtggcatcggatgtttgcaccctgcggcgatggcagcacagcgggcgaatcctag

SEQ ID NO: 187991 - DNA, 531 bp, synthetic construct
  misc_feature 1..531: note = Description of Artificial Sequence: Synthetic coding sequence
  source 1..531: mol_type = other DNA
atggacctgcccgacagcgccagccgggtgttctgcggccggatcctcagtatggtgaacacagacgacgttaatgccatcatcctagcacagaaaaatatgcttgaccgctttgagaagacgaatgagatgctgctcaactttaacaatttatctagcgctcggcttcagcagatgagtgagcgctttctccaccacaccagaactctcgtcgaaatgaagcgcgatctggactccatatttcgaagaattagaactttaaaaggtaagctggctcgccagcacccagaagcgttctcacatatcccggaagcgtcattcttagaggaggaggatgaagatccgatacctccttccacaaccacgacgatcgccacatcagaacagtccacaggctcctgtgacacgtcacctgataccgtgtctccctccctctctccagggtttgaggacctgtctcacgttcagccaggttcgcctgccatcaatggaaggtctcagactgacgatgaagagatgactggggaatag

SEQ ID NO: 187992 - DNA, 1326 bp, synthetic construct
  misc_feature 1..1326: note = Description of Artificial Sequence: Synthetic coding sequence
  source 1..1326: mol_type = other DNA
atgggcgtgggcgccggccgggtgagccagagcggcgcccccagcccggggggagctgggcgggccaacagttgccccccaagctcaatggcatcatgcgcagaacccagcgagcccagcgccccactgccagccggtgtgccccctctggaggactttgaagtattggacggcgttgaagacgccgaaggcgaagaagaagaagaggaagaagaggaagaagaggatgatctctccgagttgcccccactggaagacatgggccagcccccggccgaagaggccgagcagcccggggctctggccagagagttccttgctgctatggagcccgaacccgctccagccccggctcctgaggaatggctggacattctcggcaacggcctgttgaggaagaaaactctcgtgccaggacctcccgggtcatctagaccagttaaggggcaggtggtaactgttcatctacaaacgtcactggagaacggcacccgggtgcaagaggaaccagagctggtgtttacacttggtgattgcgacgttatccaggctctggatctgtccgttcccctcatggacgtgggagagactgccatggtgaccgcagattccaaatattgctatggcccacaggggagaagtccttacattcccccacatgctgccctgtgtctagaagttaccctgaagaccgccgtcgacgggcccgaccttgagatgctgactgggcaggagcgcgtcgctttggctaatcggaagcgcgaatgcggcaatgcccattaccagcgcgcagatttcgtgctggcagcgaattcgtacgacctcgccataaaggcaattaccagttcagcaaaggttgatatgaccttcgaggaagaagcccagttactgcagctgaaggtgaagtgtcttaataacctcgctgcatcacagctgaagctggatcactacagggctgcactgagatcctgctccttggtgttagaacatcagccagacaatatcaaggctctctttcgcaaggggaaagtgttggcccagcagggtgaatatagcgaagctatcccaatcctccgggccgcactcaaattggagccatcaaacaagacaattcacgccgaactgtccaaattggtgaagaaacacgccgcccagagatctacagagaccgctctgtatcggaagatgctgggcaacccatcacggttgcctgccaagtgtcctggcaaaggggcctggtccattccttggaagtggctgttcggggccactgcggtcgctttaggaggagtcgccctgtctgtggtgatcgctgcacgcaattag

SEQ ID NO: 187993 - DNA, 762 bp, synthetic construct
  misc_feature 1..762: note = Description of Artificial Sequence: Synthetic coding sequence
  source 1..762: mol_type = other DNA
atggccagctgcgccgagcccagcgagcccagcgcccccctgcccgcaggagtgcccccgctcgaggattttgaggtactcgacggtgttgaagatgccgagggcgaagaggaagaagaagaagaggaggaggaagaggacgatttatccgaactccctcccctggaagacatgggccaaccccccgccgaggaagcagagcagccgggtgcgcttgctagggaattcctcgccgccatggagccagagcctgcccctgctccagctccggaggaatggctagatatcctggtcgacatgacctttgaggaagaagctcagttactccagttgaaggtcaagtgtctgaacaatcttgcggctagtcagctaaagctagaccattatagggccgccctccggagttgttcactggtcctggagcaccagcccgataacatcaaggccctctttcgaaaggggaaagtgctggcacagcagggagaatattcagaggcgataccaatacttcgcgctgcccttaagcttgagccttccaacaaaacaatccatgccgagctgtccaaacttgtgaaaaagcacgctgcccagagaagtaccgaaaccgcgctgtaccgaaagatgctggggaacccttcaaggctaccagccaagtgccctgggaaaggagcgtggagcataccctggaaatggctgtttggtgctacagccgttgcactgggcggcgtggctctgtccgtcgtgatagcagccagaaattag

SEQ ID NO: 187994 - DNA, 1599 bp, synthetic construct
  misc_feature 1..1599: note = Description of Artificial Sequence: Synthetic coding sequence
  source 1..1599: mol_type = other DNA
atggccaagcgggtggccatcgtgggcgccggcgtgagcggcctggcttctatcaaatgctgtttagaagagggcttggagccaacgtgctttgagaggagcgatgacctggggggactgtggcggttcacagagcatgtggaggaaggtcgcgcaagcctgtataaaagcgtcgtatccaattcttgtaaagagatgtcctgttatagtgacttcccattccccgaagactatccgaattacgtgcctaacagccagttcctagaatatttaaaaatgtacgccaatcatttcgacctgcttaaacatatccagtttaaaaccaaagtgtgctccgtgaccaaatgttccgacagcgccgtgagtggccaatgggaggtggtgacaatgcacgaagagaagcaggagagcgcgatttttgatgctgtgatggtctgtacagggttcctgaccaacccctatttgcctctggatagctttcccggcatcaatgccttcaaaggacagtactttcacagtagacagtacaaacatcctgacattttcaaagacaagagagtcctggttattggtatgggcaatagtgggactgatatagccgtagaggctagccatctggccgaaaaagtctttttaagtaccacgggtggagggtgggtcattagccgcattttcgactcaggctatccatgggatatggtgttcatgacgcggttccagaacatgttacgcaattccctgcccacaccaatcgtgacgtggcttatggagagaaaaattaataattggttaaaccatgctaactacggactcatccccgaagataggacgcagcttaaggagttcgtattaaacgatgaacttccggggcgtataatcaccgggaaggtgttcatcagaccttcaataaaggaagttaaggagaattctgtcatctttaacaacacttctaaggaggagcctattgacatcatcgtgtttgctaccggatataccttcgcattcccattcctggacgagtcagtagttaaggtggaagacggccaggcaagtctgtataaatacatctttccggctcaccttcagaaacctaccctggcaatcattggactgattaaacctctcggcagcatgattccgaccggcgagacccaggctcgctgggcggttcgtgtgttgaaaggcgtgaataagttacccccaccatccgtgatgatcgaggagatcaatgctcgcaaggagaacaagccatcatggtttggattgtgttattgcaaggctctgcagtcagactatatcacctacatcgacgaactgcttacttatattaacgccaagcctaatttgtttagcatgttgctgacagatccccacttggcccttacagtgttcttcgggccctgctcaccttaccagttcaggctcaccgggccagggaagtgggagggtgccagaaacgccatcatgacccagtgggatagaacctttaaggtaataaaagcccgggtagtacaagagtcacctagccctttcgagtctttcctaaaagtgttctcatttctggcactactcgttgctattttcctgattttcctgtag

SEQ ID NO: 187995 - DNA, 1599 bp, synthetic construct
  misc_feature 1..1599: note = Description of Artificial Sequence: Synthetic coding sequence
  source 1..1599: mol_type = other DNA
atggccaagcgggtggccatcgtgggcgccggcgtgagcggcctggccagtatcaagtgttgtcttgaggagggactggaaccgacctgtttcgaaaggtctgatgacctaggcggtttgtggaggtttaccgagcacgttgaggagggcagggcgtccttatacaagtctgtcgtatctaattcatgtaaggagatgagttgttatagcgattttccattccctgaggattatccaaattacgtgcccaattcacaatttctggagtatttaaaaatgtacgcaaaccattttgacctcctcaagcacatacaattcaagacgaaggtgtgttccgttaccaaatgtagcgacagcgccgttagcgggcagtgggaggtggtgaccatgcatgaagaaaagcaagaatctgcgatctttgatgcagtgatggtctgcacagggttccttacgaacccttacctcccgctggattcattccctgggattaatgcattcaagggacagtacttccacagcagacagtataaacaccctgacattttcaaggataagagagtgctggtgattggcatgggtaactccggaactgatatcgctgtcgaagcatctcaccttgcagaaaaagtgttcttatctacgaccggcggaggctgggttatcagtcggatttttgacagcggatatccatgggatatggtgtttatgaccaggtttcaaaacatgcttaggaacagcctgcccaccccaattgtgacttggctgatggagcgcaaaatcaataattggctgaaccacgcaaattacggcctgatcccagaggacaggactcagctgaaggaatttgttctcaatgacgaactaccgggtcggataatcaccggaaaagtcttcattcgaccttccataaaggaggtcaaggaaaacagcgtaattttcaataacacctctaaagaagaacccattgacatcatcgtgtttgctactggctacacttttgcttttcccttcctggatgagtcagtggtcaaggtcgaagacggacaggcctcgctttataagtacatctttccagcacacctgcaaaagcctactttggcaattatcggcttgatcaaacctctggggagtatgatcccaacaggcgaaacacaggcccggtgggctgtgcgcgtgctcaagggagtgaacaagttgcctcctccaagcgtgatgatcgaggagatcaatgcgagaaaagaaaacaaaccgtcttggttcggattgtgctattgcaaggccctgcagtccgattacattacttacattgacgaactgctgacatatataaatgctaagccaaacctgttcagcatgctgctgaccgacccacacctagctctgactgtgttcttcggaccttgttcgccttatcagtttcgcttgacgggcccggggaagtgggaaggcgctagaaatgcaataatgactcagtgggataggacttttaaagtgatcaaggccagggtggtgcaggagtccccatcccccttcgagagctttctcaaagtgttttctttcctggccctgctcgtggcgatattcctgatctttctgtag

SEQ ID NO: 187996 - DNA, 1410 bp, synthetic construct
  misc_feature 1..1410: note = Description of Artificial Sequence: Synthetic coding sequence
  source 1..1410: mol_type = other DNA
atggccaagcgggtggccatcgtgggcgccggcgtgagcggcctggccagcatcaaatgttgtctggaagaaggactggaacccacgtgctttgaacgaagcgatgatctcggggggctgtggagattcactactaaagtctgctcagtcacaaagtgctccgacagtgccgtgagcggccagtgggaggtggtgaccatgcatgaggagaagcaggagagcgcgatcttcgacgccgtgatggtctgcaccggcttcctcactaatccttacctcccactggacagctttcctgggattaatgctttcaaagggcaatactttcactcccggcagtacaaacacccggatattttcaaagataagagggtgctcgtaattggaatgggcaatagtggtaccgatatcgctgtagaagcttcgcacctcgctgagaaggtcttcctgtccaccacaggcgggggttgggtaattagcagaatcttcgattcagggtacccctgggatatggtatttatgacaagattccagaacatgctgcgcaactccctgccaacaccaattgtaacctggctcatggaacggaaaatcaataactggctgaatcacgctaattatggcctgataccagaagaccgcacccagctcaaggaatttgtactcaacgacgaactgcccgggcggatcatcactggaaaggtcttcatacggccttccattaaggaagtcaaagagaacagtgtgatttttaacaataccagcaaggaagagccaatcgatattatagtttttgccactggatacacttttgcattcccgtttttggacgaatccgtggtcaaggttgaagatggtcaggcctcactctacaaatacatcttccccgcccacctgcagaagcctacacttgctataattggtctgatcaaacccctggggagtatgatcccgactggtgaaacacaggcgagatgggccgtgcgagttctcaagggtgtgaacaagctcccacccccatcagtgatgatcgaagaaatcaacgcccgcaaagagaacaagccttcctggttcggtttgtgttattgtaaggccttgcagtctgattacatcacttatatcgatgaactattaacttacataaatgccaaacctaacctgttctctatgctgctgacagatccgcacttggctctgaccgtgttttttggaccctgctccccgtaccaattccgattgacagggccgggaaagtgggagggcgcccgaaatgccattatgactcaatgggatcgtactttcaaggtgatcaaggctagagtggtgcaagagagcccgtccccattcgagtccttcctgaaagtatttagcttcttggctctcctggtcgctatctttcttatttttctctag

SEQ ID NO: 187997 - DNA, 627 bp, synthetic construct
  misc_feature 1..627: note = Description of Artificial Sequence: Synthetic coding sequence
  source 1..627: mol_type = other DNA
atggccaagcgggtggccatcgtgggcgccggcgtgagcggcctggctagcataaaatgttgcctggaggagggtctggaacctacctgcttcgaacgcagcgacgacctggggggattgtggcgcttcaccgaacatgtcgaggaggggcgtgccagcttgtacaaatctgtcgtatctaactcatgcaaggaaatgtcatgctacagcgacttcccgtttcccgaagactacccaaactacgtgcccaatagtcagtttctggaatacctgaagatgtatgccaaccatttcgacttacttaagcacatccagttcaagaccaaagtgtgtagcgtcaccaaatgctcggactccgccgtcagtggccaatgggaggtggttaccatgcacgaagagaagcaggaatccgccatcttcgatgccgtgatggtgtgcaccgggttcttaaccaacccctacctgccactcgactcctttcctggcattaacgcatttaaaggccaatacttccactccaggcagtataaacatcctgatatatttaaagataagcgtgttctggttatcggaatgggtaacagcggtaccgacattgctgttgaggcctcccacctcgctgagtag

SEQ ID NO: 187998 - DNA, 1830 bp, synthetic construct
  misc_feature 1..1830: note = Description of Artificial Sequence: Synthetic coding sequence
  source 1..1830: mol_type = other DNA
atggagggcaagcccatgcggcggtgcaccaacatccggcccggcgagacaggaatggacgtgacttctcgttgcaccttgggggaccccaataagcttccagagggtgttcctcagccagcacgcatgccatacatttctgataagcatccacgccagactctggaggtgatcaatttactgaggaaacaccgcgagttgtgcgacgtcgttctggttgtgggagctaaaaagatatatgcccatcgagtcatcttatctgcctgttcaccttactttagggccatgtttacaggtgagctggcagagagcagacagaccgaagtcgtcatcagagacatcgacgagagagccatggaactgctaattgatttcgcctacacctcacagatcaccgtcgaagagggtaacgtgcagacccttctccctgctgcctgcctactgcagctggccgagatccaggaggcatgctgtgagtttcttaagcgtcagttggatccgagcaactgcctaggtattcgggccttcgcagacacccattcttgccgagagctcctaaggattgccgataagttcactcaacacaacttccaggaagtaatggaatcggaggagttcatgcttctcccagcaaaccagctgatcgatattattagctctgacgaattgaacgttaggtctgaggaacaggtcttcaatgctgtcatggcttgggtcaagtattcgattcaggagcgcagaccacagctgccgcaagtactccagcacgtgagactcccccttttaagcccaaaatttctcgtgggcactgtgggatccgaccctctgattaaaagcgatgaagaatgccgcgatcttgtggatgaagcaaagaactaccttctgctgccacaggagcgacctctgatgcagggaccccgtacccgccctagaaaacctatccgatgtggtgaggtgctgttcgctgtaggcggctggtgttctggggacgccatttcatctgttgagcgatatgacccacagaccaacgaatggaggatggtcgcaagcatgtcaaagagacggtgcggggtcggcgtgtcagtgcttgatgacctcctgtacgccgtgggtggtcatgatgggtcgtcttatctcaacagtgttgagagatacgatccgaaaacaaatcagtggtctagcgacgttgctcctacttcaacctgcagaacaagcgtgggcgtggctgtccttggaggcttcttgtacgctgtcgggggccaggatggggtgtcctgcctgaacattgtagagagatacgacccaaaagagaacaaatggaccagggtggcatccatgtcaactcgcagactcggagtcgccgtcgccgtgctgggcgggtttctctatgcggtcggcggctccgacgggacaagcccattgaacacagtagagaggtacaatcctcaagaaaacagatggcatactatcgctcccatgggcacacgccgaaagcacttaggctgcgcagtctatcaggacatgatttatgccgtggggggacgcgatgacacgacagaactctcctcagccgaacggtataaccctaggacgaatcagtggtcaccagtggtggccatgacctcccgtagatctggggtcgggctggcagttgtgaatgggcagttgatggcagtaggcggtttcgacggcacaacatacctgaaaaccatcgaggtgttcgatcccgacgccaacacctggcgtctgtatggtgggatgaattatcgcaggctaggggggggggtaggcgtcataaagatgacccactgcgagagtcacatctggtag

SEQ ID NO: 187999 - DNA, 1416 bp, synthetic construct
  misc_feature 1..1416: note = Description of Artificial Sequence: Synthetic coding sequence
  source 1..1416: mol_type = other DNA
atggccaagaaggtggccgtgatcggcgccggcgtgagcggcctgattagcctgaagtgttgtgtcgacgagggactagagcccacttgtttcgaaagaaccgaggatatcggaggagtctggaggtttaaggagaatgttgaggatggtagggcctcaatctaccagtccgttgtgactaacacttcaaaggagatgagctgttttagtgattttcccatgccagaagactttcctaacttcctgcataattcaaagctgctcgaatacttcaggatctttgccaaaaaattcgatctgctgaaatacatccagtttcagactaccgtgctgtcggtgcggaaatgtcccgatttctcctcctccggtcagtggaaagttgtgacacagagtaatggtaaggagcagtctgccgtcttcgatgctgtgatggtttgttcaggccaccacatcctgccccacattccactcaaatctttcccaggaatggagagatttaagggacaatactttcactctcgccaatataagcaccccgatggcttcgaaggcaagaggatcctcgttattggaatgggaaattctggctcggacatcgccgtggagttgtccaagaatgcggcacaggtcttcatctcaactcggcatggcacatgggtgatgagccgcatcagcgaagacgggtatccctgggatagcgtatttcacactcggtttcgaagcatgctgcggaacgttctgcctaggacagccgtgaagtggatgatagaacagcaaatgaacagatggttcaaccacgagaattacggcctcgaacctcagaacaagtatattatgaaagagcccgtgctgaatgatgatgtgccttcgaggctactatgtggggcaattaaagtcaaatccactgtgaaagagttgacagagacttctgcgatctttgaggacgggacagtggaggagaatatagacgtgatcatcttcgccacgggttattcattctcatttcctttcttagaggattcattggtcaaggttgaaaacaacatggtgtccctatataagtatatcttcccagctcatttagacaagtcaaccctggcctgcatcggtttgattcaaccactgggctcaatattccctaccgccgagctccaggctaggtgggtgacccgcgtgttcaaaggactctgcagtttgccgtcggaaaggacgatgatgatggacattataaagagaaatgagaaacgtatcgacctcttcggggagagtcaatcccaaaccctccagacaaactacgtcgactacctcgatgagctcgcactggagatcggcgccaaacccgacttctgctcccttctgttcaaagatccaaagctggcagtccggctgtactttggcccctgcaactcctattag

SEQ ID NO: 188000 - DNA, 1599 bp, synthetic construct
  misc_feature 1..1599: note = Description of Artificial Sequence: Synthetic coding sequence
  source 1..1599: mol_type = other DNA
atgggcaagaaggtggccatcatcggcgccggcgtgagcggcctggccagcattaggagttgccttgaggaaggcctggaaccaacttgcttcgaaaaaagcaacgatatcggaggactttggaagttctctgaccacgccgaggaggggcgagcctccatttataaatctgtgttcagtaactcctctaaggaaatgatgtgtttccctgactttccctttccagacgactttcccaacttcatgcataatagcaaaatccaggaatatatcatcgcattcgccaaggaaaagaacctgcttaagtatatccagttcaaaaccttcgtttcttcggtcaataaacacccggatttcgctaccacaggacagtgggatgtcaccaccgaacgtgacggcaaaaaagagtcggccgtgttcgatgccgtgatggtgtgttcgggccatcacgtttacccaaacttaccaaaggaaagcttccctgggctgaatcacttcaaaggcaagtgcttccattcccgggactataaagagcccggcgttttcaacggaaaaagagtgctggtcgtgggattaggcaacagcgggtgcgatattgccaccgaattatcgcgtacagccgagcaggtgatgatctctagcagatccgggtcatgggtaatgtcaagggtctgggataatggatacccttgggatatgttactagtcacccgcttcgggacctttttgaagaacaacttgccaacggctatctctgactggctgtacgtgaagcagatgaacgcgagattcaaacacgaaaattacggccttatgcccctcaacggcgtgctccgcaaagagcctgtgttcaatgacgagttgcccgcttcaatcctgtgcggaattgttagcgtgaagccgaacgtgaaggagtttaccgagacatctgccatcttcgaagacggaaccatctttgagggcatagattgcgttattttcgctacaggctactcattcgcatatcctttcctggacgagagcataatcaagagccgcaacaacgagatcatattgttcaagggagtgtttccaccactgctggagaagagcaccattgctgtgattggctttgtgcaatctctaggggcagccattcccactgtggatttgcaatcacggtgggcagcacaagtgattaaagggacatgtaccttgccctccatggaggacatgatgaacgacatcaatgaaaagatggaaaagaagagaaaatggtttggtaagtcggaaacaattcagacggattatatagtttatatggacgaattgagcagcttcattggagccaaacctaatataccctggctgtttctgacggaccccaagcttgccatggaggtgtatttcgggccttgttctccctaccagttcagattagtcggccccggtcaatggcctggcgcccggaacgctatcctcacgcagtgggacaggtcactaaagccaatgcagactagggttgtgggccggctgcagaagccttgcttcttcttccattggttgaagctcttcgccataccaattctgttaatagcagtttttctcgttctaacgtag

SEQ ID NO: 188001 - DNA, 1599 bp, synthetic construct
  misc_feature 1..1599: note = Description of Artificial Sequence: Synthetic coding sequence
  source 1..1599: mol_type = other DNA
atgggcaagaaggtggccatcatcggcgccggcgtgagcggcctggcctctattcgctcctgtctggaggaaggactcgagcccacatgtttcgaaaaatctaacgatattggcgggctgtggaagttcagcgaccacgctgaggaggggcgcgccagcatttacaagagtgtattttccaattcttccaaggagatgatgtgctttccagattttccctttcccgatgacttcccaaacttcatgcacaattccaaaatacaggaatacattatcgccttcgctaaggagaagaacctcctcaagtacatccagttcaagacattcgtctcttctgtcaacaagcatccggacttcgccaccacgggccagtgggacgttacaaccgaacgggacggcaaaaaagagtcggcggtattcgacgccgtgatggtgtgctccggacaccatgtataccccaatctccccaaggagtctttcccaggcctgaatcacttcaaagggaaatgcttccattcaagagactacaaggagcccggtgtgttcaatggaaaacgagtcctggtagtcggccttggtaatagtggttgcgacatcgcaacagagctctctcgaacggctgaacaagtcatgatttcttcaaggagcggctcatgggtgatgagcagggtctgggacaatgggtacccctgggacatgcttctcgttactaggttcggcacctttttgaagaacaatttgcccactgctatctctgattggctatacgtgaaacaaatgaacgcacggttcaagcacgagaattacggactgatgcccctgaatggggttctgagaaaggaaccagtgtttaacgatgaactccccgcctctatcctgtgcgggatcgtttcggtcaaacctaacgtcaaggagtttacggaaacctccgccattttcgaagacggaacgattttcgaaggcattgactgcgtcatctttgcaacggggtactctttcgcatatccatttctggacgagtctattataaagagccgcaacaacgagattatcctgtttaagggggtctttccaccactcttggaaaaaagtacaattgccgtgattggctttgtgcaaagtctgggcgctgccattcctacagttgatcttcagtccaggtgggctgctcaggtgattaaagggacatgcacgctgccttctatggaagatatgatgaacgatataaatgaaaaaatggaaaaaaaaaggaaatggtttggcaaaagcgagaccattcagacggattacattgtgtacatggatgagttaagtagcttcatcggcgccaaacctaatattccctggctgttcttaaccgaccccaagctggccatggaggtttacttcggtccctgcagcccataccagtttcgcctcgttggacccggccagtggcctggagcgaggaatgccatactgacacagtgggacaggtccctcaaaccgatgcagacccgggtggtgggccggcttcagaaaccctgctttttctttcattggctgaagttgttcgccattcccatcctgctcatcgcagtattcttggtactgacttag

SEQ ID NO: 188002 - DNA, 1410 bp, synthetic construct
  misc_feature 1..1410: note = Description of Artificial Sequence: Synthetic coding sequence
  source 1..1410: mol_type = other DNA
atgggcaagaaggtggccatcatcggcgccggcgtgagcggcctggcctccattagaagttgcctagaggaaggactggagcctacatgtttcgaaaagagtaacgacataggcggcctttggaagttctccacgtttgtaagctctgtgaataaacaccccgatttcgccaccaccggacagtgggacgtgaccactgaaagggatggcaaaaaggaaagcgccgtgttcgacgctgtgatggtgtgttcaggccatcatgtctaccctaatctgcccaaggaatcattccccggactaaatcatttcaagggtaaatgcttccactctcgcgactacaaagaacctggggtgtttaacgggaagcgggtgctcgtagtgggcttagggaattctggatgcgacatcgccacggaactctccaggacagccgaacaggtaatgattagcagccggagcggctcatgggtgatgtcccgagtgtgggacaatggctatccgtgggatatgttattagtgacaagatttggcaccttcctgaagaacaatctacctaccgctatatccgactggctctacgtcaagcagatgaacgctcgcttcaagcatgaaaactatggcctgatgcctctgaacggtgtgctgcgcaaggaacctgtgttcaatgacgagctgcctgctagcatcctgtgtggaatagtttccgtgaagcctaacgtcaaggagtttacagaaacaagtgctatttttgaggacggcaccatcttcgagggaattgactgcgtgatattcgccactggctactcctttgcttaccccttccttgatgagtccattatcaaaagccgcaataacgaaatcattctattcaagggggtcttcccacctttgcttgaaaagtccactattgccgtaatcggcttcgttcaatcactgggtgcagccatccctacggtcgacctgcagtcccgatgggctgcccaggttataaagggcacgtgtacgttaccctctatggaggatatgatgaatgacatcaacgaaaagatggaaaagaagcggaagtggtttggaaagtcagagaccattcaaacagattacattgtgtacatggacgaactgtcctcctttataggtgccaaacctaatattccctggctctttctgactgaccccaagctcgccatggaggtgtactttggaccatgtagcccatatcagtttaggctcgtcggccccggacagtggcccggggcgcgcaatgccatactgacccagtgggatagatcgcttaagcccatgcaaacaagggtagtggggcgtctgcaaaaaccttgttttttttttcactggttaaaactgttcgctatccctatccttttgattgccgtttttctcgtgctgacctag

SEQ ID NO: 188003 - DNA, 1539 bp, synthetic construct
  misc_feature 1..1539: note = Description of Artificial Sequence: Synthetic coding sequence
  source 1..1539: mol_type = other DNA
atgcccgccagcacccggagccagaagcggcagggcatggacagcctgttagagcctctgaagatgaatatggaccacgccgaagaaggaagagccagcatctataagtccgtcttctccaactctagtaaagagatgatgtgtttccccgatttccctttcccagatgattttcccaatttcatgcataattcaaagattcaggagtatattattgcgttcgctaaagaaaagaaccttctgaagtatattcagttcaaaacctttgtctcctccgtgaataaacatcctgacttcgctaccaccgggcagtgggacgttacaacagaaagggacggtaaaaaagaaagcgccgtatttgatgccgttatggtctgttcagggcaccacgtttaccccaacctgcccaaggagagcttcccaggcctgaatcacttcaaagggaagtgcttccactcccgagactacaaagaacccggagtttttaatgggaagagagtcctggtggttgggcttggtaactctggctgtgacattgcaacagagctctcccgcaccgccgagcaagttatgattagttcacggagtggcagctgggtgatgtcccgcgtgtgggacaacggttacccatgggacatgctgttggttacgaggttcggaacctttctcaagaacaatctgcctactgctatctctgattggctttacgttaagcagatgaatgcacgctttaagcatgaaaactacggactcatgccactgaatggcgtcctcagaaaagagccagtattcaatgatgaactgcctgcctccatcctctgcggcatcgtctctgtcaaaccaaacgtaaaggagtttactgagactagcgcaatctttgaggacggcactatttttgagggtatcgactgtgtgatatttgccaccggttattccttcgcatacccgttcctggatgagtcaattattaagagtaggaacaatgagataatcctctttaagggtgtattccccccgctgctggagaagagtaccatagctgtgatcggctttgtccagagtcttggtgccgctatcccaacagtcgacctccagagccgctgggccgcacaggtaatcaaggggacttgcacactaccatccatggaggacatgatgaacgacattaacgaaaagatggaaaagaaaaggaagtggttcggtaagtccgaaacaatccaaacagattatatcgtttatatggacgagctgtcaagctttatcggcgcaaaacctaacattccatggctgtttctcacagacccgaagctggcaatggaggtgtacttcgggccgtgctccccctaccagttccgattggtcggccctggacagtggcctggggctaggaatgccatacttactcagtgggatcgatcactgaaaccaatgcagaccagggtggtgggcagacttcagaagccttgcttctttttccactggcttaagctctttgccatccccatccttttgatcgccgtgttcttggtactcacttag

SEQ ID NO: 188004 - DNA, 1677 bp, synthetic construct
  misc_feature 1..1677: note = Description of Artificial Sequence: Synthetic coding sequence
  source 1..1677: mol_type = other DNA
atggccaagaaggtggccgtgatcggcgccggcgtgagcggcctgtcgagtatcaaatgttgcgttgacgaggacttagagcctacctgcttcgaaagaagcgacgacatcggtggactgtggaagttcacggagagtagcaaggatgggatgaccagggtgtataaatcattagtcacaaatgtctgtaaggaaatgagctgctactcagattttccttttcacgaagattaccccaatttcatgaaccatgaaaagttctgggactacttacaggagtttgctgagcatttcgatctgttaaagtacatccaattcaaaactacagtctgcagtatcactaagcgacccgactttagtgaaaccggccagtgggacgtggttactgagactgaagggaagcaaaaccgtgccgtcttcgatgccgtgatggtgtgtacagggcatttcctgaacccccacctccctttggaggcctttcccggcatccacaagttcaagggccagatcttgcacagccaggaatacaagatcccggagggattccagggaaagcgggttctcgttataggcctgggcaacacaggcggcgacatagcagtagaactgagtcgaactgcagcccaggtgctcctctcaaccaggactggcacctgggtgctcggccgctcttccgattggggttatccttacaatatgatggtgacgcgaagatgctgctctttcattgcccaggtgcttcctagcaggttcctgaactggattcaagagagaaaactgaacaagaggttcaaccatgaagactacgggcttagtattacaaagggtaaaaaagccaagtttattgtaaatgatgagcttcctaactgcatcttgtgtggcgccattacgatgaagacaagcgttatagagtttactgaaactagtgcagtctttgaggacggaacggtggaagaaaacatagacgtggtcatttttacgacagggtatacattttctttccccttcttcgaggagcccctcaaaagtctgtgcacaaagaagatcttcctgtacaagcaggttttcccactgaatctcgagcgcgccaccctggctattattggcctgattggtctgaaagggtctattctttcagggacggagcttcaagccagatgggtgacacgtgtctttaagggcctctgtaagatcccgccatcccagaagttgatgatggaagcaacagagaaagagcagttgatcaaaagaggcgtctttaaagatactagcaaagacaagttcgactacattgcttacatggatgatatcgcagcctgcatcggaactaaaccgtcaatcccacttctattcttgaaggatccacgcctcgcttgggaagtcttcttcggcccctgtactccctaccaatatcgcctcatgggccctggtaagtgggatggcgcaagaaacgcaattctgactcaatgggatcgaacgctcaaaccactgaagaccagaatcgttccggattcttctaaaccagcgtccatgtctcactacctcaaggcctggggcgcacccgtgctgctagcgtcccttctgctgatatgcaagagctccctgtttctgaaactggtgcgggacaaattacaggataggatgtctccctacctcgtcagtctgtggcgggggtag

SEQ ID NO: 188005 - DNA, 1602 bp, synthetic construct
  misc_feature 1..1602: note = Description of Artificial Sequence: Synthetic coding sequence
  source 1..1602: mol_type = other DNA
atgaccaagaagcggatcgccgtgatcggcggcggcgtgagcggcctctcctctattaagtgttgtgtagaagaaggattagagccggtgtgtttcgagcgaacagatgatatcggagggctgtggcgctttcaagaaaatcccgaggaaggtagagccagcatttataagtctgttattatcaacaccagtaaggagatgatgtgcttttcagattacccgattcccgatcactatcccaactttatgcataatgcccaggtactcgaatatttcagaatgtacgctaaggaattcgatctgttgaagtatattagatttaaaacgaccgtgtgctcggtgaagaaacaacccgacttcgccacctccggccagtgggaagtggtgacagaaagcgagggcaagaaagagatgaatgtgttcgatggcgtgatggtgtgcactgggcaccataccaatgcccacttacccttggagtcatttcccggaatcgagaagtttaaagggcaatatttccacagcagagactacaaaaatcctgagggctttactggcaagcgtgttataattattgggattggcaacagcggcggtgatctggcggtcgaaatatcccagaccgctaagcaggtgttcctgagtaccagaaggggagcctggatattgaatcgggtgggggactatggttaccccgcagatgtgttgttttctagtcggctgacccattttatatggaagatatgcggacagtctctggctaacaaataccttgagaagaagattaaccagagattcgatcacgaaatgttcggtttaaagccaaaacatcgggccttatcccaacaccctactctgaacgatgacttgccgaacagaatcatttccggccttgtgaaggtgaaggggaatgtgaaggagtttaccgaaactgctgcgatcttcgaggatggttcgcgtgaggatgacatcgacgccgtgatcttcgctacaggttactctttcgactttccttttctcgaggactcagtgaaagtcgtaaagaacaagatttcactttacaagaaggttttcccccctaatcttgagcggcctaccttagccatcatcggtcttatccagcccctcggtgctatcatgcccatcagcgagctgcaggggcgatgggcaacacaagtttttaaaggacttaaaacccttccttctcaatcagagatgatggcagagatcagcaaggcccaggaggagatagacaagagatatgtagagagtcagcgacatacgatacagggtgattacatcgataccatggaagagctcgccgatctcgttggcgtgaggccaaatcttctgtccctggcttttacagatcctaagctcgccctccacctgcttctgggtccctgtaccccaatccactaccgcgtgcaggggcctgggaagtgggatggtgctcggaaggcaattctgaccactgatgacaggatacgaaaacctctgatgacccgcgtagtggagcggtccagctctatgacttctacaatgacaataggcaagtttatgctagccctcgcttttttcgctatcatcattgcatatttctag

SEQ ID NO: 188006 - DNA, 858 bp, synthetic construct
  misc_feature 1..858: note = Description of Artificial Sequence: Synthetic coding sequence
  source 1..858: mol_type = other DNA
atgaccaagaagcggatcgccgtgatcggcggcggcgtgagcggccttagcagcattaagtgctgtgtggaggagggactagagcctgtttgtttcgagcgcactgacgacatcgggggactatggcgatttcaggaaaatccggaggaagggcgcgcatctatctataaaagcgtgatcattaatacttccaaggaaatgatgtgtttctccgattaccccattccagatcactacccgaatttcatgcataatgcccaggtgctagagtatttcagaatgtatgccaaggagttcgacctcctgaagtacattaggtttaagacaactgtgtgctctgtgaaaaaacagcccgattttgctactagtggacagtgggaagtagttactgagtcagagggaaaaaaagagatgaatgtgttcgatggggtgatggtttgtaccggccatcatacaaatgctcaccttcccctagagagtttccctgggatagagaaattcaaaggacaatactttcacagtagggactataagaacccagagggattcaccggaaaacgggttatcattattggaatcggcaatagcgggggagacctagctgtggaaatcagccagaccgctaagcaggtctttctcagtacacgccggggtgcctggatcttaaatagagtgggggattacgggtaccccgcagacgtactgttttcttctcgactgactcacttcatctggaaaatctgtggacagtcattggccaacaagtacctggaaaaaaagataaatcaacggttcgaccatgaaatgttcggccttaagcctaaacatcgctccaaagatatcgccttgaccgagtag

SEQ ID NO: 188007 - DNA, 1395 bp, synthetic construct
  misc_feature 1..1395: note = Description of Artificial Sequence: Synthetic coding sequence
  source 1..1395: mol_type = other DNA
atgaccaagaagcggatcgccgtgatcggcggcggcgtgagcggcttgagctctataaagtgctgcgtcgaagagggtctcgagccagtctgtttcgaacgcaccgatgacattggaggtctgtggcgatttcaggaaaatcccgaggaagggcgggcctccatttacaaatctgtgataataaatacatcaaaagaaatgatgtgcttctcagactatccaatacctgaccactacccaaacttcatgcacaacgcccaggtactcgagtatttccggatgtacgccaaggagtttgacctcctcaaatatatcaggtttaagaccacggtctgcagtgtgaagaagcagcccgatttcgcaacctccggacagtgggaagttgtgactgaatctgagggaaagaaagaaatgaacgttttcgatggcgttatggtttgcaccggacaccatactaacgcacatttacctttggagagcttccccggcatagagaaatttaaagggcagtactttcattcaagagattacaagaaccctgagggttttacaggtaaaagagtgattatcatcgggattggcaacagcgggggtgacctggccgtggaaatcagtcagaccgccaagcaagtcttcttgagtactcggcgtggtgcctggatcctgaatagagtgggagattacgggtatcccgcagacgttttgtttagctcccggctgacacactttatctggaagatctgcgggcagtcactcgcgaacaaatatctggaaaaaaaaataaatcagcgctttgaccacgagatgtttggcctgaaacccaagcaccgggcactctcgcagcatccgactcttaacgacgacctgcctaatcgtattataagcggactggtaaaggttaagggaaatgtcaaagagttcaccgaaaccgcggcaatcttcgaagatgggtcgcgggaagatgacattgatgctgtcatctttgcaaccgggtattcattcgattttccatttcttgaagactcggtgaaggttgttaagaataagatttccctttataaaaaagtgttccctcccaatcttgaaagaccgacgctggccattatcggtctaatccagcccctaggagccatcatgcctattagcgagctacagggacgttgggcaacacaggtgttcaaaggtcttaagacccttccatcccagtctgagatgatggctgagataagtaaagcccaggaggagattgataagtcactgaccatgcgcaagacctctgataagcctaagttgaagaacatcctgcagatacctgactatcttaagactgtgaaaatcattaacaaggagtcactgcggaattgtcctggaataaagggtccaaaagagacctag

SEQ ID NO: 188008 - DNA, 579 bp, synthetic construct
  misc_feature 1..579: note = Description of Artificial Sequence: Synthetic coding sequence
  source 1..579: mol_type = other DNA
atgaccaagaagcggatcgccgtgatcggcggcggcgtgagcggcctgagttccatcaagtgttgcgtcgaggagggcttggagcctgtctgcttcgagcgcaccgatgatatagggggtctttggagatttcaagagaatcccgaggaagggagagctagtatctacaaaagtgtgatcattaatacatccaaggagatgatgtgtttctctgactatcctattcctgatcactacccaaattttatgcacaacgcacaggtactcgaatacttcagaatgtacgccaaggagttcgacctgcttaagtacatccgtttcaaaacaaccgtgtgttcagttaagaaacaacccgatttcgctacctcgggtcagtgggaagtggtgacggagtctgaaggtaagaaggaaatgaacgttttcgatggggtaatggtctgcactggccaccacaccaacgcgcacttacctctggagagcttccccggaatagagaaattcaaaggccagtacttccacagccgtgactataagaacccagaaggctttaccggtaaaagggtgattataatcggctag

SEQ ID NO: 188009 - DNA, 438 bp, synthetic construct
  misc_feature 1..438: note = Description of Artificial Sequence: Synthetic coding sequence
  source 1..438: mol_type = other DNA
atgaccaagaagcggatcgccgtgatcggcggcggcgtgagcggcctgagttccataaaatgttgtgttgaggagggactggaacccgtatgtttcgagcgcacagatgatatcggaggtttatggaggtttcaagagaacccggaagaaggacgggcaagtatttacaagagcgtgatcattaacacctccaaggagatgatgtgtttcagtgattacccaatcccagatcactatccgaatttcatgcataatgcacaggtgttggagtactttcgtatgtatgcaaaagagtttgacttgctgaaatacattcgctttaaaacaactgtgtgctccgttaaaaagcaaccagatttcgcgaccagcgggcagtgggaggtagtcaccgaatccgaaggtaaaaaggaaatgaatgtgttcgacggagtgatgtag

SEQ ID NO: 188010 - DNA, 3810 bp, synthetic construct
  misc_feature 1..3810: note = Description of Artificial Sequence: Synthetic coding sequence
  source 1..3810: mol_type = other DNA
atggaggccaccggcgtgctgcccttcgtgcggggcgtggacctgtcagggaatgatttcaagggaggttattttcccgagaacgtgaaggctatgactagcctccgctggcttaaattgaacagaaccggcctgtgctatcttcctgaggaactggcggccctgcagaagctcgagcacctttctgtctcgcataacaatttaaccaccttgcatggagagctctccagcctgcctagcctgcgcgccatcgtagcaagagctaattcccttaagaacagcggcgtgcccgacgatatcttcaaactggatgacttgagcgttttagacctttctcacaatcagcttaccgaatgtcctcgtgaactcgagaatgccaagaatatgctggtactgaacctgtctcataattctatcgacaccattccaaaccaactttttattaacctgactgacttgctctatctcgacctgtccgagaataggctggagtccctgcccccacagatgaggcgcctggtccatttgcagacactggtgctcaatggaaatcctttgctccatgcccaattaaggcaacttccagctatgacagcattacagaccctccaccttaggtccacacaaagaactcagtctaatctacccacgtctctggagggattgtccaaccttgcagacgttgacctgtcttgcaacgatctgaccagagttccggagtgcctctacactcttccatcactccggcgtctgaacctctctagtaaccagattactgaactttcactgtgtatcgatcaatgggtgcacgtcgagaccttgaatctgtcccggaaccagctcacttccttgccctccgcaatttgcaaactaagcaagttgaaaaagctttacctcaattccaataaactcgacttcgacggcctacccagcggcatcggtaagctgactaatttagaggagtttatggccgcaaacaataatctagagctggtcccggagtccctttgcaggtgtccaaagctccgcaagctggtcttaaacaaaaaccacctcgtgactcttcctgaggccattcatttccttacagaaatagaagttctggatgtgcgcgagaatcctaacttagtgatgccacccaagccagctgatagggcagcggaatggtataatatcgatttctccttgcagaaccagttacgattggctggagcatccccggcaaccgtggccgccgcggccgccgccgggtctggccctaaggacccgatggcccggaaaatgagactccgccgaaggaaagatagcgcccaagacgaccaggctaaacaggtgcttaagggtatgagtgatgtagcgcaagaaaagaataagaaacaggaagaatcggcagatgctcgtgcgccgagcgggaaggtgcgccgatgggatcaggggttggaaaagcctagactggattattctgaattttttactgaggatgtgggtcagctaccagggttaactatttggcagatcgagaacttcgtgccagtgttggtggaagaggccttccatggaaaattctatgaggcagactgctacattgtgttaaaaacatttctcgatgactccggctctcttaactgggagatatattactggattggcggcgaagctaccttggacaagaaggcctgcagcgcaattcacgctgtgaatcttaggaattacctgggggcagagtgccgtaccgttagagaggagatgggcgatgaaagcgaggaattcttgcaggtttttgacaacgacatttcatacattgaaggcggcactgcttccggattttacacagtggaggatacccattacgtgacccgaatgtaccgcgtgtatggtaaaaagaatattaaacttgagcctgtgcctcttaaaggtactagtcttgacccccgcttcgtgttcctgctggaccgcggactggacatttacgtctggagaggagcccaggccaccttgtccagcactacaaaggcccggctattcgctgaaaagatcaacaaaaatgaacggaagggcaaagccgagattacgttgctggtgcaggggcaagagctaccagagttctgggaggcgcttggcggagagccctccgagatcaagaagcatgtcccagaagatttttggcctccccagcctaaactatacaaggttggactgggactaggctatttagagttaccacagattaactacaagctttctgtggagcataagcaacggcctaaagtcgagctcatgccccgtatgcgcctgctgcagtccctgctcgacacccgctgtgtctatatactagattgctggagcgatgtatttatatggcttggaaggaagagccccaggcttgttagagccgccgctctgaaactcggccaggagctctgcggtatgttacaccggcctcgccacgccacggtttccaggtcactggaaggcactgaagcgcaagtatttaaggccaaattcaaaaactgggacgatgtgctgaccgttgactacacgagaaacgccgaagcggtcttgcagtcgccaggcctatccggaaaagtaaagcgggatgcagagaaaaaagatcaaatgaaggcagacctgaccgccttattcctgccacgtcaacctcccatgtccctggcagaggccgagcagctgatggaagaatggaatgaggacctggacggtatggagggattcgttttggaaggaaagaagttcgcacgcttacctgaagaggaatttggacacttctacacacaagattgttacgtgtttctttgccggtactgggtcccagtggaatacgaagaagaagagaagaaagaagataaggaggagaaagcagaggggaaggaaggggaagaggccacagctgaggccgaagaaaaacaaccggaggaggacttccagtgtattgtgtacttttggcagggaagggaagcatctaacatggggtggcttacatttacattctcactgcagaagaaattcgagagcctcttcccgggcaaattggaggtagtccgtatgacccaacagcaagagaacccgaagttcctctcccacttcaagaggaaattcattattcacagaggcaagcgaaaagcagtgcagggggcccagcagccttccctttaccagatcaggacaaatggaagtgcactctgcactcggtgtatccagatcaacaccgatagttctctgctcaactcggaattctgcttcattctcaaagttcccttcgaatcagaagataaccagggtatcgtatacgcatgggttggtcgggcaagcgacccagacgaggccaagctcgccgaagatatccttaatacgatgttcgacacctcctactctaaacaggttatcaacgaaggcgaggaacccgagaacttcttctgggtagggatcggagctcagaaaccctatgatgacgacgcggaatacatgaagcatactcggctgtttcgctgttccaatgagaaaggctattttgccgttactgaaaaatgcagcgatttttgtcaagacgatttggcagacgacgatatcatgcttcttgataacggtcaagaagtttatatgtgggtcggcacacagaccagccaggtcgaaattaaactgagcctcaaggcctgccaggtttacattcagcacatgagatctaaggaacacgaaagacctagacggctaaggttggtgcgcaagggaaatgaacagcatgctttcactaggtgtttccatgcctggtctgccttttgcaaagccctagcttag

SEQ ID NO: 188011 - DNA, 3552 bp, synthetic construct
  misc_feature 1..3552: note = Description of Artificial Sequence: Synthetic coding sequence
  source 1..3552: mol_type = other DNA
atgaccagcctgcggtggctgaagctgaaccggaccggcctgtgctacctgcccgaggagctcgctgcactgcaaaaactggaacatttaagtgtgtctcataataatctcacaacactgcacggggaattgtcaagtctcccgagccttcgagcgatcgtagccagggctaacagcctaaaaaacagtggagttcctgacgatatttttaagctggacgacctaagtgtgcttgatcttagccacaatcagctgactgagtgcccaagagaactggaaaacgcgaagaacatgctggtgcttaacctgtcacataataggcagctgccggccatgacagcactccaaaccttgcatctccggagtacacagagaacacagtctaacctccccacttcactggaggggctctcaaacctcgcagacgtggatttgtcttgtaacgacctcacacgggtcccagagtgcctgtataccctgcctagtctaaggaggctcaacctgtcaagcaatcagattaccgagctaagcctttgcattgaccagtgggtacacgtggaaacattgaacctatctcggaaccagctgactagcctacccagtgccatttgtaagctctccaagctgaagaaactttacctcaattccaacaagttagactttgatggcctaccctcaggaattggaaagcttactaatctggaggagttcatggcagccaataataatctggagcttgtaccagagagcctttgccgctgccccaaactgaggaagctagttctgaacaagaaccatctcgtcacccttccagaagccattcacttcctgactgaaatcgaggtgctcgacgtgagggaaaatccaaacctggttatgcctcctaagcctgccgaccgagcagccgagtggtacaacatagactttagcctgcagaatcagcttaggcttgctggcgcttcccccgcaacagtggcggccgctgctgccggttccggtcctaaggacccaatggcgcgcaaaatgcgccttagacggaggaaggactctgctcaagacgatcaggccaagcaagtcctgaaaggtatgagcgatgttgcacaggagaaaaataaaaagcaggaagagtccgccgacgcgcgtgcccccagcggaaaggtgagacgctgggatcagggcctcgaaaaaccacgcctcgattactctgagttttttactgaggacgtgggacagttacctgggctcactatctggcaaatcgagaactttgttcctgtacttgtcgaagaggccttccatggcaaattttatgaagccgattgttatattgtcctaaaaacgttccttgacgactctgggtccctgaattgggagatatattactggatcgggggagaagcaactctggacaaaaaagcttgttctgctatccacgcagtgaacctacgtaattacctgggtgccgaatgtagaacggtcagggaggagatgggcgatgagtcggaggaattcctccaggtctttgacaacgacatctcctatattgaggggggcaccgcatctggcttttacaccgtggaggatacgcattacgttactcgaatgtacagagtctatggaaaaaagaatatcaaactggaacctgtgcctctgaagggtacatctctggatccccgctttgtgttcctcctggatcgtggcctggacatatatgtctggcgcggagcacaggcaaccctcagttccactactaaagcacgactgttcgcagagaagatcaacaagaacgagagaaagggtaaagccgaaattaccctgttggtacagggacaagagctacccgaattctgggaggcacttggtggggagccctccgagatcaagaaacacgttcccgaggatttttggcctccccagccaaagctttataaagtgggactcgggctcggctacttagagcttcctcagattaactacaagctctccgtcgaacataagcagaggccgaaggtcgaactaatgccacgcatgcggctgctgcagtccctcttggacaccaggtgtgtttatatcctggactgttggagtgacgttttcatttggctggggcgcaaaagccctcggctcgtgagagcagccgccctgaaactgggccaggagctgtgcggtatgctgcacaggccaagacacgctacagtgagcaggtccctggagggaacggaggcccaagtttttaaggctaaatttaagaactgggatgacgtcttgacagtcgactacacacggaacgctgaggcagtcctgcagtcgccaggcctgagtggtaaggtaaagcgtgacgcggagaagaaagaccaaatgaaggcagacctgaccgccttgttcctgcccaggcagcctcccatgagtctggccgaggccgaacaactgatggaagagtggaacgaggaccttgacggaatggaaggctttgtgctggagggtaaaaaattcgctcgtttacccgaagaggaatttggccacttctacacacaggactgttatgtgtttttgtgtcgctactgggtccctgttgaatacgaagaggaagaaaaaaaggaagataaagaggagaaagccgagggcaaggaaggcgaggaggccaccgcagaagcagaggagaagcaaccagaggaagattttcagtgtatcgtctatttctggcaaggtagggaggctagtaatatgggctggctgaccttcaccttttctctccaaaagaagtttgaatctctctttcccggcaagttagaggttgtgcggatgacccagcagcaagagaacccaaagtttttatcccatttcaaaaggaagttcatcattcatcgcgggaagaggaaggccgtgcaaggcgcccagcaaccttcattgtaccagattcggaccaacggtagcgccctgtgcacccggtgtattcagattaacactgatagctccctgttaaactccgagttctgtttcattttgaaagtcccatttgagagtgaagacaatcagggtatcgtctacgcctgggttggtcgtgcctccgatcccgacgaggccaaactggccgaagatattttaaatacaatgttcgacacatcatatagtaaacaggtgatcaacgaaggcgaagaaccagagaatttcttttgggtcggcatcggtgctcagaagccctacgatgatgatgcagagtacatgaaacacactagactcttccggtgcagcaatgaaaaagggtatttcgctgtgacagaaaagtgttccgacttctgccaggacgaccttgcagacgacgatatcatgctgttggataatggccaggaggtgtacatgtgggtcggaactcagacttcccaggttgaaataaagttgtcactcaaggcctgccaggtctacatccaacacatgaggtccaaggaacatgaacggccaagaaggctgaggctcgttaggaagggaaacgagcagcatgccttcacaagatgcttccacgcttggtctgctttctgtaaggccctggcatag

SEQ ID NO: 188012 - DNA, 3447 bp, synthetic construct
  misc_feature 1..3447: note = Description of Artificial Sequence: Synthetic coding sequence
  source 1..3447: mol_type = other DNA
atggaggccaccggcgtgctgcccttcgtgcggggcgtggacctgagtggaaatgacttcaaaggcgggtactttccagagaatgtcaaagccatgacctctttacgatggctgaagttgaatagaaccggattatgctatttaccagaggagttagccgcactgcaaaagttggaacatctcagcgtctcacataataatctgaccaccctgcacggtgaactgtcatctttaccttccctgcgagccatcgtggcacgtgccaattctctgaagaattccggagtgcctgatgatatctttaaactggacgatttgagcgtgctcgacctgtcgcacaaccagttgacagagtgtcctcgcgagctggagaacgctaagaatatgttggttttgaatctttcccacaactccatcgataccattcccaatcaactgtttatcaatctgactgatctgctctatctcgacctgagtgaaaaccgccttgaaagcttgccgcctcaaatgcgccgtctcgttcacctgcagaccctggtgttgaatggtaaccctttgttgcacgcacagctgcgacagctgcccgccatgaccgccttgcaaacgcttcaccttcgatccacccagagaacacaatctaaccttccgacatcactggagggcctctcaaatcttgctgacgtggatttaagctgcaatgatctgacacgcgtgcctgagtgtctgtatactctccccagtctgcggcgactcaatctctcgagcaaccaaataactgagctctcgctttgtattgatcagtgggtgcacgttgagaccctgaacctctctcgcaaccaactcacctctctgcccagtgcaatttgtaaacttagcaagctaaaaaaactctacctgaactctaacaagctggacttcgatgggttgccaagtggcatcgggaagttgactaacttggaggagttcatggctgcgaataacaacctggagctagtgcccgaatcactgtgcaggtgcccgaaacttcgtaaactggtgttaaataagaaccatctcgtcaccctccccgaggctatccactttctaaccgagatagaggtcctcgacgtaagggaaaatcctaacctagtcatgcctcccaagccagctgaccgggccgccgaatggtacaacatcgacttcagcttacagaatcagttaagactggctggtgcttcgcccgcaaccgtggcagctgctgctgctgccggtagtggtccaaaagaccccatggcaagaaagatgcgactgcgtcgcagaaaagattccgctcaggatgatcaagctaaacaggtccttaagggcatgagcgatgtcgcacaggagaaaaataagaaacaggaagagagcgcagacgccagagccccaagcggaaaggtgcgaagatgggatcaggggctcgagaagcctcggctggactactctgaattcttcactgaagacgttgggcagttgccaggcttgacaatttggcagattgagaacttcgtgccagttttggttgaagaagcttttcatggcaaattttatgaggccgattgctatattgtcctgaaaacttttctggatgattccggtagtctaaattgggaaatttactattggatcggtggggaagctaccctggataagaaggcttgctcagccatccatgcagttaacctccggaattatttaggggccgaatgcaggactgttagagaggagatgggagacgagtcagaggaatttctgcaggtattcgataatgatatctcatatatcgagggcggaaccgcatcaggcttttataccgtggaagacacccactatgtgaccagaatgtatcgagtctatgggaaaaagaacatcaagctggagcccgtgccactgaaaggcaccagcctggatccaaggtttgtgttccttctcgacaggggactcgacatctacgtgtggaggggggcccaagctaccctgagttcgaccaccaaagctagactcttcgccgaaaaaattaataaaaacgagcggaagggcaaagcagaaattaccctactggtccaggggcaggaactgccagagttctgggaggccttgggaggtgagcccagtgagataaagaaaaattgggacgatgtgctgactgttgactatacaaggaacgccgaggcagttcttcagtcgccgggcctgagcggcaaggtaaaacgagatgccgagaagaaggaccagatgaaggcagacctcaccgcgttatttcttccccggcagccgcctatgtccctggctgaggccgagcagctgatggaggagtggaatgaagacctggatggtatggagggtttcgtcctcgagggaaaaaagtttgctcggctcccggaagaagagttcgggcatttttacacacaggactgctatgtgttcctctgtagatactgggtgcctgtcgaatacgaagaggaagagaagaaggaagacaaagaagagaaagcagaggggaaggaaggagaagaagcaactgcagaggctgaggagaaacagcccgaagaggacttccaatgtattgtgtacttctggcagggtagagaggcaagtaacatgggttggctgacattcacattttccctgcagaagaagttcgagtcgctgtttcccggaaagctggaagtggtgaggatgacacaacagcaggagaacccgaagttcctaagtcatttcaagaggaagtttataattcataggggaaagcggaaggccgtgcaaggtgcacagcaaccatccttgtaccagattagaaccaatggttctgctttgtgtactcggtgtattcagatcaacacagacagttctctgcttaattccgaattctgcttcatcctcaaagtcccttttgagtcagaggataaccagggtatcgtgtacgcctgggtggggcgtgcttcggatccagacgaggctaagctggccgaggacatactgaacacaatgtttgatacatcctactctaagcaggtgatcaacgaaggagaggagccagagaattttttctgggtgggaattggcgctcaaaagccctacgacgacgatgccgagtacatgaagcacactcggctcttcaggtgttcaaacgagaaaggctactttgccgtgactgaaaagtgcagcgacttttgccaagacgacctggccgatgatgacattatgctactcgacaacggccaagaggtttatatgtgggtcggcactcagactagccaagttgaaattaagctttccctgaaagcttgccaggtctatatccagcatatgaggtcaaaggaacacgagcgtccacggcggcttcggctcgttcgaaaggggaatgagcagcacgctttcacccggtgcttccacgcttggtccgcgttctgcaaggcgctcgcctag

SEQ ID NO: 188013 - DNA, 1284 bp, synthetic construct
  misc_feature 1..1284: note = Description of Artificial Sequence: Synthetic coding sequence
  source 1..1284: mol_type = other DNA
atgttcttcacctgcggccccaacgaggccatggtggtgagcggcttctgccggtctccccccgtgatggtggccggtggacgagtgttcgttctgccatgcatccagcagatacaaaggatctccctgaatacactcaccttgaacgtcaagagcgagaaggtgtacacacgccacggcgtcccgataagtgtcacaggcatcgcccaggtgaaaatacagggtcagaacaaggaaatgttagccgctgcatgccagatgttcctcggcaaaaccgaggccgaaatcgctcacatagccctggaaacactcgaaggccatcaaagagccataatggcccacatgacagtggaagaaatatataaggatcgccaaaaattctctgagcaggtcttcaaggttgcatcctcagacctggtgaacatgggcattagcgtcgtgtcctacacccttaaagatatacatgatgaccaggactatctgcactctttagggaaggccagaaccgcgcaggttcaaaaagatgcgaggattggcgaagctgaggccaagcgcgacgctggtataagggaggcaaaggccaaacaggaaaaagtgtctgctcagtacctttctgaaatagagatggctaaggctcaacgcgattacgagctgaaaaaagctgcatatgacatcgaagtgaataccagaagggcacaggctgacctggcctaccagcttcaggtcgcgaagactaagcagcagatcgaagaacagcgggtgcaggtccaagtcgtagaacgagcccaacaggtggcagtgcaggagcaagagattgccagacgtgagaaagaactggaagcccgtgtgcgaaagcccgccgaagcagaaagatataaactggaacgcttagccgaggccgagaaaagccaattaattatgcaggccgaggcagaggccgcctcggttaggatgcgcggggaggccgaggcattcgccatcggtgcacgggctcgggccgaagcggaacagatggcaaagaaggccgaagcattccaattgtatcaagaagccgcgcagctggacatgttgcttgaaaaactgccacaggtggctgaggagatcagcggacccctcacctccgcaaataagattactctggtctcaagtggctctggtaccatgggagcggccaaggtcacaggtgaagtgctcgatatcctaaccagactacctgaaagcgtcgagagactcaccggtgtgtccatcagtcaagtaaatcataagcctctgcggactgcctag

SEQ ID NO: 188014 - DNA, 1284 bp, synthetic construct
  misc_feature 1..1284: note = Description of Artificial Sequence: Synthetic coding sequence
  source 1..1284: mol_type = other DNA
atgttcttcacctgcggccccaacgaggccatggtggtgagcggcttctgccgcagccccccagtcatggttgctgggggccgggtttttgtgctaccttgcattcagcagattcagaggatttctctgaacaccctgacattgaacgtcaagtcagagaaagtttatacaagacacggggtgccgatttcagtgacgggcattgctcaagttaaaatccaggggcagaacaaagaaatgttggccgcagcctgccagatgtttctgggcaaaaccgaagccgaaatcgcccacatcgcattggagaccctcgagggacaccagcgagccattatggcccacatgaccgtggaagagatttacaaagaccgccagaagttctcagagcaggtgtttaaggtggcctctagcgacctagtcaacatggggatctcagtagtgtcctataccctgaaagatatccacgatgaccaggactacctgcacagcctagggaaggccagaacggctcaggtgcagaaggacgcccgcatcggtgaagcagaggcgaagagggacgctgggatccgagaagctaaggctaaacaggaaaaagtttccgctcagtacctcagtgaaatcgaaatggccaaggctcagagagattatgagctaaagaaggccgcgtacgatattgaggtgaacaccagacgagcgcaggccgatctcgcctatcagcttcaggtagcaaaaaccaagcaacaaattgaagagcaaagagtgcaagtacaggttgtggaacgtgcccagcaggtcgcagtacaggagcaggaaatagccaggcgggaaaaggagctcgaggctagggtacggaagcccgctgaagccgagcgctataagctggaacgcctggccgaagcggagaaatcgcaactaattatgcaggccgaggctgaggcagcctccgtgcgcatgcgcggtgaggctgaggcgtttgctatcggcgcacgcgccagggctgaagcagagcaaatggccaagaaagcggaagccttccagttgtaccaggaggcagctcagctggacatgctgctggaaaaactgcctcaggtggcggaggagatttcagggcccttaacctctgctaataagattacactcgtgagcagtggtagcgggacaatgggcgccgctaaggtcacaggagaagttctagatatactgactcgtttacccgaatctgtcgagagactgacaggtgtatccatcagtcaggtgaaccataaaccactgcgtaccgcctag

SEQ ID NO: 188015 - DNA, 1284 bp, synthetic construct
  misc_feature 1..1284: note = Description of Artificial Sequence: Synthetic coding sequence
  source 1..1284: mol_type = other DNA
atgttcttcacctgcggccccaacgaggccatggtggtgagcggcttttgcagatcacccccagtgatggtggcgggcggacgcgtgttcgtgctcccctgcattcagcaaatccaacgcatatctttgaatactctgacactaaacgttaagagtgagaaggtctacacgagacacggtgtccctattagcgtcaccggaattgcacaggtcaaaattcaggggcagaataaagagatgctggccgccgcgtgccagatgtttctgggcaaaacagaggctgaaatcgcccacattgctctggagacactggagggccaccagcgcgccattatggctcatatgactgtcgaagagatctataaagaccgacagaagttttccgagcaggtttttaaggttgcctctagcgatctagtcaacatgggaatctcggtggtgtcttatactctgaaagacatacacgatgaccaagattacttacacagtctgggaaaggcccggacagcccaggtgcagaaagacgcacggatcggagaagcggaagctaagcgggatgctggtatacgagaggctaaggctaaacaggagaaagtatcagcgcagtacctgagcgagattgaaatggctaaggcccagcgcgattacgagctgaaaaaagcagcttacgatattgaggtgaatacccggcgcgcacaggcagatctcgcatatcaactgcaggtggcaaaaaccaagcagcaaatcgaggagcagagagtgcaagtgcaagtggtggagcgcgcccagcaggtcgcggtacaggaacaggagattgcccggcgggagaaagagctggaagccagggtgcgtaagcccgccgaggccgaaaggtataaattggagcgcctcgccgaagctgaaaagtcacagctgataatgcaagctgaagcagaggctgcctcagtccgaatgagaggagaagctgaagcatttgcaattggagcaagagcccgagccgaagctgaacagatggccaagaaggcagaggccttccagctgtaccaagaagctgcccagctagacatgctcctggaaaagctgcctcaggtggcagaggagatttcaggtcctctgacatccgcgaacaaaattactctcgtttcttctggttctgggaccatgggggcagcaaaagtcacaggggaagtcctggacattcttactcggctcccggagtcagttgagaggctgactggagtgagcatctcacaggtcaaccacaaaccattaagaaccgcatag

SEQ ID NO: 188016 - DNA, 438 bp, synthetic construct
  misc_feature 1..438: note = Description of Artificial Sequence: Synthetic coding sequence
  source 1..438: mol_type = other DNA
atgggcgtggagggcaccggccggggcggctgccggctgggcggccctgacggaaaggggaaaggatgggcccccgtggacgctactgcacgcctcccacacccccaaaggctttcgttgccgctactgcaactgcagcccgagccctgtttctcactggtggcccagatgaggccatggtggagcccggattacctgcactctctgggaaaggcccgcacggctcaggttcagaaagatgcccggattggtgaagcggaagcaaagcgggatgcaggtattcgcgaagccaaagctaagcaagaaaaggtgtcagctcagtacctgtcggagatcgagatggctaaggcccagcgagactatgagcttaaaaaagctgcttatgatatcgaggtgaatacccgaagggctcaggccgacttggcttatcagctgtag

SEQ ID NO: 188017 - DNA, 579 bp, synthetic construct
  misc_feature 1..579: note = Description of Artificial Sequence: Synthetic coding sequence
  source 1..579: mol_type = other DNA
atgttcttcacctgcggccccaacgaggccatggtggtgagcggcttctgccgtagccccccagtgatggtggctggaggccgtgtgtttgtcttaccatgtattcagcaaattcagaggatctcgctcaacaccttgactctgaacgtcaagtcagagaaagtgaagatacagggacagaacaaggaaatgctggctgccgcttgtcaaatgttcctggggaagactgaagctgagatcgcccatattgctctggagactctggagggacatcagagggcaataatggctcatatgacagtggaggagatttacaaggatcgccagaagttctctgagcaggtatttaaggttgcttcaagtgatttagtaaacatggggatttccgtggtaagttacacactcaaggacattcatgatgaccaagactacctgcattccttgggcaaggcaagaacggcgcaggtgcagaaggatgcaaggatcggagaagcggaggccaaacgggatgccgggatccgtgaagctaaagcaaaacaagagaaggtatctgctcagtatctatctgaaatcgaatag

SEQ ID NO: 188018 - DNA, 579 bp, synthetic construct
  misc_feature 1..579: note = Description of Artificial Sequence: Synthetic coding sequence
  source 1..579: mol_type = other DNA
atgttcttcacctgcggccccaacgaggccatggtggtgagcggcttttgccgaagcccacctgtaatggttgcagggggccgggtctttgtcctgccgtgtattcagcagatccagaggatctcgctcaacacattaactctgaacgttaagtcagagaaggtcaaaattcagggacagaataaagagatgcttgctgctgcgtgtcagatgttcttaggaaagactgaggcggagatcgctcatatcgcactggaaactctcgagggacaccaacgcgcaattatggcccatatgaccgtggaggagatttacaaagaccggcagaaattcagtgagcaggtcttcaaggtggcaagcagtgaccttgtcaatatgggcatttccgtcgtgtcctatactttgaaggacatccacgacgaccaggattacctccacagcttgggcaaagcccgaacggcccaggttcagaaagatgctcggataggtgaggcggaggcgaaacgggatgctggaatacgcgaggcaaaagctaagcaggagaaggtgtctgctcaatacttatccgagattgagtag

SEQ ID NO: 188019 - DNA, 717 bp, synthetic construct
  misc_feature 1..717: note = Description of Artificial Sequence: Synthetic coding sequence
  source 1..717: mol_type = other DNA
atgcggccctggtggagccccgtgaagatccagggccagaacaaggaaatgcttgccgcagcttgtcagatgttccttgggaaaacggaagcagagatcgcccatatcgcccttgagacactcgaaggtcaccagcgcgctataatggcccatatgacagtcgaggaaatctataaggacaggcagaaattttctgaacaggtgtttaaggtagcttcctctgatcttgtcaatatgggtatcagtgtggttagttacaccttgaaggacatccatgacgatcaagattatttgcacagtttgggaaaggctcggaccgctcaagtccaaaaggatgctaggatcggagaggcagaggccaaacgcgatgccgggatccgcgaagccaaagctaaacaagaaaaggtatccgcgcagtacctgtcagaaattgaaatggccaaggcccaaagggattacgaattgaaaaaagccgcatatgatattgaagtgaataccagacgagctcaggccgatctggcttaccagctgcaggtggcaaagaccaagcagcaaatcgaggagcaaagagtgcaggtgcaggtggtcgagcgagcccaacaggtggccgtacaggaacaggaaatcgcgcgccgggagaaagaactcgaagcgcgggtccgcaaacctgccgaggctgaaagatacaagcttgagcgacttgccgaagcagagtag

SEQ ID NO: 188020 - DNA, 579 bp, synthetic construct
  misc_feature 1..579: note = Description of Artificial Sequence: Synthetic coding sequence
  source 1..579: mol_type = other DNA
atgttcttcacctgcggccccaacgaggccatggtggtgagcggcttttgcagatcacctccagtaatggtcgcagggggtcgtgtgtttgtactgccgtgcattcagcagattcaacggatctcccttaatacccttacccttaacgtaaaaagcgaaaaggtaaaaattcaaggacagaataaggagatgttggcagctgcctgccagatgttcctgggaaagacagaggctgagattgcacatatcgcactcgagaccctagaaggacaccagagagccattatggcacacatgacggtggaagaaatatacaaagaccgccagaaattcagcgagcaagtcttcaaagtcgcctcctccgatctcgtgaatatgggaattagcgttgtgagctacactctcaaggatatacatgatgaccaagattaccttcactccctgggtaaagcgcgcacagctcaggtgcaaaaggacgctcgcattggcgaggccgaagcgaaacgcgatgcagggatcagagaagccaaggcaaaacaagagaaagtgtctgcgcaatatttaagcgaaattgagtag

SEQ ID NO: 188021 - DNA, 579 bp, synthetic construct
  misc_feature 1..579: note = Description of Artificial Sequence: Synthetic coding sequence
  source 1..579: mol_type = other DNA
atgttcttcacctgcggccccaacgaggccatggtggtgagcggcttctgtcgatccccacccgtcatggtcgcagggggaagggtcttcgtgttgccatgcatacagcaaatccagaggattagcctaaacacactcactctcaatgtgaagtctgagaaggtgaagatccagggtcagaacaaagaaatgctggccgccgcttgccagatgttcttgggaaagacagaagctgaaattgcccacatcgccctggaaacgctggaggggcaccaaagagcaatcatggcccacatgactgttgaagaaatttataaggacagacagaaattttctgagcaggtattcaaggtggccagttccgatctggtgaatatgggaataagcgtcgtgagttataccttaaaggacattcacgacgatcaagactatctgcactcactcggtaaggcaagaaccgcacaggtccagaaggacgctagaattggggaggccgaagctaaacgagatgcggggataagggaggctaaggccaaacaagaaaaagtctctgcacagtatctcagtgagatcgaatag

SEQ ID NO: 188022 - DNA, 438 bp, synthetic construct
  misc_feature 1..438: note = Description of Artificial Sequence: Synthetic coding sequence
  source 1..438: mol_type = other DNA
atgggcgtggagggcaccggccggggcggctgccggctgggcggcccagatggcaagggcaagggatgggcccctgtagacgcaacggcacgactgccccacccacagcgcctttctctgccgctcttacagttacaacctgaaccctgcttttcacttgtggcccagatgcggccatggtggtcgcccgattacctgcactctcttggtaaggcccgtactgcacaggtccagaaggatgcccgcataggggaggccgaggcaaaacgagacgcaggcattcgcgaggcaaaggcaaaacaagagaaagtttccgcacagtatctctccgagatcgagatggccaaagcccaacgggattacgagctgaaaaaagctgcctatgacatagaggtaaacacccgaagggcccaggccgacttggcataccagttgtag

SEQ ID NO: 188023 - DNA, 273 bp, synthetic construct
  misc_feature 1..273: note = Description of Artificial Sequence: Synthetic coding sequence
  source 1..273: mol_type = other DNA
tgagccaagaaggccgaggccttccagctgtaccaggaggccgcccagctggatatgctgctggagaagctgccccaagttgcggaggagatctctggacccctcacttctgcgaacaagataacgcttgtgtcctctgggagcggcacaatgggtgcagcaaaggtgacgggtgaggtgctagacatcttgacacggctgcccgagagtgtggagaggctgaccggcgttagcatctctcaagtaaatcacaagcctttgagaaccgcatag

SEQ ID NO: 188024 - DNA, 708 bp, synthetic construct
  misc_feature 1..708: note = Description of Artificial Sequence: Synthetic coding sequence
  source 1..708: mol_type = other DNA
atgttcttcacctgcggccccaacgaggccatggtggtgagcggcttctgccggagcccgcccgtaatggtggcaggaggacgtgttttcgttctgccttgcattcagcagatccagcgcattagtctcaatacattgaccctgaacgtgaagtcggaaaaggtgtacacgagacacggagtcccgatcagcgttaccggaatcgcccaagtgaagatccagggccaaaacaaagagatgctggccgccgcgtgtcaaatgtttctgggtaaaaccgaggctgagatagctcacatcgccttagagacactggaaggccaccaaagagcgattatggctcatatgacagtggaggagatctacaaagaccgtcaaaagtttagcgaacaggtgttcaaggtcgcgagctcagacctggttaacatggggatatcagtcgtcagctacaccctgaaggacatccacgacgaccaggattacttacacagcctgggaaaggcaagaaccgcgcaggtacagaaagacgctcgcatcggtgaggctgaagcaaaaagggacgctggcataagggaggcaaaagcaaaacaagaaaaggttagtgctcagtacctatctgaaatcgagatggcaaaggcgcagagggactatgaactgaaaaaggctgcctacgatattgaagtgaacactcgacgtgcccaggctgactag

SEQ ID NO: 188025 - DNA, 717 bp, synthetic construct
  misc_feature 1..717: note = Description of Artificial Sequence: Synthetic coding sequence
  source 1..717: mol_type = other DNA
atgcggccctggtggagccccgtgaagatccagggccagaacaaggaaatgctagccgcagcctgccagatgttccttggaaagaccgaggctgagattgctcatatagccctggagacactcgagggtcaccagcgagctatcatggcccacatgacagtcgaggagatatataaagatagacaaaagttctccgagcaggtgtttaaggtggcctctagtgacctcgtgaatatgggaatttccgtggtgtcctatacccttaaggatatacacgatgaccaggattacctgcactcattgggcaaggcccgcactgcccaagtgcagaaggatgcccgcatcggagaggcagaagccaagcgagacgcgggcatcagagaggccaaggcgaaacaggaaaaggtgagtgctcaatacctctcagagatcgagatggcgaaagcgcagcgcgactacgagcttaagaaagccgcctacgatatcgaggtaaacactagacgtgctcaggctgacctagcataccagttacaggtggcaaaaaccaaacaacagatcgaagagcaaagagtgcaggtgcaagtggtcgagcgggcccagcaggttgcggtgcaggagcaagagatcgctcgccgggaaaaagagctcgaggcccgggtgcgcaagcccgccgaggcggagagatacaagttggaacgcctggctgaggccgaatag

SEQ ID NO: 188026 - DNA, 417 bp, synthetic construct
  misc_feature 1..417: note = Description of Artificial Sequence: Synthetic coding sequence
  source 1..417: mol_type = other DNA
gtgaagatccagggccagaacaaggagatgctggccgccgcctgccagatgttcttgggtaaaacggaggccgaaatcgcccatatcgctcttgagacccttgagggtcatcagagggccatcatggcgcacatgacggtcgaggaaatatacaaggaccgccaaaaattttccgagcaggttttcaaggtggcaagctccgatctggtaaacatgggcatctccgtggtttcatacaccctaaaagacattcacgatgatcaggactacctgcacagccttggcaaagctaggaccgctcaggtccagaaagatgccaggataggggaagcggaagcgaagagagacgctgggataagagaagcaaaggccaagcaggagaaggtgtccgcacagtatctgagcgagattgagtag

SEQ ID NO: 188027 - DNA, 558 bp, synthetic construct
  misc_feature 1..558: note = Description of Artificial Sequence: Synthetic coding sequence
  source 1..558: mol_type = other DNA
atgttcttcacctgcggccccaacgaggccatggtggtgagcggcttctgcaggagccctccagtaatggtcgctggcggcagggtgtttgtcttgccttgcattcagcagattcagcggatatctctgaacaccttgaccttaaacgtaaaatctgaaaaggtgtacacccggcacggagtacctatctcagtgactggaatcgcccaagtgaagattcaaggccagaacaaggagatgttggcggccgcctgccaaatgttcctgggaaagaccgaagccgagatagcgcatattgccctcgaaacgttagaaggacatcagcgcgccatcatggcacatatgaccgtggaggaaatttacaaagaccggcagaagttttccgaacaagtgtttaaggtggcctcatccgacctggttaatatggggatttccgtagtctcctataccttgaaggacattcatgacgaccaagactacctgcatagcttgggaaaggcacggacagcccaggtgcagaaggatgcgcgaatcggtgaagccgaggctaaacgctag

SEQ ID NO: 188028 - DNA, 348 bp, synthetic construct
  misc_feature 1..348: note = Description of Artificial Sequence: Synthetic coding sequence
  source 1..348: mol_type = other DNA
atgggcgtggagggcaccggccggggcggctgccggctgggcggccctgacggcaagggtaagggttgggctccagtggacgctactgcccggctgcctcatccccagcggctctcgctgccactgctgcaattgcaacctgagccctgcttcagcttggtggctcagatgcgaccatggtggtccccggattaccttcactcactaggaaaagcccgcaccgctcaagtgcagaaagatgctcggatcggcgaggctgaggctaagcgcgatgcaggcattcgggaagcaaaggctaaacaagaaaaggtttctgcacaatacctgtctgaaattgagatggcttag

SEQ ID NO: 188029 - DNA, 561 bp, synthetic construct
  misc_feature 1..561: note = Description of Artificial Sequence: Synthetic coding sequence
  source 1..561: mol_type = other DNA
gtggccaagaccaagcagcagatcgaggagcagcgggtgcaggtgcaggtggttgaaagggcacagcaggtagcggtccaggagcaagaaattgcacggagagaaaaagagctcgaggctagagtaaggaagcctgccgaggcggaacggtataagcttgagagactggctgaggccgagaaaagccaacttatcatgcaggccgaggctgaggcagccagtgtcagaatgcgaggagaggcggaggcgtttgccatcggagcgcgtgcgagggccgaagcagagcagatggctaaaaaggctgaagcatttcaattatatcaagaggcagcgcagttggacatgctgctggaaaaactcccacaggtggcagaagagatatcagggccacttacttctgctaacaagattaccctggtttcttccggctctggcactatgggagcagccaaggtgacaggagaggtcctggacattctcactagactccccgaaagtgtcgaacgcctgaccggagtaagcatttctcaagtaaatcacaagcctctgcggactgcctag

SEQ ID NO: 188030 - DNA, 438 bp, synthetic construct
  misc_feature 1..438: note = Description of Artificial Sequence: Synthetic coding sequence
  source 1..438: mol_type = other DNA
atgggcgtggagggcaccggccggggcggctgccggctgggcggcccagacggcaaagggaagggctgggctccagtcgacgcaaccgccagattacctcatccacagaggctgagcttgcctctgttacaactccagcctgagccgtgcttcagtttggttgcccaaatgcgcccttggtggtcccctgactatttgcatagtttggggaaagcccgtacagcccaagtgcagaaggacgccaggattggcgaggctgaggccaagagagatgccggaatcagggaagccaaagcgaaacaggagaaagtttctgcacaatatctcagcgagattgaaatggctaaagctcaaagagactacgaacttaaaaaggccgcatacgatatcgaagtgaacaccaggcgggcccaggccgatctggcatatcagttgtag

SEQ ID NO: 188031 - DNA, 558 bp, synthetic construct
  misc_feature 1..558: note = Description of Artificial Sequence: Synthetic coding sequence
  source 1..558: mol_type = other DNA
atgttcttcacctgcggccccaacgaggccatggtggtgagcggcttttgccggtcacccccagttatggtagcaggaggcagggtgtttgtgctgccgtgcatccagcaaatccagaggattagtttaaataccctgacactgaacgtgaaatcagagaaagtctacacacggcatggtgtgcctatcagtgtgacaggaatcgcccaggtcaaaattcaggggcagaataaggaaatgcttgccgccgcttgtcagatgttcttgggaaaaaccgaggccgaaatcgcccatatcgcccttgagactctagaagggcatcagcgggccattatggctcacatgaccgtagaagagatctacaaggacaggcagaagttttccgaacaggtcttcaaggtcgcttccagcgatctggtgaacatgggaatcagcgtggtaagctatacactcaaagatattcatgatgatcaggattacttacattccttgggaaaggcccggactgctcaggtgcagaaggatgcccgcatcggtgaggccgaagcgaaacgttag

SEQ ID NO: 188032 - DNA, 633 bp, synthetic construct
  misc_feature 1..633: note = Description of Artificial Sequence: Synthetic coding sequence
  source 1..633: mol_type = other DNA
atgttcttcacctgcggccccaacgaggccatggtggtgagcggcttttgtcggtccccaccagtgatggtggcgggaggacgggtctttgttctgccatgcattcagcagatccaaaggatctcccttaacactctgaccctcaacgttaagtcagaaaaagtgtacacacgccatggcgtgccaatttcggtcaccggaatcgctcaagtgaagatacaggggcagaacaaagagatgcttgctgctgcctgccaaatgttcctgggaaagaccgaagccgagatcgctcatattgcactggagaccctagagggacatcagagagccatcatggcacatatgaccgttgaagagatctataaagaccgtcagaaattttcagagcaggtgttcaaggtcgcttcatctgatctagtcaatatggggatcagcgtggtcagctatacactaaaagacattcacgacgatcaggattacctgcattccctggggaaagcacgcaccgctcaggtgcaaaaggacgcccgtataggagaggcagaggccaagcgcgacgcagggattagagaggcaaaagccaagcaggagaaggtgagcgcacaatacctttcagagatcgagatggcatag

SEQ ID NO: 188033 - DNA, 633 bp, synthetic construct
  misc_feature 1..633: note = Description of Artificial Sequence: Synthetic coding sequence
  source 1..633: mol_type = other DNA
atgttcttcacctgcggccccaacgaggccatggtggtgagcggcttttgtagaagcccaccggtcatggtggccgggggtcgtgtctttgtgctcccatgcattcaacagatacagcggataagcttgaacactctcaccttaaacgtgaaaagcgagaaggtatatacacggcatggcgtccctattagcgtgacaggaatcgcgcaagtaaagattcaggggcagaataaagagatgttggctgctgcctgtcagatgtttcttggtaagacagaggcggagatcgctcacatcgccctcgaaaccctggaaggacatcagagagccatcatggcccatatgaccgtggaggaaatctataaggaccgccagaaattctccgaacaggtgtttaaggtcgcgagtagtgatctggtgaacatggggatttcagtggtgagctacacattgaaagacattcacgatgatcaagattacttacacagcctgggcaaggccaggaccgcacaagtgcagaaagacgcccgcatcggggaggccgaggcgaaacgggatgccggcatacgcgaagccaaggccaagcaagagaaggtttccgctcagtatctgagtgaaattgaaatggcgtag

SEQ ID NO: 188034 - DNA, 759 bp, synthetic construct
  misc_feature 1..759: note = Description of Artificial Sequence: Synthetic coding sequence
  source 1..759: mol_type = other DNA
atgttcttcacctgcggccccaacgaggccatggtggtgagcggcttctgtagatcaccccctgtgatggtggccggtgggcgtgttttcgtgctgccctgtatacagcagatccaacggatatcgctgaatacccttacgctgaacgtgaagtcagaaaaagtttatactcgacacggcgtgcctattagtgtcactggcattgcccaggttaaaatccaggggcagaataaggagatgcttgccgccgcctgtcagatgtttctggggaagactgaagccgaaatagctcacatagccttggagaccctggaaggccatcagcgcgctattatggctcacatgacagtggaagaaatctacaaagatagacagaaattctccgagcaagtgtttaaggtcgccagctccgatcttgttaatatgggcatcagcgtggtgagctatacgctgaaagacatccacgatgaccaagattacctccatagtctgggcaaggccaggacagcacaggtgcaaaaggacgcccgaatcggagaagccgaagcgaagcgggatgccggcatacgcgaggccaaggccaaacaggagaaggtttctgcacagtatctgtccgaaatcgagatggctaaggcccagcgcgactacgaactgaaaaaggccgcatacgacattgaagtcaacacacggcgcgcacaagccgatcttgcttatcagctgcaggtggccaagacaaagcaacaaattgaagagcagtag

SEQ ID NO: 188035 - DNA, 444 bp, synthetic construct
  misc_feature 1..444: note = Description of Artificial Sequence: Synthetic coding sequence
  source 1..444: mol_type = other DNA
atgcggccctggtggagccccgtgaagatccagggccagaacaaggagatgctcgccgctgcctgccagatgttcctcggaaaaactgaggccgaaatcgcccacatcgctctggagaccctggaagggcaccagcgggcaattatggctcatatgactgtggaggaaatatacaaagacagacagaagttctccgaacaagtgttcaaagtggccagctctgacttggttaatatgggaataagcgtggttagctatactctgaaagatatacatgacgatcaggactacttgcattccctagggaaagctaggacagcccaggtgcaaaaggatgcccggataggcgaggctgaggctaagcgggacgccggcattagagaggcgaaagccaaacaggaaaaggtgagcgcccagtatctgtctgaaattgaaatggcgtag

SEQ ID NO: 188036 - DNA, 549 bp, synthetic construct
  misc_feature 1..549: note = Description of Artificial Sequence: Synthetic coding sequence
  source 1..549: mol_type = other DNA
gtgaagatccagggccagaacaaggagatgctggccgccgcctgccagatgtttctgggaaagaccgaggctgaaatcgcacatattgctctggaaaccctggaaggccaccagagggcaatcatggcacacatgactgtggaagaaatatacaaggaccggcagaagttttcagagcaggtttttaaggtggccagttcagacctcgtgaacatggggataagcgtcgtgtcctacaccctgaaggacattcatgatgatcaagactatctgcacagcctgggcaaggcccgcactgcccaggtacagaaggacgctcggatcggagaagcagaggcaaaaagggatgcaggaattagagaagcaaaggccaaacaggaaaaagtcagcgcccaatatctgtccgaaattgagatggccaaagcgcaaagagactatgagctgaagaaggcggcctacgatatcgaggttaacacgaggagggcccaggcagaccttgcttaccagctgcaagtcgccaagacaaaacaacagatcgaagaacagtag

SEQ ID NO: 188037 - DNA, 348 bp, synthetic construct
  misc_feature 1..348: note = Description of Artificial Sequence: Synthetic coding sequence
  source 1..348: mol_type = other DNA
gtgaagatccagggccagaacaaggagatgctggccgccgcctgccagatgtttctggggaagacagaggccgagatcgcccatattgccctcgaaacgctcgagggacatcaacgagctattatggcccatatgaccgtcgaagaaatatacaaagatcgacagaagttttcagaacaggtcttcaaggtggcaagcagcgatctagtgaatatgggcatctccgtagtttcgtacaccctgaaagacattcacgatgaccaggattacctacatagtctgggcaaagcacgcaccgcacaggttcagaaagatgccagaattggggaggctgaagctaagaggtag

SEQ ID NO: 188038 - DNA, 708 bp, synthetic construct
  misc_feature 1..708: note = Description of Artificial Sequence: Synthetic coding sequence
  source 1..708: mol_type = other DNA
atgttcttcacctgcggccccaacgaggccatggtggtgagcggcttttgtcgaagccccccagtgatggtggctggtggacgcgtgttcgtccttccttgtatccagcagattcaacggatctcactgaacactctgaccctgaatgtgaaatctgagaaagtgtacacacgtcacggagtaccgattagcgtgacaggtatcgcccaggtgaagatccagggacaaaataaggaaatgctggccgcggcctgtcaaatgtttttaggcaagaccgaagccgagatcgcacatattgctctggagactctggaaggccatcagcgagctatcatggcccatatgaccgtagaggagatttacaaggataggcagaagttctccgagcaggtgtttaaggtagcgagcagcgaccttgttaacatgggtatatcagtggtgtcttacacgcttaaagacatccatgatgaccaagattatctgcactccttggggaaggcacggacagcgcaggtgcagaaagatgccaggattggagaagccgaggcgaaaagagatgcaggtatcagggaggccaaagcaaaacaagaaaaagtgtccgcgcagtatctgagtgagatcgagatggcaaaggcccagagggactacgagctgaagaaggctgcttacgacatcgaggttaacactcgacgggctcaggcggattag

SEQ ID NO: 188039 - DNA, 1284 bp, synthetic construct
  misc_feature 1..1284: note = Description of Artificial Sequence: Synthetic coding sequence
  source 1..1284: mol_type = other DNA
atgttcttcacctgcggccccaacgaggccatggtggtgagcggcttttgtaggtcaccacctgtgatggtagctggcggacgggtcttcgttctcccgtgcatacagcagattcagagaatctctctgaacaccttaacgttaaacgtcaagagcgaaaaagtatacacccggcatggcgtgcctatatctgtaactgggatcgcgcaagtcaaaatccaggggcagaataaagagatgcttgccgccgcttgccaaatgttcctcgggaaaaccgaagctgaaatcgcccatattgctcttgagacactcgaaggacatcagcgcgccataatggcgcatatgactgtcgaggaaatttacaaggaccggcagaaatttagcgaacaggtgtttaaggtggccagtagtgacctcgtgaacatgggtataagtgtggtgagctatactctcaaagatatccacgatgatcaagactacctccattccctggggaaagcaagaaccgctcaggtgcagaaggacgcacgcattggcgaggctgaggcgaagcgagacgcaggcatcagagaggcaaaggccaagcaggaaaaagtctctgctcagtatctgagcgagatcgagatggccaaagcacaaagggattacgagcttaaaaaagcagcgtatgacatagaagtcaatacccgccgggcccaggcagaccttgcctaccagttacaggtagctaagacaaagcagcaaattgaagaacaaagggtgcaggttcaggtcgtggagcgggctcaacaggttgcggtgcaggaacaggagattgctagaagggaaaaggagctggaagcacgcgtgcggaagccagccgaggctgagagatataagttggagagactggccgaagctgaaaaatctcagcttatcatgcaggctgaagccgaagccgcctcagtccgcatgcgtggggaggctgaggctttcgcgatcggcgcaagggctcgggccgaagccgaacagatggcaaagaaggctgaggccttccaactgtaccaggaggctgcccagctggatatgctgcttgagaagctcccccaggtggcggaggagatctcaggtcctttaacgagcgccaataagatcaccctcgtgagttccggaagcggcacaatgggggcagcaaaagttactggtgaagtgctggacatcctgactcgactgccagagtctgtagagaggttaaccggggtgtcaatttcccaggtgaaccacaagccactgcgaacggcttag

SEQ ID NO: 188040 - DNA, 498 bp, synthetic construct
  misc_feature 1..498: note = Description of Artificial Sequence: Synthetic coding sequence
  source 1..498: mol_type = other DNA
gtgaagatccagggccagaacaaggagatgctggccgccgcctgccaaatgtttttgggcaagaccgaggcggaaatcgcccatatcgctctagagacgctggaaggccaccagcgagcaatcatggcacacatgaccgtggaggagatttacaaggaccgccaaaaattttcagaacaggtattcaaagttgctagtagcgatctggtgaatatgggcatctccgtcgtctcttacactctgaaagacatccatgacgatcaagattatctgcactccttaggcaaggctaggaccgcacaggtgcagaaagatgcccgaattggcgaggccgaagcaaagcgggacgcaggaattcgggaggccaaagccaagcaagagaaggtgtccgcacaatacctctccgagatagagatggccaaagctcagcgcgactatgagttgaagaaagcggcctatgatatcgaagtgaacaccaggagggctcaagccgactag

SEQ ID NO: 188041 - DNA, 438 bp, synthetic construct
  misc_feature 1..438: note = Description of Artificial Sequence: Synthetic coding sequence
  source 1..438: mol_type = other DNA
atgggcgtggagggcaccggccggggcggctgccggctgggcggccccgacggtaagggcaagggctgggccccagtcgacgccacggcaaggctgccccacccacagcggctcagcctacccctcctgcagctccagcctgaaccgtgtttctctctggtggcccaaatgcgtccttggtggtctccagattacctgcactccctcgggaaagcaaggacagctcaggttcagaaagatgcccggatcggtgaggcagaggccaaaagggatgccggaattcgtgaggccaaagcgaagcaagagaaggtcagcgctcagtatctgtctgagatagaaatggcaaaggcgcagcgtgattacgaactgaagaaagccgcctacgatatcgaggtgaacactcggagggctcaggccgacctggcatatcaattgtag

SEQ ID NO: 188042 - DNA, 759 bp, synthetic construct
  misc_feature 1..759: note = Description of Artificial Sequence: Synthetic coding sequence
  source 1..759: mol_type = other DNA
atgttcttcacctgcggccccaacgaggccatggtggtgagcggcttctgcaggagtccaccagtgatggtggccggagggagagtctttgtcttgccgtgcatacagcaaatccagcgcatcagcctcaacactctgaccctgaacgtcaaatcagagaaagtatacacacgccatggggtgcctataagcgtgacaggcattgcccaggtaaaaatccaaggacagaacaaagaaatgctggctgccgcctgtcagatgtttctgggcaaaaccgaagctgaaatcgcgcacatagccctcgagaccctggagggccaccagcgcgccataatggcgcatatgaccgtagaggagatttataaagaccggcagaagttctctgagcaggtgtttaaagtagccagcagcgatctcgttaatatgggcatatccgtggtcagctatacactcaaggacatacatgacgatcaggattatctacactctttgggtaaggccaggacggcgcaggttcaaaaggatgcgagaataggcgaggccgaagctaagagagatgctggcattagggaggccaaggccaaacaagagaaggtgtccgcgcagtatctcagtgagattgaaatggcgaaggctcagcgagattatgagttgaagaaggccgcttatgacatcgaagtcaatacccgacgcgcacaggcggatctggcttaccagttacaggtcgccaagacaaaacagcagattgaagagcagtag

SEQ ID NO: 188043 - DNA, 759 bp, synthetic construct
  misc_feature 1..759: note = Description of Artificial Sequence: Synthetic coding sequence
  source 1..759: mol_type = other DNA
atgttcttcacctgcggccccaacgaggccatggtggtgagcggcttctgtcgaagtcccccagtgatggtcgcggggggccgcgtgttcgtactgccctgcatccagcagattcaaagaatcagcttgaacacactgacactgaatgtaaaaagcgagaaagtatacacccgacatggcgtaccaatcagcgtgaccgggatcgcacaagtgaaaattcagggccagaacaaggaaatgctcgctgccgcttgtcaaatgttcctaggaaagacagaagctgagatagctcacatcgcgctcgaaactctggaggggcaccaaagagctattatggctcacatgacagtggaggagatttataaggaccgacagaagtttagcgagcaggtcttcaaggtggccagtagtgacttggtgaatatgggcatatccgtggtctcatatactctgaaggacattcacgacgaccaagactacctgcacagtctggggaaagccaggaccgcccaggtccagaaagatgctcgaataggcgaggcagaggctaaaagggacgctgggattcgcgaggctaaggctaagcaagaaaaagtctccgcacagtacctgtccgagatcgagatggccaaggcccagagagactatgaacttaagaaggcagcatacgacattgaagtgaacacccgccgggctcaggctgatctggcctatcagctacaggttgcaaagacaaagcaacagatcgaagaacagtag

SEQ ID NO: 188044 - DNA, 249 bp, synthetic construct
  misc_feature 1..249: note = Description of Artificial Sequence: Synthetic coding sequence
  source 1..249: mol_type = other DNA
gactacctgcacagcctgggcaaggcccggaccgcccaggtgcagaaggatgctcggataggtgaggccgaggcaaaacgtgacgcaggcataagggaagcgaaggcaaaacaggagaaagtctcggctcaatacctctccgaaatcgagatggcaaaagcccaaagagattacgaactcaaaaaggccgcttatgacatcgaggtgaatacaagacgtgcccaggccgatctcgcataccaactgtag

SEQ ID NO: 188045 - DNA, 558 bp, synthetic construct
  misc_feature 1..558: note = Description of Artificial Sequence: Synthetic coding sequence
  source 1..558: mol_type = other DNA
atgttcttcacctgcggccccaacgaggccatggtggtgagcggcttctgtcggagtcccccagtcatggttgcgggaggccgtgttttcgtgctgccttgtatccagcaaattcagcggattagccttaacacgttgacattgaatgtgaaaagcgagaaagtgtatacacgccacggggtgcccattagcgttactggtatcgcccaggtgaagattcaggggcagaacaaggagatgctggcagccgcctgccagatgtttctagggaaaaccgaagctgagatcgcacacatcgctttagaaacactggaaggccaccagcgggcaataatggcccacatgaccgtcgaggagatctataaggatagacagaagttctctgaacaggtcttcaaagtagcctcctcagacttggtgaacatgggtatttccgtcgtttcatacacccttaaggatattcacgatgaccaggattatcttcactccctcggcaaggctcgaacagctcaggtgcagaaggacgccaggatcggcgaagcagaagccaagaggtag

SEQ ID NO: 188046 - DNA, 759 bp, synthetic construct
  misc_feature 1..759: note = Description of Artificial Sequence: Synthetic coding sequence
  source 1..759: mol_type = other DNA
atgttcttcacctgcggccccaacgaggccatggtggtgagcggcttctgccggagtccacctgtaatggtggccggagggcgcgtgtttgtgctgccttgtattcaacagattcagaggatatcactgaacaccctcactcttaacgtcaaatctgagaaggtgtatactaggcatggcgtgccgatctcagtcactgggatagcccaggtgaaaattcaagggcagaacaaggaaatgctggcggctgcttgtcagatgttcctcggcaagaccgaggccgagatcgcacacattgccctggagacactcgaaggccaccagcgggctattatggcacacatgacggtggaggagatatataaagacaggcaaaaattcagcgagcaggtgttcaaggtggcttccagtgacctggttaacatggggatttcagtagtttcctatacattaaaggacattcatgatgatcaagattatttgcactccctgggcaaagcgagaactgcccaagtacagaaggatgcccggattggtgaagccgaggctaaaagagatgcgggcatcagggaggcaaaagcgaagcaagagaaggtgtcagcccaatatctgtctgagattgagatggccaaggcacaacgggattatgagctcaaaaaagcagcgtacgatattgaggtcaatacaagacgggcccaggccgacctcgcctaccagctgcaggtcgccaaaacaaaacagcaaatcgaagaacagtag

SEQ ID NO: 188047 - DNA, 558 bp, synthetic construct
  misc_feature 1..558: note = Description of Artificial Sequence: Synthetic coding sequence
  source 1..558: mol_type = other DNA
atgttcttcacctgcggccccaacgaggccatggtggtgagcggcttctgccgttctccacctgtgatggtcgcgggagggcgcgtatttgttctgccatgcatccaacagattcaacgcatctcgctcaatactctgactctgaatgtcaagagcgaaaaggtgtacacgagacatggcgtaccaatatctgtcacgggcatcgcccaggtgaagatccagggccagaacaaggagatgttggccgccgcgtgtcaaatgtttctgggcaaaaccgaggccgagatcgctcatatcgccctcgaaaccctcgaaggccaccagagagccatcatggcacacatgactgttgaagaaatttacaaagacagacaaaaattctccgaacaggtattcaaagtggcctcatcggatcttgtgaacatgggaatcagcgtggtctcctatacactgaaagatatccatgacgaccaggactatctgcatagtttgggaaaagctaggacagcacaggttcagaaggatgcaagaataggggaggctgaagccaaaagatag

SEQ ID NO: 188048 - DNA, 717 bp, synthetic construct
  misc_feature 1..717: note = Description of Artificial Sequence: Synthetic coding sequence
  source 1..717: mol_type = other DNA
atgcggccctggtggagccccgtgaagatccagggccagaacaaggaaatgctggcagctgcatgtcaaatgtttctggggaagactgaggccgaaatcgcccatatcgccttagagactttggagggacaccagcgcgccattatggcgcacatgacagtagaagagatctacaaagatcgacagaagttttctgagcaggtattcaaggtggcatcgagcgatctggtgaacatgggcattagcgtggtgtcttacactctgaaagatattcatgacgaccaggactatcttcacagccttggcaaagctaggactgctcaagttcagaaagacgccagaataggggaagcggaagccaaacgagatgcaggcattagggaggcgaaggcgaagcaagaaaaggtttctgctcagtacctgtcagaaatcgaaatggccaaagctcagcgcgactatgagctgaagaaagccgcctatgacatcgaagtgaataccagaagagcccaggccgatctggcttaccagcttcaggtggccaaaaccaaacagcagatagaggaacaaagggtgcaagtgcaagtggtggaacgcgcacagcaggtggcggtgcaagagcaggagatcgctcgtagggaaaaagagttagaagctcgcgtccggaagcccgccgaagccgagagatataagctggaaaggttggcggaggctgagtag

SEQ ID NO: 188049 - DNA, 1284 bp, synthetic construct
  misc_feature 1..1284: note = Description of Artificial Sequence: Synthetic coding sequence
  source 1..1284: mol_type = other DNA
atgttcttcacctgcggccccaacgaggccatggtggtgagcggcttttgccggtctcctcccgtgatggtggctggagggcgagtctttgtcttaccttgcatacaacaaatccagaggatctccctgaacacactgacactgaatgtgaaaagtgaaaaagtctatacccggcatggcgtgcccatctccgttacaggtatcgctcaagtaaagatccagggccagaacaaagaaatgttggcagctgcctgtcagatgtttctgggcaagaccgaagctgagattgcccatatcgctctagagaccttagaaggtcatcaacgcgccattatggctcatatgacggtggaggagatttataaggaccggcagaagtttagcgagcaggtcttcaaggtcgcatcttccgatctagtaaacatggggatatctgtcgtctcgtacaccctgaaggatattcacgatgaccaagattacctgcatagcttgggcaaagctcgcactgcgcaagttcaaaaagatgcaagaataggcgaggctgaagccaagcgggacgccggcataagggaagctaaagccaaacaggaaaaagtatctgcccagtatttatccgagattgagatggccaaggcccagcgcgactacgaattgaaaaaggccgcatacgacatcgaagtgaatacccgtagggcgcaggctgacctggcgtaccagctgcaggtggccaagactaaacaacagattgaagagcaacgggtccaagttcaggtcgttgagagagcccagcaagtggccgtacaggagcaggagatagccaggcgagaaaaggaactggaagcaagggttcggaagcccgctgaagccgagcgatacaaactagagaggttggctgaagcagaaaagagtcagttaatcatgcaggccgaagccgaagcagcatcagtgcgtatgagaggcgaagctgaggcttttgccataggggctagggctcgggctgaagccgaacagatggcaaagaaggccgaggcgtttcagctgtaccaggaggccgcacagctggatatgctgctggaaaaactcccccaggtggcggaggagatttccggtccacttacctccgctaataaaatcactttggtatccagcggcagcggaacaatgggcgccgccaaggtgacaggggaagtactggacattctgaccaggctaccagagtctgttgaacgcctgactggggttagcatctcacaggtaaatcacaagccacttaggacggcctag

SEQ ID NO: 188050 - DNA, 579 bp, synthetic construct
  misc_feature 1..579: note = Description of Artificial Sequence: Synthetic coding sequence
  source 1..579: mol_type = other DNA
atgttcttcacctgcggccccaacgaggccatggtggtgagcggcttctgtaggtcccccccagtcatggtagccgggggtcgggttttcgtgctgccgtgtatccagcagattcaaaggatttctctgaatacccttaccctcaatgtaaaatctgagaaggtcaagatccagggccagaataaagagatgctagctgcagcctgccaaatgtttttgggcaagactgaagctgagattgctcatatcgcattggaaaccctcgagggccatcagcgggccattatggcacacatgaccgtggaagagatctacaaggatcgtcagaaattttctgaacaggtgttcaaggtggcatctagtgacctggtgaatatgggtatctccgttgttagctataccctcaaggatatacatgatgatcaggattatttgcactccttggggaaggccaggactgctcaggtccagaaagacgcccgcataggagaggccgaggctaaaagggatgccggcattagggaggccaaggctaaacaggagaaagtaagtgcccagtacctgtccgagatcgagtag

SEQ ID NO: 188051 - DNA, 708 bp, synthetic construct
  misc_feature 1..708: note = Description of Artificial Sequence: Synthetic coding sequence
  source 1..708: mol_type = other DNA
atgttcttcacctgcggccccaacgaggccatggtggtgagcggcttctgccgcagcccccccgtcatggtggctggcgggagagtcttcgtactgccttgcatccaacagatccagcgcatcagcttgaataccttaaccctaaatgttaaaagcgaaaaagtgtacaccagacacggcgtgccaattagcgtgactggtatcgctcaagtcaaaatccagggtcagaacaaggaaatgttagcggcggcatgtcagatgtttctcgggaagaccgaggctgagatagcccacatagcccttgagaccttggaggggcaccaaagagcaatcatggctcacatgacagtggaggagatctataaagatcgtcagaagttttccgagcaagtgtttaaggtggcgtcctcggatctggtgaatatgggaatatcagttgtgagttacaccttgaaggacatccatgacgaccaagactatttacactccctcggaaaagctcgcaccgctcaggtgcagaaggatgcgcggattggagaggccgaagcgaagagggatgccggcattagagaggctaaggccaaacaagagaaggtgtctgcccagtatctctccgagatcgagatggcaaaagctcaacgggactacgaattgaaaaaagccgcttacgacatcgaggtgaatacaaggcgggctcaggccgattag

SEQ ID NO: 188052 - DNA, 183 bp, synthetic construct
  misc_feature 1..183: note = Description of Artificial Sequence: Synthetic coding sequence
  source 1..183: mol_type = other DNA
gtggccaagaccaagcagcagatcgaggagcagcgggtgcaggtgcaagtagtggagcgcgctcagcaagtggccgtgcaggagcaagaaatcgctagaagggagaaagagctggaagcccgggtaagaaaacccgctgaagccgagcgctacaaactggaacggcttgcagaagcagagtag

SEQ ID NO: 188053 - DNA, 717 bp, synthetic construct
  misc_feature 1..717: note = Description of Artificial Sequence: Synthetic coding sequence
  source 1..717: mol_type = other DNA
atgcggccctggtggagccccgtgaagatccagggccagaacaaggagatgctggccgcagcctgtcagatgttccttgggaagaccgaggctgagatcgcgcacattgccttggagacgctcgagggacaccagcgagccatcatggcccacatgactgtggaagaaatctacaaagaccgacagaaattcagcgaacaggtgttcaaagtggcctccagtgatcttgtgaatatgggcatctccgtagtgtcctacaccctcaaggacattcacgatgaccaggattacctccattctttgggaaaggcccgaacggcacaggtgcaaaaggacgctcggattggcgaggccgaggctaagagggatgccggtatccgtgaggccaaggcaaagcaagagaaagtgtcagcgcaatatctctctgagatcgaaatggcaaaagcccaacgggactatgaactcaagaaagctgcatacgacatcgaggtgaacactagaagagcccaagccgacctggcttatcagctgcaggtggccaagaccaagcagcagattgaagagcagcgggttcaggtgcaggtcgtggaacgtgctcagcaagtcgccgtgcaggagcaagaaattgctagacgcgagaaggagctcgaggcccgcgtccggaaaccagctgaggccgagcgctacaagctcgagagactcgcagaggccgaatag

SEQ ID NO: 188054 - DNA, 708 bp, synthetic construct
  misc_feature 1..708: note = Description of Artificial Sequence: Synthetic coding sequence
  source 1..708: mol_type = other DNA
atgttcttcacctgcggccccaacgaggccatggtggtgagcggcttttgccgtagccctcccgtcatggtggcgggcgggagagtgttcgttcttccttgcatccagcaaatacagcgcatctcccttaacacactgaccctgaacgtgaagtccgaaaaggtgtacacacggcatggtgtgcccatctccgtgactggaatcgcccaggtcaaaatccaaggccagaataaagagatgttggcggccgcctgtcaaatgttcttagggaagactgaggcagagattgctcatatcgccttagagacattagaggggcaccagagagcgattatggcccacatgaccgtcgaggaaatctataaggacaggcagaaattctcagagcaggtgttcaaggtggccagctctgacttggtcaatatggggattagtgtcgtgtcttacactctcaaagatatccacgatgaccaggactatctgcatagcttggggaaagccagaaccgcccaggtgcagaaagacgccagaataggagaggccgaagccaagcgcgacgcgggcataagggaggccaaggccaagcaggaaaaagtgtctgctcaatacctgtctgagatagaaatggctaaggcacaaagagattacgagctgaagaaggccgcctacgatatagaagtgaacacgcgtcgggcgcaggcagattag

SEQ ID NO: 188055 - DNA, 1074 bp, synthetic construct
  misc_feature 1..1074: note = Description of Artificial Sequence: Synthetic coding sequence
  source 1..1074: mol_type = other DNA
gtgaagatccagggccagaacaaggagatgctggccgccgcctgccaaatgtttctcggaaagacagaggctgagatcgcacacatcgccttggagacgctggaaggccatcagcgagcaataatggcccatatgacggtggaggagatttataaagaccggcagaagttttcggagcaagtattcaaggtggctagttcagacctggttaatatggggattagtgttgtttcctatacattaaaggatatccacgatgaccaggactacttgcacagcttgggcaaagccaggactgctcaggtgcagaaagatgcccggattggagaggcagaagctaaacgggatgcaggcatcagggaggctaaggcaaagcaggaaaaggtgagcgctcagtatcttagtgagatcgagatggccaaggcccaacgagattatgagttgaagaaagctgcatatgatatcgaggtcaatactaggcgagcacaagcagatctcgcctaccaactccaagtggccaaaaccaagcagcagatcgaggaacagagagtgcaggtgcaagttgtcgagcgtgctcagcaggtggccgtgcaggaacaagagatcgcgagacgcgaaaaggagttagaggcccgcgttagaaaacctgccgaagccgagcggtataaactcgaacgcctggcagaggcggaaaaaagtcagctgattatgcaggcagaagccgaggcagcatctgtgaggatgagaggtgaggccgaggcctttgccattggggccagagcccgggccgaagccgaacaaatggccaagaaggccgaggcctttcaattgtaccaggaagctgcccaacttgacatgctgcttgaaaagctgccacaggtggccgaggaaatctcagggccacttacgagtgctaacaaaataaccctggtgagctcgggatccgggaccatgggtgccgcaaaggtgaccggcgaagttctggatatcctcacgcgtctgccagaatctgtcgagaggttaacaggggtcagcatctctcaggtgaaccacaagcccctgcggaccgcttag

SEQ ID NO: 188056 - DNA, 36 bp, synthetic construct; identical to SEQ ID NO: 81862
  misc_feature 1..36: note = Description of Artificial Sequence: Synthetic coding sequence
  source 1..36: mol_type = other DNA

SEQ ID NO: 188057 - DNA, 759 bp, synthetic construct
  misc_feature 1..759: note = Description of Artificial Sequence: Synthetic coding sequence
  source 1..759: mol_type = other DNA
atgttcttcacctgcggccccaacgaggccatggtggtgagcggcttctgccggagtccacctgtgatggtggccggagggcgggtgtttgtgctgccgtgcattcagcagatacagaggatatccctgaacactctgactctgaatgtgaagtctgagaaggtttacaccagacacggagtccccatctccgtcactggcatagcccaggtaaagatacagggccaaaataaggagatgctggccgctgcatgccagatgttcctgggaaagactgaggccgaaatcgcccacattgccctcgagacactggagggacatcagagggctatcatggcccatatgaccgtggaggaaatctacaaggaccgccaaaaattttcggagcaggtcttcaaagtcgcttccagcgacctagtgaacatggggatctccgtggtttcttacactttaaaggatattcacgacgaccaagattaccttcactccctcgggaaggctcgcacggcccaggtgcagaaggacgctcggatcggcgaggcggaggccaagagagatgccggtattcgagaagcaaaggcgaaacaagagaaggtgtccgcgcagtacttgtccgaaatagagatggccaaggcacagagagactacgagttgaaaaaagctgcttacgatatagaagtaaacactcggcgggcacaagccgacttggcataccagctgcaagtcgcaaagactaagcagcagatagaagaacaatag

SEQ ID NO: 188058 - DNA, 708 bp, synthetic construct
  misc_feature 1..708: note = Description of Artificial Sequence: Synthetic coding sequence
  source 1..708: mol_type = other DNA
atgttcttcacctgcggccccaacgaggccatggtggtgagcggcttctgccgcagcccaccagtaatggtcgctggcggcagagtttttgtgctgccttgcattcagcagatacaaagaattagtttgaacacactgacgctgaatgttaagtctgagaaggtgtatacacgccacggcgtgccaatcagcgtcactggaattgcccaggtgaagatccagggccaaaacaaggagatgctggctgcggcctgccagatgtttctcggtaaaacagaagccgagatagctcatattgccctcgaaacgctcgagggccaccaaagggccatcatggcacacatgaccgtggaggagatctacaaagaccgccagaagttttcagagcaggtgtttaaggtggcctctagtgacctggtgaatatgggcatttccgtggtatcgtatacgcttaaggacatccatgacgatcaagactacctccacagtctaggcaaggctcgaactgcccaggtacagaaggacgcacgcatcggtgaggcagaggccaagcgcgacgccggaatccgagaagcaaaagccaagcaggaaaaagtctccgcccaatacctgtccgagatagaaatggccaaagcccagcgcgattacgaactgaaaaaagccgcctacgatattgaagtcaatacccgccgcgcccaagccgattag

SEQ ID NO: 188059 - DNA, 558 bp, synthetic construct
  misc_feature 1..558: note = Description of Artificial Sequence: Synthetic coding sequence
  source 1..558: mol_type = other DNA
atgttcttcacctgcggccccaacgaggccatggtggtgagcggcttctgtcgctcgccccccgtgatggtcgccggaggacgagttttcgtgcttccttgtattcaacaaatccaacgtattagcttaaacacgctcactctgaatgtcaagtctgaaaaggtgtacacaagacatggcgttcccatatccgtgaccgggattgcccaagtcaaaattcagggacagaataaggaaatgttagccgccgcctgccagatgttccttggaaagacggaagctgagatcgctcacatcgctcttgaaaccctggaggggcaccagagagctatcatggctcacatgacagtcgaggaaatctataaggaccgacagaagttctctgaacaagtatttaaggttgcatctagcgatctggttaacatgggtatatccgtggtgagttacaccctcaaggatatacacgacgaccaggattatctgcactcacttgggaaagcaaggacagcccaggtccagaaggatgcccgaatcggtgaagccgaagccaagagatag

SEQ ID NO: 188060 - DNA, 438 bp, synthetic construct
  misc_feature 1..438: note = Description of Artificial Sequence: Synthetic coding sequence
  source 1..438: mol_type = other DNA
atgggcgtggagggcaccggccggggcggctgccggctgggcggccctgacggcaagggcaagggatgggcgccagtggacgccacggcgcgcctgccccatccacagaggttgagcttgcccctcctacagctgcaaccagagccatgcttctcactggtcgctcagatgaggccttggtggtcccccgactatctgcattccctcggcaaggctcggacagctcaagttcaaaaggatgcaaggattggcgaggccgaggcgaagagggatgccggcatccgagaagcgaaagcaaaacaggaaaaagtttctgctcaatatttgagcgagatcgaaatggccaaggcccagcgcgactatgaactgaaaaaggccgcttacgacatcgaagtcaatactcggcgggcccaggcagatttggcatatcagctgtag

SEQ ID NO: 188061 - DNA, 717 bp, synthetic construct
  misc_feature 1..717: note = Description of Artificial Sequence: Synthetic coding sequence
  source 1..717: mol_type = other DNA
atgcggccctggtggagccccgtgaagatccagggccagaacaaggagatgctggctgcagcatgccaaatgttcctgggaaagacagaggctgagattgctcacatcgcattagagacacttgaaggtcatcagagggccatcatggctcacatgaccgtggaggaaatctacaaagaccggcaaaagttttccgaacaggttttcaaagtggcaagtagcgatctggtcaacatgggaataagtgtggtgagttataccctgaaagatatccacgatgatcaggactacctgcattctttggggaaagcaagaacagctcaggtacagaaagacgcccgtataggtgaggccgaagccaagcgggatgccggaatccgggaagccaaggcaaaacaggagaaagttagcgctcagtacctgagtgagatcgagatggctaaagcacagagggactacgaactcaagaaggctgcctacgatatcgaagtgaatacccggagggcccaggcagatcttgcttatcagcttcaggtcgcaaagactaagcagcagatcgaggagcagcgcgtacaggttcaagtcgtggagagagcacagcaggttgccgttcaggaacaggagatagctcgccgcgaaaaggagcttgaggcaagagtcagaaagccagcagaggccgagcggtataaactggaaaggttagccgaggccgagtag

SEQ ID NO: 188062 - DNA, 1140 bp, synthetic construct
  misc_feature 1..1140: note = Description of Artificial Sequence: Synthetic coding sequence
  source 1..1140: mol_type = other DNA
atgttcttcacctgcggccccaacgaggccatggtggtgagcggcttctgtaggagccctcccgttatggttgcaggcgggcgggttttcgtcttaccctgtatacagcagattcaacgcatctctcttaacacccttacactgaacgtgaaaagtgaaaaggtctacactcggcacggggtgcctatttcggtcaccggaattgcccaggagatttataaagatcgccagaaattcagtgaacaggtgtttaaggtagcctcatccgatctggtgaatatgggcatatcagtcgtcagttacaccctcaaggatattcacgacgatcaggattacctccactccctcggaaaagctcgcacagcacaggtgcagaaggacgcacgaataggtgaggctgaggctaaaagggacgccggcattagggaagctaaggccaagcaagaaaaagtttccgcccaatatttgagtgagatagaaatggccaaggcccagcgggactacgagttgaagaaagccgcttacgacattgaggttaataccagacgggcacaggcagacctggcctatcaactccaagtggcaaagacaaagcagcagattgaggaacagcgcgtgcaggttcaggtggtggaacgcgcccagcaggtagccgtgcaagaacaggaaatagctcgccgggagaaggaattggaggcgcgggttcgtaaacctgccgaagccgaaagatacaagctagagcggttggctgaagccgagaagagccagctgatcatgcaggccgaggcggaagctgcctcggtccgtatgagaggggaagccgaggcctttgctatcggagcaagggcccgcgcggaggcagagcaaatggctaagaaagctgaagcttttcagctgtaccaggaggctgcacagttggacatgctgcttgagaaactcccacaggtggctgaagaaatctccggccctttaaccagtgccaacaagataactctagtgtcgtccgggtcgggaactatgggagctgcaaaggtaaccggagaggtgctggacatcttgacgcgacttcctgaatcggtggagagactgacaggtgtctcaatatctcaggtcaaccataagcctctgaggaccgcctag

SEQ ID NO: 188063 - DNA, 558 bp, synthetic construct
  misc_feature 1..558: note = Description of Artificial Sequence: Synthetic coding sequence
  source 1..558: mol_type = other DNA
atgttcttcacctgcggccccaacgaggccatggtggtgagcggcttttgcaggagccctcctgtcatggtcgccggggggcgagtcttcgtcctgccctgcatccagcagatccagagaatctctctcaacaccttgaccttgaacgtgaagagcgagaaggtctatacacgccacggggtgccaatttctgtcacgggtattgcacaggtcaagattcaggggcagaataaagagatgttagctgcagcctgtcagatgtttctcggcaagaccgaagcagaaattgcccacatcgccttggagaccctggagggtcaccaaagagcgatcatggcccacatgaccgtcgaagaaatctacaaggatagacagaagttttcagagcaggtgttcaaagtagcatcctctgacctcgtaaatatgggcatttccgtcgtctcttacaccttgaaggacatccatgacgatcaggactaccttcacagcttagggaaggccagaacagctcaagtgcagaaagacgcacgcatcggtgaggcagaggcaaaacggtag

SEQ ID NO: 188064 - DNA, 696 bp, synthetic construct
  misc_feature 1..696: note = Description of Artificial Sequence: Synthetic coding sequence
  source 1..696: mol_type = other DNA
gtgaagatccagggccagaacaaggagatgctggccgccgcctgccagatgtttctgggcaaaaccgaagccgagatagcccatattgcactggaaacgcttgagggtcatcagagagcaattatggctcatatgaccgtcgaggaaatctataaagaccgccagaaattctctgaacaggtgtttaaggtggccagttcggatttagtgaacatggggatctccgtcgtgagctacaccctcaaggacatccacgatgaccaggactacctgcacagtctgggcaaggcgaggaccgctcaggtgcagaaggacgctcgtattggtgaggcagaggccaagcgcgatgcagggattagagaagctaaggcaaagcaggagaaagtgtcagcacaatatctgagtgagattgagatggcgaaggcacaacgcgactacgagcttaagaaagctgcatatgacattgaggtgaatactaggcgcgcccaggctgatttagcttatcagttgcaagtggccaaaacgaagcaacagatcgaggaacaacgcgttcaggtgcaggtggtggaacgcgcccaacaagttgcagttcaggagcaggaaatcgcaagaagagagaaagagctggaggctcgcgtccgcaagccagcagaagccgagaggtataagctggagcgcttagccgaggccgagtag

SEQ ID NO: 188065 - DNA, 633 bp, synthetic construct
  misc_feature 1..633: note = Description of Artificial Sequence: Synthetic coding sequence
  source 1..633: mol_type = other DNA
atgttcttcacctgcggccccaacgaggccatggtggtgagcggcttctgcagatctccgccagttatggtggcagggggacgggtcttcgttctgccttgcatccagcaaatacagcggatttccctcaataccctgacactgaacgtcaaaagtgagaaggtctataccagacacggcgtgcccatctcggttactggaatcgcccaggtgaagatccagggccaaaacaaagaaatgttagcggctgcatgtcagatgttcctgggaaagaccgaggcggagattgcccacatcgccctggaaacgcttgaaggccaccaacgtgcaatcatggcacacatgacagtggaggaaatttataaggacaggcagaagttctccgaacaggtttttaaggtagcttccagcgaccttgtgaatatgggcatttcggtagtctcctatacactgaaggacattcacgacgatcaggattacctgcattctctgggaaaggcaaggaccgcccaggtgcagaaagacgctcggatcggcgaagccgaggccaagagggatgcgggcattcgggaggcaaaagccaaacaggagaaagtgagcgctcagtacctctccgagattgagatggcttag

SEQ ID NO: 188066 - DNA, 579 bp, synthetic construct
  misc_feature 1..579: note = Description of Artificial Sequence: Synthetic coding sequence
  source 1..579: mol_type = other DNA
atgttcttcacctgcggccccaacgaggccatggtggtgagcggcttctgtcgcagtccacctgtgatggtggccggcggaagggtattcgttcttccttgcattcagcagattcaacgaattagcctcaatacgctcaccctcaacgtcaaaagcgaaaaggtgaaaatccaggggcaaaacaaagaaatgctcgctgccgcatgtcaaatgtttctcggcaaaacagaagccgagattgctcatatcgcgctcgaaaccttggaggggcaccaacgtgcaattatggcccatatgacagtggaggaaatttacaaggacagacagaagttctcagagcaggtcttcaaagtagcttcctctgatctcgttaatatgggtatttctgtggtatcttatacgcttaaggatatccacgatgatcaagattacctgcatagtctgggcaaagccaggaccgcccaggtacagaaagatgccaggatcggcgaggccgaggccaagcgggacgccggtatccgcgaagccaaagccaaacaggaaaaggtcagtgctcaatacctgtctgagatagaatag

SEQ ID NO: 188067 - DNA, 1140 bp, synthetic construct
  misc_feature 1..1140: note = Description of Artificial Sequence: Synthetic coding sequence
  source 1..1140: mol_type = other DNA
atgttcttcacctgcggccccaacgaggccatggtggtgagcggcttctgcagatcaccccccgtgatggtagccggaggtcgggtctttgttctcccatgtattcaacagatccaacgcatcagtctgaacacactcacgctgaacgtgaagtcagagaaagtgtacactagacatggcgtgccaatttccgttactggaatcgcccaggaaatatataaggaccgccagaaattctctgagcaagtcttcaaggtggcctcttctgatttagtgaatatggggatcagtgtcgtgtcatacacactcaaggatatccacgatgatcaggactatcttcattcactgggtaaagctcggacagcccaggtacagaaggatgcccgtattggcgaagccgaggccaagagagatgctggtatccgagaggctaaggcaaaacaggagaaggtgagcgcccagtacctatcagaaattgagatggcgaaagcccagcgggactacgagctgaagaaagccgcgtacgatattgaagttaatacacgacgtgctcaagccgatctggcttaccagctccaggttgccaagactaaacagcagattgaagaacagcgcgtccaagtccaggtggtggagcgcgcccagcaggtcgctgtccaggagcaagagattgcacgccgggagaaagagctagaagccagggtacgcaagcccgcagaggctgagcgttacaaactggaaaggctggcggaggccgaaaagtctcagctgatcatgcaggctgaggccgaggccgcttccgtgagaatgcggggcgaggcggaagccttcgccataggagccagagccagagccgaagcagaacagatggctaaaaaggctgaggcatttcagctatatcaggaagctgcccagctcgatatgctactggaaaaattgcctcaggtagccgaggaaatctcaggccctttgacgtccgccaacaagatcaccctcgtgtcctctggaagcgggactatgggcgccgctaaggtaacaggagaagtactcgatatattgaccaggctgcccgagagtgtggagcgtctcactggggtttccatctcccaagtgaatcacaaacctctgcgaacagcatag

SEQ ID NO: 188068 - DNA, 1140 bp, synthetic construct
  misc_feature 1..1140: note = Description of Artificial Sequence: Synthetic coding sequence
  source 1..1140: mol_type = other DNA
atgttcttcacctgcggccccaacgaggccatggtggtgagcggcttttgtaggagccctcccgtcatggtcgccggtgggagggtatttgtgctgccctgcattcagcagatccagagaatctccctgaatactttgaccctgaatgttaaaagcgagaaagtgtatactcgccacggggtgccgatctccgtcacaggtatcgctcaggaaatttataaggatcgacaaaagttctcagaacaagtgttcaaagttgctagtagcgacctggtcaatatgggcataagcgtggttagttacacgttaaaggacattcatgatgatcaggattacctccactcccttgggaaagccaggaccgcacaggtccagaaggatgcgaggattggcgaagcggaggcaaaaagagatgctggcataagagaggctaaggccaaacaggagaaggtgagcgcacaatacctctcagaaattgagatggcaaaagcacaaagagattatgagttaaagaaggcagcatatgacattgaggttaatacacgccgagcgcaggcggatttagcttaccaacttcaggtggctaagactaagcagcagatagaagagcagagggtgcaagttcaggtggtcgagagggcgcaacaggtggcagtgcaggagcaggaaatcgcacggagagaaaaggaactcgaagcaagggtgagaaagcccgccgaggcagagcgatacaagttggaacgactcgccgaggccgaaaagtcccagctgattatgcaggcggaggccgaagctgcttccgttcggatgcgaggagaagccgaagcattcgccattggggccagagcacgagccgaggctgagcagatggcgaagaaagcagaagcatttcaattgtaccaggaagccgctcaattggacatgctcctagagaagcttccacaggtggccgaagaaatatcaggtcccctgacatctgctaataaaattacgttggtgtcatccggtagtggaaccatgggggctgccaaagtgactggagaggtgctggatatcctgaccagattaccagaaagcgtcgagcgactgaccggcgtttccatcagccaggtgaatcacaagcccctgcgaaccgcctag

SEQ ID NO: 188069 - DNA, 1140 bp, synthetic construct
  misc_feature 1..1140: note = Description of Artificial Sequence: Synthetic coding sequence
  source 1..1140: mol_type = other DNA
atgttcttcacctgcggccccaacgaggccatggtggtgagcggcttttgcaggtcaccgcctgtcatggtcgctggagggcgagtgttcgtgcttccctgcatccagcagatacaaagaatttcattgaacacactaacactgaatgtgaagtctgaaaaggtgtacacgaggcacggcgtgcccatctctgtgaccgggattgcccaggaaatctacaaggaccggcagaagttctccgagcaggttttcaaggtggctagctctgaccttgttaatatgggaatatctgttgtgtcttataccttgaaggacattcacgatgaccaggattatttacattcgctgggaaaggctcggacagcccaggtacagaaggacgcccgcatcggcgaggctgaggctaaaagggacgccggtattagggaggctaaggcaaagcaggaaaaagtatctgcgcaatacctgtctgaaatagaaatggctaaggctcaacgcgactacgaactgaagaaggccgcttatgatattgaagtgaacacccgaagggcccaggccgatctggcatatcaactgcaggtagcaaaaacgaagcagcagattgaagaacagcgagtgcaggtgcaggtagtggaaagagcccagcaggttgcagttcaagagcaggagatcgcaagaagggagaaagaactggaagctcgtgttcgcaaacctgcggaggctgagagatacaagctcgaaagactagctgaggctgaaaaaagtcaactgatcatgcaggctgaggccgaggctgcaagtgttcgcatgcgcggcgaggccgaggcttttgcaatcggagctagggcgcgcgcagaagctgagcagatggctaaaaaggccgaggcctttcagctctaccaggaggctgcccagctggacatgttattagaaaagcttccacaggtcgcagaggagatatcaggaccactcacttccgccaataagatcaccctggtgagcagtggctccggcaccatgggagcggcaaaggttaccggtgaggtcctggacatattgacccgcctgcccgagtctgtggaacgcctgactggagtcagtatctcacaagtgaaccataagcctcttcgtaccgcctag

SEQ ID NO: 188070 - DNA, 1140 bp, synthetic construct
  misc_feature 1..1140: note = Description of Artificial Sequence: Synthetic coding sequence
  source 1..1140: mol_type = other DNA
atgttcttcacctgcggccccaacgaggccatggtggtgagcggcttctgccgttcacctccggtcatggtggccggcggccgagtcttcgtgctgccatgtattcagcagattcagaggatcagcctgaacaccttgactctgaacgtgaaatccgaaaaggtgtataccagacacggggttccaatcagcgtgaccggcattgctcaagagatctacaaggatcggcaaaaattctctgagcaggtgtttaaagtggcaagctccgacctcgtgaatatggggatcagcgtcgtgagctacaccctgaaagatatccacgacgaccaggattatcttcacagtctggggaaagccagaaccgcccaggtgcagaaggacgctagaatcggtgaagcagaagcgaagcgggacgcaggcatcagagaggctaaggccaaacaggagaaagtttctgcacagtatctgtctgagatcgagatggctaaagcccagcgcgattacgaactgaagaaagcggcctatgatatcgaagttaatacacgacgtgcccaggccgacctcgcttaccagctccaggtggctaagacgaaacaacaaatcgaggagcagagggtgcaagtgcaggtggtggaaagggcacagcaggttgccgtgcaggagcaggaaatcgcaaggagagaaaaggagctggaagcaagggtgagaaagcccgccgaagcagagcggtacaaactggaacgcctggccgaggccgagaagtcgcagctgattatgcaggctgaagctgaggccgcctctgtgcggatgagaggagaggcagaggccttcgccataggagcacgagcaagagccgaggctgaacagatggccaaaaaagccgaagccttccaactttaccaggaggcggcacaattggacatgttgcttgagaagctgccacaagtggccgaggagatctctgggcctctcactagcgccaacaaaattacactcgtgtccagtgggagcgggacaatgggcgcggctaaggtgaccggggaggtgctagacattctaacacggttgccagagagcgtggaaagactgaccggcgtcagtattagtcaggtgaatcacaaacctctgaggacagcctag

SEQ ID NO: 188071 - DNA, 861 bp, synthetic construct
  misc_feature 1..861: note = Description of Artificial Sequence: Synthetic coding sequence
  source 1..861: mol_type = other DNA
atgggcatcagcgtggtgagctacaccctgaaggacatccacgacgaccaagattatcttcatagtttaggtaaagcccggaccgcccaggtacagaaagacgctcgcatcggtgaggcagaggcaaagagagatgccggcatcagggaggcgaaggctaagcaggaaaaggtgtccgctcagtacctgtctgaaattgagatggctaaagcacagcgcgactacgaattgaaaaaagcggcctatgacatcgaagtcaatacaaggcgggcccaggctgaccttgcatatcagttgcaggtcgctaagactaagcaacagatcgaggagcagagggtacaggtgcaagttgtcgagagagcacagcaggtggctgtgcaggagcaggagattgcaaggcgtgagaaagaattagaggcacgagtgcgaaaaccagcggaggcggaaagatacaaactggagcgcctggccgaggctgagaaaagtcaactgattatgcaggctgaggctgaggctgcatccgtgaggatgcggggggaggccgaggccttcgccatcggagcccgcgccagagccgaggccgaacagatggcaaagaaagcagaagcctttcaactctaccaagaagccgcacaactcgacatgcttcttgagaagttacctcaggtcgctgaggagataagcgggccgctcactagcgctaacaagatcactttagttagttccggatctggaacaatgggtgctgccaaggtgacaggagaggtgttggacatattaactcgtctccccgagagcgtcgaacggttgaccggcgtgtcaatttctcaagtgaatcacaagccactgcgcactgcatag

SEQ ID NO: 188072 - DNA, 1452 bp, synthetic construct
  misc_feature 1..1452: note = Description of Artificial Sequence: Synthetic coding sequence
  source 1..1452: mol_type = other DNA
atgggcaactgccacaccgtgggccccaacgaggccctggtggtgtctggaggttgttgtggaagcgactataagcagtatgtctttggaggctgggcctgggcttggtggtgcatctccgacacccagcggctgagcctggaggtcatgaccatcctgtgcagatgtgaaaatatcgagacctcggagggtgtccccttgtttgtgacaggtgtggcccaggttccctgtccttgtctgctagactgcaagtggggaaatagcaagggcttttggaagctctgccaagtctgtcagataagcctggagatcatgaccctacagccacgctgtgaggatgtggagactgccgaaggtgttgctctgaccgttactggggtggcacaggttaaaatcatgacagagaaagaactgctggcagtcgcatgtgaacagttcctggggaaaaacgttcaggatatcaagaacgtggtgcttcagaccctggaaggacatcttaggtccatactgggcaccctcacagtggagcagatatatcaggaccgcgatcagttcgctaaacttgttagggaagtggctgctccagatgttggcagaatgggcatcgaaatcctgagcttcaccattaaggacgtgtacgataaagtggactatctgtcgtcactgggaaaaacccagaccgctgtggtgcagcgggacgctgatattggtgttgctgaggcagagcgcgacgctggtattagggaagcggaatgcaaaaaagagatgctcgacgtgaagttcatggcagatactaaaatcgcggattccaaacgcgcatttgaactgcagaagtctgcctttagtgaggaagttaacatcaaaacagcagaagcccagctggcttacgaactccagggcgctagggagcagcagaagattagacaggaggagattgagattgaagttgtacagaggaagaagcagatcgccgtggaggcccaggagattcttcgcactgataaggaactgattgctaccgtccggcggcccgccgaggcagaggcccaccgcattcagcagattgcagagggtgaaaaggtcaagcaggtgctcttggcccaggccgaagccgaaaaaataaggaagatcggggaggcagaggcagccgtgatcgaggcaatgggcaaagcggaggcagagcggatgaagctgaaagcagaggcttaccagaagtacggcgatgcagctaagatggcgctcgtcctggaggctctcccacagatcgctgcaaagattgctgctccactcacaaaagtggacgagattgtggtgttgagcggagacaactcaaaggtgacaagcgaggtgaaccgcctgcttgcagaattgcccgcgtccgtgcacgccctcacaggcgtagatctttctaaaatcccacttattaagaaagcaaccggtgttcaagtgtag

SEQ ID NO: 188073 - DNA, 1287 bp, synthetic construct
  misc_feature 1..1287: note = Description of Artificial Sequence: Synthetic coding sequence
  source 1..1287: mol_type = other DNA
atgggcaactgccacaccgtgggccccaacgaggccctggtggtgtcagggggatgctgtgggtctgattacaaacagtacgtttttggagggtgggcctgggcctggtggtgtatctccgatacccagaggatcagcctagagattatgacccttcagcctagatgcgaggatgttgaaaccgcggagggggttgcactcaccgttactggagtggctcaggttaaaataatgaccgagaaggaactgctggccgttgcctgcgagcagtttctcggtaaaaacgtgcaggacattaaaaacgtggtgttacagacattagaagggcatctaaggagtatacttgggacccttaccgtggagcagatttatcaggaccgcgaccagtttgccaaactcgtgcgagaagtggccgcgccagacgtcgggagaatgggtattgagattttgagcttcaccattaaagatgtctatgacaaggtcgactatctgtcctccttgggcaaaacccagacggcagtcgtgcagcgtgacgctgatattggagtggcggaagctgaaagggatgccggcattcgagaggccgagtgcaagaaggaaatgttagatgtgaagttcatggccgacacaaaaatcgccgattcaaagagagcattcgagttgcagaaatccgccttttccgaggaggtgaacatcaaaaccgccgaggctcagctggcatatgagctgcagggcgcaagggagcagcagaaaattcgccaggaggaaatagagattgaagtcgtacagagaaaaaaacagatagccgtagaggctcaggaaatcctccgcactgacaaagaactcatcgcaacagtcaggcgccccgcagaagccgaggcacacaggatccagcagatcgccgaaggagagaaagtcaagcaggtgctgctggctcaggctgaagctgagaaaattcggaaaatcggagaagcagaggccgcagtcatcgaggcaatgggaaaggctgaagcagaacgtatgaaactgaaagcagaggcctaccagaagtacggagatgcagctaaaatggcgctcgtgctggaggcattgccacaaattgctgctaagatcgcagcccccctcaccaaggtggatgagattgtagtgctttcaggtgacaactctaaggtgaccagtgaggtgaaccgactgctcgccgagcttccagcttccgttcatgccctgactggagtggacctgtcaaaaataccgctaattaagaaggcgactggggtacaagtctag

SEQ ID NO: 188074 - DNA, 2982 bp, synthetic construct
  misc_feature 1..2982: note = Description of Artificial Sequence: Synthetic coding sequence
  source 1..2982: mol_type = other DNA
atgcccgccctggcccgggacggcggccagctgcccctgctggtggtgttctcagccatgatctttggcacaattactaatcaggacctgcctgtgatcaagtgtgtcctcatcaaccacaagaacaatgactccagcgtggggaaatcttcctcttatcccatggtgagcgagagcccggaggatctgggctgtgctttaagacctcagagctcgggcactgtatacgaggctgccgccgtcgaggtggatgtaagcgccagcatcactttgcaggtattggtggatgcccccggcaatatctcttgcttatgggtatttaagcatagctctctcaactgtcagccccattttgatctgcagaatcggggtgttgtgtcaatggtgatcttgaagatgacagaaacccaagccggggaatatctgctgttcatccagtctgaggccaccaattacactatcctctttacagtgtcaattagaaatacactgctttacaccctgcggcgaccatatttcaggaagatggagaatcaggatgccttggtatgcatttcagagagtgtgccggagccaattgtggagtgggtgctgtgcgactctcagggcgagagctgtaaggaggagagccctgccgtagttaagaaagaagaaaaggtcctccatgagcttttcgggacagacatccgctgttgcgcccgcaatgagctgggaagagagtgtacgagattgttcaccatcgatctgaatcagacacctcagacaacccttccccagctgtttttaaaggtgggggaacccctctggatcaggtgcaaggccgtgcatgtcaatcacggctttggcctcacgtgggagctggaaaataaagcattggaggaaggcaactactttgagatgagcacctactccaccaatagaacaatgatccggatacttttcgccttcgtgagcagtgtggcaaggaatgatacaggatactacacttgtagttcaagcaagcatcccagccagtctgctctggtgaccatcgtggagaagggatttattaatgcaactaactcttccgaagattatgaaatcgaccagtacgaagagttctgcttttccgtgagattcaaggcgtatccccaaatccggtgcacctggacattcagccgaaagtccttcccttgtgagcagaaaggcctagacaacggatattctatctccaagttttgcaaccacaaacatcagccgggagagtatattttccacgcagagaatgatgacgctcaattcaccaagatgtttaccttgaatattcgtcgaaagccccaagtgctggccgaagcttctgcatcccaagcctcctgttttagcgatgggtatcctttgccatcgtggacctggaagaagtgttcagacaaatctcccaactgtaccgaagagattacagaaggagtgtggaataggaaagctaacagaaaagtgttcggccaatgggtgagttcttccacactgaacatgtctgaggccataaagggcttcctggtcaagtgttgtgcttataatagtctggggactagctgcgaaactatccttctcaactcacctggcccattccctttcattcaggacaatatctctttctatgccacaatcggcgtttgtctgctcttcatcgtggtattaactctgctgatatgccacaaatataagaaacagttcaggtatgaatctcagctgcagatggtacaagtgacggggtcctctgacaacgagtatttttacgtcgacttccgcgaatatgaatacgacctcaagtgggaatttccacgagaaaaccttgaatttggcaaagtgctgggctctggagccttcggtaaggtgatgaacgccactgcctacgggatctccaagactggagtgtccatacaagttgccgtaaagatgttgaaggagaaagcagattccagcgagagggaggcactgatgtcagagctgaaaatgatgacacagctcggttcacacgaaaatattgtgaatctcctgggcgcctgtaccttgtctggccctatctatctaatttttgaatattgttgctatggggaccttcttaactacctgaggagtaagcgggagaagtttcacagaacttggactgaaatctttaaggagcataacttcagtttttatcctacgtttcagtctcatccaaacagctcaatgcctggatccagagaagttcagatccatcctgattcagaccagatctcaggtctgcacggcaatagcttccattccgaggacgagatcgagtacgaaaatcagaagcggctcgaggaagaggaagacctgaacgtactcactttcgaggacctgctctgtttcgcctatcaagtggcgaagggcatggagttcttagagtttaagtcctgcgtgcaccgcgacctcgcagctcgcaacgtcctggtgacgcacggcaaggtggtgaaaatttgcgattttgggctcgctcgcgacatcatgagcgacagcaattacgttgtgcgaggtaatgcccgattgccagtcaagtggatggccccggaatcactcttcgaggggatttacactattaagtcagacgtatggtcatacgggatactgctgtgggaaattttttctttaggtgttaatccctacccaggaattcccgtagatgcgaacttttataaacttattcaaaatggctttaagatggatcagcccttctacgccactgaagaaatttacatcattatgcaatcgtgttgggcttttgacagccggaagagaccctcttttccgaatctgactagctttttgggttgtcaactagcggatgccgaggaagcaatgtaccaaaacgtggacggtagggtgtccgagtgcccacatacctatcagaacaggaggcccttcagtcgagagatggatctggggctgctctcaccccaggctcaagtggaggacagctag

SEQ ID NO: 188075 - DNA, 2991 bp, synthetic construct
  misc_feature 1..2991: note = Description of Artificial Sequence: Synthetic coding sequence
  source 1..2991: mol_type = other DNA
atgcccgccctggcccgggacggcggccagctgcccctgctggtggttttttctgcaatgatcttcggcaccatcaccaaccaggatctaccagtcattaagtgcgtcctaattaaccacaagaacaatgattcctcagttggaaagtcgtcgtcctatcccatggtaagtgagtctccagaagatctgggatgtgcattaaggccacagagctccggtaccgtgtacgaggccgcagccgtggaggtggatgtgagcgcctcaatcaccctacaggtcctggtggatgcacccgggaatatatcctgcctgtgggtgtttaagcattcgtcactcaattgccagccccattttgacctgcaaaatcgtggcgtggttagcatggtcatccttaagatgacggaaacccaggcgggggagtatcttctgttcattcagtcagaagcgaccaactacaccatattattcactgttagcatccgcaacacactactttacaccctgagacggccgtacttccggaagatggaaaaccaggatgcgcttgtgtgcatctctgagtctgttccggagcctattgtggaatgggtgctttgtgattcacagggggagtcctgtaaagaggaaagccccgcagtggtcaagaaagaagagaaagttcttcatgaattgttcggcacagacatccgctgctgtgcccgcaacgaactcggcagggaatgcacgcgactatttaccatcgatctgaatcagaccccacaaacgaccctaccacagctcttcctcaaggtcggagaaccattatggatccggtgtaaggccgtgcacgttaaccacggcttcggcctgacctgggagctggagaacaaagcattggaagagggcaactactttgagatgtcgacgtactcaaccaaccgtaccatgatccgaattctgttcgccttcgtgagctctgtggcccgtaatgatacaggctactacacatgctcttcgtccaagcacccctctcagagtgctctggttactatcgttgaaaaaggtttcatcaatgcaacgaactcgtccgaggactacgagatcgatcagtatgaagagttttgtttctctgtcagatttaaagcgtacccccagatcaggtgcacctggactttcagccgcaagagttttccatgtgagcaaaagggcctggacaatgggtactccatttcaaagttttgtaaccacaaacaccaacccggcgaatatatatttcatgcagagaatgacgatgcacagtttacaaagatgtttacacttaatattcgccggaagcctcaagtgctcgcagaagcatccgcctcacaggcttcttgctttagtgatggctaccccttgccttcatggacctggaagaaatgcagtgacaaaagtccaaactgtactgaggagattacagagggagtgtggaatcggaaagccaatcgtaaagtctttggccaatgggtctcttcaagcaccctaaatatgagtgaggcaatcaaaggctttttggtgaagtgctgcgcttataattccctgggcacctcatgtgaaaccattctcctcaacagcccaggacctttccctttcatccaggataatatctccttttacgctacaatcggagtatgcttgttgttcatcgtcgtgttgacccttctgatttgccacaagtataaaaagcagtttcgctacgaatcgcagctgcagatggtccaggttactgggtcttccgacaatgaatacttttacgtcgattttcgggagtatgaatatgacctgaagtgggagtttcccagggagaacctcgagttcggtaaagttctgggcagcggcgcttttggtaaagttatgaatgccaccgcgtatggaatctctaagacaggtgtctccatccaggttgccgtgaagatgctcaaggagaaggctgactcgtccgaaagggaagcgctgatgtcagaactgaagatgatgacccaactgggttcccacgaaaatatcgttaacctgttaggtgcatgcactttgtccggcccaatctacctaatattcgaatattgttgctacggcgacctgctgaactacctgagaagcaaacgggaaaagtttcataggacctggaccgaaatattcaaggaacacaactttagtttttaccctacattccagagccatcctaactcttccatgccaggatccagagaagtgcagatccatcctgatagcgatcagattagcggcttgcacgggaattccttccactccgaagacgagatagaatatgagaaccagaagcggctggaagaggaggaagacctgaatgtgctgaccttcgaggatttgctttgtttcgcttaccaggtggctaaagggatggagtttctcgaatttaagtcctgcgtccatcgggacctggccgcacgaaatgtgttagtgacacatggtaaagtagttaaaatttgcgactttgggctggcccgcgatataatgagtgattctaattatgtagtgagaggcaatgtcagattagcacgcctccccgtaaagtggatggccccagagtcgctgttcgagggcatatatactatcaagagtgacgtctggtcatacgggattcttctttgggagatcttcagcctcggagtgaacccttaccccgggatccctgttgacgctaatttttataagctgatccagaatggattcaaaatggaccagcctttttatgcgaccgaagaaatttatatcattatgcagtcgtgctgggcattcgactcaaggaagcgaccttcattccctaatctgacaagtttcctggggtgtcagcttgccgatgctgaggaggcgatgtatcaaaatgtggacggaagagtgtcagaatgtccccatacgtatcagaaccgaagaccattttcacgggaaatggacctgggcctactgtctccccaggcgcaggtcgaggattcctag

SEQ ID NO: 188076 - DNA, 2859 bp, synthetic construct
  misc_feature 1..2859: note = Description of Artificial Sequence: Synthetic coding sequence
  source 1..2859: mol_type = other DNA
atgcccgccctggcccgggacggcggccagctgcccctgctggtggtcttctctgccatgatttttgggacaatcaccaaccaagatctgccggtgatcaaatgcgtgttgataaaccacaaaaataatgattccagcgtcggaaaaagtagctcttatccaatggtgtctgagagcccagaggatctgggctgtgcgcttcgccctcagtctagtggaaccgtgtacgaagctgcagcagtggaagtagatgtttccgcttccatcactctgcaggtattggtcgatgctcccgggaacatttcttgtctctgggtctttaagcactcttccctgaactgccagcctcactttgatcttcagaacaggggcgtggttagtatggtgatcctgaagatgaccgaaactcaagccggtgagtacctcctttttatccagtctgaggccactaattacaccatcctgtttactgtgtcaattcgaaataccctcctgtatacgctccgccgcccctactttcgcaagatggaaaaccaagacgccttggtgtgtattagcgagtccgtgccggagccgattgttgagtgggtactgtgcgactcacaaggtgagtcctgcaaggaagaaagcccggccgtggttaagaaagaagaaaaggtcctgcatgagctcttcggaaccgatatcaggtgttgcgcacgtaacgaactggggcgcgagtgcacacggcttttcactatcgatttgaatcagaccccgcagaccaccttgccccagctcttcctgaaagtaggcgagccgttgtggatccgatgtaaggccgttcatgtgaaccacggtttcgggctgacctgggaactggagaacaaggccctggaggaaggcaactattttgagatgtccacatacagcacgaataggactatgatcagaatcctcttcgcttttgtgagctccgtggctcgaaacgacaccggatactatacatgctcttcttctaaacatcctagtcaatccgcactcgtcactatcgtcgaaaaaggcttcatcaacgccactaattcttcagaagattacgagattgaccagtatgaggaattctgcttttctgtgcgatttaaagcttacccacaaattaggtgcacctggacgtttagtaggaagagcttcccttgcgaacagaaggggctcgacaacggctactccatttcaaagttctgcaaccacaaacatcagccgggtgagtacatctttcacgccgaaaacgatgatgcccagttcaccaaaatgttcacattgaacatcagaagaaagccacaggttctcgcagaggcttcagcgtcccaggccagctgcttttccgacgggtacccactgccatcttggacatggaagaagtgctcagacaagtcccctaattgtaccgaggagatcaccgaaggggtgtggaacagaaaagctaaccgcaaagtgttcggacagtgggtctccagctctacactgaacatgagcgaagctattaaaggtttcttggttaagtgttgtgcctataattcacttggaactagctgcgaaacaatccttcttaatagccccggtccctttcccttcatccaggacaatatatctttctatgccaccataggcgtctgtctactttttatcgtggtgctcaccctcttaatctgtcataagtacaaaaagcagtttcggtacgagtcccagttgcagatggtccaggttaccggatcgtccgataatgaatacttctatgtcgattttcgtgagtacgaatacgacttgaaatgggaattcccacgggagaatctcgagttcggaaaagttctgggctcaggagcgtttggcaaggtgatgaacgctactgcctacggaataagcaaaactggcgtttctatacaggtcgcagtgaagatgctgaaggaaaaggcagatagttctgaacgggaggcactgatgtcggagctgaaaatgatgacccagctgggatctcacgaaaatatagtcaatcttctgggcgcgtgcacactgtccgggcctatttacctcatctttgagtactgttgttacggagatctgctcaattacctgcgctcaaagcgggagaagtttcaccggacctggaccgagatcttcaaggagcacaacttcagtttttaccccacctttcaaagccatccgaactccagcatgcccggctcccgcgaggttcaaattcacccggatagtgatcaaatctctggtctccatgggaactcttttcatagcgaggacgagatagagtacgagaaccaaaagcgattggaggaagaggaagacctgaacgtcctcactttcgaagacctgctttgtttcgcctatcaagtcgccaaggggatggagtttttggaatttaaatccgccaggctgccagtgaaatggatggcccccgagtccttgtttgagggaatctatacaattaaaagcgacgtatggtcatacggaattctactgtgggaaatcttcagtttgggagtgaacccctaccctggaattcccgttgatgccaatttttataagctaattcagaatggatttaagatggaccaacctttttatgcgactgaggaaatttacattatcatgcagtcctgttgggcgtttgactcgagaaaaaggccctcattccccaatcttacatcctttctcggttgtcaactggccgatgccgaggaggccatgtatcaaaatgtggacggaagagtgagtgaatgccctcacacttatcagaaccggcggccatttagtcgcgagatggacctcggtctccttagtccgcaggctcaagtggaggattcttag

SEQ ID NO: 188077 - DNA, 2253 bp, synthetic construct
  misc_feature 1..2253: note = Description of Artificial Sequence: Synthetic coding sequence
  source 1..2253: mol_type = other DNA
atgtggaacctgctgcacgagaccgacagcgccgtggccaccgccaggcgtccgcgctggctctgcgccggggcactggtactggccggcggatttttcttgctagggttcttgttcgggtggtttatcaaaagctcgaacgaagccacaaacataaccccgaagcacaacatgaaggccttcctggacgagctaaaagccgagaatataaagaagtttctctataacttcacacaaattccacacctggctggcactgaacagaacttccagctggcgaagcagattcagagccagtggaaggaatttggactcgactccgtggagcttgctcattacgatgtactgctcagttaccccaataagacacaccctaattatatatccattatcaacgaggacggcaacgagatctttaatacatccctttttgagcctcctccacccggttacgagaacgtgtctgatatcgtccctcccttcagtgcattcagtccccagggcatgccagaaggtgacctggtgtatgtgaattacgcacgaaccgaggactttttcaaattagagagagacatgaagatcaactgtagtggcaaaatcgtcatcgcccgctacgggaaagtattccgtgggaacaaagtaaagaacgcacagctggccggcgccaagggggtaattctttattctgatccggcagactattttgcccctggagttaagagctatccagacggatggaatttaccaggtggcggggtgcagcgaggcaacattttaaatttgaatggcgccggtgaccctttgacaccgggctatcctgccaacgaatacgcttaccggagaggaatcgctgaagccgtaggcttgccaagcatacctgtgcaccccattggctactatgacgcccagaagctcctcgaaaagatgggcgggagtgcaccccccgattcaagctggcggggttcgctgaaggtgccttacaacgtgggtccaggatttacagggaacttttcaacacagaaagtgaagatgcacatccacagcactaacgaggtgacccgaatatacaatgtgattggaactttgcgaggcgccgttgagccggatagatacgtgattctgggtggacatcgggattcctgggtgtttgggggcatcgacccccaaagcggagccgccgtcgtgcatgagattgttcgttcttttgggactctgaagaaggaagggtggcgcccccggcgcactatccttttcgcgtcctgggacgctgaagaatttgggctgctcgggagtacagagtgggcggaggagaactctagactgctccaggagcggggggtggcctatattaatgctgacagttccattgagggaaactacactctgcgggtggattgtacgccacttatgtatagccttgtgcacaatcttactaaggaactgaaatcgcccgatgaggggttcgaaggaaagtccctttatgaatcctggactaagaaatcgcccagcccggagttctcagggatgccgcgaataagtaagctcggatctgggaatgattttgaagttttctttcagcgtctcggcatcgcaagtggccgagcacgctatactaagaattgggaaactaacaagttctccggatacccgttataccactcagtctatgagacatacgaattggtggagaagttctatgacccaatgttcaaataccatctgaccgtcgctcaggtgagaggcggaatggtgtttgagcttgccaactctatcgtcctccctttcgactgcagagattatgctgtggtgcttcgaaagtatgccgataaaatttacagcatttctatgaagcacccccaggagatgaagacgtacagcgtcagtttcgattccctgttttccgccgtaaagaactttaccgaaatcgcctcaaagtttagtgagcgcttgcaggactttgataagagtaaccctatcgtgctcagaatgatgaacgaccagctgatgttccttgagagggcctttatagacccactcggactcccagatagaccattctacaggcatgtgatctacgcaccaagctcgcataacaagtatgctggcgagagtttccccggcatctacgatgctctcttcgatattgagtctaaagtcgacccaagtaaagcctggggagaagtgaagcgccaaatctacgtagccgcctttactgttcaagccgccgcagaaacattgtcagaagtagcctag

SEQ ID NO: 188078 - DNA, 2208 bp, synthetic construct
  misc_feature 1..2208: note = Description of Artificial Sequence: Synthetic coding sequence
  source 1..2208: mol_type = other DNA
atgaccgccggcagcagctaccccctgttcctggccgcctacgcctgcacaggttgcctcgccgagagattgggatggtttatcaaatcctccaatgaagcaaccaacattactccaaagcacaacatgaaagcctttctggatgaactgaaagccgagaacataaagaaatttctgtacaatttcacacaaatccctcacctcgcaggtaccgaacagaatttccagctggcaaagcagatccagtctcagtggaaagaattcgggctggactctgtggaactagcccattatgacgtgctacttagttaccctaataagactcatcccaattacatttcaatcattaatgaggatgggaacgagatcttcaacacatccctattcgaaccaccacctccaggttacgaaaacgtgagcgatatcgtcccacctttttctgccttctcaccccagggaatgccggaaggcgatctggtgtacgtcaattatgcccgaaccgaagacttctttaaactggagcgcgacatgaagattaattgctcaggcaagatcgttatcgcacgatacggaaaagtgttccgtgggaacaaagtgaaaaatgcgcagctggccggggcgaagggagtcatattgtactccgatccagctgactacttcgctcccggcgtgaaaagctatccagatgggtggaatcttcccggtggcggcgtgcaacgaggcaacattcttaacttaaacggagccggtgatccgctgacacctggatacccagcaaacgaatacgcctaccgtcgcgggattgcagaggccgtcgggctcccatcgatccccgtacacccaataggatattacgacgcacagaaactgttagaaaaaatgggaggatctgctcccccagattcttcttggagaggaagtttgaaagtaccatataacgtggggccaggcttcactggcaatttctcaacccagaaagtcaaaatgcacatccattccaccaacgaggtaactaggatttataatgtcatcggtaccctaagaggggcagtggaacctgaccggtacgtcatcctcgggggtcatcgcgactcatgggtcttcggcgggatcgatccacagtcgggggcggccgttgtccacgaaattgtgaggtcattcggcacactcaaaaaggagggctggcggcctcggcgtaccatcctcttcgcctcatgggacgccgaagaatttggcttgctggggtccaccgaatgggctgaggagaatagccggctgctgcaggagcgaggggtggcctacataaacgcggacagcagcattgagggcaactacactcttagggtggattgtacgccactgatgtactcacttgtgcacaacctcaccaaggagctgaagagtccagatgagggatttgagggcaagagtctctacgaatcctggaccaaaaaaagccctagtccagagttttctggaatgcctcgcattagcaagctgggtagcgggaacgacttcgaggtgttcttccaaaggttaggcatcgcatcaggccgagctcgttatactaagaattgggagaccaacaagttctcaggctatccgctctatcactctgtttatgaaacttacgagcttgtcgaaaagttctacgatcccatgtttaagtaccatctgaccgtcgcccaggtgcgaggagggatggtgttcgaactcgcgaactccattgttctcccttttgattgtcgagactacgcggttgtgctcagaaaatatgccgacaagatatacagcatctccatgaagcacccacaggagatgaagacttatagcgtatcctttgatagtcttttcagtgctgttaaaaactttacggaaatcgcttccaaattttccgaaagacttcaggactttgataagagcaacccgatcgtgctacgaatgatgaatgaccaactgatgttcctcgagagggcctttatcgatcctctggggctgcctgacaggcctttttaccgacatgtgatctatgctccctcctcccataataagtatgccggcgaatcattccccgggatttatgatgccctcttcgatatcgagtctaaggtggacccatccaaagcttggggggaggtcaagcgccagatctacgttgctgcttttactgtccaggcggctgcggagaccctgtcagaggtggcctag

SEQ ID NO: 188079 - DNA, 1329 bp, synthetic construct
  misc_feature 1..1329: note = Description of Artificial Sequence: Synthetic coding sequence
  source 1..1329: mol_type = other DNA
atgggcggcagcgccccccccgacagcagctggcggggcagcctgaaggtgccttacaacgtggggccaggctttacaggaaatttcagtacacagaaagtaaagatgcatattcattctacgaatgaggtgacaagaatttacaacgttatcggcacacttcgcggtgcagtcgagcccgatcgttacgtcatcctgggcggacaccgcgatagttgggtgttcggtggcattgatcctcaaagcggggccgctgtggtgcacgaaattgtgcgaagcttcggcactctcaaaaaggagggatggcgcccccgaagaacgatcctgttcgccagctgggacgcggaggagttcggactgctgggatctaccgagtgggcagaagagaattcccgcttattacaagagcgaggggtggcctatatcaacgcagatagcagcatagaaggcaactacacactgcgtgtggattgtacccctctgatgtacagccttgtccacaatcttaccaaggagctgaaaagtccagatgaaggctttgaagggaagagcctttatgagtcttggacgaaaaagtcccccagcccagaattctcgggtatgcctcgcattagcaaactggggagtggcaatgactttgaggtgttcttccagcggctgggcatcgccagcggcagagctcggtatacaaaaaactgggagactaacaaatttagcggatatcccctgtatcactccgtctacgaaacctacgaactcgttgagaagttttacgatcccatgtttaagtatcatctgaccgtggcccaagtgaggggagggatggtcttcgagttagcaaacagcatcgtgctgccattcgattgtcgggactatgcagttgtgctgcgtaaatacgctgacaaaatttatagtatcagtatgaagcacccccaggagatgaaaacctatagtgtctcctttgattccctgttctcagctgtaaagaacttcacagaaatcgcctccaaatttagtgaacgtctccaggatttcgataaatctaatcccattgtgctacggatgatgaatgaccagctgatgtttctcgagcgggccttcatcgatccactcggcttgccagataggcccttctatcggcacgtgatctatgcaccctcttctcacaacaagtatgcaggggagtcttttcccgggatttacgacgccctttttgacattgagtctaaggtggatccatccaaggcatggggggaggtgaaacggcagatttatgtggcggcttttaccgttcaggcggccgctgaaacgctgtctgaagtagcatag

SEQ ID NO: 188080 - DNA, 2160 bp, synthetic construct
  misc_feature 1..2160: note = Description of Artificial Sequence: Synthetic coding sequence
  source 1..2160: mol_type = other DNA
atgtggaacctgctgcacgagaccgacagcgccgtggccaccgccaggcgtccacgttggctgtgcgcaggagccctcgtgctggccggtgggttctttttacttggcttcctcttcggttggttcatcaagagtagcaacgaggctactaacatcactccgaaacataatatgaaggcctttttggacgaactaaaggccgagaatatcaagaagtttctctacaactttacacaaatcccgcacctggccgggacagagcagaacttccagctggcaaaacagatccagtcacagtggaaagaattcggtctggactctgtagagctggcccattacgacgtgctgctcagctacccaaacaagacacaccccaactacattagcattatcaatgaagatggtaacgagatctttaataccagcctgtttgagccacctccaccagggtacgagaacgtaagtgacattgtacctcctttctctgcgttctctcctcagggaatgccagagggagacctggtctacgtgaattatgctcgcaccgaagatttctttaaactggaacgcgacatgaagattaactgttcgggcaaaatagtcatcgcaaggtatgggaaagtcttccgcggaaataaggtcaagaacgcccagctcgccggggctaagggtgttatcctctatagtgacccagccgattactttgcacctggggtgaagtcctatcccgacggctggaacttgccggggggtggggtgcaacggggaaacattctgaacttgaacggtgcaggagacccactcacccccgggtacccagccaacgaatacgcctaccggcgagggatcgctgaggctgtgggcctgccatctatcccagtgcaccctataggatattatgatgcacagaagctcctcgagaaaatgggtggcagcgcccctccagattcctcatggcggggaagtttaaaggtcccctataatgtggggcctggatttacgggaaacttctccacacagaaggtgaaaatgcacatccactctaccaatgaggttacccgtatttataatgtgatcggcaccctgcggggtgcggttgagcccgatcgctatgtcatccttggaggacaccgcgactcttgggtgtttggaggaatcgatccacagtcaggagcggccgttgtccacgaaatcgtgcgtagcttcggcaccctgaaaaaggagggctggagaccgcggcgcacaatcctatttgctagctgggatgcagaggaattcggcctgctgggcagcacagaatgggctgaagaaaactcacgcttgctacaagaacggggtgtcgcttatatcaatgcagatagcagtattgaaggtaattatactctcagggtggattgtacaccgctaatgtatagccttgtgcacaatttaactaaagaactcaagagccctgacgaaggatttgaggggaagtctttgtacgagagctggactaagaaatccccctcccctgaattttcaggaatgccccggatcagcaaattaggaagtggcaacgacttcgaggttttctttcagaggctcggtattgcatctgggagagctaggtacaccaaaaactgggagacgaacaaattttcaggctacccactgtatcactctgtctatgagacgtatgagctcgtggagaagttctatgatccaatgtttaagtaccacctgacagtcgcgcaggtgcgcggcggcatggtttttgaactggccaactctattgtactgccgtttgactgtcgtgactacgcagtggtcctcaggaaatatgccgataagatctacagcatctcaatgaaacacccacaagaaatgaagacctactccgtgagtttcgatagtctgttttctgcagtgaagaacttcacggagattgccagtaagttttccgagagactccaggactttgacaaatctaagcacgtgatatacgctccatcctcccacaataaatacgctggggaatcctttccgggcatttacgacgctctgttcgacatcgagtccaaggtagacccgagcaaggcatggggggaagtaaaaagacaaatatatgtggcggcatttacggtgcaggctgcagccgagaccctgagcgaagtagcatag

SEQ ID NO: 188081 - DNA, 1638 bp, synthetic construct
  misc_feature 1..1638: note = Description of Artificial Sequence: Synthetic coding sequence
  source 1..1638: mol_type = other DNA
atgtggaacctgctgcacgagaccgacagcgccgtggccaccgcccgccgccctcgctggctgtgcgctggcgccctggttctggcaggcggcttttttctgttaggattcctcttcggatggtttattaaaagcagcaatgaggctactaacatcactcccaagcataatatgaaggctttccttgacgagctaaaagccgagaacatcaagaaatttctgtataactttactcaaatacctcatttggcaggaactgagcagaatttccaattggccaaacagatccaatcccaatggaaggaattcggcctggactctgtagaacttgcccactacgatgtgctcctgagctatcctaacaagactcacccaaactacatatccattatcaacgaggatggaaacgaaattttcaatacttcactctttgaacccccgccaccaggttatgagaacgtatccgacattgtacctccatttagcgccttctcgccccagggaatgcctgagggagatctggtatatgtgaactatgcccgcactgaagacttctttaagcttgaacgggatatgaaaatcaattgcagcggaaaaatagtcatcgcccgctacggcaaggttttccgtggtaacaaggtcaaaaacgcccagcttgctggggctaagggcgtcattctctacagtgaccctgctgattatttcgctcccggggtcaagagctatccagacggctggaatctcccggggggtggagtgcagagaggcaacatcctcaatctgaacggcgcaggagatccgcttactccgggctatcctgctaacgagtacgcctataggcgggggattgccgaggccgtaggcttaccaagtatacccgtgcatccaataggctactacgatgcacaaaaactgctggagaaaatgggtggctctgccccacctgactcatcttggagaggtagccttaaggttccttataacgtgggaccaggttttactggcaatttttccacccaaaaggtgaaaatgcatatccattccaccaatgaagtgacgagaatttacaacgtcataggtaccctaaggggcgctgttgagcccgatcggtacgtgatcctggggggccaccgcgattcttgggtgttcggtggtatcgatcctcagagcggggccgccgtagttcatgagatcgtgagatcattcgggaccttaaagaaagaggatattctcgggtggaggccgcggcgcacaattctgttcgcttcctgggatgctgaggagttcggcctccttgggtctacggagtgggctgaagaaaactctagactcctacaggaaagaggggtggcgtacataaacgcggatagtagtatcgagggtaattatacattgcgagtcgattgtacacctctgatgtactcattggtccataacttgaccaaggaactgaagtcaccagatgaggggttcgagggcaagtccctctatgagagctggaccaagaaatcaccaagccctgagttttcaggaatgccccgaatctccaaactgggctccggtaacgacttcgaggtcttttttcagcgtctgggtattgcatccggccgcgccaggtatacaaagaagaaaaaatag

SEQ ID NO: 188082 - DNA, 2115 bp, synthetic construct
  misc_feature 1..2115: note = Description of Artificial Sequence: Synthetic coding sequence
  source 1..2115: mol_type = other DNA
atgaccgccggcagcagctaccccctgttcctggccgcctacgcctgcacgggctgtcttgcagagcgattaggctggttcattaaatcatccaacgaggctacgaacattactcccaaacacaacatgaaggctttcctggacgaacttaaagctgagaacatcaaaaaattcctttacaacttcacccagattcctcacctcgccggcacagaacagaattttcagctggccaaacagattcaatctcagtggaaagaatttggtctcgactccgtggagcttgctcactatgatgtgctgttgtcctatcctaacaagacacatcctaactacatcagtattattaacgaggacgggaatgagatttttaacacttcactctttgaacccccaccccctggctatgaaaacgtgagtgatattgtgccacccttcagtgccttctcccctcagggcatgccggagggagacttggtctacgtgaactacgcccgtaccgaagattttttcaagctagagcgggacatgaagataaactgctcagggaaaatcgtaattgcgcgctatggtaaagtctttagaggtaacaaagtcaaaaatgctcagttagctggagctaaaggagtcatcctgtactccgaccccgctgactatttcgcccctggcgtcaagtcttatcctgatggctggaaccttccggggggtggagtccagagaggaaatatactgaacctgaacggggccggagaccccctgacacccggctaccccgccaatgagtatgcctataggcgcggtattgctgaggctgtcgggctgccctccattcctgttcacccaattggctattacgacgctcaaaagctcctggagaaaatgggtggctccgctcctcctgatagtagctggcggggctctctaaaggtgccatacaatgtagggccagggttcaccgggaacttcagcacccagaaggttaagatgcatattcactcgacaaacgaggttacaaggatatataacgtgatcggcaccctgcgcggcgcggtggaaccagacagatatgttattctgggtggacaccgggattcatgggtctttggtggaatcgacccgcagtcaggtgctgccgttgtccacgagatcgtccgctcattcggtaccctgaaaaaggaaggatggcgacccaggagaacaatcctcttcgctagttgggacgctgaagagttcgggctgctgggttctaccgagtgggctgaagaaaatagccgtttgttacaagaaagaggagtcgcatacatcaatgctgatagttctatagaaggaaactataccctgcgagttgattgtaccccgctaatgtattcgctcgttcacaacttgaccaaggagctgaagagccccgatgagggatttgaggggaagtccctgtacgagagctggactaaaaagtctccctcaccagagtttagcggaatgccccggatatctaagctggggtccggtaacgacttcgaggtgttctttcaacgtctcgggatcgcctctggccgagctcgctacactaaaaactgggagaccaacaaattttcagggtatcccctctatcactcagtttacgaaacctatgagctcgtggaaaaattctacgatcctatgtttaagtatcatttgactgtggcccaggtccgcggggggatggtgttcgagctggcaaactccatagtgctgcccttcgattgcagggactatgccgtagtgttgcgaaagtatgcggacaagatttacagcatcagtatgaagcacccacaggaaatgaaaacatactcagtttcattcgattcgctgtttagtgcagtgaaaaatttcacagaaattgcatccaagtttagtgaaagactgcaggactttgacaagagtaaacatgtgatctatgcgccctcttcacacaataaatatgccggagagtccttcccaggcatttacgatgccctgttcgatattgagtctaaggttgacccaagcaaggcttggggtgaagtgaagaggcagatctacgtggctgccttcactgtgcaagctgccgcagagactctttcggaggtggcctag

SEQ ID NO: 188083 - DNA, 774 bp, synthetic construct
  misc_feature 1..774: note = Description of Artificial Sequence: Synthetic coding sequence
  source 1..774: mol_type = other DNA
atggcccagcggatgaccacccagctgctgctgctgctggtgtgggtggctgtggtgggcgaggctcagaccagaatagcgtgggcgagaaccgagctcctgaacgtttgcatgaacgcgaaacaccataaggagaaaccaggaccagaagataaattgcacgagcagtgtcgaccatggaggaagaacgcctgttgcagtaccaacacctcccaggaggcccacaaggatgtctcctatctgtacagatttaactggaaccactgtggagaaatggctccggcatgcaaacgacattttatacaagacacttgcctgtacgaatgtagtccgaacctggggccctggattcagcaggtggaccaatcatggcgtaaggagcgggtgctcaatgtaccactgtgtaaggaagactgtgagcagtggtgggaggactgcaggacatcctatacctgtaaatctaattggcacaaggggtggaactggactagtggttttaacaagtgcgccgtgggcgccgcctgccagcctttccacttttactttccgacacctacagtgctctgcaacgagatttggactcactcctacaaagtgtctaactatagccgagggagcggcagatgcatacaaatgtggttcgacccagcccaaggaaatcctaacgaagaagtggcccgtttctatgctgccgcgatgagtggagccgggccatgggccgcttggcctttcctgctcagcttggcgctcatgcttttatggttgcttagttag

SEQ ID NO: 188084 - DNA, 774 bp, synthetic construct
  misc_feature 1..774: note = Description of Artificial Sequence: Synthetic coding sequence
  source 1..774: mol_type = other DNA
atggcccagcggatgaccacccagctgctgctgctgctggtgtgggtagctgtcgttggagaagcccaaacccggatcgcgtgggcccggacggaactgcttaacgtctgcatgaatgctaaacaccacaaagagaagcccggccctgaggacaaactccatgagcaatgtcgaccctggaggaagaacgcgtgctgcagcacaaatacctctcaagaagctcataaggacgtgtcttatctgtatcgattcaattggaaccattgcggagaaatggcgccagcgtgcaaaagacactttatccaggacacctgcttatatgaatgctctccgaatttaggtccctggattcagcaggttgaccaaagttggcgcaaagaaagagtgctgaatgttcctttgtgtaaggaggactgtgaacagtggtgggaagactgtaggacttcatacacatgcaagtccaactggcataagggatggaactggacttcaggtttcaataaatgcgcagtcggcgctgcttgccagcctttccacttttattttcccacccctactgtcctatgtaatgagatctggacgcacagttacaaggtctcaaattactccaggggctcgggacgatgcattcagatgtggtttgatcctgcccagggtaaccctaacgaggaggtggctcggttttacgccgcagctatgagtggtgccggaccttgggccgcctggccattccttctcagtttagctctgatgctgttgtggcttttgtcttag

SEQ ID NO: 188085 - DNA, 774 bp, synthetic construct
  misc_feature 1..774: note = Description of Artificial Sequence: Synthetic coding sequence
  source 1..774: mol_type = other DNA
atggcccagcggatgaccacccagctgctgctgctgctggtgtgggttgcagttgtgggtgaggcacagacaagaatcgcatgggcgcgtactgagctcttgaacgtttgtatgaatgccaaacaccacaaggaaaagcccggaccggaggacaagctccacgaacagtgtagaccctggcggaagaacgcctgttgttccaccaatacaagtcaggaggcacacaaggacgtctcgtacctgtatcgattcaattggaaccattgtggggaaatggcacctgcttgtaagcggcatttcatacaagacacctgcctatatgaatgcagcccgaacttggggccgtggattcaacaggtcgatcagagctggcggaaagaaagggtgctgaacgttcccctgtgtaaagaggattgcgaacagtggtgggaagattgtcgtacatcgtatacttgtaagtcaaattggcataagggctggaactggacaagtggttttaacaaatgcgctgtgggcgccgcttgccagcctttccacttttactttccgacgcccaccgtgctctgtaacgagatatggacacattcttacaaagtgtccaattactccagagggtccggcaggtgtattcaaatgtggtttgatcccgctcagggaaaccccaatgaggaggtggcacggttctatgcagcagctatgtctggggccggcccgtgggccgcttggccgttcctactctcccttgcgcttatgctcctgtggctgttgagctag

SEQ ID NO: 188086 - DNA, 774 bp, synthetic construct
  misc_feature 1..774: note = Description of Artificial Sequence: Synthetic coding sequence
  source 1..774: mol_type = other DNA
atggcccagcggatgaccacccagctgctgctgctgctggtgtgggtggccgttgttggtgaagcccaaaccaggattgcctgggcacggactgaattgttaaacgtctgcatgaatgccaagcatcacaaggaaaagccagggcccgaggacaagctgcacgagcagtgcagaccatggaggaagaacgcctgctgctctaccaatacgagccaggaggcacacaaggacgtctcttatctataccggttcaactggaatcactgtggcgaaatggctcccgcctgtaagcgccatttcatacaggatacctgcctgtatgagtgctctcccaacctcgggccgtggatccagcaggtggaccagtcttggaggaaagagagagttctgaatgtgcctttgtgcaaggaggattgcgaacagtggtgggaggattgtaggacctcctacacttgtaagtcaaattggcacaagggttggaactggaccagcggctttaacaaatgtgcagttggagcggcctgtcagcccttccacttctactttcccacccccaccgtcctgtgtaatgagatatggactcactcttataaggtgtccaactattctcgggggtctggaaggtgcatccaaatgtggttcgaccccgcccagggcaatccaaatgaagaggttgcccggttctatgcagcagccatgtccggcgctggcccatgggccgcctggccctttttattgtcgctggcactgatgctgctttggttactgagctag

SEQ ID NO: 188087 - DNA, 768 bp, synthetic construct
  misc_feature 1..768: note = Description of Artificial Sequence: Synthetic coding sequence
  source 1..768: mol_type = other DNA
atggtgtggaagtggatgcccctgctgctgctgctggtgtgcgtggctaccatgtgctccgcacaagacagaactgacttactcaatgtttgtatggacgccaagcaccacaagaccaagcccgggccagaagataagctccacgatcagtgcagcccatggaaaaagaatgcttgctgcaccgccagcacatcgcaggagctgcacaaagacacctccagactgtacaattttaattgggaccattgtggcaaaatggagcctgcttgcaagagacacttcatccaggatacgtgcttatatgaatgttcccctaatctgggcccatggatacagcaagtcaaccagtcctggcgcaaggaacgcttcttggacgttcccctgtgtaaggaagattgccaacgctggtgggaggactgccataccagccatacatgtaagtcaaattggcaccgcggctgggactggacttccggagtaaataagtgccctgctggcgctttgtgtagaacatttgagtcttatttccctactcccgccgccctgtgcgaggggctctggagtcattcatataaggtgtccaattattctagaggctcaggcagatgtatccaaatgtggtttgacagtgcgcagggcaatccaaatgaggaagtcgcaaggttttatgccgccgctatgcacgttaatgccggggagatgctgcatggcaccggtgggctgttactgagtttggccctcatgcttcagttgtggctgcttggatag

SEQ ID NO: 188088 - DNA, 729 bp, synthetic construct
  misc_feature 1..729: note = Description of Artificial Sequence: Synthetic coding sequence
  source 1..729: mol_type = other DNA
atgctgcccgccgccaccgaggtgcagctgcggctgcagggccagaaagatatggtctggaagtggatgcccctgctcctgttgcttgtttgtgtcgccaccatgtgttctgcccaggatcggacagatctcctgaacgtttgtatggacgcaaaacaccataagaccaagccaggacctgaagacaaacttcacgatcagtgtagcccgtggaaaaagaatgcttgttgcaccgccagtacctcccaggaactgcacaaggatacttcccgactctataatttcaattgggatcattgtgggaaaatggaaccagcgtgtgctacatcatcgagaacgccggtttccatgtctgcacatcccggcgctctagaccctgctggtgagtccgaactggctaaaaatgccagctggatgtgcccatatgccaaaaggactgtgtctgcaggtggcaggatagttacacctccgacacgggctcgcgccactggcacagaggatgggacagggcctcaggaactcacatccgcgcagctcggtttgagcgccgctcccttgtccccgacatcaccgctacagctgccgttcgtcaaggcgtcaggcgttacccacaccagatctgctaccacggctgaaggagccgccgccgctagtcggtgcggcttaatccagccccgggcaaccccgacccggaagtggagaggctcaatgcttcaaccctgcatgtag

SEQ ID NO: 188089 - DNA, 516 bp, synthetic construct
  misc_feature 1..516: note = Description of Artificial Sequence: Synthetic coding sequence
  source 1..516: mol_type = other DNA
atggtgtggaagtggatgcccctgctgctgctgctggtgtgcgtggcaactatgtgcagcgctcaggacagaacagacctgttaaacgtctgtatggacgctaagcatcataaaactaagcccgggcctgaagacaaattacatgaccagtgctcaccatggaaaaagaacgcatgctgtacggccagcacttcccaggaactccataaggacacgagccggctctataacttcaactgggatcattgtggcaaaatggagccagcctgcaaacgccatttcatccaagacacatgtctgtatgagtgctcacccaacctgggaccctggatccaacaggtgaatcagtcatggagaaaggagcgcttcctcgatgttcctctgtgcaaagaagactgccagcgctggtgggaagactgccacacttctcacacatgcaaaagcaattggcatagaggctgggactggacatccggcgtgaacaaatgccccgcaggcgctctctgtcgcacctag

SEQ ID NO: 188090 - DNA, 2010 bp, synthetic construct
  misc_feature 1..2010: note = Description of Artificial Sequence: Synthetic coding sequence
  source 1..2010: mol_type = other DNA
atggccctgctgctggtgagcctgctggccttcctgagcctgggctctgggtgtcatcatcgtatttgtcactgttccaaccgggttttcctgtgccaggaatcaaaggtgaccgaaattcccagcgatctaccacggaacgctatcgagctacgctttgttcttacaaagctgcgtgtcattcagaaaggagccttcagcggtttcggtgacctggagaaaattgaaatcagtcaaaacgatgtattagaggtgatagaagcagatgtgtttagcaatctgcctaaattgcacgagattagaatcgagaaagctaacaacctcctatacatcaaccccgaagcttttcagaatttacccaatttgcagtacctcctcatcagcaacaccggcatcaagcatctgcccgatgtgcacaagatccattctctccaaaaagtgcttctctggctcaacaagaacgggatccaggagatccataactgtgcctttaacgggacccagctggatgaactgaacctctcagacaataacaacctcgaagaactccctaatgacgtatttcatggtgcctcagggccggttatactcgacatctcaagaactcgcattcactccctcccaagctacggcttggagaaccttaaaaaactcagagcgcggagcacctataatttaaaaaagctcccaacattagagaaattggtcgccctgatggaggcctcactgacatatccctctcactgctgcgcctttgccaattggcggaggcagatctcagagcttcatcccatctgcaacaaatcaatcctgaggcaggaagtggactatatgacccaggcccggggccagcgatcctctttggcagaggacaacgaatcatcttattcccgcgggttcgatatgacatacacggagttcgactatgacctttgtaatgaggtggtcgacgtgacatgttctccgaagccggatgctttcaatccatgtgaggatatcatggggtacaatattttacgcgtcctgatatggtttatatctatactcgcaataacaggtaatatcattgtgctagttatacttaccacatcccagtacaaacttaccgttccacgatttctaatgtgtaatctcgcattcgcggacctatgcatcggaatttacctgctgctgatcgcgtctgtggatattcacaccaagtcccaatatcacaactatgcaatagactggcagacaggcgccggctgtgacgcagcaggcttcttcacagtattcgcctcagaactgtccgtgtacaccctgaccgctattacgctcgaacgttggcacaccattactcacgccatgcagctcgattgcaaagtccagctgcgtcacgctgcttccgtgatggtcatggggtggatcttcgcatttgccgcagctctcttcccgatcttcggaattagttcctatatgaaggtgtccatatgcctgcccatggatatagatagccccctgtctcagctctatgtgatgagcctgctggtgctgaatgtccttgccttcgtcgttatctgcggatgttacatccacatttatctaaccgttagaaaccctaacattgtatcttcatcatccgatacaagaatcgccaagagaatggcaatgttgatcttcacagacttcctatgcatggcccctatatctttctttgccatatccgcttctcttaaggtgcccctcatcactgtgagcaaggccaaaattctcctcgtgttatttcaccccattaatagttgtgccaacccctttttgtacgccatctttacaaagaattttaggcgggactttttcatcctgctcagcaaatgtggctgttatgagatgcaagctcaaatctacagaacagagacaagctctactgtccataatacccacccacgtaacggccactgcagttcggcgccaagggtaacttcaggctctacgtatatcctcgtgccactgtcccatctcgcacagaactag

SEQ ID NO: 188091 - DNA, 1902 bp, synthetic construct
  misc_feature 1..1902: note = Description of Artificial Sequence: Synthetic coding sequence
  source 1..1902: mol_type = other DNA
atggccctgctgctggtgagcctgctggccttcctgagcctgggcagcggctgccatcatagaatatgtcattgctctaatcgtgtgttcctgtgccaggagtccaaggtcaccgagattccttcggatctccccagaaacgctattgaattgcggttcgtactcactaagttgagggtaatccagaagggggcattttctggattcggggatcttgagaagattgagatatcacagaatgatgtgctggaggtgattgaagcagatgtgttctccaacctaccaaagctccacgaaattcgcatcgagaaggctaacaatctgctgtatatcaaccctgaagcgtttcaaaacttgcctaatctgcagtatctgctgatttcaaataccggtatcaagcatctcccagatgtccacaagattcactctctgcagaaagttctgcttgacatccaggacaacatcaacattcacactatcgagcgtaattcctttgtaggtctctcctttgaatcagtcattttgtggttgaacaagaacggaattcaggagatccataattgtgcattcaatggcacccaattggatgaattgaatttgtctgataacaacaaccttgaagaactgccgaatgatgtgtttcatggggcctctggtcctgtaatactgagcgagttgcaccccatctgcaataagtcaatactgagacaggaggtggactatatgacccaggctcgggggcagagaagcagcctggctgaagacaatgaatcgtcatatagccgggggtttgacatgacgtacactgaattcgattatgatctgtgtaacgaggtagtggacgtaacgtgtagccccaaaccagatgcgttcaacccttgtgaagatataatggggtataatatcttgcgggttttaatttggttcatttcaatcctcgctataaccgggaatataattgtccttgttatcttgactacttcccagtacaaactgactgtgcctcggttcctgatgtgtaacttggcctttgcggatctgtgcatcgggatatacctgctgctgatcgcgtcagtggatatacatactaaaagccagtaccacaactatgcgattgactggcagactggtgcaggatgtgacgcagctggatttttcacagtattcgcctccgagttatctgtgtatactttaacggcaatcacactggagcggtggcatacaatcacacacgcaatgcagttagactgtaaagtgcagctccgacacgctgcttccgtcatggttatgggctggatcttcgcctttgcagctgccctatttccaatcttcgggatcagcagctacatgaaggtatccatctgtcttccaatggacattgattcgcctctgagtcagctgtatgtgatgagcttactggttctgaacgttctggcttttgtggtgatatgcggatgctacattcacatctacctgaccgtgcgcaatccaaacatcgtgtcatccagttccgatacaaggattgctaagcgcatggcaatgctgatctttactgattttctttgcatggcgcctatctcattttttgcaatcagcgcaagtctgaaggtgcctttaattaccgtcagcaaggcaaagattctgctggtactgtttcaccccatcaattcgtgtgccaacccttttctttacgctatttttaccaaaaatttccgtcgcgatttctttattctgctcagcaaatgcggctgttacgagatgcaggcacagatctaccggacggaaacctcttcgacagtacataacactcatccccggaatgggcattgttcatcagccccgagagtgacttcaggttctacatacatactggtgcccctctcacatctcgcgcaaaactag

SEQ ID NO: 188092 - DNA, 2088 bp, synthetic construct
  misc_feature 1..2088: note = Description of Artificial Sequence: Synthetic coding sequence
  source 1..2088: mol_type = other DNA
atggccctgctgctggtgagcctgctggccttcctgagcctgggcagtggttgccaccatcgcatctgtcactgttcgaacagggtctttctttgccaggaatcgaaggtgactgagatcccttcagacctgccaagaaacgctattgaacttaggttcgtactgactaaactgcgagttatccagaaaggtgccttctcaggatttggtgacctagagaaaattgaaatctcgcaaaatgacgttttggaggtgatagaggcagatgtgtttagcaatcttcccaaacttcacgagatccgtatagagaaagcaaacaatctgctctacattaacccagaggcatttcagaacctgcctaatttgcagtatctcctgatcagtaatacgggtattaagcacctgccagatgtgcacaaaatccactccctgcagaaggtcctgctggacattcaagacaacattaatatccacaccatcgaaagaaactcatttgtaggcttgtccttcgagagtgtgatcttatggctcaacaaaaacggaatccaggagatacacaactgcgctttcaacggaacacagctggacgaattgaacctgtccgataataataacctggaggaattgcccaacgatgtgttccatggcgccagcgggcccgttatcctcgatattagtagaacgcggatccattccctgcctagttatggactggagaacctgaagaagttgagggcacgaagcacctacaacttgaagaagctgcctactttagagaaactagttgcgctgatggaagcaagcttgacttatccgtctcattgttgtgcttttgctaattggagacggcaaatcagtgagctgcatccaatttgtaacaagagtatcttgagacaagaagttgactacatgacccaggctagggggcagcgttcgtcactggctgaggataacgagagctcatatagtcgcggctttgacatgacatatacggaatttgactacgatctctgtaacgaggtggtagacgtaacttgcagcccaaagccggacgcctttaatccctgtgaagatatcatgggctataacattctccgagtgctgatttggtttattagcattctcgcaatcacaggtaacattattgtcctggtaatcctgactacctctcaatacaaactgaccgtgcctcgcttcctaatgtgcaacttggcttttgccgacctctgtataggtatttacttactccttattgctagtgtagacattcatactaaatcgcaatatcataactacgccatagactggcagaccggggctggctgtgatgctgcaggtttttttacggtctttgcttctgagctctccgtatacacacttactgcgatcactcttgagcggtggcacaccataacacatgcaatgcaactagactgcaaagttcagcttaggcatgccgcttccgtcatggtgatgggctggatcttcgctttcgccgccgcgttattcccaatcttcggcatctctagctatatgaaggtgagcatttgtttgcccatggacatcgactctccactttcacaactttatgtgatgtctcttctagttctgaatgtgctggcgtttgtggttatctgcgggtgttacatccacatttacttgacagtacggaatccaaacatcgtgagctcttcttctgataccaggatcgctaaacgtatggcgatgctcattttcacagacttcctgtgtatggcacctatcagtttttttgccatcagtgcgagcttgaaagtaccactcattacagtgtccaaggcgaagattctgctggtgctgttccaccccatcaattcgtgtgccaatccattcctgtatgccatcttcacgaaaaattttcgaagagacttctttatactgcttagcaagtgtggatgctatgagatgcaggcccagatatataggactgagacatcgtctacagtacacaacacccaccctcggaacggccactgttcctccgctcctcgggttacttctggctctacatacattctcgtccctctgagccatctggcccagaattag

SEQ ID NO: 188093 - DNA, 1296 bp, synthetic construct
  misc_feature 1..1296: note = Description of Artificial Sequence: Synthetic coding sequence
  source 1..1296: mol_type = other DNA
atggaggccagcctgacctaccccagccactgctgcgccttcgccaattggcggcgacagattagtgagttgcatcctatctgtaacaaaagcatccttcggcaagaggtcgattatatgacccaagccagaggtcagaggagcagcttggcggaagacaacgaaagttcctacagccgcggcttcgacatgacatatacagaatttgattatgatctgtgtaacgaagttgtggatgtgacctgctctccaaagcccgacgcattcaacccatgtgaggatatcatgggctacaatattttgagggtcttgatctggttcatttcaatacttgctattactggaaacatcatcgtgctggtgattttgactacctctcaatacaagctgacggtgccgcggtttctgatgtgtaacttggccttcgcggacctatgcataggcatataccttcttctgattgcctctgtggacatccatactaagtcacagtatcacaactatgcgattgactggcagactggggcaggctgtgatgccgctgggttctttaccgtgttcgcttccgagttgtcagtctatacattaacagcgattacactggaacgatggcacacaatcactcatgcgatgcaacttgactgcaaagtgcaactcagacatgccgccagcgtgatggtgatgggatggatcttcgcgtttgccgctgccctctttccgatttttggtatttctagctacatgaaagttagcatttgcctaccgatggatattgactctccactgtcgcagctctatgttatgagtctgctagtcctcaacgtgttagccttcgtggtaatttgcgggtgctatatccacatctatttgactgtgagaaacccgaacatcgtgtcaagctcatcagatactagaatcgccaaacgtatggccatgctgatctttaccgacttcctctgcatggcccccatttctttcttcgccatttcagcgtcgctgaaggtgcccctcataacagtaagcaaagccaagatccttctggtgctgtttcatcccattaacagctgcgccaacccttttctgtatgcaatctttacgaaaaacttcagaagggattttttcattctgctgagtaagtgcgggtgctacgagatgcaggcgcagatttataggactgaaacctcaagcaccgtgcataatacccacccccgcaatgggcactgttcatccgctccccgggtcacaagtggctccacctatatcctcgtgccactgagccacctagctcagaactag

SEQ ID NO: 188094 - DNA, 3417 bp, synthetic construct
  misc_feature 1..3417: note = Description of Artificial Sequence: Synthetic coding sequence
  source 1..3417: mol_type = other DNA
atggcccccaccctgttccagaagctgttcagcaagcggaccggcttgggggctcccggccgggatgcgcgggaccccgattgcggtttctcatggcctttacccgaattcgatcctagccaaatccgccttatcgtgtatcaggattgtgaaaggcgcgggaggaacgttctgttcgattcatcagttaaacgacgaaatgaagatattagtgtcagtaagcttggtagcgacgcccaggttaaggtgtttgggaagtgttgtcaactaaagcccggaggcgattcctcctcaagcctcgattcaagcgtcacctcctcctccgatataaaggatcagtgcttgaaatatcaaggatcccgttgttcctctgatgctaacatgctgggcgagatgatgttcggatccgtagccatgagttacaagggcagcacccttaaaatccatcaaatcagaagtcctccccagctaatgctcagcaaagtgtttacagcacgcaccggcagtagtatctgcggaagtctcaacacactgcaggactccctagagtttatcaaccaggataacaacactctcaaagccgacaataacaccgtgataaacggtcttttaggtaacattgtgcacagcaaccccatggacatgccaggccgggagctgaacgaagaccgcgacagcggcatcgcccgaagtgcctcactgtcttccctgttgatcaccccctttccttcgcccaactcatccctcacccgctcttgcgctagctcatatcagcggcgctggcgtcgctctcagacgacctcactcgaaaatggtgtgtttcctcgatggtcaattgaagagtcctttaacctctcggatgagagctgcggccccaatcccggcatcgtgaggaaaaagaaaatcgctattggcgtgatttttagtctgagtaaggacgaggatgaaaataacaaatttaacgagttcttcttctcacatttccctctttttgagagtcacatgaataaactaaagtcagcaattgagcaggccatgaagatgtctcgcagatctgccgatgcctcacagcggagtctggcatacaataggatagtcgatgcactgaatgagtttagaacgacaatttgtaacctttacactatgccccgcattggggagccggtgtggctcaccatgatgagtggcactcctgaaaagaaccacctttgttatcggttcatgaaagaattcacctttctaatggaaaacgcatccaaaaaccagtttctccccgccctgatcaccgcagtgcttactaatcatctggcatgggtgcctaccgtgatgccgaatgggcagccccctattaagatttttttagaaaaacactcaagccagtcggtggatatgctagcaaaaacacacccctacaaccccctctgggcccaactgggcgatctctatggagctatcggcagtccagttagattggctagaaccgttgtggtgggcaaacggcaggacatggttcagcggttactgtattttttgacttacttcatacgttgctccgaattacaggagacacatctcctagaaaacggcgaggatgaggcaatcgtaatgccgggtactgtgatcacaacaacccttgagaagggcgaaatcgaagagtcagaatatgtgttggtgaccatgcacaggaacaagtcttctttgctgtttaaggaaagtgaagagatacgcacacctaactgcaattgtaaatattgctcgcaccccctgctcggacagaacgtagagaatatatctcaacaggagcgcgaggacatacagaattcatctaaagaactgcttgggatttcagatgaatgccagatgattagcccctcagattgtcaggaggaaaatgctgtagacgtgaagcagtacagagacaaattgaggacatgcttcgatgccaaattagagaccgtagtatgcacggggtctgtgcctgtcgacaaatgtgctctatctgagtcaggcctggagagcactgaggaaacctggcagtccgagaagcttctggactcagacagccataccggcaaggcaatgcgaagtactggaatggtggttgaaaagaaacccccagataaaatcgtgcccgcgtcattttcatgtgaggctgctcagactaaggtaacctttttgattggcgattctatgtctcccgactccgacacagaactccgctctcaggccgtggtggaccagatcacacggcatcacacaaaaccgcttaaagaggagagaggcgccatcgaccagcatcaggagacaaaacaaacaaccaaggaccagtccggtgaatcagatactcaaaacatggtctctgaggagccgtgtgagctgccttgttggaatcactctgatcccgaatccatgtcactgttcgacgaatacttcaacgacgactccatcgaaacaaggaccattgatgatgttcctttcaagacctcaaccgactcgaaagatcattgttgcatgttggaattctccaaaatcctctgcaccaagaataataagcagaacaacgagttttgtaaatgtatcgaaaccgtcccacaagactcttgtaaaacatgtttcccacagcaggatcagcgagatacactgtctatcctcgtgccccatggagataaagagagctctgataaaaaaatcgcagtggggaccgaatgggatattccgagaaacgaatcttctgactccgccctgggagactccgaaagcgaggatacagggcatgatatgacccgacaggtgtccagctattatggcggggagcaggaggactgggctgaggaggacgagatccctttccccggcagtaagctcattgaggtgagcgcagtccagcccaacatcgcaaatttcggaagaagtctcctggggggatattgttcaagctacgtccctgattttgtgctccaaggaattggcagcgatgaacgctttcggcagtgtttgatgtcagatctcagccacgccgtgcagcacccagttctggatgaaccgatcgcggaagccgtttgcattatagcagatatggacaagtggacagtccaggtggcatcctcccaaaggagagtgacagataacaaattgggtaaggaagtgttggtgtcgtccctggtgtctaacctcctccactccacacttcaactttataaacacaacctttcacccaacttctgtgtcatgcacctggaggacagactgcaggaactgtactttaagagcaaaatgctgagcgagtaccttaggggccagatgcgggttcacgttaaagagctgggcgtggtgcttggaattgaaagctctgatttgccactgttggcagccgtcgcctctactcacagcccgtatgttgcccagatcctactctag

SEQ ID NO: 188095 - DNA, 3501 bp, synthetic construct
  misc_feature 1..3501: note = Description of Artificial Sequence: Synthetic coding sequence
  source 1..3501: mol_type = other DNA
atggcccccaccctgttccagaagctgttcagcaagcggaccggcctgggtgcacctgggagggatgctcgagacccagattgcggtttcagttggccgctgcctgagtttgatcccagtcagatccgattgatcgtctaccaagactgcgaacggcgaggtcgtaatgtgctgtttgactcctctgtcaaacgaagaaatgaggatatttctgtttcgaagctcggctcagacgcacaagtgaaagtcttcggaaaatgctgccagttgaaaccaggcggtgacagttcctcgtctttagacagctccgtgacttcctcctctgacatcaaagaccaatgcctcaaatatcaggggtcgagatgctccagtgacgccaatatgctgggcgaaatgatgttcggaagcgtggccatgtcctacaagggctccacgttgaagattcaccaaattcgatctccaccccagctgatgttgagcaaagtcttcacagcgcgcactggatcctctatttgtggaagcctcaatacactccaggactcactggagtttatcaatcaggataataacactctgaaggcggacaacaataccgtgatcaacgggctactcggtaacattgggctgtctcagttttgctcgccaaggagagcttttagcgaacagggacctctgaggctgatacgtagtgcaagctttttcgccgtccactctaaccctatggatatgcctggaagagaattgaacgaggaccgtgactccgggatcgcccgatccgcaagtctctcctcgctcctgatcactccttttcctagccctaattcctccctgacccggtcctgtgcctccagttaccagcgccgctggcgaagatcgcagaccacctctcttgagaatggggtcttccctagatggtccatcgaggagtcctttaatctgagtgacgaatcctgcggaccgaacccaggaatcgtgcggaaaaagaagatcgccataggagtcattttcagcctgtctaaagacgaggatgaaaacaacaagtttaacgagttcttttttagccatttccccctgtttgagagtcatatgaataagttaaagtctgccatcgagcaggctatgaaaatgtctaggcggagcgcagacgcaagccagcgttctctggcatacaatagaattgtggatgctctgaacgagttccgcaccacaatatgtaacttatacactatgcctcgtatcggggagccagtatggctcactatgatgtcaggtactcctgagaaaaatcatctatgctaccgctttatgaaggagtttacctttctaatggaaaatgcttctaaaaatcagtttcttcccgccttgattactgcagttctgacaaatcatctcgcatgggtgcctacagtcatgccaaacggacagcctcctattaagatcttccttgagaagcattcctcccagagcgtggatatgcttgccaagacacacccttacaacccactgtgggcacagctcggggacctctacggcgcaatcgggtctcccgtgcggctggctcgcactgtcgtggtgggaaagagacaggatatggtccaaagactgctctatttcctcacttattttatacgttgtagtgagctccaggagacacacttgctggagaatggcgaggatgaagctattgttatgccaggcactgtgatcacaacaactcttgaaaaaggggaaatcgaggagtccgaatacgttctggtgactatgcacagaaataagagttccctgctgttcaaagaaagtgaagagatccgcacacccaattgcaactgcaagtattgctctcatcctttgctcgggcagaacgtggaaaacataagccagcaagagcgagaggacatccaaaatagctcaaaggaactgctgggtataagcgatgagtgccaaatgatctcccctagcgactgccaagaggagaatgccgtggacgtaaaacaataccgcgacaagctgcgaacttgcttcgacgctaagctcgagacagtcgtctgtacaggaagtgtaccagtggataaatgcgccctgtccgagagcggcctcgagagcacagaggagacctggcagagtgagaaactacttgacagcgacagtcacacgggtaaggctatgagatcgacggggatggtcgtcgagaaaaagccaccagacaaaatcgtcccagcatcattcagctgtgaggccgcccagacaaaagtgaccttcctcatcggagactccatgagtccagatagcgacacggaactgagaagccaggccgtggtagaccagattacccgtcaccatacaaagcctcttaaggaggagagaggtgccattgatcaacaccaggagactaaacagaccactaaggaccagagtggcgagagcgacactcagaatatggtgtctgaggaaccgtgcgaactgccctgctggaaccacagtgaccccgaaagcatgagcctgtttgacgagtacttcaacgatgattctattgaaacaagaaccatagatgatgtgcctttcaagacttctacggatagcaaggaccactgctgcatgctggaattttccaagatcttatgtactaaaaataacaagcagaataatgaattttgcaaatgcatcgagaccgtgccccaggattcctgcaagacttgtttcccgcagcaggatcaacgggacaccttatctatcctggttccccatggtgacaaggaatcttcagataagaagatcgccgtgggtactgagtgggacatccctcgcaacgagtcttccgacagcgcattaggtgatagtgaatcggaagacactggccacgacatgactcgtcaggtctcttcctattatggcggagagcaagaagattgggctgaggaagacgaaattcctttccctggtagcaagttgatcgaagtgtctgccgtgcagcccaacatcgccaacttcgggcgaagtcttctggggggttattgtagctcttacgttcctgactttgtccttcagggtattggcagcgatgagcggtttcggcaatgtttgatgagtgacctgagtcacgcggtccaacaccctgtgcttgatgaacccattgcggaggctgtatgcattatcgctgacatggataaatggacagtgcaagtcgcatcaagccagcgccgcgtcacagacaacaaattgggcaaggaagtgttagtgtcatccctggtttccaatctgctgcattctaccctgcagttgtataaacacaacctgagtccaaatttctgtgtgatgcatctcgaagataggcttcaggagctgtacttcaagagcaagatgctcagcgagtatttaaggggccagatgagagtgcacgtgaaagagctgggggtggtcctcgggatcgaaagcagtgatcttccactgctggctgcagtggccagcacacattcaccttacgtggcccagatccttctgtag

SEQ ID NO: 188096 - DNA, 1527 bp, synthetic construct
  misc_feature 1..1527: note = Description of Artificial Sequence: Synthetic coding sequence
  source 1..1527: mol_type = other DNA
atggcccccaccctgttccagaagctgttcagcaagcggaccggcctgggcgcacccggacgggacgcaagagatcctgactgcggattcagctggccactgcctgaattcgatccttcccagatcaggcttattgtttatcaggattgcgagaggcgaggccgcaatgtcctatttgattcctctgttaaacggcgaaatgaggatatatcggtgtctaaactcggtagcgacgcccaagtcaaggtttttggtaaatgctgtcaattaaaaccagggggcgacagctcatcctccctcgactccagcgtgacttcctcttctgacattaaggatcagtgtctaaagtatcagggcagtagatgctcctcagatgcgaacatgctgggagagatgatgtttgggagcgtcgctatgtcttacaagggaagcactctgaagattcaccagattcgctcgcccccacagctgatgttgtctaaagtgttcacagcccggacaggctcttccatttgtggttccctgaatacattgcaggattctctggaattcatcaatcaagacaataatacactaaaggctgacaacaacactgttatcaatggccttctgggcaacatcgggcttagccagttttgcagcccgcgacgtgccttcagcgaacagggtccattaagactaatacggagtgcatcattttttgccgtccactccaaccctatggacatgcctggccgcgagttaaacgaagatagggactcaggcatcgcacgatccgcctctctgagttcactgctgatcactcccttcccttctccgaattcctccctgacaaggagctgtgcctcctcttaccagcgtcgctggcgcaggagccagaccacttccttagagaacggggtgtttccaaggtggtccatcgaagaaagctttaatctgtccgacgagtcctgtgggccaaaccctgggatcgtgcgcaagaaaaagatcgcgatcggcgtgatttttagcttgtccaaggatgaagatgagaacaacaagttcaacgagtttttcttttcccactttcccctcttcgaatcccacatgaacaagttaaaatctgccatagagcaggcgatgaagatgtcaaggcggtcagcagacgcatcccaacgatcccttgcttataaccggatcgtggacgccttgaacgagttccgcaccacaatatgcaacctgtacacaatgcctagaatcggcgagcctgtctggctgactatgatgagcggcacacccgaaaaaaaccacttgtgttatcgctttatgaaggaatttacttttctgatggagaacgcctctaaaaaccaattcctgcccgcactaatcacagctgtccttaccaaccatttggcttgggtgcctaccgtgatgcccaatggacagcctccaatcaaaattttcttagagaagcactcatcccagtcggtggacatgttggctaaaacacacccgtacaaccccctctgggcccagctgggaatgtag

SEQ ID NO: 188097 - DNA, 2757 bp, synthetic construct
  misc_feature 1..2757: note = Description of Artificial Sequence: Synthetic coding sequence
  source 1..2757: mol_type = other DNA
atggacatgcccggccgggagctgaacgaggaccgggacagcggcatcgcgcggtcagcgtccctgtcctctctgctgatcactccatttcctagtccaaatagctcactgacaagaagttgcgcctctagctaccaacgtcggtggcgccggtcacaaaccacatcactcgaaaacggagtgttcccacgctggtctatcgaggaatcattcaacttaagcgatgaaagttgcgggcctaaccctggcatcgtaagaaagaaaaaaatcgccattggcgtcattttttctttgtctaaagatgaagacgagaataataagttcaatgagttctttttctcccactttcccctctttgagtcacacatgaacaaattgaagagcgccatcgaacaggccatgaagatgtcacggcgcagcgccgatgccagtcagcggtcccttgcgtataataggatcgtagacgctctcaacgagttccggacaaccatttgtaatttatacactatgccgcgcataggggagcccgtgtggttaactatgatgtctgggacccctgagaaaaatcatctttgctatcgtttcatgaaggagtttaccttcttgatggagaatgccagcaagaatcagtttctgcccgcgttgattaccgccgttttgacaaaccatctcgcctgggtgcccaccgtgatgcccaacgggcagcccccaattaaaatattccttgaaaagcactcaagccagagtgtcgatatgctagcgaaaactcatccgtataaccctctctgggctcaactgggcgacctatatggggccattgggtctcccgttcgtctggccagaacagtggtcgtaggaaaaaggcaggatatggtccagagattgctgtacttcctaacatacttcattaggtgttctgagctgcaagaaacccacctgctcgagaacggggaggacgaagccattgtgatgccagggactgtgataaccaccaccctggagaagggcgagatagaagagtcagaatatgtcttagtgcttctgttcaaggaaagcgaagaaattaggacccctaactgtaactgcaaatactgttcacatcctctccttgggcagaatgtcgagaatatatcccagcaggagagggaggatattcagaattcatccaaagagctgttgggcatctccgatgagtgtcagatgatcagcccctcggattgtcaggaagagaatgcagttgacgtgaagcagtacagggacaagctgaggacctgtttcgatgcgaagctggaaacagtcgtgtgtaccggatctgtccccgtggacaaatgtgcactaagcgagtcaggacttgagtccacagaagaaacgtggcagtctgagaaactgctagatagtgattctcacactgggaaggcaatgagatctactggtatggtggtggaaaagaagcctcccgacaaaatagttcccgcctccttctcgtgcgaggcggcacaaacaaaggtcactttcctgatcggagatagtatgtcacccgactctgacacggagttgcgatcgcaagctgtggtcgatcagataaccagacatcataccaagccacttaaagaggaaaggggagccatcgaccaacatcaagagaccaaacaaacaacaaaagaccaatcaggcgaaagcgatacgcagaatatggtgagcgaagaaccctgcgagctcccatgttggaatcatagtgatccagagtctatgtcccttttcgacgaatatttcaacgacgattccatcgagacgcgtactatcgatgacgtgccatttaaaacctccacagattctaaggatcattgctgcatgctcgaattcagcaagatcctatgtactaagaacaataaacagaacaacgagttctgcaagtgtatagagacagttccgcaggattcctgcaaaacgtgttttccccaacaggatcagcgggatactctgtccattctggtgcctcacggagataaagagtctagtgataagaagatagcggtgggcacagaatgggatatacctcgtaacgagagttccgacagtgccctgggcgatagtgagagtgaggatacaggacacgatatgacccgtcaggtctcaagctactacgggggagagcaagaggactgggccgaggaggatgagataccgttccccggctcgaagctgatcgaggtcagcgctgtacagccgaacattgcgaattttggacgcagcctccttggaggctattgtagtagctatgtgccagatttcgtgttacagggaatcggatcagatgagagatttcgtcagtgcttgatgagtgacctcagccacgctgtgcaacaccccgtactcgacgaacctatcgctgaggccgtgtgcataatcgcagatatggataagtggacagtgcaggttgcttctagccagcgcagggtcaccgacaacaaactaggaaaggaggtgcttgttagtagtcttgtgtccaatctgttacactctaccctccagttatacaaacacaacctgtcccccaacttctgcgtgatgcacctcgaagaccgcctccaggaattatatttcaaatccaagatgttgagcgaataccttcggggtcagatgcgtgtgcatgtgaaggaacttggagtggtgcttggaatcgaatcctcggacctacccctgttagccgctgtggcttctacccattctccctacgtggctcagatcctcctgtag

SEQ ID NO: 188098 - DNA, 3345 bp, synthetic construct
  misc_feature 1..3345: note = Description of Artificial Sequence: Synthetic coding sequence
  source 1..3345: mol_type = other DNA
atggcccccaccctgctgcagaagctgttcaacaagcggggcagctcaggttcttccgcggcagccagtgctcaaggacgggcccccaaagaagggcccgcattctcttggagttgttccgagttcgacttgaacgagatcagactgattgtatatcaagactgcgataggcgggggcggcaggtgctttttgattctaaggccgtgcagaaaattgaagaggtcactgcccagaaaacagaggacgtccctatcaagattagcgcaaaatgctgtcaaggcagctcttcggtgagctcatctagttcatcctctataagctcacacagtagctctggaggctcatcacatcacgccaaggagcaactgcctaagtatcagtacacacgtcccgctagtgatgtcaatatgctcggcgaaatgatgtttggctcagtagctatgtcttataagggaagtacacttaagatccactatatcagatcgccccctcaattaatgatcagcaaggtgttttccgctcgcatgggtagcttttgtggatccactaacaatctccaggactcctttgagtacataaaccaggatcccaatttgggtaaactgaataccaaccagaactcgcttgggccttgcagaaccggaagcaacttggctcacagcactcccgtggacatgccctccaggggccagaacgaagaccgggattccggcatagcacgaagcgcctctctctcttcattattgatcacacccttcccttcacccagctcttccactagctcctcctcatcctatcagcgacgctggctccgttctcaaacaacaagtttagaaaacggcattatccctcggaggagtacagatgagaccttctctctggcagaggagacgtgctcttccaaccccgctatggttcggagaaaaaagatcgcaataagcattatattttccttgtgcgagaaagaggaggctcagcgaaacttccaggatttcttcttctctcacttccctctgttcgagtcccatatgaacaggctgaagtccgctatagagaaagctatgatctcatgtcggaagattgctgagagtagtctgagagtccagttttatgtgagtaggctcatggaagctctgggtgaattccgtggtaccatctggaacctctatagcgttccaaggattgctgagcccgtgtggctcaccatgatgtctgggactctggaaaagaatcagctgtgtcagagattcttaaaggaatttacactgctgattgaacagatcaataagaaccaattcttcgcagccttactcacagctgtactgacataccacttggcatgggtgcccactgtaatgccagtggaccatccgcccattaaagccttttctgagaagaggacttcacaaagcgtgaatatgcttgccaaaacacatccctacaacccgctgtgggcccaactgggagatttatacggggcaatcggatcccctgtgaggctgactaggaccgtggttgtgggcaagcagaaggacttagtgcaacggattctgtacgtcctgacgtatttcctgcgctgttctgaactgcaggagaatcagctcacttggtccggcaatcacggtgagggcgatcaggtcttgaacggttccaaaataattaccgcgctagaaaagggcgaagttgaggagagcgaatacgttgtgattaccgttagaaatgaaccagctttagtacctccaatactcccgcccacagcggccgaaagacacaatccctggccgaccgggtttcctgagtgcccagaaggcacagattcccgtgacctcggactcaagcctgataaagaagctaatagacgaccagagcaagggagtgaggcctgttctgctggttgcctgggccctgcttccgatgcaagctggaagccacagaacgcgttttgcggagatgaaaagaataaggaggcaccccaggatgggtcctctcgactgccctcttgcgaggtgctgggagcagggatgaaaatggaccagcaggcagtctgtgagctgttgaaggtggaaatgcctacccgcctgcccgatcgatccgtcgcatggccctgtccagaccgacacctgcgagagaaaccaagccttgaaaaagtcacatttcaaattgggagttttgcgtcccctgaatctgatttcgagagccgaatgaagaagatggaggagcgcgtcaaggcctgcggcccatccctggaggcgtctgaggccgccgacgtagcccaggaccctcaggtctctcggtccccctttaaacctggattccaggagaacgtatgctgtccacaaaaccgattatctgagggcgatgagggggaaagcgataaggggtttgctgaagacaggggaagtaggaatgatatggcggccgatatcgctggacagctgtcccatgcggctgacctcggtaccgcctcgcacggagccggcggcactggcggccgccggctcgaagctactcgcggattgtatgtaaaggcggcagaaggccctgtcctggagccagtggcccccagatgcgtccagagaggtccgggcttggtggcaggcgctaatatcccatgcggcgacgacaataaaaaggcgaattttcggacggaaggcgacatccccaggaacgagtcctctgattcagcgttgggagactccgatgacgaagcttgtgcatccgccatgcttgatctgggacatggcggagatcgcactggcggttcactcgaggtggagctgccactgccccggagccagtcaatttcaacacagaatgttaggaattttgggcgaagtctccttgccgggtattgccctacatatatgcccgacctggtcctgcatggaacagggtctgacgagaagctgaaacagtgtctcgtcgcagatttggtacacaccgttcatcacccagtactagacgagcccattgccgaggccgtgtgcatcatcgctgacacagataagtggtccgtgcaggtggctacgtcccagcgcaaggtgaccgacaacatgaagttggggcaggatgtgttagtaagcagtcaagtatcttcactgttgcaatctatcctccagctgtacaaacttcaccttcctgccgatttctgtataatgcatttagaggataggttgcaagagatgtatctgaaatctaagatgctatctgagtatcttcggggtcacaccagggtacatgtcaaggaactcggcgtggtgctgggtattgagagcaacgacctcccactcctgaccgctatcgcctctacccactccccatacgtagcacaaatactgctctag

SEQ ID NO: 188099 - DNA, 3414 bp, synthetic construct
  misc_feature 1..3414: note = Description of Artificial Sequence: Synthetic coding sequence
  source 1..3414: mol_type = other DNA
atgtgcggcggcaccgccaacaccaccaaccagcccgagagctggcaggattcggcccgatgcgtgagcgatgctgtgcccggggcaggaagaatatatcgcgccctgttatgcaccaagataaagaagcacacaggtgttgataggagtactgaccacaccgagctagacaattcctggtcatgcagcgaatttgacctgaacgagataagacttatcgtctaccaggactgcgaccgccgaggccgccaggttctgttcgattctaaggccgtgcaaaagatcgaggaggtgacagcccaaaagaccgaagacgttcccattaagatttccgcaaagtgttgtcagggctcttcaagcgtcagcagttcctcgtcttcctctatctcctctcattccagtagtggaggctcctcccatcatgcaaaggaacagcttcctaaatatcagtacacaaggcccgcctcagatgttaatatgcttggtgagatgatgttcggttcagtggccatgtcatacaaggggtctacactgaagattcactatatccggtcccccccacaactcatgatcagcaaagtgttcagcgctcggatgggtagcttctgcggctcaaccaataatctgcaggattcttttgagtacataaatcaggatccaaacttgggcaagttaaacaccaaccaaaactcactcgggccttgcaggactggcagcaatctcgcacactctactcctgtggacatgccctctcgaggccagaacgaggacagggactcaggtatcgcccggagtgcctccctctcaagtctgttgattactcctttcccaagcccctcttcttcaaccagttcgtctagcagctaccagcgcagatggctgaggagccagactactagtcttgagaatggtatcatcccacggaggtctaccgatgagacgttctctctcgcagaggagacctgctcgtccaatcccgcaatggtgcgacggaaaaaaatcgcgattagcatcatcttttctctctgtgagaaagaagaggctcagcgaaattttcaggattttttttttagccacttcccgctgttcgaatctcatatgaatcggctgaagagcgccatcgaaaaggcgatgatcagctgtcgcaaaatagctgagtcttcgttgagagttcagttttatgttagccgactgatggaggcactgggagaatttcgtggcacaatctggaatctctattccgtgccccgaatagccgagcccgtctggctgaccatgatgtccggaactctcgagaaaaaccaactgtgccagcgattccttaaggaattcaccctcttgattgaacaaattaacaagaaccagttcttcgcggctctactgactgcagtattaacataccacctggcctgggttcccacagtgatgcctgtagatcatccccccatcaaagcattctctgagaagcgaaccagccagtccgtgaacatgctagccaagactcatccttacaaccctctgtgggcgcagcttggtgacttgtacggtgccatcggcagtccagttagactaacaagaactgtcgtggtcggcaaacaaaaagacctggtgcagcggatcttatacgtcttgacttacttcttgcggtgtagcgagcttcaagagaaccaacttacttggtccgggaatcacggcgagggggatcaagttttaaacggatctaaaataatcacagcactggagaagggcgaagtggaagagtccgagtacgtagtgatcacagtccggaacgagcccgcattggttccgcctatcctacccccaacagctgctgagcgccacaatccatggccaaccggatttccagagtgcccagaggggacagattccagagatctgggcttgaaacccgataaggaagcaaaccgacgcccagagcaagggagtgaggcttgcagcgccggctgtctcgggccagccagtgacgcctcatggaaaccccaaaatgcattttgcggagatgagaagaacaaagaggctcctcaggatggaagtagccgtctgccctcctgcgaagtcttgggagctggcatgaaaatggaccagcaagctgtttgtgagttgcttaaggtcgaaatgcccactaggcttcccgaccgcagcgtcgcttggccttgtccagaccgacacctgagagagaagccatccctggaaaaagtgacattccagatcgggtccttcgcctcccccgaaagtgactttgaatcacgtatgaaaaaaatggaggagagggtgaaggcctgcgggcccagcctggaagcctcggaagcagcagacgttgcccaggatcctcaggtctcaagaagtcctttcaaacccggctttcaagagaatgtgtgctgccctcagaatcgactctccgaaggagatgagggcgagtccgataaaggctttgctgaagataggggcagccggaacgacatggcagcagatattgccgggcagctctcccatgcagccgacctgggaactgcgtctcacggcgcaggcgggacaggcggacggcggttggaagctactcgcgggctgtacgtgaaggcggctgaaggccccgtgcttgaaccagtggcgccacggtgtgtgcaacgaggtcctggacttgtggccggagcaaatattccttgcggagacgataacaaaaaagccaactttcgcactgagggggatattcctagaaacgaaagttctgacagtgctctgggcgattcagatgacgaagcgtgcgcctctgccatgttggacctcggccatgggggggatcgcactggcggcagtttagaagtggaactgccattgcccagaagtcaatccatctccacgcagaacgtgcgaaacttcggcagatctttgcttgccggctactgcccgacgtatatgccagacctggtgttgcatgggaccggcagcgatgagaaactcaagcaatgtctagtggccgatctggtgcatacagtgcaccatccggtcctcgacgagcctattgcggaagcagtctgtattattgcggataccgacaagtggagcgtccaggtcgccacctctcagcggaaggtgacggacaacatgaaactgggtcaagatgttcttgtgtcatcacaggtttcctcactgctgcagtctatcctacagctgtacaagctgcatctgccggcagacttttgcatcatgcatttggaagaccggctccaggagatgtatcttaagtccaaaatgctgtctgagtatctccgggggcacacgagagtacatgtcaaggaacttggagtggtgctgggcatagaatctaatgacctgccactactgacagccattgcgtcgacccactctccctacgtcgcccaaatactgttatag

SEQ ID NO: 188100 - DNA, 2022 bp, synthetic construct
  misc_feature 1..2022: note = Description of Artificial Sequence: Synthetic coding sequence
  source 1..2022: mol_type = other DNA
atgtgcggcggcaccgccaacaccaccaaccagcccgagagctggcaggatagtgcgcggtgcgtgtctgatgcagtcccaggagccggccggatttatagggccctcctgtgcaccaagatcaaaaaacacaccggcgtggaccggtccaccgaccacaccgagctggataactcctggtcatgctctgagttcgatctcaacgagatacggctaattgtttaccaggattgtgatcggcggggccgtcaggttctattcgactctaaagcagtgcagaaaatcgaagaagtgacagcacagaaaaccgaggacgtgcctataaaaatttccgcgaaatgttgtcagggatcctcctccgtcagcagttctagctcctcgagtatctcgagccactcaagtagcgggggttcctcccatcacgctaaagaacagttgcctaaataccagtacaccagacctgcctctgacgttaacatgcttggcgagatgatgtttgggagtgttgcaatgtcctataagggatctacgctcaagattcactatattcgcagcccaccacaattaatgatatcgaaagtcttctccgcgcggatgggtagcttttgtggctcaactaacaacctacaagattctttcgagtacatcaatcaggatcccaatttgggcaaactgaacactaatcaaaatagcttagggccctgccgaaccggctcaaacctggcgcatagtacccctgtcgacatgccatcgcggggacagaatgaggatagggactccgggatcgcaaggtctgccagcctgagctctttgttgatcaccccattccccagtccgagcagttccacctcatccagctcttcataccagcgcaggtggctgagaagtcagaccacctcccttgagaatgggattatacctaggaggtctaccgacgaaacgttctccttggcagaggagacttgctcttccaaccccgccatggtccgccggaaaaagattgctatctcaatcattttcagcctatgcgaaaaggaagaagcccaacgcaatttccaggacttctttttcagccacttccctctgtttgaatctcacatgaaccgcttaaagtctgcgatcgagaaagccatgatcagctgtcgcaaaattgcagaatctagtctgagggtgcagttttatgtgagcaggctcatggaggccctgggtgagttccgggggactatctggaatctgtactccgtccctcgcatcgccgagcccgtgtggttgaccatgatgtccggcacactggaaaagaatcaactgtgtcagcgatttctgaaggagttcacattgctgatcgagcagataaacaaaaaccaattcttcgctgcgctcctaacagcagttcttacgtatcacttggcttgggttccaaccgtcatgcctgtcgaccatccgcccattaaggcctttagcgaaaagcggacgtcccaaagcgtaaatatgcttgctaaaacccatccatacaacccactgtgggcccagctgggagatctttatggcgctattgggtcccctgtgagactgaccagaacagtggttgttggcaagcagaaggacctggttcagcggatactgtatgtgctgacttacttcttgaggtgctccgagctgcaagagaaccagctgacctggtcaggaaatcacggggaaggcgaccaggtcctgaacggctctaagattattactgcactggagaagggggaggtggaagaaagcgagtatgtggtgattacagtccggaacgagcctgccttggtacctcctattctccctcccacagctgctgagcgacataacccatggcctacaggctttcctgaatgcccagaaggaacggactcccgggatctgggcctgaaaccagataaagaggccaaccgccgcccagagcaggggtccgaggcctgttctgccggctgtcttggccccgcatcagatgcgtcctggaaaccccagaatgccttttgtgggtag

SEQ ID NO: 188101 - DNA, 660 bp, synthetic construct
  misc_feature 1..660: note = Description of Artificial Sequence: Synthetic coding sequence
  source 1..660: mol_type = other DNA
atggaccccgcccccggcgtgctggacccccgggccgccccccccgccctgttaggaaccccgcaagcagaggtgttagaagatgtgctcagggagcaatttggaccccttccacaacttgctgctgtctgcaggttaaagaggcttccgtcaggtggttattcttctactgagaacctgcagttagtccttgaacggagacgggtggctaacgcaaaggaaagggaacgcattaagaaccttaacaggggcttcgccaggctaaaagcccttgtgcctttcctcccccaaagccgtaaaccgtctaaggttgacatcttgaagggcgccaccgagtatatccaggtgctgagcgatctgctcgagggagcaaaagactccaaaaagcaggacccagatgaacagtcctacagcaataattcctcagaatcccatacgtccagtgcccggcagctcagtcgtaacatcacacaacacattagttgcgccttcggcttaaagaacgaggaggagggcccatgggccgatggtgggagcggcgaacccgctcacgcctgcaggcatagcgtgatgtctactaccgaaatcattagcccgaccaggtccttagatcggttccccgaggtggagctcctcagccaccgccttccacaagtctag

SEQ ID NO: 188102 - DNA, 1035 bp, synthetic construct
  misc_feature 1..1035: note = Description of Artificial Sequence: Synthetic coding sequence
  source 1..1035: mol_type = other DNA
atggtgcgggcccggcaccagcccggcggcctgtgcctgctgctgctcctgctgtgccaattcatggaagaccggagtgctcaggccgggaattgttggctgcgccaagcaaaaaacggccgatgtcaagttctctataaaaccgaactttctaaggaggagtgctgttctacaggccgactgtcaaccagctggaccgaggaagatgtcaatgacaataccctcttcaaatggatgatcttcaatggcggcgcaccaaactgtatcccgtgtaaggagacctgtgaaaatgtagattgcggcccagggaagaagtgtaggatgaacaaaaagaataaaccccggtgcgtctgcgcccccgattgttccaatattacctggaaaggccctgtttgtggcttggacggcaaaacttataggaatgaatgcgctttgttgaaggcccgatgcaaggaacagcctgagctggaagtccagtatcaaggacggtgtaagaaaacatgtcgggatgtgttctgccccggttcctctacatgtgtcgtcgaccagaccaacaatgcttactgcgttacttgcaaccgcatctgccctgagcctgcaagcagtgaacaatacctatgcggtaatgacggtgtaacatactcctccgcttgccatctcagaaaagctacttgtcttctaggccgcagcattgggttagcatacgagggaaaatgtataaaagccaaatcatgcgaagatatacagtgcacgggcggcaagaaatgtttgtgggatttcaaggtgggccgcggacgatgctcactctgcgacgaactgtgccctgactcaaaatccgacgagcctgtctgtgcatctgacaatgctacatacgcgagtgaatgcgccatgaaagaagctgcctgtagttccggagtgctcctggaggttaagcactcaggatcttgtaatagtatctctgaagacacggaagaggaagaggaagacgaggaccaggactatagctttcctatatcttctatactggaatggtag

SEQ ID NO: 188103 - DNA, 954 bp, synthetic construct
  misc_feature 1..954: note = Description of Artificial Sequence: Synthetic coding sequence
  source 1..954: mol_type = other DNA
atggtgcgggcccggcaccagcccggcggcctgtgcctgctgctgctcctgttgtgccaattcatggaggatcgctctgcccaggcggggaactgttggctgcgacaggccaagaatggcagatgtcaagtgctctacaaaactgaactgtccaaggaggaatgctgctccacgggccgactctccacaagttggaccgaggaagacgttaatgataacactctttttaagtggatgattttcaacggtggcgccccgaattgcatcccttgcaaggagacctgtgagaacgtcgattgcggccccggcaaaaaatgtcggatgaataaaaagaacaagccccgctgtgtgtgtgccccagattgctctaacataacttggaagggtcccgtgtgcggccttgacggaaaaacatatcgtaatgagtgcgcactgttaaaggctcgatgcaaggagcagcctgagctggaggtgcagtaccaaggaaggtgtaagaaaacttgcagagacgtcttttgccctgggtcaagcacctgcgtggtagaccagaccaacaatgcttattgcgtcacgtgtaacaggatctgtcctgaaccagcttccagcgaacaatacctctgcggcaatgacggggtcacttactcttctgcatgtcacttaaggaaagcaacttgcttgctcgggcggtccataggtctagcctatgaagggaagtgcattaaagccaagtcttgcgaagatattcaatgtacagggggaaaaaaatgcttgtgggattttaaagttggacgagggagatgtagtctatgtgacgagttatgtcctgattccaaatctgacgagcccgtgtgcgccagtgataatgccacttatgcttctgagtgcgcaatgaaagaggctgcttgctcttcgggtgtactgctggaggtaaaacacagtgggagctgcaattag

SEQ ID NO: 188104 - DNA, 1023 bp, synthetic construct
  misc_feature 1..1023: note = Description of Artificial Sequence: Synthetic coding sequence
  source 1..1023: mol_type = other DNA
atggtgcgggcccggcaccagcccggcggcctgtgcctgctgctgttgctgctgtgtcagtttatggaagatcgctcagcccaggccggcaactgctggctcagacaggctaagaacggtcgatgccaggtcctctacaaaaccgaattgtccaaggaagaatgctgtagcacgggccggctgagcacaagctggacagaggaggatgtcaatgacaacacactgtttaagtggatgatcttcaatggcggtgctcctaactgcatcccgtgtaaagaaacttgtgagaatgtcgattgtggccccggtaagaaatgtcgtatgaacaaaaagaacaaaccacggtgcgtgtgcgctcccgattgttctaatattacctggaaagggcccgtctgtggccttgacgggaagacttaccgcaatgagtgcgctctgcttaaggcaagatgcaaggaacagccagagcttgaagtccaataccagggtcggtgcaagaagacatgcagagacgtgttctgtccaggttcttctacctgtgtggtggaccagactaataatgcttactgcgttacctgtaaccgcatttgccctgaacctgcctcctccgagcagtacctctgcgggaatgacggtgtgacctacagctccgcctgccacctcaggaaggcgacctgcctcctcgggcgtagcattggactcgcttatgaggggaagtgcatcaaggctaaatcttgtgaagacattcagtgtaccggcggcaaaaaatgcttgtgggatttcaaggtcgggagaggccgatgtagtctctgcgatgaattatgccctgactcaaagtctgacgagcccgtgtgcgcaagtgataacgcaacctacgcgtccgaatgtgctatgaaagaggctgcctgttcctcaggggtacttctggaggtcaagcacagcggatcttgcaactacacagaggaagaagaggaggacgaggatcaagattattcctttccgatcagttcaatactggagtggtag

SEQ ID NO: 188105 - DNA, 927 bp, synthetic construct
  misc_feature 1..927: note = Description of Artificial Sequence: Synthetic coding sequence
  source 1..927: mol_type = other DNA
atgtggaagcggtggctggccctggccctggccctggtggccgtggcctgggtgcgagccgaggaagaactcaggtcgaaatcaaaaatctgtgccaatgtgttttgtggggcggggcgagagtgtgccgtcacggagaagggcgagcctacgtgtctgtgcattgaacagtgtaagccccacaaaagacccgtatgcggcagtaatggcaagacatacctaaatcactgcgagctgcatagagacgcatgcttgactggctcaaaaattcaggtagactatgacggacattgcaaagagaagaaaagcgtctcaccaagcgccagcccagtggtgtgctaccagagcaaccgggatgagctgaggcgcaggattatccaatggctggaagccgagattatccctgatgggtggttttccaaagggtccaactactcagagattctcgacaagtatttcaagaatttcgacaacggggatagtcgcctggactcctctgaattcctcaagtttgtggagcaaaacgagacagccatcaatatcactacctaccccgaccaggaaaataacaagcttttgcgtggcctctgcgtcgacgcgctgatcgaactctctgacgaaaacgcggactggaagttgtcattccaggaattcctcaagtgtctcaatccctcttttaaccccccagaaaaaaagtgtgcactggaagatgaaacctacgctgatggcgccgaaaccgaggtggactgcaatagatgcgtgtgcgcttgcgggaactgggtatgcacagcgatgacatgtgacggtaaaaaccaaaagggggctcagactcagaccgaggaggaaatgactagatacgtgcaggagctacagaagcaccaggaaactgccgaaaaaactaagagggtgagtactaaggaaatctag

SEQ ID NO: 188106 - DNA, 423 bp, synthetic construct
  misc_feature 1..423: note = Description of Artificial Sequence: Synthetic coding sequence
  source 1..423: mol_type = other DNA
atgtggaagcggtggctggccctggccctggccctggtggccgtggcatgggtgagggccgaagaggaactccgttccaagtccaaaatttgtgcaaatgtgttctgcggggctggccgggagtgtgccgtgactgagaaaggcgagccgacttgcttatgtatcgagcagtgtaaacctcataagcgccctgtgtgtggatccaatggtaagacatatcttaaccactgtgagctacatcgtgacgcctgtctgaccgggtccaagattcaggtggattatgatggacattgtaaggagaagaagtcagtcagccctagcgccagtcctgtcgtgtgctatcagtccaaccgggacgagctgcggaggcgtataatccagtggctcgaagccgagatcatccccgacgggtggttctcatag

SEQ ID NO: 188107 - DNA, 756 bp, synthetic construct
  misc_feature 1..756: note = Description of Artificial Sequence: Synthetic coding sequence
  source 1..756: mol_type = other DNA
atgtgcttcgtggagcccgccggcaacgtgcagagccagcggaagggaaacccaccagtgtccgcgttgtctaacgccaatctgacggggtcaaagatccaagtagactatgacggccattgtaaagaaaagaagtccgttagcccgagcgcctctccagtggtgtgttaccagtccaatcgagacgaactgagacgaagaataattcagtggctcgaggcggagataattcccgatgggtggttctccaagggcagtaactattcggaaattttagataaatactttaagaacttcgataacggggactccaggttggattctagcgagttcctgaaattcgtggagcaaaatgagacagctatcaatatcactacctatcctgatcaggagaacaataaattgctcaggggactgtgcgtcgacgcccttatagagttgtcagacgagaacgctgactggaaattaagctttcaggagttcctgaagtgcctgaacccatcatttaatccaccagagaagaagtgcgcgctggaggacgagacatatgccgatggcgccgaaaccgaggtggattgcaaccgctgtgtttgcgcctgtggaaactgggtgtgcaccgccatgacgtgcgacggaaaaaatcagaaaggtgctcagacacagactgaggaagagatgaccaggtatgttcaggaacttcagaagcaccaggagaccgcagagaagactaagcgcgtttccacgaaggagatctag

SEQ ID NO: 188108 - DNA, 792 bp, synthetic construct
  misc_feature 1..792: note = Description of Artificial Sequence: Synthetic coding sequence
  source 1..792: mol_type = other DNA
atgcggcccggcgcccccggccccctgtggcccctgccctggggcgctctggcgtgggcggttggttttgtgtcaagcatggggagtggaaaccctgctccaggcggagtgtgttggcttcaacaaggtcaggaagccacctgcagcttggtattgcaaacagacgtgactcgcgcagaatgctgtgcgtcaggaaatatcgatactgcttggtcaaacctgacccatcctggcaacaaaatcaatttactgggctttcttgggctagtgcactgtctcccatgtaaggatagctgcgatggtgtcgaatgtggtcctggaaaggcatgccgcatgttaggcggtagacccagatgtgagtgcgctccagattgttcaggccttccggcacggctccaggtgtgcggctcagacggtgccacgtatcgggacgaatgcgaacttcgggctgccagatgtcggggccatcccgatttgagcgtgatgtaccgcggaaggtgtcggaagagttgcgagcacgtcgtgtgccctcggccccagtcttgcgtggtcgaccaaaccggtagcgctcattgtgtggtatgccgggctgcaccttgtcctgtcccttcgagcccagggcaggagctgtgtggtaataataacgtgacttacatcagttcttgccacatgcgccaggccacctgctttctcggcagaagtattggtgtgcgccacgccggctcttgcgcaggaacaccagaggaaccaccaggtggcgaaagcgccgaagaggaagagaactttgtgtag

SEQ ID NO: 188109 - DNA, 1614 bp, synthetic construct
  misc_feature 1..1614: note = Description of Artificial Sequence: Synthetic coding sequence
  source 1..1614: mol_type = other DNA
atgctgaacaccctgcagaccaacgccggctacctggagcaggtgaagcggcagaggggagacccccaaactcagctcgaggctatggaactgtacctcgcccgatctggactccaggttgaagatctggatcgactgaatatcattcacgtcacagggacaaaaggtaagggctcgacctgcgcctttaccgagtgcatcttaagaagctatggattgaaaactggctttttttcaagtccacacctggttcaggttagggaaagaattcgaatcaacggccaacccatcagtcctgagttgttcaccaaatacttctggagactttaccacaggctcgaggagaccaaagacggatcgtgtgtgagcatgcctccctattttcgctttctcactctgatggcattccacgttttcctccaggaaaaagtggatctcgcagtcgtcgaagtaggaatcggaggcgcctatgactgtactaacataatccgaaaacccgtggtctgtggcgtatctagccttggtatcgaccataccagtctgctcggagacaccgtggagaagatagcctggcagaaaggcggcattttcaaacagggtgtgcccgcattcaccgtgttgcaaccagaagggccccttgccgttcttcgggatcgggcccagcagattagctgtccactgtatttgtgtccaatgctagaggcattggaagaaggaggaccaccgctgacactcggactggaaggcgagcaccagcgcagcaacgctgcactagccctccagctggcgcactgctggttgcaaagacaggatcgacacggagccggcgagccgaaagcctcccgccccggcctcttgtggcaacttcccctagccccagtatttcaacccacgagtcatatgagactgggattaagaaacaccgaatggcctggcaggactcaggtgctaaggcgcggacctctgacctggtatctggatggagcccacacggcgagctcagctcaggcttgtgtgcggtggtttcgtcaggcccttcagggcagagaaagaccttcagggggccccgaggtgcgagtgctcctcttcaacgccacaggcgatcgtgaccccgctgcattgctgaagctgttgcaaccctgccaatttgattacgccgtcttctgtccgaacctcaccgaagtgagttctacgggcaacgctgatcaacagaattttaccgtcacacttgaccaggtcctgttgagatgcctggaacatcaacagcactggaatcacctggacgaggagcaggcatccccagacttgtggtccgccccatcaccggagcccggaggaagcgccagccttctactggcaccacatccacctcacacttgttccgcatctagcctcgtgttctcctgtatctcccatgccttgcaatggatcagccaagggcgggaccctatcttccaacctccctccccccctaagggacttcttacgcaccctgtggcccacagcggggcttcgatcttgcgagaagccgctgccatccacgtacttgttactggatctctacatctggtagggggagtattgaaacttctggagccagccttgtcgcaatag

SEQ ID NO: 188110 - DNA, 1128 bp, synthetic construct
  misc_feature 1..1128: note = Description of Artificial Sequence: Synthetic coding sequence
  source 1..1128: mol_type = other DNA
atgagccgggcccggagccacctgcgggccgccctgttcctggccgctgctagcgcgcgcggcattactacacaggtcgctgccaggagaggcctatccgcctggccagtaccccaggagcccagcatggagtaccaggacgccgtgagaatgctcaatacactgcagactaatgccggatatctggaacaggtgaaacgtcagcgaggcgacccacagacacagctggaggctatggaactctaccttgctagatccggtttacaggtcgaggatctcgatagactgaatattatccacgtgacaggcaccaaaggaaagggcagcacttgcgcgttcactgagtgcatcctacgttcctacggattaaagacggggtttttctcttccccgcacctggtgcaagtgcgggagagaatccggatcaatggccagccaatatctccagagctgttcacaaagtacttttggagactgtatcatcggctagaggaaaccaaggatggaagttgtgtgtccatgcccccctacttcaggtttcttacgctgatggcattccatgtgttcctccaggaaaaagtggacctggccgtggtcgaagttggcatcgggggagcttacgattgcacaaatataataagaaaacctgtagtgtgcggggtcagctcccttggaatcgaccacacttctctgctcggggacacggtggaaaagatagcctggcagaagggcggcatctttaagcagggggtccctgcctttacggttctgcagcctgaagggcccctggcggttctgcgggatcgggcccagcagatttcggtgctcggctctcagcgacatcctggacagggctcctgcggtagctgtccttggcacctttgcagcagtccccacccgacttgcggctcgggtttcggtacacgtagcggaagggccggtaggcgctgctgcggcgctgggccctccccaggcacctggaccgtgcggacgccacccgcagcaaggcgacccgcttgcgcaggttccgcaagacggtgcagagccgctcggggacgggcagtggcaccaagattcgaatcctgctcaagcatgctcccaggaacgggcaccagacgcccctgttag

SEQ ID NO: 188111 - DNA, 1128 bp, synthetic construct
  misc_feature 1..1128: note = Description of Artificial Sequence: Synthetic coding sequence
  source 1..1128: mol_type = other DNA
atgagccgggcccggagccacctgcgggccgccctgttcctggccgccgcctcggcccgaggcattaccacacaggtggccgctcgcaggggactgtcagcctggccggtgccccaagagccttcaatggaatatcaggacgccgttcgaatgttaaataccctgcagaccaatgctggctatctcgaacaagtcaaaagacagagaggcgatccgcagacacagctggaggccatggagctatacctggcccggtcaggcctgcaggtcgaagacctggataggcttaacattattcacgtcaccggcaccaaaggaaagggttcaacttgcgctttcactgaatgcatcctccgatcatatggcctcaagacgggatttttctcttcaccccatctggtgcaggttagggaacgcataaggatcaatggccagcccattagccccgaactgtttacaaaatacttttggcggctgtaccaccgcctggaagaaacaaaagatggaagctgtgtcagtatgccaccttacttccgctttttgacacttatggcctttcatgtcttcctgcaggaaaaagtcgacctcgcagtagtggaagtggggatcgggggtgcctacgactgcaccaacataataaggaagccggtcgtttgcggcgtttcctccttggggatcgatcatacaagtctactgggcgatacagtggagaaaatagcctggcagaaaggcggcatctttaagcagggcgtgcctgcattcacagttctacagcctgagggacctctcgctgtgttaagagacagagcacagcagataagcgtacttggttctcagaggcaccctgggcagggtagttgcgggtcttgcccttggcatctgtgtagctcaccacatccgacttgtggatcaggctttggcactaggtcgggtcgtgcaggacggagatgctgtggagcgggcccgtcgccgggtacttggacagtgcgcaccccccccgccgcccgtcgccccgcatgtgccgggtcagcccgtcggtgtcgggcagctcgtgggagagctgtggctccacgctttgagagctgttcctctatgcttcctggcaccggcactcgtagaccatgttag

SEQ ID NO: 188112 - DNA, 1764 bp, synthetic construct
  misc_feature 1..1764: note = Description of Artificial Sequence: Synthetic coding sequence
  source 1..1764: mol_type = other DNA
atgagccgggcccggagccacctgcgggccgccctgttcctggccgctgcgtccgctagggggatcaccactcaggtggccgcccgacgaggcctgtctgcctggcccgtgccccaggagcccagtatggaataccaagatgccgtgagaatgctcaataccttacagacgaatgcggggtaccttgagcaggtcaagaggcagcgaggagacccacaaactcagttggaagcaatggaactctatctggcccgcagcggtctccaggtagaagatctcgatagactgaatattattcacgtgaccggtacaaaagggaaggggtctacctgtgccttcacggaatgtatcctgcgcagctacgggctgaaaacgggattcttttcttccccccatctggtccaggtgcgggagaggattcgcatcaatgggcagccaatcagtcctgagctcttcactaaatacttctggcgattgtaccataggctggaggagaccaaggacggctcgtgcgtatctatgccgccctacttccgcttcctgacactcatggcattccacgtgtttttgcaagagaaggtcgatctagccgtggtggaagttggtattggaggagcatatgattgcactaacatcattcggaagccggtggtgtgtggagtgtccagtctgggcatagaccatacttcgcttctgggcgataccgtggaaaaaatcgcttggcagaaaggtgggatattcaagcaaggggtgccagcttttaccgtgctacaaccagaaggcccactcgccgttcttcgcgatcgagcgcagcaaattagctgtcccctctatctgtgccccatgttggaagccctggaggagggcgggccaccattgacattaggcttggagggcgagcatcagcgctccaacgccgccctggcactccagttagcacactgttggctgcagagacaggaccgccatggagctggggagcccaaagcatctagacctggattgctctggcagttgccactggctccagtgtttcagcccaccagtcatatgcgcctgggattgagaaataccgagtggcccggcaggactcaggtgttgagacgcggcccactcacttggtacctcgacggcgcccacaccgcgtctagtgcccaagcttgtgtgcgctggttccggcaggctttacagggcagagagaggccttctggagggcccgaagtgcgggtgctcctgttcaacgctacaggggacagggacccagctgccctacttaaactcttacaaccctgtcagtttgactacgcagtcttttgcccaaatttgaccgaggtatcatcaactggcaatgcagatcaacagaattttacggtgaccctggatcaagttcttctgcggtgccttgagcaccagcagcactggaatcatctggatgaagaacaggctagcccagatttatggtcagctccaagccctgagccaggtgggagcgcctcactgctgctggcgcctcaccccccccatacttgcagcgcttcctcccttgtgttttcttgcatttcccacgcgttgcagtggatcagtcaaggccgagatccaattttccagccgccctcaccccccaaaggactcttgacacacccagtggctcactctggtgcctcgatcctgcgggaggcagctgctatacatgtgctagtgaccggtagcctgcatctggtggggggggttctgaagctcctcgagccagctctcagtcaatag

SEQ ID NO: 188113 - DNA, 1686 bp, synthetic construct
  misc_feature 1..1686: note = Description of Artificial Sequence: Synthetic coding sequence
  source 1..1686: mol_type = other DNA
atgagccgggcccggagccacctgcgggccgccctgttcctggccgctgcctccgctagagggattaccacccaggtggcagcgcgtcgaggactgtctgcttggcccgttccccaggaaccctccatggagtatcaggacgcggtaagaatgctcaacactttgcagaccaatgccggttacctggaacaggtgaagcggcagaggggcgatccacaaacacagcttgaggcgatggaattatacctggcgcgatccgggttgcaggtggaggacctcgatagactgaacatcattcacgtgacgggaacaaagggaaaaggttctacttgcgctttcactgagtgtatactgcgatcctacggtcttaagaccggcttttttagctctccgcacctggttcaggtgcgggaacgtattagaattaatggacaaccaatctctccagagcttttcacaaagtacttctggcggctgtatcatcggctcgaagagaccaaagtggatctggcagtggtggaagtaggcattggaggcgcttatgactgtactaatatcatcagaaagcccgttgtgtgtggggtgagcagcctcggaatcgatcacacgtcgttgctgggcgataccgtggaaaagattgcatggcagaaaggaggcattttcaaacagggagtccccgccttcaccgtgctacagcctgaaggcccacttgccgtgctgcgggaccgggctcagcagatttcatgtccgctttacctgtgtccaatgttagaggcactggaagaggggggtccaccactgacccttggcctggaaggcgaacaccagcggtccaatgcggccctcgccctgcaactggcccactgctggttgcagagacaggaccgccacggggccggtgaacctaaagccagccgtcccggcttgttgtggcagctcccgcttgcaccggtatttcagcccacgtcccacatgagacttggtttgcggaacacggaatggccaggccggacacaggtcctgcgccgtggacccctgacatggtatctggacggagcccacactgcttcaagcgcccaagcttgtgtacgatggttcaggcaggcactgcagggaagagagagaccaagcggcggccccgaggtgagggttctgttgtttaacgctacaggtgatcgagaccccgccgcgctgctgaagttattgcagccctgtcagttcgactacgcagttttttgcccgaatttgacggaagtgtctagcaccgggaacgcagaccagcagaacttcactgtgactttggaccaagtccttctgagatgtttagagcaccagcagcactggaatcacctggacgaggaacaggcctccccagacctgtggtccgctcccagtccagaacctggtggatccgctagccttctgctggcccctcaccctccccatacctgtagtgctagcagcctcgtgttcagttgtatctctcacgctttgcagtggattagccagggacgggatcccatcttccaacctccttcacccccaaagggcctactgactcatccagtggcacacagtggtgcttctattctgcgagaggctgcagctatacatgtcctcgtcactggctccctacatctggtgggcggagttcttaagctcttagagcccgccctttctcagtag

SEQ ID NO: 188114 - DNA, 585 bp, synthetic construct
  misc_feature 1..585: note = Description of Artificial Sequence: Synthetic coding sequence
  source 1..585: mol_type = other DNA
atgctgaacaccctgcagaccaacgccggctacctggagcaggtgaagcgtcagcgaggtgaccctcagacacaacttgaagctatggagctgtatctggctcgctcagggctccaggttgaagatttggatcgtttgaacattattcatgtgaccggtacgaaaggcaagggtagtacatgcgcttttactgagtgcatcctcaggagctacggactgaagactgggttctttagctcacctcatctggtacaagtgcgcgagaggatccgtatcaatggtcaacctatttctccggagttgtttacaaagtacttttggcggttataccataggctggaagagacgaaggttgatctggcagtggtagaggtcgggattgggggtgcatacgactgtactaatatcataaggaaaccagtagtttgcggtgtaagctctttaggaatcgaccatacctctctgttgggagacaccgtggaaaagattgcctggcagaaagggggcatctttaaacaaggggtgccggcgtttaccgttctgcagccagaggggccactggctgtccttagggatagggcttag

SEQ ID NO: 188115 - DNA, 798 bp, synthetic construct
  misc_feature 1..798: note = Description of Artificial Sequence: Synthetic coding sequence
  source 1..798: mol_type = other DNA
atgctgaacaccctgcagaccaacgccggctacctggagcaggtgaagaggcagcggggcgatcctcagactcaacttgaagccatggagttatacctggctaggagcggactgcaagtagaagatctagaccgactgaatatcatccacgtcaccggcacgaaggggaaaggttccacctgtgcctttaccgagtgtatcctccggtcctacggccttaaaacaggatttttctctagcccacacttggtccaggtgcgcgaacgaattcggatcaatggtcaacctatcagtcctgagcttttcacaaaatacttttggcgactctaccaccgactagaggaaacaaaggatggctcatgtgtgtcaatgcccccatacttcagattcctgaccctgatggctttccatgtgttcctgcaggagaaggtcgacctggctgtggtggaagtcgggataggcggagcatatgattgtacaaacatcattagaaagcccgttgtatgcggggtgtcttcactgggaatcgatcacacatcactgctcggcgacacagtagagaaaatcgcctggcaaaaaggcggaatcttcaaacagggggttccggctttcaccgtgcttcagcccgaaggacccctggcagttctacgtgaccgcgcacagcagatctccgtccttggcagccagaggcatcctggtcaaggatcttgcggttcctgcccttggcacctctgctcttctccccaccctacctgtggatccggtttcggtacaaggagcggacgtgccggaaggtag

SEQ ID NO: 188116 - DNA, 1392 bp, synthetic construct
  misc_feature 1..1392: note = Description of Artificial Sequence: Synthetic coding sequence
  source 1..1392: mol_type = other DNA
atgcacagcgccagcagcatgctgggcgccgtgaagatggagggccacgaacccagcgactggagttcctattatgccgaaccagaagggtatagcagcgtgagcaacatgaacgcaggcttgggcatgaatgggatgaacacttacatgagtatgagtgcggcggccatgggcagcggatctggaaatatgtccgccgggtccatgaacatgagcagctatgtaggcgccggaatgtctcccagtttggcgggaatgtccccgggagccggagcaatggcagggatgggagggtccgctggcgccgcaggcgtggcagggatgggaccacacctttctccgagtctgtctcccttgggcggtcaggccgccggagctatgggaggactagccccttatgcaaacatgaattctatgagcccaatgtatggccaggcgggactgagcagggccagggatcccaaaacatatcgccgaagttatacacatgcgaagcccccttactcgtatatttccctcattaccatggccatccagcagtcacctaacaagatgctgactctctcagagatataccagtggataatggacctgtttcccttttaccggcaaaaccagcagaggtggcagaactctatccgccacagtctttccttcaatgactgctttttgaaggtgcctcggtcaccggacaagccaggaaaaggctcattctggactctccacccagattctgggaatatgtttgagaacgggtgctatctgagacggcaaaagcggtttaagtgtgagaagcagctggctctaaaagaggccgctggtgcagcaggatcaggaaagaaggcagccgccggggcgcaggcctcccaggcccaactgggcgaagcagcaggccccgcaagcgagactcccgcagggacagagagtccacactcaagtgcctcgccatgccaggaacacaagagaggtggcttaggtgaactcaaaggaacacccgctgccgccttgtcacctccagagccagctccttcaccagggcaacaacaacaggccgccgcacatctgctgggcccgccacatcacccaggcctgcctccggaggctcacctcaagcccgaacaccattacgccttcaatcatccctttagtattaataatctaatgtcttcagaacagcagcatcatcatagtcatcaccaccaccagccgcacaagatggacctgaaggcgtacgaacaagtgatgcattatccaggatacggatccccgatgccaggttccctggcgatgggcccagtgaccaataaaactgggcttgacgcctcgccgctggctgcagataccagttactatcagggggtgtattcccgccccataatgaacagttcatag

SEQ ID NO: 188117 - DNA, 1374 bp, synthetic construct
  misc_feature 1..1374: note = Description of Artificial Sequence: Synthetic coding sequence
  source 1..1374: mol_type = other DNA
atgctgggcgccgtgaagatggagggccacgagcccagcgactggtcttcttattacgccgagccagaagggtacagcagtgtgagtaatatgaacgccggcctcggtatgaacggcatgaatacgtatatgtctatgtccgctgctgcaatggggagtggttccggcaatatgagcgcagggtcgatgaatatgtcctcctatgtcggggctgggatgagcccttctttagccggaatgtccccaggtgctggcgctatggccggcatggggggcagtgctggtgctgctggggtggccggaatgggcccccatctgtctccgagtctgtccccactcggggggcaggctgccggggctatgggtggtttggccccctatgcaaatatgaacagcatgagccccatgtacggacaggccggtctgtcccgggcaagggatccaaagacctatcgccgaagctatactcatgcaaaacctccctactcttacatcagcctgatcacaatggcaatccaacagtcccctaataagatgttgactttgagtgagatctatcaatggatcatggatctgttcccgttttaccgacagaatcagcagcgctggcagaacagcattcgccacagcttgtcatttaatgactgtttcctcaaggtgccccgcagccccgacaaaccaggcaaggggtctttttggacacttcacccagattcaggaaacatgtttgagaacgggtgctatctcagacgacaaaagcgatttaagtgcgaaaagcagctcgccctcaaagaggctgctggtgccgcaggctctggcaaaaaagcagcagcgggtgcacaggctagtcaggctcagcttggcgaggccgccggaccagcatccgagacccctgccggcactgagagcccgcacagcagcgcctctccatgtcaagagcataagagaggcgggcttggagaacttaagggcacgcccgcagcggcacttagccctcctgagcccgccccctctcctgggcagcagcagcaggccgccgcccatctgctgggcccacctcatcaccccggcctgcctcccgaggctcaccttaagcccgagcatcattatgcattcaatcatccatttagcatcaacaatcttatgtcttccgagcagcagcaccaccattctcatcaccatcatcaaccacataagatggacttaaaggcgtacgaacaggtgatgcactatcccgggtatgggagccctatgccagggtccctggcaatgggcccagtcactaataaaactgggctggacgcgtccccactggccgccgatacaagttactaccagggagtctacagccgaccaattatgaattcttcatag

SEQ ID NO: 188118 - DNA, 1374 bp, synthetic construct
  misc_feature 1..1374: note = Description of Artificial Sequence: Synthetic coding sequence
  source 1..1374: mol_type = other DNA
atgctgggcgccgtgaagatggagggccacgagcccagcgactggagttcgtattacgccgagccagagggatactcatcagtttcaaacatgaatgcagggttaggtatgaacggcatgaacacttacatgagcatgtcagctgccgccatgggttcaggcagcggcaacatgtccgccgggtctatgaatatgtcgtcctacgtgggagcgggaatgtcgccatctcttgctggaatgtccccaggcgcaggagctatggccggcatgggtggctccgccggggcggcaggggtggcaggaatggggccacacttatcgcccagcctgtctcctctgggagggcaggctgcgggggctatgggaggccttgcaccatatgccaacatgaattcaatgtctccaatgtatggccaggctggcctcagtcgggcacgagatcctaagacttacagacggtcctatacccacgcaaagcccccgtattcttacatctctctgataaccatggccatccaacaaagtccgaataagatgcttacgctcagtgaaatttatcagtggatcatggacttgtttcccttttacaggcagaaccaacagcggtggcagaacagcattcggcattcactatcttttaacgactgcttcttgaaagtgccccgcagcccagacaaacctgggaagggctccttctggaccctgcaccctgactcaggcaacatgtttgagaatggatgctaccttcggcgccagaagaggtttaagtgcgagaaacagttagccctgaaggaagccgcgggagccgctggcagcggaaagaaagccgcggctggggcccaggcctcgcaggcgcaactgggtgaggctgctggaccagcctcagagacccccgccgggacagaaagtccacactcctcagcatccccttgccaggaacataaaaggggaggcctaggggaactaaaagggacgcccgccgccgcactgagtccgcccgaacccgctccctctccaggacagcagcagcaggcggccgctcacctcctcggaccacctcaccaccctggattaccaccggaggcccaccttaaacctgaacaccactatgcctttaatcaccctttctccattaacaacctgatgtctagtgaacagcagcaccaccactctcaccatcatcaccaacctcacaagatggatctgaaggcttatgaacaggtaatgcattaccccgggtatggcagccccatgccgggaagcctggctatgggtccagtgactaataaaacaggactggacgcgtcaccactggcagcagacacatcatactaccagggcgtgtacagccggcccattatgaattcttcatag

SEQ ID NO: 188119 - DNA, 1032 bp, synthetic construct
  misc_feature 1..1032: note = Description of Artificial Sequence: Synthetic coding sequence
  source 1..1032: mol_type = other DNA
atgctgggcgccgtgaagatggagggccacgagcccagcgactggagtagttattatgccgaacccgaaggctattcaagcgtgtccagagctagagacccaaaaacctatcgcagatcatatacccacgcgaagcctccttacagctacatcagcctgattacgatggcgatccagcagtcgccgaacaagatgctaaccctctctgagatttaccagtggatcatggacctgttcccattctatagacaaaatcagcaacgctggcaaaactcaatcagacactcccttagcttcaacgattgtttcctaaaggtgccaagaagtccagacaagccaggaaaaggatccttctggacactgcaccccgactccggtaatatgtttgaaaatgggtgttatctcagaagacagaagcgttttaagtgtgaaaaacagctcgccctgaaagaggcagctggggcagcaggctctgggaaaaaggcggccgcaggtgcccaggcctcccaggcgcaactgggtgaagcagccggacctgcgtcggagacgcctgccggaactgaatcaccccacagttccgcttcaccgtgccaggagcacaagcgcggagggcttggtgaactgaaaggtactccagccgctgccctgagcccgccggagccagctcccagtcccggccagcagcaacaagccgccgcccacctgttgggcccgccgcaccaccccgggctgccaccagaggcacatcttaagcctgagcaccattacgcatttaaccaccccttctccatcaacaacctgatgagtagcgagcagcagcatcaccactcacaccatcaccaccagcctcacaagatggatttgaaggcttatgaacaagtcatgcattaccctggatacggttcccctatgccgggcagcctggctatgggccctgtgacaaataaaactgggctggacgccagtcctcttgccgcagacacctcatattaccaaggtgtctacagcaggcctattatgaacagctcttag

SEQ ID NO: 188120 - DNA, 1053 bp, synthetic construct
  misc_feature 1..1053: note = Description of Artificial Sequence: Synthetic coding sequence
  source 1..1053: mol_type = other DNA
atgctgggcagcgtgaagatggaggcccacgacctggccgagtggtcctactaccccgaagcaggcgaggtctatagtccggtgactcccgtgcccaccatggcccccctgaattcttacatgacattgaatccactttcatcaccgtaccctcccgggggattacccgcctcccctctgccatccggaccactagcgcccccagcaccggcagcccccttgggcccaaccttccctgggcttggagtgtcgggcgggagtagtagttcagggtacggcgccccagggccaggactggttcacggcaaggagatgcctaagggctacagacgccccctagcacatgcgaagcctccttattcatatatcagcctcataacgatggccattcaacaggcccccggtaagatgcttaccctgagtgagatctatcagtggatcatggatctgtttccttactatagagaaaatcagcagcggtggcagaacagtattcgccacagtctctcctttaatgactgcttcgttaaagttgcacgatctccggacaaacccggtaaggggagctactgggcactccacccatcttcgggcaacatgtttgaaaacgggtgctacctgaggagacagaagaggtttaaactggaggaaaaagtcaaaaaagggggatccggcgcagcaactaccactcgaaatggcactggcagcgccgcgtccacaacgacccccgccgcaaccgtgacctcccctccccagccaccacctcccgctccagagcctgaagctcaaggcggtgaggatgtgggggctctggactgtggaagccctgccagctccactccttacttcacgggactggaactccctggtgaactaaagctggacgcaccatacaactttaaccatccgttcagtatcaacaatctcatgtctgaacaaactcccgccccccctaaactggacgtaggatttgggggatacggggcggaaggaggtgagccaggggtgtactatcaaggcctgtacagcaggtcccttcttaacgcttcatag

SEQ ID NO: 188121 - DNA, 1662 bp, synthetic construct
  misc_feature 1..1662: note = Description of Artificial Sequence: Synthetic coding sequence
  source 1..1662: mol_type = other DNA
atgcaggcccggtacagcgtgagcagccccaacagcctgggcgtggtgccctatctgggtggtgagcagtcctactatcgggctgccgccgccgcagccgggggtggctacaccgctatgcctgcgcccatgtccgtgtacagccatcctgcccatgctgagcagtaccctggaggcatggctcgtgcctatggcccctacactccacagccccaaccgaaggatatggtcaaacccccgtactcctatattgctctgatcactatggcgatccagaacgcccccgacaagaagatcacactcaacggaatctatcaattcatcatggacagatttccattctaccgtgacaacaagcaggggtggcagaatagcattcgccataatctgagccttaacgagtgcttcgtcaaagtccctagagacgataaaaagcccggcaaggggtcctactggaccctcgaccctgactcctacaacatgtttgaaaatgggagcttcctacgtagacgcagaaggtttaagaaaaaggatgccgtgaaggataaggaggagaaggacaggctgcaccttaaggagccaccaccccctggcagacagccaccacccgccccccccgagcaggcagatggaaacgccccgggcccccaacccccccccgtcagaattcaggatatcaaaaccgaaaatggcacctgtccgtctcctccacagccactttcccccgctgcagcgctgggatccggaagcgcagccgcagtaccaaagatcgaaagccctgacagctcgtcctctagcctatcttcaggcagtagccctcctggctccctgccaagcgcccgcccattgagtctggacggggcagattccgcaccacctcctcctgctcctagcgcgcctcctccgcaccactctcagggattcagcgtcgataatatcatgacaagtctccggggctctcctcaaagcgccgcggctgagctgagctccgggctactcgcttcggccgctgcgtcctctcgagccgggatagccccaccacttgctttgggcgcctactcccctggccaaagttcgctgtactcttctccttgttcccagacctcaagtgctgggagtagcggtgggggaggcggcggcgcaggcgccgctggaggtgctggaggagccgggacctatcactgcaatctccaggccatgtctttgtacgccgccggggagcgggggggccacctgcagggggcacctggcggggccggcggtagcgccgtcgatgacccgttgcctgactattccctgcccccagtgacaagcagtagctcctcttcccttagtcatggggggggtggtgggggaggcggaggcggtcaagaggcaggacaccacccagcagcccaccagggtcgtcttacttcctggtatctgaaccaggccggaggtgatctggggcatcttgctagtgctgcggctgcagcggccgctgctggttacccaggacagcaacagaatttccatagcgtgcgggagatgttcgagtcccagcgcattggcctcaataatagtcccgttaatggaaactctagctgccaaatggcattcccatcctctcagtccttgtaccggacttcaggagcgttcgtgtacgattgcagtaaattctag

SEQ ID NO: 188122 - DNA, 639 bp, synthetic construct
  misc_feature 1..639: note = Description of Artificial Sequence: Synthetic coding sequence
  source 1..639: mol_type = other DNA
atgcaggcccggtacagcgtgagcagccccaacagcctgggcgtggtgccatacctggggggagaacagagttactatcgcgccgcagccgccgccgcaggtgggggctatacagccatgccagcccctatgagcgtatacagccatcctgcacatgcggaacagtatccgggcggcatggccagggcttacgggccatataccccacaaccccagccgaaagacatggtgaagcccccatatagttatatcgccctgattactatggcaatacagaacgctccagacaagaagatcaccctcaatggcatctaccagtttatcatggacaggttcccattctacagggacaataagcaggggtggcagaatagcatccgacacaacctgtctttgaatgagtgcttcgttaaagttcccagagatgacaagaagcctgggaagggctcctactggacgcttgatccggacagctacaacatgttcgagaacggtagttttcttagacgaaggagacggttcaaaaagaaggacgctgtgaaggataaagaggagaaagatcgccctcaggccacacgcgcttcaagcaggacttccaccaggtgtggaaggtgttcctcgcacagaggatccgcctag

SEQ ID NO: 188123 - DNA, 1488 bp, synthetic construct
  misc_feature 1..1488: note = Description of Artificial Sequence: Synthetic coding sequence
  source 1..1488: mol_type = other DNA
atgaccctgggcagctgctgctgcgagatcatgagcagcgagagctctcccgctgctctttccgaagccgacgcggatatcgacgtcgtggggggaggctctggcggcggggaactcccagcccggtctgggccccgcgccccacgcgatgtgttacctcatgggcatgagccaccagcagaggaggccgaagctgatctggcggaagacgaagaagagagcggcggatgctcagacggcgagccgcgggccctcgcatcccggggagccgcagctgctgctgggtcacccgggccgggcgcagccgctgccaggggagcagccggtcccggaccggggccaccaagtggaggagccgccacccgtagtccgctggttaagccaccttatagttacatcgccttgattaccatggccattctccagagtcccaagaagagactgaccctttctgagatctgcgaatttatcagcggaaggttcccatattacagggagaagtttcccgcctggcaaaactccattcgccacaacctctccctgaacgactgcttcgtcaagattccacgggagcccggaaaccccgggaagggaaactattggacgttagatcccgaaagcgccgatatgtttgataacggctccttcctgcgtcggagaaaaaggttcaagcggcaacccttaccccctcctcacccccaccctcatccacacccagagctgcttttacggggcggagccgctgcagccggggatccaggtgctttcctacccggttttgccgcctacggcgcatatggctacggttacggtctcgcacttcctgcatacggagcccccccaccaggtccggccccacatccgcacccacatccccatgcgtttgcgtttgcagccgctgctgcggctgccccatgtcagctgagtgtgcctcccggcagagctgctgccccccctcctggtcctccaacagcttcggtgtttgctggggctggctctgcgcctgcacccgcccccgcgtccgggagtgggcccggaccaggtcccgctggactacctgcattcctaggcgctgagctgggctgtgccaaggctttttatgctgccagcctttcaccacctgccgccgggacagccgctgggctgcccaccgccctcctgagacaggggctgaaaaccgacgcaggcgggggagccggagggggcggcgccggcgccgggcaacgcccaagtttctcaattgaccacattatgggacatggcgggggaggggccgctccacccggcgccggagagggctccccaggcccccccttcgccgccgccgccggacccggtggacaggcccaggtgttggccatgctcaccgcccccgccttggctccggtagctgggcatatccggctctcacatcccggagacgcactgctttcttctggctctaggtttgcgagtaaggtagctggtctgtccgggtgtcacttctag

SEQ ID NO: 188124 - DNA, 1437 bp, synthetic construct
  misc_feature 1..1437: note = Description of Artificial Sequence: Synthetic coding sequence
  source 1..1437: mol_type = other DNA
atgaccctgagcggcggcggcagcgccagcgacatgagcggccagacagtccttacggccgaagacgtggacattgatgtggtgggagagggagatgatggcctcgaagaaaaagattctgatgctggctgcgattcccctgctggccctccagagctgcgcctggacgaggcagacgaggtcccgccagccgcacctcatcatggtcagcctcagcccccgcaccaacaaccgctcacattaccgaaagaggcagccggagccggtgctggaccaggcggggatgtgggagcccctgaggccgatggatgcaagggaggggtggggggtgaagaaggcggcgccagtgggggcggccccggggccggctccggatcagctggaggacttgcgccatccaagcctaagaatagcctcgttaagccaccatattcctacatcgccttgatcaccatggccattctgcagagcccgcagaaaaaattaactctgtctggcatttgtgagttcatttcaaaccggttcccgtactaccgggaaaagtttcccgcatggcagaattcgatacggcataatctcagccttaatgactgctttgtgaaaatcccgagggaacctggaaaccctggcaagggcaattattggacccttgatccccagagtgaggacatgttcgacaacggctcctttctgcggcgtcgaaagcgatttaaacgtcatcaacaagagcacctaagagagcagactgccctgatgatgcagagctttggcgcctacagcctggcggctgctgccggggccgcaggcccgtatggcagaccttatgggctccaccccgcggccgctgcaggggcgtattcacatccggccgctgccgccgccgcagccgccgcagcggcccttcagtacccatacgccctcccaccggttgcgccagtcctccccccagccgtgccactgctgccaagtggagagctgggaagaaaggcggcagcttttgggtcacaactggggcctgggttgcaactgcaattgaattctctgggggcagccgccgcggctgcgggcacagcgggagctgccgggaccaccgctagccttatcaagagtgagccatccgctaggccaagcttctcaatcgagaacatcattgggggagggcctgctgctccaggcgggtcagcagtgggagcgggcgtcgctggcggaactggcggtagtggtggtggctcgacggctcagagtttcctgcggccgccagggaccgtgcagagtgctgctctaatggctacccaccagcctttgtcgctgtcccgcacaaccgccaccatcgctccgatcctcagtgtgcccctatccggtcagttcctccagccagccgccagtgctgcagccgctgctgccgccgctgctcaggctaaatggcccgcccaatag

SEQ ID NO: 188125 - DNA, 1320 bp, synthetic construct
  misc_feature 1..1320: note = Description of Artificial Sequence: Synthetic coding sequence
  source 1..1320: mol_type = other DNA
atgaacctgccccgggccgagcggctgcggagcaccccccagcggagcctaagagactcagatggagaagacggaaaaatcgatgttctgggtgaggaagaggatgaagatgaagaagaagctgcaagtcaacagtttctcgaacagagcctccagcccgggctgcaggtggcacgctgggggggagtggccctcccccgtgagcatatcgaaggaggtggcggtccgtccgacccaagcgaatttggcacagagtttagggctcccccacggtctgcggccgcatccgaggatgctaggcagcctgctaaacctccaagcagttacatcgcgttgatcaccatggctatattgcaatctccccacaagcggctcacactctctgggatctgcgctttcatttccgatcgcttcccctactaccgcaggaagttccctgcatggcagaacagcattcggcacaatctctcccttaatgactgtttcgttaagatcccacgcgaaccaggacggcctggaaaggggaactattggtctctggacccggcaagccaagacatgttcgacaatggctccttcctccggcgtcggaaacgcttccaacgtcatcagccgactcctggtgcacacctgcctcatccattcccacttccagcagcacatgctgcgctccataatccaaggcccggacctttgctcggcgcgcccgcccccccccagccagtgcctggagcgtacccaaacactggccccggacggaggccctacgccctgctgcaccctcatccgcctcgctatcttctgctatcagcccctgcctatgcaggggcccccaaaaaagcggaaggcgctgatctggctaccccagcaccattcccatgctgtagtcctcaccttgtgctgtccctggggagacgagcgcgcgtgtggcgcaggcacagggaggccgatgcctccttgtctgcactgagagtgagctgcaagggctcaggggaacgcgtgcaggggcttcgaagagtgtgtccacgaccgcgcggcgcaacagccccttgctcttctgacaggcaagcatgccgcactatcttgcagcagcagcagcgccatcaggaagaggattgcgctaatgggtgcgccccaacaaagggagctgtgctcggaggccatctttctgctgccagcgcccttctgagataccaggccgttgcggaaggatcagggctaactagcctagccgcacctctcggaggggagggaaccagtccggtgtttctagtgtcacctactccgagctcactggccgaatcagccggcccatcctag

SEQ ID NO: 188126 - DNA, 1227 bp, synthetic construct
  misc_feature 1..1227: note = Description of Artificial Sequence: Synthetic coding sequence
  source 1..1227: mol_type = other DNA
atgaacctgccccgggccgagcggccccggagcaccccccagcggtccctccgcgactcggacggggaggacgggaagattgacgtgctcggagaggaagaagacgaagacgaagtggaagatgaggaggaggaggcaagccagaagttcctggagcagagtcttcagccaggcttgcaagttgctcgctggggtggcgtggctctacctcgcgagcatatcgagggaggcggaccatctgatccctccgagttcgggacggagttccgtgctcccccccgcagcgcagcagcctctgaggatgctaggcagccagcgaagcccccctactcttatatagctctgatcactatggccattctacagtccccgcataagcggctgacactctccggtatttgtgcctttatttcaggaaggttcccttactacaggaggaaattcccagcctggcagaacagcatacggcacaacctatcattaaatgactgttttgtgaaaattccaagagagccaggccacccaggcaagggcacatattggagcctagacccagcgtctcaagacatgtttgataacggctctttcttgcgccgcagaaagcgcttcaagcggcatcagctgacgcctggtgcccatctaccacaccccttccccctacccgcggcccacgctgcactgcacaatccacggccgggtcccctgctgggcgctcctgcactccctcaaccagtgccaggagcctaccccaacaccgctcctggtagaaggccatatgctctgcttcatccacacccccccagatacctgttattaagcgccccagcgtacgcgggcgcacccaagaaagccgaaggggcagatctggcaaccccaggaaccttgccggtgctgcagccttccctagggccacaaccctgggaggaggggaaaggcctcgccagtccccccggaggcggctgtatttccttcagtatcgagagcatcatgcaaggtgtaaggggagccggcacaggggccgctcagagcttgagcccaactgcttggagctattgtcctctgctacagcggcccagttcactgagcgacaactttgcagctacagccgctgcctcagggggcggtctgcgccaacggctccggtctcaccaaggtcggggtgccgggcgggctcccgtgggccgggtcggggccgctgctgttagcggcgggggccgcggactatag

SEQ ID NO: 188127 - DNA, 1251 bp, synthetic construct
  misc_feature 1..1251: note = Description of Artificial Sequence: Synthetic coding sequence
  source 1..1251: mol_type = other DNA
atgaacctgccccgggccgagcggccccggagcaccccccagcggtctctgcgcgattccgacggcgaggatggaaagatcgacgttctgggtgaagaagaagacgaggacgaggtggaggacgaagaagaggaggcgcgtcaacagtttctcgaacagtcccttcaacctgggcttcaggtcgctagatgggggggggtggcattgccaagagaacacattgagggcggaggaggcccgtccgacccttcggagtttgggacaaaatttagagctccgcccagatccgccgctgccagtgaagacgcgcgccagcctgctaaacctccatattcctatatcgcactgatcacgatggctatactgcagaacccgcacaagagacttaccctgagtggcatttgtgccttcatcagtggacggtttccatactacagacgcaagtttcctgcttggcaaaactctatccgccacaatttatctctgaacgattgttttgttaaaatcccaagagaacccggccatcctggaaaggggaattactggagccttgaccccgcgagtcaggatatgtttgacaacggctcttttctccgccgcagaaaaagatttaagcgtcaccagttgaccccaggagcccacctcccgcatccattcccccttcctgccgcccacgcagcactgcacaatccacaccctggccccctccttggagcacccgctccccctcaacccgtacctggcgcctatcctaatacggcccccgggcggcgtccctacgccctgttgcatccacatcccctcaggtatctcttgctgagcgcccgggtctatgcaggtgctcctaaaaaagctgagggcgccgacctggccacaccggcgcccttcccctgctgctcaccacacctagttctcagccttggcagaagggccagggtgtggcgccggcaccgtgaggccgatgccagtctgagcgcgctcagggtgctgtgcaaaggaagcggcgagagagtccagggactcagacgggtgtgcccacgtcctagaggagcaacagctacctgtagctcagatcaccaggcctgctgtattcctaagcccctgccactttgttgtaaatgtccccctccactgttgctgggacagttttgttctaactcgtccagcattaggaggaccgcccctacggcagcgctcccaccccgagctcgatgttgggctggaacatgcagaccaaggcgccgctgctag

SEQ ID NO: 188128 - DNA, 1254 bp, synthetic construct
  misc_feature 1..1254: note = Description of Artificial Sequence: Synthetic coding sequence
  source 1..1254: mol_type = other DNA
atgaacctgccccgggccgagcggctgcggagcaccccccagcggagccttcgggactctgatggcgaggacgggaagatcgatgtgctcggggaggaggaggacgaggatgaggtggaagatgaggaagaggctgcatctcagcagttcttggagcagagccttcagcctgggttacaagtagccagatggggaggcgtcgctctccctcgggaacacatcgagggaggcgggggccctagtgacccaagtgagttcggaacgaagttccgcgcgccacctcgaagcgccgccgcctctgaggatgcgaggcagcctgctaagccaccatattcatatattgcgctcatcactatggccatcctccagaatccgcacaaaaggctgacattgagcggcatatgtgcttttatttctgggcgattcccatattaccgtcggaaatttccggcttggcagaattccatcagacacaacctgagcctaaacgactgctttgtgaagattccaagagagccaggccatccaggtaagggtaactactggagcttagaccccgcctctcaagatatgtttgacaatgggagcttccttcggagacgcaaaaggtttaagcgccaccagctgacccccggtgcacatttgccacatccctttcctcttccagcagcacacgccgcactacacaatccccggcctggtcctctcctgggagctcctgccccacctcaaccagtgcccggggcatatcctaacacagcccccggcagacgaccatacgccttgctgcacccgcacccactgcgttacctactgttatctgcgccggtgtacgcaggcgccccaaagaaggccgaaggtgccgcactggccacccccgctcctttcccctgttgctctccacatctggtgttatccctgggtaggcgggccagagtgtggaggcgtcaccgtgaggccgatgcaagcctgtccgctctaagggtgctgtgtaaagggtccggggagcgcgtgcaggggctgagacggatatgtcctcgccccaggggggccactgccacgtgtagctcagaccaccaggcttgttgtatacctcgacctctgcccctttgttgcaagtgtcctccacctccgcttcttggccaattttgttccaactcctcatcgatccgccggcggaccgctcctaccgctgccctcccgccccgcgcccggtgctgggctggtacttgtaggccgaggaggccatgctag

SEQ ID NO: 188129 - DNA, 1122 bp, synthetic construct
  misc_feature 1..1122: note = Description of Artificial Sequence: Synthetic coding sequence
  source 1..1122: mol_type = other DNA
atgaccgccgagagcggccccccccccccccagcccgaggtgctggccacagtgaaagaggaacggggagagacagccgctggtgcaggcgtgcccggggaagctaccggcaggggcgccggtggtagaaggaggaagcgtcctctccagcgagggaagcccccgtattcttatattgctcttatagcaatggccatcgctcacgcccccgaacgaaggctcaccctggggggcatatacaaattcataactgagcgctttccattttaccgtgacaaccccaaaaaatggcagaacagtattcggcataatcttactctgaacgattgctttctgaaaatccctcgggaggccggaaggccgggtaaaggaaactactgggccctcgacccaaacgcagaggacatgtttgagagcgggagctttctgcgcaggcgcaaaagattcaaacgctccgacctaagcacttaccccgcatacatgcatgatgctgccgccgctgcagccgctgcggcagcggcagccgcagccgcagcaattttccctggcgcagttcccgctgctagacctccatatccaggcgcagtctacgcaggatatgctcccccttctctagccgctcccccccccgtttactaccctgctgcctctccaggtccttgcagagtgttcggcctggtacccgagcgacctctaagccccgaacttggtcctgctccatctggcccaggcgggtcctgtgctttcgcaagtgctggggcccccgctactactacggggtatcagccggctgggtgcacaggcgcgaggcccgccaacccctcggcctatgctgccgcatatgctggccccgatggagcatacccacagggtgctggttcggcaatttttgcagcggctggaagattggctggcccagcaagccccccagccggtggaagctcaggcggcgtagagacaacagttgacttctacgggcgcaccagtccagggcagttcggagctcttggcgcatgctataatcccggtggacaactgggaggggcatccgcaggtgcatatcatgctaggcacgccgccgcatatccgggcggaatcgatcggttcgtgagcgccatgtag

SEQ ID NO: 188130 - DNA, 960 bp, synthetic construct
  misc_feature 1..960: note = Description of Artificial Sequence: Synthetic coding sequence
  source 1..960: mol_type = other DNA
atggccggccggagcgacatggacccccccgccgccttcagcggctttcccgccctccccgcagtcgccccttccgggcctcctccatctcccctggcaggcgcggaacctggccgcgagcctgaagaggcagcagcaggccggggcgaggccgctcccaccccggcacccggccctggtcgtcgaagacgacgccctctgcaacgaggcaagcccccatactcatacattgcattaattgctatggcgctcgcccacgcccccggccgtagactgacactggccgccatttatcgattcatcaccgagcgattcgccttctacagggacagccccagaaagtggcagaactcaatccgccacaacttgacattgaacgattgctttgtcaaagtcccaagagagcctgggaatcccggaaaaggcaactactggaccctcgacccagcagcagctgatatgttcgacaacggctcttttctacggcggcgcaaaagattcaaacgcgccgaattgcctgcccacgccgctgcagcccctgggccacctctgcctttcccttacgccccatacgcccctgcccctggaccggctttgctggtcccaccaccatcagctggtccgggcccctcacctcctgcccggctgttttcagtggactctctcgtcaatctccagcctgaactggcaggcctgggtgccccggaacctccgtgctgtgcggcaccggacgccgcagcagccgcatttcccccctgcgcagccgccgctagcccgcctctctacagccaagtgccggatcggttagtgctgcccgctactagacctggccccggcccgctgcccgctgagccactgctggctctggccggacccgcggccgccctgggtcctttgtctccgggagaagcatacctcaggcagccaggatttgccagcgggcttgaaaggtacttgtag

SEQ ID NO: 188131 - DNA, 1335 bp, synthetic construct
  misc_feature 1..1335: note = Description of Artificial Sequence: Synthetic coding sequence
  source 1..1335: mol_type = other DNA
atgaccaccgagggcggccccccccccgcccccctgcggcgggcctgttcacctgttcccggggcacttcaagccgcactgatgtcccctccccctgctgccgccgctgcagccgcagccgcacccgaaacaacaagctcctcttcctcatcctcgtccgcctcttgtgcaagttctagttcatcaagcaactctgctagtgccccttctgccgcttgtaagtccgcaggaggagggggggccggagcaggctccggaggcgccaagaaagcctcttctgggctgcggcgtcccgagaagcctccgtactcctatatcgcactaatagtcatggctattcagtcctccccctctaaaagactgaccttatcagagatataccaatttctccaagccagatttcccttcttccggggtgcctatcagggatggaaaaattccgttaggcataacctgtcccttaatgagtgcttcatcaaactgccaaagggcttggggcggccgggaaaagggcattactggactattgacccagcttccgagttcatgttcgaggagggatcctttcggaggaggcctagggggtttcggcgtaagtgccaggctctaaagcctatgtatcacagggtcgtgagcggactgggattcggagccagccttctaccacagggctttgactttcaggctcctccctctgcgcctctgggctgtcactcccaaggggggtacgggggtctggacatgatgccagccggttatgatgccggagccggtgctccgagccacgctcatccacatcatcatcaccaccatcacgtgccacacatgtctcctaatcccggctccacgtatatggcctcctgtcccgtaccagccgggcctgggggagtcggcgctgccggaggggggggcggaggcgactatgggccagactctagcagctcaccagtacctagtagtcccgcaatggcctccgcaatcgaatgtcattcaccttacacttctcctgcggctcattggtccagccccggcgcatcaccctatctgaaacaacctccagcattaactccgtcctccaaccctgccgcttccgccgggctgcatagtagtatgagctcctacagtctggagcagtcatacttgcatcagaatgcccgggaagacctctccgtgggactccctcgctaccagcaccacagtaccccggtctgcgatcgtaaggatttcgtattgaactttaacggcatttcctcatttcatccatccgcttctggaagttattaccatcaccaccaccagtccgtgtgtcaagatataaaaccatgcgtgatgtag

SEQ ID NO: 188132 - DNA, 1470 bp, synthetic construct
  misc_feature 1..1470: note = Description of Artificial Sequence: Synthetic coding sequence
  source 1..1470: mol_type = other DNA
atgctggacatgggcgaccggaaggaggtgaagatgatccccaagagttctttttccatcaacagtctggtgcctgaggccgtccagaatgataaccaccacgctagccatggccatcataatagtcaccacccccaacaccaccaccaccatcaccaccaccatcaccacccccctcccccagcaccacagcctccacctccaccacaacagcagcagccccccccacctccgccccccgccccccagcccccgcaaacccgcggggctcccgccgccgacgatgataagggtccacagcagctgctgctccccccaccaccccctcccccgcccgcagctgccctggacggagcaaaagcagacggactgggaggcaagggggagccagggggcggtcctggggaactggcgcctgtcggaccggatgagaaggagaaaggcgccggcgctggtggggaggagaaaaagggcgcaggagagggtggaaaagacggcgaaggtggtaaggaaggggaaaagaagaacggtaagtatgagaaaccaccgttttcttacaacgccctcatcatgatggcgatccgacaatcccctgagaaacgccttaccctgaacggcatttacgaatttatcatgaagaatttcccgtactacagagagaacaaacagggatggcagaattccatcagacacaatctgagtttgaacaagtgctttgtcaaagtcccccggcactacgacgaccctgggaagggtaactactggatgttggacccatctagcgacgatgtgttcatcggcgggacaactggaaagctgcgcaggcgctcaacaacctctcgggcgaaactcgctttcaagagaggcgcaagattgacgtcaaccggccttacctttatggatcgagccgggtccctatattggcctatgagcccattcctcagcctacatcaccctcgtgcatccagcacattgtcatataatggtactacaagcgcttacccaagccaccctatgccgtattcttcagtgctcacacagaactctctaggaaataatcattccttttctacagccaacggattatccgtcgatcggcttgtgaatggcgagattccctatgcaacccatcacctgacggcggctgccttggcggcgtcagtcccttgcggcctctctgtgccttgcagtggtacctactcgctgaatccatgttccgttaatctccttgcagggcagacctcttatttcttcccacacgtaccccatccttccatgacctctcagtcaagtacctcaatgtcagctcgcgccgcatcatcctctacaagcccccaggccccatcaactttgccatgtgaatcactgaggccgagtctgccgagttttactactggactttccggaggattgagtgattactttacacatcagaatcagggctctagttcgaaccccttgatacattag

SEQ ID NO: 188133 - DNA, 1470 bp, synthetic construct
  misc_feature 1..1470: note = Description of Artificial Sequence: Synthetic coding sequence
  source 1..1470: mol_type = other DNA
atgctggacatgggcgaccggaaggaggtgaagatgatccccaagtcctctttttcaatcaactccctcgtgccagaagctgttcagaacgacaaccaccatgcgtcccacgggcatcacaactcccaccatccccagcaccaccaccaccaccatcaccatcaccaccacccccctccgcctgccccgcagcccccgcctcccccccagcagcagcagccacccccaccccctcctcctgcgccacagccaccccagacaaggggcgcacctgcagccgacgacgataaaggaccccagcagctgttgctgccccccccccctccacccccccccgccgcagccctcgacggagcgaaggcagacgggctggggggtaagggcgagcccggtggaggccctggtgaactcgcccctgtcggccccgatgagaaagagaaaggagctggagctggaggtgaggaaaaaaagggggcaggagagggaggcaaagatggggagggaggaaaggaaggagagaaaaagaacgggaagtacgagaaaccaccattcagttacaatgcgctcatcatgatggcaatccggcaaagtcctgaaaaacggcttacccttaacggcatttatgaatttatcatgaaaaattttccttactaccgggaaaataaacaggggtggcagaatagcattaggcacaacttgagcctgaacaaatgcttcgtcaaggtccctaggcattacgacgatcccggcaagggaaactactggatgttagaccccagttctgacgacgtgtttatcggtgggactacggggaagctgcgtcggaggtcaactacctcaagagcaaaactggccttcaaacgaggggcgcggctcacctcaactggtctgacgtttatggacagggctggttccctctattggccaatgtcacctttcctgtcactgcatcatcctagagcttccagcacgctgagttacaacggcacgacttccgcctatccctctcaccctatgccctactcgagcgtgctgacacagaactccctgggcaataaccatagcttttccacagccaatggtctatctgtggaccgactggtgaatggcgagatcccctatgctactcatcacctcaccgctgcagccctggccgcctccgtcccttgcggcctcagcgtaccgtgctctgggacttatagcctaaatccatgctcggtcaacctgttggcagggcaaacttcctacttctttcctcatgtgcctcaccccagtatgacgtcccagagtagcacaagtatgtcagcccgcgccgctagctcttctacaagcccccaggccccttccactttaccttgcgagtccctgagaccaagtctgccatcattcaccacaggactctccggagggctaagcgattattttactcatcagaatcagggctcgagctctaacccactgattcactag

SEQ ID NO: 188134 - DNA, 1137 bp, synthetic construct
  misc_feature 1..1137: note = Description of Artificial Sequence: Synthetic coding sequence
  source 1..1137: mol_type = other DNA
atgagcagcttcgacctgcccgcccccagccccccccggtgcagccctcagttcccttctattggccaagagccccccgagatgaatctgtattatgaaaacttctttcacccacagggtgtacctagcccgcaacgcccaagttttgaaggcggaggcgagtacggggcaaccccaaatccctacttgtggtttaacggaccgacaatgaccccacctccatacctgccaggaccaaacgcttctcccttcttaccacaggcgtacggcgtgcagcgcccactcttacctagcgtgtccggcctgggggggagcgacttgggatggctcccaatacctagccaggaagagctgatgaagctggtcaggcctccatattcttacagcgcactcatcgcaatggcaatccacggagctccagataaacggttgacccttagccaaatatatcagtacgtggccgataacttcccgttttataacaagagtaaggccggctggcagaatagtattcgacacaaccttagccttaatgattgcttcaaaaaggtgcccagagacgaggatgatccaggcaaggggaactattggactctggatccaaactgcgaaaagatgtttgacaacggtaacttcaggcggaagcggaagcgcaagtccgatgtgagctcttccaccgcatcccttgctttagagaagacagagagctctctgccagtggactccccaaaaacgacagaacctcaggatattctcgatggcgcctcccctggaggaactacatctagccctgagaaacggccctcgccgcccccttccggggccccatgcctgaattcattcctgtcgagcatgaccgcctacgtgagcggcggatctccaacgtcccaccctcttgttactccaggactgagcccggagccgtctgacaaaacaggacagaactccctgacatttaactcattctccccactcaccaatcttagtaatcattcagggggcggcgactgggccaatcctatgcccaccaacatgctatcgtatggaggcagtgtgctctctcaattttccccacatttctacaatagcgtgaacacctcaggagtcctataccctcgagagggcacggaagtgtag

SEQ ID NO: 188135 - DNA, 852 bp, synthetic construct
  misc_feature 1..852: note = Description of Artificial Sequence: Synthetic coding sequence
  source 1..852: mol_type = other DNA
atgagcagcttcgacctgcccgcccccagccccccccggtgcagccctcagttccccagcattggacaggaacctcctgaaatgaatttgtattatgaaaatttttttcacccccagggcgtgccttccccccaacggccatctttcgaaggaggcggagagtacggcgctactccgaatccttacctgtggttcaacggtcctacgatgacgcctccaccttatctgccaggcccaaatgctagccccttccttccgcaggcctacggcgttcagaggcctttactccccagcgtgtcaggtcttgggggaagtgacctaggatggctccctatcccttcccaagaggaacttatgaagctggtcagaccgccctactcctactccgccctcatagcaatggccatccacggagcccctgacaagcgcttaaccctctcacagatctaccagtatgtggccgataatttcccgttctataataaaagtaaagcagggtggcagaatagtattcggcacaacctgtcgcttaatgattgcttcaagaaggtgccccgcgacgaggacgaccccgcctacgtctctggcggttcacccacctcacacccactagtgactcctggcctgtccccggagccaagtgacaagaccgggcagaatagtctcacctttaatagtttctcgcccctcaccaacttgtccaaccattccggggggggggattgggcaaatccaatgcctaccaatatgctgagctacggcgggagcgtgttgtctcaatttagtcctcatttctacaacagtgtgaacactagcggagtgttgtacccacgcgaggggacagaagtttag

SEQ ID NO: 188136 - DNA, 1266 bp, synthetic construct
  misc_feature 1..1266: note = Description of Artificial Sequence: Synthetic coding sequence
  source 1..1266: mol_type = other DNA
atggccgagagctggctgcggctgagcggcgccggccccgccgaggaagctggtcctgagggcgggctggaggaaccagacgcactggatgattcactgacaagccttcagtggctccaggagttctctattcttaacgccaaagccccagcactgccacctgggggtactgacccacacggataccaccaagtaccaggttccgccgcccccggaagcccgctggctgccgaccctgcttgcctcggtcagcctcacacacctggaaagccaaccagctcatgtacctctcgctccgccccccccggcctgcaggcaccacctcctgacgacgtggactatgcaactaatccccatgttaagccaccgtacagttacgcgacactgatttgtatggctatgcaagccagcaaggcgacgaagattacattaagtgctatttataaatggattactgacaacttctgctactttcggcatgcagacccaacctggcagaacagcatccgccataatctttccctgaataagtgcttcattaaagtacctcgcgagaaggacgagccagggaaaggcgggttctggaggattgatccccagtatgccgaacgactgctgagcggagcgtttaaaaaaagaaggctccccccagtccacatccaccccgctttcgctagacaggcagcccaggagccaagcgcggtgccacgtgcagggccgctgaccgtgaatacagaagcccagcagctcttgagggagttcgaggaggccaccggggaagctggctggggcgccggcgaggggcggctgggacacaaaaggaaacagcctctgccgaagagagttgccaaagtgccccggcctcccagcaccctcctacccacaccagaggagcagggcgagctcgagcctttgaagggcaactttgattgggaagccatcttcgatgccggaactttgggaggggagctcggtgcacttgaagccctcgaacttagtcctccactcagtccggcatctcacgtagacgtcgatttgacaattcacgggcggcatatcgattgtccagcaacgtggggtccctcggtcgaacaggcagccgacagtctcgacttcgatgagacattcctggccactagcttcctacaacacccatgggacgagtcaggctcgggctgtctacctcccgagcctctttttgaagcaggcgacgcaactcttgccagcgacttgcaagactgggcttcagtcggcgctttcttgtag

SEQ ID NO: 188137 - DNA, 987 bp, synthetic construct
  misc_feature 1..987: note = Description of Artificial Sequence: Synthetic coding sequence
  source 1..987: mol_type = other DNA
atggccgccgccgccgccgccctgagcggcgccggcaccccccccgcgggaggcggggcggggggtggtggcgcaggcggtggcggttccccgcctggggggtgggcagttgctcggctcgaggggagggagtttgagtacttaatgaagaaacgcagcgtgaccataggccggaacagctcccaaggaagcgtcgacgtgagcatgggccattcttctttcatctcaagacgccatctggagatattcacccctcctggcggtggagggcatgggggtgccgccccggaacttcctccagcccagcctaggccagatgccggtggcgatttttacctgcgatgtctggggaaaaacggagtattcgtggacggggtgttccagcgacggggcgctccccctttgcagctccccagggtttgtaccttccgtttcccttctaccaacattaagatcaccttcaccgccctgtcctctgaaaagagggagaaacaggaggcctcggagtcgccagtcaaagcagtgcagcctcacatttcgccccttaccattaacattcctgatactatggcccaccttattagcccattgccatcccccactggtacaattagcgcagctaatagttgtcctagctccccacgtggtgcgggatctagcggatacaaggtgggtcgtgtcatgccctctgacttaaatttgatggctgacaactcccagcccgagaatgagaaggaagcttccgggggtgactctccgaaggacgattcaaagcctccctatagttatgcgcagttgatcgttcaggctattacgatggctcctgataaacagcttacacttaatgggatctatactcatattacaaagaactatccttactaccgtactgcggacaagggttggcaaaggggagaatcattcgcccacgttggcaatacccggatcaggatcggtttgcccgcacacaaggccccgcaacgttag

SEQ ID NO: 188138 - DNA, 1983 bp, synthetic construct
  misc_feature 1..1983: note = Description of Artificial Sequence: Synthetic coding sequence
  source 1..1983: mol_type = other DNA
atggccgccgccgccgccgccctgagcggcgccggcaccccccccgccggcggtggagcaggaggagggggtgccgggggcggcggttcgcctcctggaggctgggcagttgcgaggctggaaggcagagaattcgaatacctgatgaaaaaacggagtgtgactataggcagaaattcttcccagggaagcgtggatgtgtccatgggtcactcctctttcatcagcagaaggcatcttgagatctttaccccccctggtggagggggacatgggggtgctgccccagaactgccacccgcgcagcctcgtccagatgctgggggagacttttatctcaggtgcttaggaaaaaatggcgttttcgtcgatggcgtgtttcagagaaggggcgcccccccccttcagttgccacgggtatgtaccttcagattccccagcacgaatattaagatcaccttcactgccctgtcatcagaaaagagagagaagcaggaggcatcggagagccctgttaaggccgtgcagccgcatattagccctctcacaatcaacatccccgacacaatggcgcacctgattagcccccttccctctcctactggtaccatcagcgcagccaacagctgcccatcatcgcctaggggtgccggcagcagcggatacaaagtaggccgggtgatgccctctgaccttaacctcatggcagataacagccagcctgaaaacgagaaagaggcttccgggggcgactcccccaaagatgactccaagccaccgtactcttatgctcagctcattgtgcaagccattacaatggcacctgacaagcaattgaccttaaatggaatctatacccacatcacgaaaaactatccatactataggacagccgacaagggctggcagaacagtatcaggcacaatctgtctctgaatcggtattttatcaaggtcccccgaagtcaggaggagccaggcaaaggcagtttttggcggatcgacccagcatctgagtccaaactgattgagcaggcatttcgtaagcggaggccccggggtgtgccttgttttagaacccccctgggccctctcagttctaggtcagcccccgcatcacccaatcatgcgggcgttctctcagcccatagttccggggcccagacaccagagtctctgagccgggaggggtcgccagcccctcttgagcccgagcctggagctgctcagcctaagttggcagtaattcaggaagcacgcttcgcccagagcgctcctggcagcccactgtctagccaacccgtgcttatcactgtacagaggcaactgccacaagccattaaacctgtcacctacaccgtggccactcctgttaccacttccacatctcagcctcctgtggtccagaccgttcacgtggtccatcagatccccgcggttagtgtaacatccgtagccggactcgcgcctgcaaacacctacaccgtcagcggccaggctgttgttacacccgccgcagtccttgcccctcctaaagccgaagctcaggagaacggtgatcacagggaggtgaaagtgaaagtagagcccatccctgccatcgggcacgcaactctcggtactgcttcccggattatacagaccgcccagactacccctgtccagactgtgactattgtccagcaagccccactcgggcagcaccagttacccattaagacagtgactcaaaatggaactcacgtggctagcgtccctacagctgtgcacggacaggtcaacaacgccgccgcctcccctctgcacatgctggcgacacacgccagtgcaagtgcctccctacctaccaagcgccacaatggggaccagcctgaacaacctgaactgaagcggattaaaaccgaggatggcgaaggcattgtgatcgcactgtctgttgacactcccccagcagccgtgcgagagaagggcgtgcagaactag

SEQ ID NO: 188139 - DNA, 1833 bp, synthetic construct
  misc_feature 1..1833: note = Description of Artificial Sequence: Synthetic coding sequence
  source 1..1833: mol_type = other DNA
atggccgccgcccggcgggccctgggcgccggcaccccccgggccagaggccgcggcagaggggcaggcggtggaggttctcgcagagccctgggtaggggggccccaggtggaccccgggtgagggtgagcgatgaggaggccctgggagaccaccgtccgcaattagtggctgggctggggggaagagagcatggtcccctggagctccacctgcctgcccctcctcgggatctgcatgcaccaggccgtaggggacacggcggagccgctcccgagctgcctccggcccaaccccggcctgacgctggtggcgatttctacctaaggtgcctcggcaagaatggggtgttcgtggacggcgttttccagagaagaggtgccccaccattacagctgccacgcgtatgcaccttcaggttccccagtaccaacattaagattacatttacggcattgtccagcgagaagcgcgaaaagcaggaggcgtccgagagtcctgtcaaagccgtccagccacacataagtccactcactatcaatattccggatactatggcacacctcatatcaccacttccaagcccaactgggaccatttcagctgctaatagctgcccaagttcccctcgcggagctggctcctcaggctacaaagtgggccgagtcatgcctagcgacctgaatctgatggcagataactcacagcctgagaacgagaaagaggcgagtggcggcgactctcctaaagatgattctaagcctccatatagctacgctcagcttattgtccaggctatcaccatggctcccgacaagcaacttacacttaatgggatctatacacatatcaccaagaactatccctattacaggaccgcagacaaggggtggcagaatagcatcaggcataatctgagcctgaacagatatttcattaaagttccaagatctcaggaggagccaggcaaagggagcttctggcggattgatccggcctctgagtcgaagctgatcgaacaagctttcagaaagaggcggcctcggggcgtgccttgcttcaggacacccctgggcccgctgagctcccgtagtgcacctgcttcacctaatcatgcgggcgtgctcagtgcgcatagttccggcgctcagactcccgaaagtctttctagagaaggaagccccgcacctcttgagccagaaccgggcgcagcccagcctaaactcgccgtgattcaggaggccagattcgctcagagcgcacctggttcaccattgtcctcccaacccgttcttatcactgtgcagaggcagttaccacaggccatcaaacctgtgacctataccgtggccactccagtcacaacatccacttcccagcccccggtcgttcaaacagttcacgtggtacaccagattccagctgtatccgtgacctctgtggccgggctcgcacctgccaacacttacacagtttcaggccaggccgtggtcacacccgccgccgtgctcgcacctccgaaggctgaggctcaggagaacggggaccaccgagaggtcaaagttaaagtggaacccataccggcaattggacacgcaaccctgggaaccgcatcgagaatcatccagactgcgcaaaccacgcccgtgcaaacggtcaccatcgtccagcaagctccactggggcaacatcaactccccataaagacagtgacacagaatggcacacatgtcgcttcagtcccaactgccgtgcacggtcaggtgaacaatgggcctctagggctccgcagacccccctgcgccagctcagattggtcttgtctcagctag

SEQ ID NO: 188140 - DNA, 1038 bp, synthetic construct
  misc_feature 1..1038: note = Description of Artificial Sequence: Synthetic coding sequence
  source 1..1038: mol_type = other DNA
atgagccacctgttcgacccccggctgcccgccctggccgccagccccatgctctacttgtacggtcccgagagacctgggctgcctctggcattcgccccagcagctgcacttgctgccagcggacgggctgagacaccgcaaaaacctccatactcttacatcgccctcattgctatggctattcaggatgctcctgagcaaagggttacccttaatggcatttaccagttcataatggaccgcttccccttttatcatgacaaccgacagggctggcagaatagcataagacacaacctttccctgaacgactgctttgtcaaagtgcccagagagaaaggccgacccgggaaaggcagctattggactctggacccaagatgcctggatatgtttgagaacggcaattatagaaggagaaagagaaagcctaaaccagggccgggtgccccggaagcaaagcgccctcgggccgaaacacaccagaggagtgcagaggctcagccagaggccggatcgggcgccgggggatctggtccagcgatctcacggctacaggccgcgcctgcaggacccagcccactcctggacgggcccagtccacccgccccgctgcattggcccggtacagcatcacctaacgaagacgcgggagacgcagctcagggcgccgccgctgtcgcagttggacaggctgccaggaccggcgacggtccaggttctccactaagacctgcttccaggagctctccaaagtcaagtgataagagtaaaagctttagtatcgacagcattctcgccggcaagcaaggacaaaagcctcctagtggagacgagcttctgggtggagctaagccagggcccggaggccgcctgggggcctcactattggctgcttcaagctccctgagaccaccattcaacgcatccttgatgctcgatcctcatgtgcaggggggattttaccagctgggcattcccttcctgagctactttccactgcaggtaccagacactgtactgcacttccagtag

SEQ ID NO: 188141 - DNA, 1131 bp, synthetic construct
  misc_feature 1..1131: note = Description of Artificial Sequence: Synthetic coding sequence
  source 1..1131: mol_type = other DNA
atgatggccagctaccccgagcccgaggacgccgccggcgccctgctggcccctgaaaccgggaggaccgtgaaggagcccgaaggcccacctcccagccctggcaagggcggtgggggcggaggaggtactgcacccgaaaagccggaccccgcccagaaacccccgtactcatatgtcgctctaattgccatggccattagggaatcagcagagaagcggctgacacttagcggtatctatcagtacatcattgcgaaattcccattttacgagaagaacaagaaggggtggcagaatagcatacgccataatcttagtcttaacgaatgctttattaaagtccctcgagagggcggtggcgaacgcaaaggcaattattggaccttagatccagcctgtgaagatatgttcgagaaagggaattataggcgccgaagaaggatgaaacggcctttccggccacctccagctcattttcagccagggaagggcctctttggggccggtggagccgctggaggatgcggcgtagccggtgcaggagcagatgggtacggctacctagctccacctaagtacttgcagtcaggcttccttaataattcttggccacttccccagccacccagcccaatgccctatgcctcatgccaaatggccgctgccgcagcggccgccgctgcagctgctgcggctgcaggtcccggctcacctggcgccgccgctgtggtaaagggcctcgcaggacccgccgcatcatacggaccatacacaagggtgcaatccatggccctcccccccggagtagtaaattcatataacggactgggaggtccacctgctgctcccccaccacctcctcacccacatcctcacccacacgctcatcatctgcacgcagctgctgctccaccccctgcccctccccatcatggagcagcggctcccccacccggccagctgagccctgcctctcccgcgacagccgccccccctgcccctgcgcctacgagcgcccctgggctccagtttgcctgtgctcgccagccagaactagctatgatgcactgttcctattgggatcacgactctaagaccggcgccctccatagccggctggatctgtag

SEQ ID NO: 188142 - DNA, 810 bp, synthetic construct
  misc_feature 1..810: note = Description of Artificial Sequence: Synthetic coding sequence
  source 1..810: mol_type = other DNA
atgatggccagctaccccgagcccgaggacgccgccggcgccctgctggcccccgagactggcagaacagtaaaggagcctgagggcccacctcctagcccaggtaagggtgggggcgggggcggggggacagccccagaaaagcccgaccccgcccagaagcctccatatagttatgtggcgctgatcgctatggccatccgcgagagtgccgagaagagactcacactatctggtatctatcagtatattatcgctaaattccctttttatgagaaaaataaaaagggatggcagaactctattagacacaatctgtcacttaatgagtgcttcattaaagtgccaagggaggggggtggagaaaggaagggtaattactggactttagatccagcgtgcgaagatatgtttgagaagggaaattacagaaggcgccgcagaatgaagaggccatttcgacctccgccagcacacttccagccaggcaagggcctgttcggagctggtggcgccgcgggcgggtgcggcgtcgctggcgccggagccgacggctacggttacttagcccccccaaagtatcttcagagtggattcctcaataactcctggcctctgccccagccccccagccctatgccatatgcttcgtgccagatggctgccgcagcagcagcggccgctgctgcagccgctgcggccggtcccggttctctggcccgacccctgtggtccaggggatggagagctcggccccctagaactggccggactcatgcctgcagggcctggaggtgccccccagcttag

SEQ ID NO: 188143 - DNA, 2406 bp, synthetic construct
  misc_feature 1..2406: note = Description of Artificial Sequence: Synthetic coding sequence
  source 1..2406: mol_type = other DNA
atgaagaccagcccccggcggcccctgatcctgaagcggcggcggctcccactccccgttcagaatgcaccatcggagaccagcgaggaggagcccaagcgcagtccggctcagcaggagtcaaatcaggccgaggcctcaaaggaggttgcagaaagcaatagctgcaagttcccggccgggataaagatcatcaaccatcccactatgccgaacacccaggttgttgcgattcctaacaatgcaaacattcactctattattaccgcactcaccgccaaaggaaaggagagcgggagctccggccccaacaaatttattctgatctcatgcggcggagctcctactcagccacctggactcaggccccagactcagacatcatacgatgccaaaaggactgaggttacactcgagaccctaggccctaaacccgctgctcgcgatgttaacctacctagaccgccgggcgctttgtgcgagcagaaaagggagacttgcgccgacggagaggccgcgggatgtactatcaataattctctgtcaaacatccaatggctccggaaaatgagcagtgatggcttggggtcaagaagtatcaagcaggagatggaggaaaaggagaattgccacctggaacaaagacaagttaaggttgaagagcccagcaggcccagtgcaagctggcagaactccgtgtcagagcgcccaccctatagctacatggccatgatacagttcgcaattaattcaaccgaacggaagcggatgacccttaaagatatctacacatggatcgaagaccatttcccctatttcaagcatatagctaagccagggtggaagaactctattcggcataacctgagcctgcacgatatgttcgtcagagagactagtgcaaacggtaaggtctccttttggaccattcatccaagtgctaatcggtaccttacactggaccaggtctttaaacctctggatccgggcagcccacaattacctgaacacttagaatcccagcaaaaacgccctaacccggaactgcggcggaatatgacaatcaagactgagctcccactgggcgccagaagaaagatgaagccgctgctgcctcgggtgagctcttacctcgtccccatccagttccccgtcaaccagtcactggtgctgcagccctccgtaaaggtgcctctgcctctagccgcctccctcatgtcatccgaactcgcgcggcattctaaacgggttaggatcgcaccaaaggtgtttggtgaacaggttgtcttcggatatatgtccaagttcttcagtggcgatcttcgggacttcggaactccaatcaccagtctatttaatttcatttttctctgcctgagcgtgttattggcggaggagggcattgctccactgagttccgccggtcccggcaaagaagagaaacttctatttggcgaaggcttctcacctcttctccctgtgcagaccatcaaagaggaagagattcaacctggagaggagatgccacatctggccaggcccattaaagtggagagccctcccctggaagaatggccgagccccgccccatcttttaaggaagaatctagtcacagctgggaggactcgtctcaatctccaacaccacgacccaaaaaatcttacagcgggctacggtcccctactagatgcgtctcggagatgctggtaatccaacacagagagcgtcgcgaacggtccaggtctcgaaggaagcaacatctcttgcccccttgtgtggatgagcctgagctgctgtttagcgaaggtcccagtacctctcgttgggccgcggagcttcctttccctgccgactcctccgacccggcatctcagcttagctactcgcaggaagtgggtggtccattcaaaacccctatcaaagagactcttcccatctcatccacccctagcaagtccgtactgcctcggacaccggaatcgtggcgcctaacaccgcccgcaaaagttggcggccttgatttctccccagttcaaacgagtcagggggcctccgatccccttcccgacccactgggattaatggatttgtctacaacacccctgcaatctgctccacccctggagagcccacaacggctgctcagcagtgaacccctggatctgatctcagtaccgttcgggaacagtagtccatcggacatagacgtccctaagccaggtagcccggaaccacaggttagcgggctggccgccaatagatcgctaaccgagggcctggttctggataccatgaatgacagcttgtctaaaattcttctcgatatatctttccccggattggatgaagacccactgggacctgacaatatcaactggtcccagtttatccctgagctgcagtag

SEQ ID NO: 188144 - DNA, 2292 bp, synthetic construct
  misc_feature 1..2292: note = Description of Artificial Sequence: Synthetic coding sequence
  source 1..2292: mol_type = other DNA
atgaagaccagcccccggcggcccctgatcctgaagcggcggcggctcccattaccggtgcagaatgctccttccgagacctctgaagaggaaccaaagcggtcacctgctcaacaagagtccaatcaggccgaagcaagtaaggaggtggccgaaagcaactcatgtaaattcccagcaggcatcaagattatcaaccaccctaccatgcctaacactcaggttgttgcgatccctaacaatgcgaacatccatagtattattacagcactgaccgccaagggaaaggagtcaggcagctctggtcctaacaagtttatcctgatctcatgcggcggcgcgcccactcagcctcccgggttgagaccccagacccagacgtcttatgacgccaagcgtactgaggtcacattagaaacgttagggccgaagcccgctgctcgcgacgttaaccttcctaggcctcccggcgcgttatgcgaacagaagagggaaacctgtgcagatggagaggcagccggctgcacaattaacaacagcctcagtaatatccagtggctgcggaaaatgtcttccgatggcctgggctccaggtccatcaagcaggaaatggaagagaaagaaaattgccatttggaacaacggcaggttaaagtggaagagccttctcgcccttctgcgtcctggcaaaattctgtgtcggaacgacctccctacagttacatggctatgatacagttcgcaattaactccaccgaaaggaagcgaatgaccctgaaagacatctacacctggatagaagaccactttccgtattttaagcacattgcgaaacctggatggaagaactccattcgccacaatctttccctgcacgacatgttcgtcagagaaacaagcgccaacggcaaagtttccttttggaccattcacccttccgccaaccgatacctgacgctggatcaggtgtttaagccacttgatcccggatctcctcaattgcctgagcatcttgagtcccagcagaagcggcctaatcccgagttaaggcgcaacatgaccatcaaaacggaattacctttgggagccaggagaaagatgaagccactccttccccgcgtgagctcatatctcgtgcctattcagtttccagtaaaccaatccttggtgctacagccctctgtgaaggtacccttgcctttggctgctagcctcatgtcttccgaattggctaggcacagcaaacgcgtccgtatcgcccctaaggtgctgctggccgaggaaggaatcgcccctttatcatctgcaggaccgggaaaagaagaaaaactgctgttcggggagggattttcccctctcctccccgttcagacaatcaaggaagaagaaattcagcctggtgaagagatgcctcacttggcacgacccatcaaggtggagagtccacctttggaggaatggccttcacccgccccttcgttcaaggaagagagctctcactcttgggaagatagttcccagtctccgactccgcgccccaaaaaatcttatagtggcctgagatctcccacaaggtgtgtatctgagatgctggtgatacagcatcgagaaagaagagagcgcagcagatcacggaggaaacagcatttgcttcccccttgtgtggatgaacctgaactgctgttctccgaaggaccaagcacttcccgctgggcagcagaacttccctttccggccgatagcagcgatccggctagccagctttcatactcacaggaagtggggggtcccttcaagaccccaatcaaagagacactcccaatcagtagcaccccctcaaagagtgtcttaccccggaccccggagtcttggcggctgacccccccagccaaggtgggtggccttgacttctcccccgtgcagacgagccagggtgctagtgacccactgcctgatccactcggcctcatggacctgtccacgactcccctccagtcagcacctccactcgagagtccacaaaggctgctgtcgtctgaacccctggatctgatcagcgtgccattcgggaattctagtccaagcgacatcgatgtaccaaaacccggctcaccagaaccgcaggtttccggactggcagcaaacagatccctgaccgaaggcctcgttctggatacgatgaatgactccttgtccaagatcttgctggatatcagctttccgggcctggatgaggacccgctcgggccagataacatcaattggtcacagttcattccagaactgcagtag

SEQ ID NO: 188145 - DNA, 2247 bp, synthetic construct
  misc_feature 1..2247: note = Description of Artificial Sequence: Synthetic coding sequence
  source 1..2247: mol_type = other DNA
atgaagaccagcccccggcggcccctgatcctgaagcggcggcggctgccccttccagtacagaatgccccaagcgaaacaagcgaagaggagcctaagagaagccctgcccagcaggagtcaaaccaagccgaggcttctaaggaggtggcagaatccaactcctgcaagttcccagccgggatcaaaatcatcaatcaccccactatgcccaacacacaggtggtggcaatccctaacaatgctaacatccactctatcattacagctttgactgccaagggcaaggagagcggcagcagcggccccaataagttcatactgatcagctgtgggggtgctccgacccagcccccagggctacgtccacagacacaaacatcttatgacgccaagcgtactgaagtgacactggaaaccctgggacccaaacccgcagctcgggacgtaaacctcccacggcccccaggagccctctgtgaacagaaaagagagacatgcgccgatggggaagctgccggctgcactattaacaattcgctctcaaacatccagtggctgaggaagatgtcttcggatgggttaggctcacgatccattaagcaagagatggaggaaaaggagaactgccacttagagcaacgccaggttaaggtggaagaaccaagccgcccgagcgccagctggcagaattcagtcagtgagcgccctccatactcgtacatggcaatgatacagttcgcaataaacagtacagagcgtaaacgcatgactctgaaggacatttacacatggattgaggaccacttcccttactttaaacatatcgccaaacccggctggaagaattcgatccgccacaacctctcactacatgacatgtttgtgagggaaacatcagccaacgggaaagttagcttttggacaattcacccaagtgccaatcgctatctaactttggaccaggtgttcaaacagcagaagcgcccgaacccagaactccgcagaaatatgaccattaaaacagaactgcctctgggggcacgaagaaaaatgaaacctcttcttccacgcgtgagctcctacctggtgcctattcagttccccgttaaccaaagtctggtattgcaaccttccgtaaaggttccactccctctcgctgcctccctcatgtcctccgaactggcgcgccattctaaaagggtgagaatcgccccgaaagtgttgctggcggaagaaggcatcgcccccttgagcagcgccggcccagggaaggaggagaagctgctgtttggagagggcttctcccctctgctgcccgttcagacaatcaaggaggaggagatccagcctggtgaagagatgcctcatctcgcacgcccgataaaggtagaaagcccaccgcttgaggagtggccatcccctgcaccttctttcaaggaagagagcagtcactcatgggaggatagctcccaaagccctactccccggcccaagaaatcctatagcggcctccggtcccccacccgatgcgttagtgaaatgctggttattcagcatcgcgagagacgggagcgctcccgttcccgaagaaaacagcatttgctaccaccatgcgtcgacgagccagaactgctgttctctgaaggaccctccaccagccggtgggcagcagaattaccttttcctgccgattccagtgaccccgcctcccagctgtcgtatagccaggaagttgggggaccatttaagaccccaattaaggaaacacttcctatctcctccacccctagtaagagcgtcctgccccgaacccccgaaagttggagactcacccccccagcaaaagtgggagggctggacttttctccagtgcaaacctctcaaggtgccagtgaccctctccccgatcctctgggattaatggacctgagtaccactccactgcagagtgccccgcccctggagagcccacagcggctactgagctcagagccgctggaccttattagcgttccatttggcaatagtagccccagcgatatcgatgtgccaaagccagggtcccccgagccccaggtgtctggactagccgcaaatcgctccctaaccgagggcctggttctagacactatgaacgatagcctgtcaaagatcttgcttgatataagttttccaggactggacgaggaccctctgggtcccgacaatattaattggtctcagttcattcctgaactgcaatag

SEQ ID NO: 188146 - DNA, 531 bp, synthetic construct
  misc_feature 1..531: note = Description of Artificial Sequence: Synthetic coding sequence
  source 1..531: mol_type = other DNA
atgggcgcccccgccacccggcggtgcgtggagtggctgctgggcctgtacttcctgagtcacatccccataactctgttcatggacctgcaggccgtgctgcccagggagctttaccctgtggagtttcgtaacctgctaaaatggtatgcgaaagagttcaaggacccactcttgcaggagcctcccgcctggttcaagtcattcctgttttgcgagttagttttccagctgccttttttcccgatcgccacgtatgcctttcttaagggttcctgtaaatggatccgcacccccgctataatatactccgttcataccatgacaacacttatcccaatccttagcaccttccttttcgaggatttttcaaaagccagcggatttaaaggtcaaaggcccgaaaccctccacgaacggttgactctcgtgtctgtgtacgctccgtacttgttaatcccctttattttactgatatttatgcttcgctcaccctactacaaatatgaagaaaagaggaagaagaaatag

SEQ ID NO: 188147 - DNA, 1473 bp, synthetic construct
  misc_feature 1..1473: note = Description of Artificial Sequence: Synthetic coding sequence
  source 1..1473: mol_type = other DNA
atgggccccgtgatgccccccagcaagaagcccgagagcagcggcatcagtgtgtcctccgggctttcacagtgctacggtgggtccggattctccaaggcgctacaggaagacgacgatctggacttctccctcccagacatccgcctcgaagagggcgccatggaagacgaggaacttacaaatttgaattggttgcacgagtctaagaacctactaaagtctttcggagagagtgtgctcagaagtgtctcccccgtgcaagacctggatgacgacacccccccttcacccgcccacagtgacatgccgtacgatgctaggcaaaatcctaactgtaagcctccctacagttttagctgcctcatcttcatggctattgaggactccccaaccaaaagactgcctgtgaaagatatttacaattggatcctggagcacttcccctactttgccaatgctccgaccggatggaagaattccgtccgtcataacctgtcactaaataaatgtttcaagaaggtggacaaggaacggagtcagagcatcggaaaggggagtctgtggtgtatagacccagagtatcgccagaatctcatccaggcactcaagaagacaccttatcaccctcatcctcacgtgtttaatacaccaccaacatgccctcaggcttaccagagcaccagcggaccccctatatggccaggatctacgttcttcaaacggaatggcgccctcctccaagaccctgacatagacgccgcaagcgccatgatgttgttgaatacccctcccgaaatacaagccggatttccaccaggcgtcatccagaatggtgcacgggtcctgtcccgggggttgtttcctggagtgagaccactacctattacccctatcggggtcaccgccgccatgcggaacggcataacttcctgtcgaatgaggacagaaagtgagccaagctgcggctctcctgtggtgtctggcgatcccaaggaagaccataactattcctcagcaaagtcctcgaatgcaaggtccacatcccccacttctgactccatctcttcctcaagcagctcagccgacgatcactatgagtttgccaccaaaggttcccaggagggatccgagggcagcgaaggctcctttcgatcgcacgaatcgccgagcgacaccgaagaggatgataggaaacattctcaaaaagaacccaaagactctttaggagattctggctatgccagccagcacaagaagaggcagcattttgcaaaggctcgaaaggtgcctagcgacacattacccctcaaaaagagaagaaccgagaagccccccgagtccgacgatgaggagatgaaggaggccgcggggtcactgctccatttggctggcatacggtcttgtctgaataacatcacaaaccggactgcgaagggacagaaagagcaaaaagagacgaccaagaattag

SEQ ID NO: 188148 - DNA, 1473 bp, synthetic construct
  misc_feature 1..1473: note = Description of Artificial Sequence: Synthetic coding sequence
  source 1..1473: mol_type = other DNA
atgggccccgtgatgccccccagcaagaagcccgagagcagcggcattagtgtgtcaagcgggctgtcacagtgttacggaggaagtggcttctcaaaggctttgcaggaggatgatgacctggacttcagtctgccggacataagattggaagagggggctatggaggatgaggaattgaccaacctcaattggctgcacgaatcaaagaacttattaaagtcatttggcgagagcgttctgagatccgtgtctccagttcaagatttagacgacgatacacctccttctccagcgcactctgacatgccctacgacgccagacaaaaccctaattgcaaacctccttatagtttttcgtgtctgatctttatggccatagaggatagtcccactaaaaggctcccagtgaaagatatctacaattggattctggagcacttcccctactttgcgaacgcccccactggctggaaaaacagcgtgcgtcataacctcagccttaacaagtgtttcaagaaggtcgacaaagaacgctcacagtccatcgggaaaggctctctctggtgtatcgaccctgaataccgtcagaatctcatacaggctctcaaaaaaactccatatcacccgcatccccatgtgttcaatacccctcctacgtgccctcaggcctaccagagcacttccggccctcccatctggcccggtagcactttttttaaacgcaatggtgctctattgcaggatccagatattgatgccgcctcagccatgatgctgttgaataccccccccgagattcaggcaggattccccccaggggtcatacaaaatggagctcgcgtgctgtcccgagggctttttcccggagtgcgtccactgcctatcactccaatcggagttactgccgccatgaggaatggcatcacttcttgccgcatgcggactgagtcagaaccctcctgcggcagtccggtggtaagcggcgaccctaaagaggaccacaattattccagcgccaagtcctcaaatgctcggtctacttccccaacttcggactcaatctctagtagtagcagctccgccgatgatcactacgagtttgccaccaaggggtctcaggaaggaagcgagggatccgagggctcctttagatctcatgagtccccaagcgacactgaagaggacgaccgcaagcattcacagaaggagccaaaagattcacttggagactctggatacgcttcacagcacaaaaagcgacagcatttcgctaaggcccgtaaggttccttcggacactttaccccttaagaagcggagaacagaaaaaccacctgaaagcgacgacgaggagatgaaagaggccgccgggtctttgctgcacctggcaggcattaggagttgtctgaataatatcacgaatcgcaccgccaagggccagaaagagcagaaggagaccacaaaaaactag

SEQ ID NO: 188149 - DNA, 165 bp, synthetic construct
  misc_feature 1..165: note = Description of Artificial Sequence: Synthetic coding sequence
  source 1..165: mol_type = other DNA
atgggccccgtgatgccccccagcaagaagcccgagagcagcggcatctcagttagctccggtctgtcccagtgttacggagggtctggtttctccaaggctttgcaggaggacgacgacctggacttcagtctgccagacatccgtctcgaggagggagcatag

SEQ ID NO: 188150 - DNA, 282 bp, synthetic construct
  misc_feature 1..282: note = Description of Artificial Sequence: Synthetic coding sequence
  source 1..282: mol_type = other DNA
atgggccccgtgatgccccccagcaagaagcccgagagcagcggcatatcggtctcatctggcttgagccagtgctacggcgggagtggcttttccaaggccctccaggaagatgacgatctcgactttagcctgccagacatccgtctcgaggagggtgcgatggaggatgaagagctgaccaatctcaattggctgcacgagtccaagaatctgctgaaatctttcggagagagtgtgttgcggtctgtgagtcccgtgcaggacctcgatgatgattag

SEQ ID NO: 188151 - DNA, 1407 bp, synthetic construct
  misc_feature 1..1407: note = Description of Artificial Sequence: Synthetic coding sequence
  source 1..1407: mol_type = other DNA
atgggccccgtgatgccccccagcaagaagcccgagagcagcggcatcagtgtatcgagcggactgtctcagtgctatggcggcagcgggttcagcaaagcacttcaagaagacgatgacctggacttcagtttgcccgacatccgactcgaggagggggctatggaggatgaagaattaaccaaccttaactggctacacgaatccaagaacttgctcaagagctttggcgaatcagttctgcgatcggtctcccccgtccaggatcttgatgacgatactccaccctccccagcacacagcgacatgccttatgacgccagacagaatccaaattgtaaacccccatacagcttttcctgcctgatcttcatggcgatcgaggacagcccgactaagcgcctccccgtgaaagacatctataactggatactcgaacacttcccctacttcgcaaatgcacccaccggctggaagaattccgtgcggcataatctgagcttaaataaatgtttcaagaaggtcgataaggagcggtctcagagcataggaaaaggcagtctgtggtgcatcgatccagaatacagacagaacctcatccaagctctgaagaagaccccctatcacccacacccacatgtgtttaacactccacccacctgtcctcaggcctatcagtccacctctggcccccctatttggcccggatctaccttttttaagcggaacggagccctgcttcaggtgcccccgggggttatacaaaatggtgcccgagttctgagtcgcgggctgttcccaggcgttcggccactgcctattacacctatcggtgtgaccgctgccatgcggaacggcataactagttgcagaatgaggacggagagcgaaccgagctgcggcagtcctgttgtgagtggagaccccaaagaagatcataattatagtagtgccaagtccagtaatgctaggtctacctccccgacttctgacagcataagctcctcaagcagttccgcggacgaccactacgagtttgccacaaagggctcccaagagggaagcgaagggtctgaaggcagcttcagaagtcacgaatcgcctagcgatacagaggaagatgacagaaaacactctcagaaagaacccaaagattccctgggggacagcgggtacgccagccagcataaaaaaagacagcatttcgctaaagcacgaaaagtcccttccgacaccctccctctgaagaaaagacgtacagagaaacctcctgagtctgatgatgaggagatgaaagaggccgcgggatcccttctgcacctcgccgggatccgatcctgcctcaacaatatcacgaatcgaacagctaaaggacagaaagagcagaaagagactaccaaaaattag

SEQ ID NO: 188152 - DNA, 627 bp, synthetic construct
  misc_feature 1..627: note = Description of Artificial Sequence: Synthetic coding sequence
  source 1..627: mol_type = other DNA
atgggccccgtgatgccccccagcaagaagcccgagagcagcggcattagtgtcagctctggtctctctcagtgctacggtggcagcggcttttcaaaagccctccaggaggacgatgacttagacttcagcctccccgacatcaggctggaggaaggagctatggaggacgaagagctgacaaatctgaattggctccacgaaagtaagaatctcttgaaatcttttggcgaatctgtcctcaggtccgtgagccctgtgcaggaccttgatgacgacacccccccctccccggcacatagcgatatgccttacgacgcaaggcagaaccctaattgtaagccaccttacagctttagttgtctgatattcatggcgatcgaggatagccccaccaagagattaccggttaaggatatctacaattggatccttgaacatttcccatacttcgctaacgccccaaccggctggaagaactcggtgcgccacaatctttctctgaataagtgcttcaagaaggtggacaaagagcgtagccagtcaatagggaagggaagcttgtggtgcatcgatccggagtaccgacaaaatttaatccaggcccttaagaagacaccatactag

SEQ ID NO: 188153 - DNA, 1407 bp, synthetic construct
  misc_feature 1..1407: note = Description of Artificial Sequence: Synthetic coding sequence
  source 1..1407: mol_type = other DNA
atgggccccgtgatgccccccagcaagaagcccgagagcagcggcattagtgtctctagcgggctctcacaatgctacggaggatcagggttttctaaagctctgcaggaagatgatgacctggacttcagcctgccagacattagactcgaggagggagccatggaagacgaagaactcaccaacctgaactggcttcacgagagcaagaatttactgaaaagctttggcgagtcagtgctgaggtctgtgtcacccgtgcaggatcttgatgacgatacccctcccagccccgctcattctgatatgccttacgacgctagacagaatcctaactgtaaacctccctatagtttcagctgccttatttttatggcaatagaagactcgcctacaaaaaggttgcctgtaaaagacatctataattggatactggaacacttcccgtatttcgcgaacgctccaacaggatggaagaactctgtgaggcacaatttgtcactgaataagtgtttcaagaaggtggacaaggagcgtagccagtctatcggaaaaggcagcctgtggtgcattgatcccgagtaccggcagaacctgatccaggcccttaaaaaaacaccttaccacccccacccacatgtgttcaacaccccaccaacttgtccccaggcctatcagtctacatccggtccacccatttggccaggttccacttttttcaaacggaatggcgcccttctgcaagtgcccccgggagtaatccagaatggtgcccgggtgctatcaagggggctttttcccggagttagaccactgccgatcacaccaatcggggttacagccgccatgagaaatggaatcaccagttgccgcatgcgcacggaaagcgaaccctcctgcggatcgcctgtggtgtcgggcgacccgaaagaggatcacaattatagtagcgcaaaaagctccaatgcaagaagcacatctcctaccagtgactccatttctagtagctccagttccgctgacgatcactatgagttcgctaccaaaggaagccaagaaggcagtgaaggaagcgagggaagcttccggagccatgaatcccccagcgacacagaagaggacgaccggaaacactctcagaaggagcctaaagattctctgggcgattcaggatacgcttcacagcataagaagcgccagcacttcgccaaagcgcgaaaagtgcccagcgacacattgcctctaaagaaacggcggactgagaaacccccggagtctgatgacgaggaaatgaaggaagccgccgggtcactccttcacctcgcaggtatccgtagctgtctgaataacatcactaataggaccgccaagggacagaaggaacagaaggagactaccaagaactag

SEQ ID NO: 188154 - DNA, 777 bp, synthetic construct
  misc_feature 1..777: note = Description of Artificial Sequence: Synthetic coding sequence
  source 1..777: mol_type = other DNA
atgatcgagagcgacaccagcagcatcatgagcggcatcatccggaacagtggccagaatcaccacccatcccctcaggagtatcgactgctggccacaaccagtgatgatgacctgcctggcgacctccagagtttaagttggctgactgccgttgatgtccccaggctccaacagatggcaagcggcagagtggaccttgggggcccatgtgttccacatccacaccctggagctctagcaggtgtggcggaccttcacgtcggtgccacccccagccccctgctccatgggccggccgggatggcccctaggggcatgccaggcttaggcccaatcactggccaccgagacagtcagatgagccagttcccagtgggcgggcagcccagcagtggtctgcaagatccccctcacctctattctccagctacccaaccccagtttcctctgcctcccggggcccaacagctgtctgatcgtcacggtccagaggaacaacaggacagacaacccgcgtgcgagcgagacctccaactgcacgagggagccctgcccctactgcaggacgggccacgtagagtggaggaactgggcgccgctcaaccagtctcagaacaggtgttgcgggaagggggggaacaggacgagaggctgttaccccaaggactgccagttggatctgaacccggaccacacaggcaggacggcggaggtgatgcacaggtggaagaagagggccccggatgccaccctcctgagtacggacagccttag

SEQ ID NO: 188155 - DNA, 1554 bp, synthetic construct
  misc_feature 1..1554: note = Description of Artificial Sequence: Synthetic coding sequence
  source 1..1554: mol_type = other DNA
atgatcgagagcgacaccagcagcatcatgagcggcatcatccggaactctggccagaaccatcaccctagcccacaagaatatcgccttttagctactactagtgatgacgatctccccggagacctgcagtctctaagttggctcaccgcagtcgatgtcccaaggctgcagcagatggccagtggcagggtggatctcggagggccatgtgtcccacacccccaccctggagcactcgctggcgtggcagacctgcatgtaggagcgacccctagtcctctgttgcacggccctgccggaatggcaccgagaggaatgccaggcctcgggcctatcacggggcatcgcgatagtatgagtcagtttccagtgggtggacagcccagtagtgggctgcaggaccccccacacctctattcaccagccactcagcctcagtttccactccctcccggcgctcagcagtgtcctccagtggggctgtacggcccgccctttggtgttcgtcctccctacccccaaccacacgtcgccgtacactcttctcaagaactgcacccaaagcattatcccaaacctatctattcctattcttgtcttatcgctatggcgctgaaaaactccaagaccggatccctgcccgtctctgagatttacagcttcatgaaggaacatttcccctattttaagacggcccctgatgggtggaagaattctgtgagacacaacctttccttgaacaaatgcttcgaaaaggttgaaaataaaatgagcggctccagtcggaaagggtgtctttgggcactgaatctggcgcggattgataagatggaggaggaaatgcacaaatggaaaagaaaggacctggcagcaatccaccggtccatggcaaaccccgaggagctcgataagcttatcagtgatcggccagaatcttgtcgaagacccggcaagcctggtgagcctgaagcgccagtgctgacgcacgcgaccacagtggcagtagcccatggatgcctggcagtgtcacagctgcctccccagcctctgatgactttgtcactacagtccgtgcctctgcaccaccaagtgcaaccgcaggcacatttagcacccgattcgcctgccccagctcagaccccaccgctgcacgcacttcccgacctgtcgccctcacctttgcctcacccagccatgggaagggctcccgtggactttataaacattagcactgatatgaacactgaggtcgacgcgctggatccttccataatggacttcgctttacaaggaaatttgtgggaagaaatgaaggatgaggggttcagcctcgatacgttaggggcgttcgccgatagcccactcgggtgtgacctgggagccagcggcctgacccctgcaagcggaggcagcgaccagagctttcccgatttgcaggtgaccgggttgtacacggcctactccactcccgactcggtggccgcatccggtacttcatcttccagtcagtacctgggcgcacagggtaataagcctattgcactcctgtag

SEQ ID NO: 188156 - DNA, 1014 bp, synthetic construct
  misc_feature 1..1014: note = Description of Artificial Sequence: Synthetic coding sequence
  source 1..1014: mol_type = other DNA
atgcccggcctgccctgccccgccctgccctgccccgcccccccccccgctcctagttgtttgatcgccatggctctcaagaacagtaaaacaggctctctgcctgtctctgaaatctattcctttatgaaggaacacttcccctactttaagacagctccagacgggtggaagaacagcgttagacataacttatctctcaataaatgcttcgaaaaagtcgagaataaaatgtccggctcttctagaaaaggctgcctgtgggctctcaacctcgcacggattgacaaaatggaagaagagatgcacaagtggaaaaggaaggatctggccgctatccaccgaagcatggcgaatcctgaagaactcgataagctgataagtgatagaccagaatcctgccgtcgccccggaaaacctggagaaccggaggcccctgtcttgacacacgccactaccgtggccgtggctcacggttgtctggcggtgtctcaactgcccccacagccattgatgaccctgtcccttcaatcggttcccttgcatcaccaggtccagccccaggcccatctggccccggattcccccgcccccgctcaaacccctccactccatgctctgcccgacctgagcccctctcccctgccccacccagctatgggtcgggcacccgtggatttcattaacatttctaccgacatgaatacagaggtggacgccttggatccttccatcatggattttgctcttcagggtaacctctgggaagaaatgaaggatgagggctttagcctcgatacactaggagcattcgcagacagcccattaggttgcgacctcggcgcttcaggcctgacacctgcttcagggggctccgatcagtcttttcctgacctgcaggttacagggctttataccgcttatagcactccagactccgttgcagcctccgggacatcctcatcttctcaatatctcggcgcacagggaaacaagccaatcgccctgctctag

SEQ ID NO: 188157 - DNA, 1680 bp, synthetic construct
  misc_feature 1..1680: note = Description of Artificial Sequence: Synthetic coding sequence
  source 1..1680: mol_type = other DNA
atggccgccaagctgcgggcccaccaggtggacgtggaccccgacttcgcacctcaatccagaccaaggtcctgcacgtggccccttccgcagcctgacctggccggtgacgaggatggggcacttggcgccggagtggccgagggggcggaagactgcggtcccgaaaggcgcgcaacagccccagcaatggccccggcaccaccccttggggctgaggtgggccccctcagaaaagctaaatcttctaggcgaaatgcctggggcaatctatcatatgccgacttaatcactaaggcaattgagtctgcccccgataaacggttgaccctgtcgcaaatttatgactggatggtgagatacgtgccatacttcaaagacaaaggggattcaaacagttctgcaggatggaagaactctattagacacaacctgagccttcacacaaggttcatccgcgtccagaatgaaggtaccggtaagtcaagctggtggatgcttaaccccgaggggggcaaaactgggaagaccccacgaaggcgggccgtatctatggacaatggcgcaaagttcttgcgtataaaaggaaaagccagcaaaaagaagcagcttcaagcccccgaacggagcccagacgactcatctccctccgctcccgctcccggccccgtgccagccgcagccaaatgggccgcctctcccgcctcgcacgccagtgatgactacgaggcctgggcagatttccgggggggggggcggcccctcttgggggaggccgctgagcttgaagatgacgaagcccttgaagccctggcccctagcagtccattgatgtacccatctccagcatccgcactgtcccccgcattgggctcaaggtgtcctggcgagcttccacgactcgcagagctggggggccctctgggactccacggcggcggcggcgctggcctgccagaaggtctgctcgacggtgctcaggacgcttatggaccccgcgctcgagcacaggctcggccaggcgcaggatgtgcggggggcgcaggcgccgggggccgcagtcgacgtctcccccggcagagaggcgggcccgttcgggctgcacgagcgctggcccaatgcctatctccgccccatcagccttacgatgccgcaagaaggggcggtaggagggggcccgggacagcagggcctcgcaggaggctccgcggcccagcaagacgacctccagctggtagatcagcaggcgccctacggtgccgcagaaggagagccgctggacggcgagcaaggccactgcccggaaggcctggaccccgacatgtgcagagagagccacgcgtgcgcaggggcgtgcatcacccacaacgactgcatggccagcggcggaatgggttgcaattacgctttggccctgcatctgccgcggccggccccggaaggggtcctgcccctcagccagagctgggcgccggactccgagctgcctcacggctgagggcgccacgccctgttcctagaggccctttgtctagccatcccgattccagggtccccgcccccgactctagctcccctggcggaggcccctccccagctcgtgaccctagccgcaggccagccgccggcgaaggagagggcggggccggtgctcctcactgttcttgtcctcacagctag

SEQ ID NO: 188158 - DNA, 2034 bp, synthetic construct
  misc_feature 1..2034: note = Description of Artificial Sequence: Synthetic coding sequence
  source 1..2034: mol_type = other DNA
atgatgcaggagagcggcaccgagaccaagagcaacggcagcgccatacaaaacgggagcgggggctccaaccacctgctcgaatgtggcggtttacgagagggtaggtcgaatggcgagacaccagcggtcgacattggggcagctgaccttgcgcacgcgcagcagcagcagcagcaggccctgcaggtcgctcggcaactgttgctccaacagcagcagcagcagcaagtcagtggactgaaatcgccgaaaaggaatgataagcaacccgcccttcaggtgcctgttagtgtggctatgatgacccctcaagtaatcactccacagcagatgcagcagattcttcagcaacaggtcttgtctccacagcagctgcaagtcctgctccaacaacaacaagccctgatgctccaacagcagcagcttcaggagttttacaagaagcaacaggaacaactacaactccagctgctacagcaacagcacgctggaaaacagccgaaagagcaacagcaggtggctacacagcagctggcatttcagcagcagctgctgcagatgcagcaattgcagcagcagcacctgcttagcttgcagcgacagggtctgctgactattcagcccgggcagccggcattgcccttgcaacccctggctcaagggatgatccccacagaactccaacagctgtggaaggaggtgacgagcgcacacactgcagaggagacgactggaaacaaccatagcagcctggacctaaccaccacttgcgtctccagctctgcccctagtaaaactagcctcatcatgaaccctcacgcctcaactaatggccagctgtcagtacatacaccaaaacgagagagtctttcccatgaggaacacccccatagccacccgctgtatggacacggcgtctgtaaatggccaggatgtgaagctgtctgtgaggactttcaatccttcctaaaacacttaaacagcgagcatgcgctggacgacagatctactgctcaatgccgggtgcagatgcaagtggtacagcagcttgagctgcagctcgccaaagacaaagaacgcctacaggctatgatgacgcaccttcacgttaaaagcacagaaccgaaagctgccccccaacccctgaacctggtcagtagcgtgaccctgtccaagtctgccagcgaggcctctccacaatctctgccacacaccccaaccacccctaccgcacctctaaccccagtgactcagggaccaagtgtgatcacaaccacgtccatgcacactgtggggccaatccggcgtcgttatagcgataaatacaacgtccctatctcttcagccgacatagcccagaaccaggagttttataagaacgcagaggtcaggcccccattcacatatgcatctctgattaggcaggcgattctggagtcaccggagaagcagctgacactgaatgaaatttacaactggtttacaaggatgtttgcttactttcgccgcaacgccgcgacctggaagaacgctgtacggcacaatttgagtctccataaatgttttgtgcgcgtggaaaatgtgaaaggggcagtctggaccgtcgacgaggttgagttccagaaacgcaggccacagaagatttcggggaacccgtctctaatcaaaaatatgcagtcgtctcacgcctattgtacccctctcaacgcagccctgcaggcatctatggccgagaattccatcccgttgtacacaacagcaagcatgggaaatccaacccttgggaatttggctagtgctatcagagaagagctcaacggggccatggagcacacaaattctaacgagagcgattctagccccggacgttcacctatgcaagccgtgcacccagttcacgtgaaagaggagcccctggacccggaagaggccgaagggccccttagtctggtgaccaccgccaatcactccccagattttgaccacgaccgggattacgaagatgaacccgtgaacgaggacatggaatag

SEQ ID NO: 188159 - DNA, 1077 bp, synthetic construct
  misc_feature 1..1077: note = Description of Artificial Sequence: Synthetic coding sequence
  source 1..1077: mol_type = other DNA
atgatgaccccccaggtgatcaccccccagcagatgcagcagatcctccagcagcaggtgctcagccctcagcagcttcaggtgcttcttcagcagcagcaggccctgatgctgcagcagcagcaactccaagagttctataaaaaacagcaggagcagcttcaactgcagcttttgcagcagcagcacgcaggcaagcaaccgaaagagcagcagcaagtggccactcagcagctggcctttcagcagcaactgctccaaatgcagcagctccaacagcagcaccttctgtcactgcaacgccagggcctgctgactattcagccgggccaacccgctctgccgttgcagccccttgcacaaggaatgatccctacagagctgcagcagctgtggaaagaagtcacctccgcacacaccgccgaggagaccacaggtaataatcactcatctctggacctgaccactacgtgtgtctcttcctctgccccgagcaaaacttccctaatcatgaatccccatgccagcactaatggccagctgtcagtacacacccctaagcgggaatctttgagtcacgaagagcatccacattctcacccattgtacggccatggagtgtgcaagtggcccggatgcgaggctgtttgcgaagactttcagtctttcctcaagcatctgaattccgagcacgcattggacgaccggagcaccgctcaatgtcgagtgcagatgcaggttgtccaacaattagagctgcaacttgccaaggacaaagagagattacaggcgatgatgacacacctccacgtcaaaagcacagagcccaaggccgcaccacagcccctcaatttagtgagttcagtaacacttagcaaatcggcttccgaagcctcccctcagagtttacctcatactcctactactcctacccctcctgactcacgccatcctcgtccactgtgtcaccataatcaccagcatgctcacggggggacacatcctcaggcggtattgaggcagatccagagagctcactttgtctctcgttactgcgctgagcccaggatcctgtag

SEQ ID NO: 188160 - DNA, 1509 bp, synthetic construct
  misc_feature 1..1509: note = Description of Artificial Sequence: Synthetic coding sequence
  source 1..1509: mol_type = other DNA
atgatgcaggagagcggcaccgagaccaagagcaacggcagcgccatccaaaacggctcaggcgggtccaatcacttgctagaatgcggcggactgcgggagggcaggtcaaacggggagactcccgccgtggatattggggctgccgacctcgcacacgcacaacaacagcagcagcaagccctgcaggttgcgaggcagcttctgctgcaacaacagcagcaacagcaggtgtccggtctaaagtcccccaagagaaacgacaagcaacctgctctgcaggtacccgtcagtgtagcaatgatgacaccccaggtcatcactccacagcagatgcagcagatcctccagcagcaagttctttcccctcagcagctgcaagttctgctgcagcagcaacaggcccttatgcttcagcagcaacaactccaggagttttacaaaaaacaacaggaacagttgcagttgcagctgctgcagcagcaacacgccggcaagcagccgaaggaacagcagcaggtggccactcagcagttggctttccagcagcagcttctccagatgcagcaactgcagcagcagcacttgctaagtttgcagcgccagggactcctgactatccaaccaggccagccagccctccccttacagcctctggcccagggaatgatccctacggagcttcagcagctgtggaaggaggtcactagtgcccataccgctgaagaaacaacaggaaacaaccactcctctcttgacctgaccacaacttgtgtcagctctagcgcgccttcaaagacaagtctaattatgaatccacacgcttccacaaacgggcaactaagtgtgcatacacctaagagggagagcttgagccacgaagagcacccacactctcatcctctgtatgggcatggtgtgtgtaaatggcctggctgcgaagccgtttgcgaagactttcagagtttcctaaagcacctgaacagcgagcatgccctggatgaccggagcaccgcccaatgcagggtgcagatgcaggtcgtgcagcagctcgagctacagctggcgaaggataaggagcgactgcaggctatgatgactcatttgcacgtgaagtccaccgagccaaaagcagctccacagcccctcaatctggttagtagcgtcaccctttccaaatccgcctccgaggcgagccctcagagcctgcctcatactcctaccactccaacggctcctctcacacccgtcacgcaggggcccagtgtgataaccaccacatccatgcatactgtagggcctattcgcagacgatactcagacaaatataatgtcccaatatccagcgcagatattgcccagaaccaagaattttataagaatgcggaggtgaggccaccctttacttacgccagtctcatcaggcaggccatactggaatcccccgagaagaaaaagaaagagcgccagacactgggaaccatgcccattcactcaacacagcaatag

SEQ ID NO: 188161 - DNA, 1470 bp, synthetic construct
  misc_feature 1..1470: note = Description of Artificial Sequence: Synthetic coding sequence
  source 1..1470: mol_type = other DNA
atgatgaccccccaggtgatcaccccccagcagatgcagcagatcttgcaacagcaggtcctgagtccccagcagctgcaggttctgctccagcagcagcaggccctgatgcttcaactgcagcagttgtggaaggaagtgacatctgcccacaccgctgaggagacaacagggaacaatcatagttcactggatctgacaacaacctgcgtttcatctagcgctcccagcaaaacatctctgatcatgaatccacacgccagcacaaacggccagttatctgttcacacaccaaagagagagtccctctcacatgaagaacaccctcactcccaccctctgtatggtcacggcgtatgcaagtggcctggatgcgaagctgtctgcgaggacttccagtcgttcctgaagcatctgaacagtgagcatgccttggatgaccgcagcaccgcgcagtgccgcgttcaaatgcaggtggtccagcagctggagttacaactggctaaagataaggagagactccaggctatgatgacgcacctccacgtgaaatcaacagagcccaaagccgccccccagccactcaacctggtgtcttcagtgaccctctccaagagtgcatccgaggcctccccccaaagtctccctcatacccccacaaccccaacagcaccccttacccccgtcacacagggcccaagtgtgattaccaccactagcatgcatactgtcggcccgatccgcagacgatactcagacaaatacaatgttcctatctcttccgctgacattgctcagaaccaggagttctataagaacgcggaggtgcgccccccattcacatacgcgagcctgatcagacaggctattcttgaatccccggagaaacaactgacactgaacgaaatctataattggtttacgcgtatgttcgcctattttcgacgaaatgctgctacttggaaaaacgccgtaaggcacaatctgtcgctgcataagtgcttcgtgagagtcgaaaacgtcaaaggggccgtgtggacagtggacgaggtagaattccagaagagaagaccacagaaaattagcggcaatcctagccttattaaaaacatgcagagttctcacgcatactgcacgccgttaaatgctgcgctgcaggccagtatggccgaaaatagcatccctttgtacaccaccgcgtcaatgggtaatcctaccctgggcaacctcgccagtgccatccgagaggagctgaacggcgcgatggaacacactaattctaatgagtcagacagttccccgggcaggagtccaatgcaggccgtgcaccctgtgcatgtgaaggaggagccacttgacccggaggaggccgaagggcctctttcactcgtaacaaccgctaatcatagccccgattttgaccacgacagggattatgaagatgaacctgtgaacgaggatatggaatag

SEQ ID NO: 188162 - DNA, 2034 bp, synthetic construct
  misc_feature 1..2034: note = Description of Artificial Sequence: Synthetic coding sequence
  source 1..2034: mol_type = other DNA
atgatgcaggagagcggcaccgagaccaagagcaacggcagcgccattcagaatgggtccggaggcagtaatcacctacttgagtgtggaggcctaagagagggtcggtccaatggagaaacacctgcagttgacatcggagctgccgacctcgcccacgcacagcagcagcagcagcaggcacttcaggtcgcaagacagttacttctgcaacagcagcagcagcaacaagtgtccggcctcaagagtcctaaacggaacgataagcagcccgccctccaggtccctgtgagtgtagcgatgatgacaccacaggttatcactccgcagcagatgcagcagattctgcaacagcaggttctaagcccgcaacagttgcaggtgttgctgcaacagcaacaggcactgatgctgcagcagcagcagttgcaagagttttacaaaaagcaacaggaacagttgcagctccagctgctacagcaacaacacgccggcaagcagcccaaagagcagcagcaggtggctacacaacagttggcatttcaacagcagttactacagatgcagcaattgcagcagcagcaccttctttctctacaacggcaagggctcctaaccatacagcctggacagccagcactacctctgcagcccctggcacaagggatgattcccacagagctgcagcaactgtggaaggaagtgacttctgcccacactgcggaggagacaactggtaacaaccattcctccctggacctcaccacgacctgtgtcagttcctccgctccaagcaagacatccctgatcatgaacccacatgcaagcaccaatggccagctctcggtccacaccccgaagagagagtccttatcccatgaagaacacccacacagccaccccctgtacggccacggcgtttgtaagtggcccgggtgcgaggctgtctgtgaagattttcaatcttttctgaaacatctaaactccgagcatgctctggatgacagaagcaccgctcagtgcagggtccagatgcaagttgtacagcagctggagctgcagctcgccaaagataaggagagactccaagctatgatgacccacctacacgttaagagcactgagcccaaggctgcccctcagccactaaatctggtgtcatccgtaacgttgtctaagtcagctagtgaggcatccccccagagcttaccccatactcctaccacccctaccgcccccttaacaccagtgacccagggcccaagcgtgatcaccaccacctcaatgcacacagttggccctatccggcggcggtacagcgataaatataacgtaccaattagctcagccgatattgcccaaaatcaggagttctacaagaacgccgaggttcggcctcctttcacttatgccagtctaattcgccaagcaatcttagagtccccagaaaaacaactcacgctgaatgagatttacaactggttcaccagaatgttcgcttacttccggaggaacgccgctacctggaagaacgcggtgcggcacaatctgtccctccacaaatgttttgtgagagtggagaacgttaagggggccgtgtggacagtcgacgaagtcgaattccaaaagagaaggcctcagaaaataagtggaaacccaagcctgatcaaaaacatgcagtctagtcacgcttactgcacacctctgaacgcagcactccaggcatccatggctgagaatagcatcccactctacacaaccgcttccatgggaaatcccacgctgggcaatttggccagcgccattcgggaggagcttaatggtgccatggagcacaccaatagcaatgaatctgactcatccccaggtcgaagcccgatgcaggcggtgcaccccgttcacgttaaagaggagccgctcgacccggaagaggcggaagggccattatctcttgttactaccgctaatcactcacccgattttgaccacgacagggattatgaggacgagcctgtgaatgaggacatggaatag

SEQ ID NO: 188163 - DNA, 1806 bp, synthetic construct
  misc_feature 1..1806: note = Description of Artificial Sequence: Synthetic coding sequence
  source 1..1806: mol_type = other DNA
atgatgcaggagagcggcaccgagaccaagagcaacggcagcgccatacaaaacggctccggcggctccaaccaccttctcgagtgcggtggcctgcgcgaaggcagatcgaacggagagacaccagcagtcgatatcggcgctgcggacctggcacacgcgcagcagcaacagcagcaggccttacaagtggcacggcagctcctgttacagcaacaacagcagcagcaggtgagcggtttgaagtccccgaaacggaacgacaaacagcccgctttgcagcagcaacaggttgctacacagcagctggcattccaacagcagctgctccagatgcagcagctgcagcaacagcatcttctctctctgcagcgccagggcctcttgaccatccaacccggtcaacccgcgcttccgctgcagcccctcgcccaaggaatgattccgaccgaactgcagcaactgtggaaagaagtcacatcagcacataccgccgaggaaactacaggcaataatcatagttcccttgacctgaccactacctgcgtgtctagctcagcacccagcaagacatctttgatcatgaaccctcatgccagcacaaatgggcagctgtccgttcacacaccaaaaagagagtccttatcccatgaggagcacccccactctcacccactgtacgggcatggagtgtgcaagtggccaggatgcgaggctgtttgtgaggacttccagagcttcctgaaacatctgaacagcgaacatgctctggacgatcgcagtactgcacagtgccgggtacagatgcaggtcgttcaacagctagagctgcagctggctaaagacaaggaacgcctgcaagcgatgatgacccacctacatgtgaaatccacagaaccaaaggcggctccccaaccactcaatctggtatcttccgtgacactgtcgaagtcagcatctgaagcctcacctcagtcccttccacacacccctacgacccccaccgccccactgacacctgtgacccaggggcctagtgtgataaccaccaccagcatgcacaccgtcggcccaattagaaggaggtattcagataaatataacgtgccaatctcctcggctgacatcgcacagaaccaggaattctacaaaaatgccgaggtcaggcctccctttacctacgctagcttgattcgccaggctatacttgaaagtccagagaagcagttaaccttaaacgagatctacaactggttcacaagaatgttcgcctacttccgtcgtaacgccgctacttggaaaaacgcagtgaggcacaacctgagcctgcataaatgtttcgtccgggtcgaaaacgtgaagggcgctgtgtggaccgtcgatgaagtggagtttcagaaacgtagaccccagaagatcagcggcaatccatctttaatcaaaaatatgcaatcctcccatgcctattgcactccgctgaacgctgcgttgcaggcttcaatggcagaaaattccattcctctctataccacggcttctatgggcaaccctacactcggaaacctggcttcagcaatacgggaagaactaaacggagcgatggaacacaccaatagtaatgagagcgattcgtcgcctggtcgatccccgatgcaggcggtccaccctgtccatgtgaaagaggagccccttgacccggaggaggcagagggtcccctgtctctggtaacaacagcaaaccattcacccgactttgaccacgatagggattacgaagatgagcccgttaatgaggacatggaatag

SEQ ID NO: 188164 - DNA, 675 bp, synthetic construct
  misc_feature 1..675: note = Description of Artificial Sequence: Synthetic coding sequence
  source 1..675: mol_type = other DNA
atgatgaccccccaggtgatcaccccccagcagatgcagcagatcctacaacaacaagtgctctctccccagcagcttcaggttctcctgcaacagcaacaagctctgatgctgcagcaacagcaactacaggaattctataagaagcagcaggagcagcttcaactgcagctgctgcaacagcaacatgccggaaaacagccaaaggagcaacagcaggttgccacccaacaactagccttccagcaacagcttctgcaaatgcagcaactacagcagcaacacctgttgtcattgcagcggcaaggcctcctcacaatacagcccggccagcccgcgttgccgctgcagccactagctcagggtatgattcccactgaactccagcaactctggaaagaggtcacgagtgcacatacagctgaagaaaccaccgggaacaaccattcctcgctggacctgaccaccacttgcgtgtccagctccgctccatccaaaacaagtctgatcatgaatccccacgcctctactaatgggcagttatcggtgcatacccctaagagggagtcactctcgcacgaagagcacccacacagccatcctctttatgggcatggggtctgtaagtggcccgggtgcgaagcagtttgtgaggatttccagagtttcctgtag

SEQ ID NO: 188165 - DNA, 2040 bp, synthetic construct
  misc_feature 1..2040: note = Description of Artificial Sequence: Synthetic coding sequence
  source 1..2040: mol_type = other DNA
atgttccagtgcgtgttcagcagcagcgtgctgcagccccacagcacaagctgtctgtttaagcaccttttttaccattccgcgaccccggccagccagaaacagcccgaacctatctattctaagaagacggagattcagaggcaaaccgttcgggccccattcgctaaacttttcatcttcagtgccctgcaggtggccagacaacttcttcttcagcaacagcagcagcaacaagtgtcgggcctgaaatcacctaaaagaaacgataaacagccagcgctacaggtcccggtctctgtagccatgatgactccacaggttatcacaccacagcagatgcagcagatactgcagcagcaagtccttagccctcagcagctgcaggtgctgctccagcagcaacaggctctcatgttacagcaacagcaactccaggagttttataagaaacagcaggagcagctacaattacagctcctgcagcagcagcatgccggtaaacagcctaaggagcagcagcaagtggctacgcaacagctggccttccagcagcagctgctccagatgcagcagcttcagcaacagcacctgctgtccctgcaaaggcagggactgcttaccatccagccaggacaacccgccctgccacttcagccattggcccagggcatgatccctactgaactgcagcaactgtggaaagaagtaacctcagcccacacggcagaagagacaacgggcaacaaccactccagtctggatcttacgacaacctgcgtttcttccagtgccccctctaagacttctctcattatgaacccacacgcgagtaccaatgggcagctgtctgtgcacacgcctaaacgggaaagcttgagccacgaggagcatcctcactcacatccactttacggtcacggcgtatgcaaatggccaggatgtgaggcagtctgcgaagattttcaaagttttctcaaacacctgaactcggagcatgcccttgacgaccggtctacagctcagtgccgcgttcagatgcaggtggtccaacaacttgaacttcaactggcgaaagacaaggagcgcttgcaggccatgatgactcatttacatgtcaagtctaccgagcctaaggctgctccacaacccctgaatctagtctcaagcgtgactctgagtaaaagtgcttctgaggcgagccctcaaagcctcccccatacccccactactcccaccgccccactgacacccgtgacgcagggcccgtctgttatcaccaccacatccatgcacacagtaggcccaatcagacgacgatattcagataagtataatgttcccatctccagtgctgatatcgctcaaaatcaagaattttacaagaacgctgaagtccgacccccttttacatatgcctcactgatcaggcaggctatactagagtcaccagagaaacagttaacgttaaacgagatctacaattggttcactcgtatgttcgcctatttccgaagaaacgccgccacttggaaaaacgctgtccgccataacctgtccctgcacaagtgctttgtcagggtggaaaacgtgaaaggggccgtttggacagtggatgaagtggaatttcaaaaacggcgaccacagaaaatcagtgggaacccctcactcattaagaatatgcagtcatcccacgcctattgcactcctctgaatgccgcccttcaggctagcatggctgaaaatagcatacccctttacaccacagcttctatgggaaatcccacactaggcaacttagcaagcgcaataagagaggaactcaatggggcgatggagcacactaattctaacgagagcgatagctcccccgggcgatccccgatgcaggccgtgcatcctgtgcatgtgaaggaagaaccattagatcctgaggaggccgaaggccccctgagcttagtgacaaccgccaaccattctccggatttcgatcacgatagggactatgaggacgagcctgtgaacgaggatatggaatag

SEQ ID NO: 188166 - DNA, 372 bp, synthetic construct
  misc_feature 1..372: note = Description of Artificial Sequence: Synthetic coding sequence
  source 1..372: mol_type = other DNA
atgatgaccccccaggtgatcaccccccagcagatgcagcagatccttcaacagcaggttctcagcccacaacaattgcaggtcctgctgcagcagcaacaggcactgatgctccagcagcaacagctgcaagagttctacaagaaacagcaagagcagctccaattacagctactacagcagcagcacgccggcaagcaacccaaagagcagcagcaggtggctactcagcagcttgccttccagcaacaactactccaaatgcagcagctacagcagcaacatctgttgagtctgcagagacagggtctgctcaccatacagccaggccaacccgcactgcccttacagcccctggctcaaggtatgtag

SEQ ID NO: 188167 - DNA, 2034 bp, synthetic construct
  misc_feature 1..2034: note = Description of Artificial Sequence: Synthetic coding sequence
  source 1..2034: mol_type = other DNA
atgatgcaggagagcggcaccgagaccaagagcaacggcagcgccatccagaatgggtctggcggtagcaatcacctcctggaatgtggaggattgcgagaaggtcgcagcaacggggagacaccagccgtggacattggggccgcagacctggctcatgctcagcagcagcaacagcaggcccttcaagttgccaggcaactcctgctgcaacagcagcaacagcagcaggtgtcagggttaaagtcccctaagaggaatgataagcagcccgctctgcaggtgccagtctctgtcgcaatgatgaccccacaggtgatcacgcctcagcagatgcagcagatccttcaacagcaagtcctgtcgcctcaacagctccaggtcctgctgcagcagcaacaggctttgatgctgcagcagcaacagctacaggagttttataaaaagcagcaggaacaacttcagttgcagctgctccaacagcagcatgcaggaaaacagcctaaggaacagcaacaagtggcaactcagcaactggcgttccagcagcagcttctacagatgcagcaattgcagcagcagcatctgcttagtctgcagaggcaagggctgttgaccattcagcctggccagcccgctctgcccctgcagcctctcgcgcagggaatgatacccacggagctgcagcagctgtggaaggaagtcacatctgctcacaccgctgaggaaactactgggaataatcactcttctctcgatttgaccaccacttgtgtgtcttctagcgccccctccaaaaccagcctgatcatgaacccgcatgcgtcaacaaacgggcaacttagtgttcatacgccaaagcgggaaagcttgtcacatgaggagcatccgcacagccatccgctgtacggacatggagtgtgcaagtggccaggttgtgaggccgtgtgcgaggatttccagtctttcctgaaacatctaaactcagagcacgcccttgacgaccgctccactgcccagtgcagagttcagatgcaggttgttcagcagctcgagcttcagctggccaaggataaagaacgtctacaggcaatgatgacccatctacatgttaaatccaccgagcctaaggctgcacctcagccactgaatctcgtttcttctgtgaccctctcaaaatcagcatccgaggcctctccccagagtctaccccacacgccaactactccaaccgcacccctgacacccgtgactcaggggcctagcgtgattaccaccacttccatgcataccgtgggccctatccggaggcgctactccgataagtataatgtgcccatcagcagtgccgatatcgctcagaatcaagagttttacaagaacgctgaggtgcgacctccattcacctacgcctctctgatacggcaggcgattttagagagccctgaaaaacagctgacgctgaacgagatttataattggtttaccaggatgtttgcatattttcgacgtaatgctgccacttggaaaaacgccgttcgccacaatctatccctgcacaagtgtttcgtgcgggtggaaaacgtcaaaggcgcggtgtggaccgtagacgaggtcgaattccagaaaagacgtccgcagaaaatatccgggaacccttccctgatcaagaacatgcaatcttcccacgcatactgtactcctctcaatgccgccctgcaagcatcgatggctgagaacagcatccctctgtatacaactgcctctatgggtaaccctaccctgggaaatctcgcaagcgccattcgggaagaactgaacggagccatggagcacaccaacagcaacgaaagcgatagtagccctggccgctcacccatgcaagcggttcatcctgtgcatgtgaaggaagagcccttagatcccgaggaagcggaaggtccccttagcttagtcaccacagcaaaccactccccagacttcgatcatgacagagattatgaagacgagcccgttaatgaggacatggagtag

SEQ ID NO: 188168 - DNA, 345 bp, synthetic construct
  misc_feature 1..345: note = Description of Artificial Sequence: Synthetic coding sequence
  source 1..345: mol_type = other DNA
atgatgcaggagagcggcaccgagaccaagagcaacggcagcgccatccagaacggttccggcggcagcaatcatctgctggaatgcggcggcctgagagaaggccgatcgaacggcgagactcccgctgtagacattggcgccgccgatctcgcccacgcacagcagcagcagcaacagtggcacctgatcaaccatcagcctagtcggtcgcccagcagctggttaaagcgcttgatcagcagcccatgggagctggaagtgctgcaagtacccctttggggagccgtggccgagactaagatgagcggccccgtctgtcaaccaaacccttcacccttttag

SEQ ID NO: 188169 - DNA, 669 bp, synthetic construct
  misc_feature 1..669: note = Description of Artificial Sequence: Synthetic coding sequence
  source 1..669: mol_type = other DNA
atgatgcaggagagcgccaccgagaccatcagcaacagcagcatgaatcagaatgggatgagtacactgtcttctcaactggatgccggcagtagagacggacgatcctcaggtgacacctcgtctgaggtgagcaccgtggaacttctccaccttcagcaacagcaggcgcttcaggccgctcggcaacttctcttacagcagcagaccagtggtctaaaaagcccaaagtcttctgacaagcagcgccccttacaggtgcccgtctcagttgcaatgatgacccctcaggtgatcacaccgcagcagatgcagcagatcctgcagcaacaggtgttatctccccaacagctgcaagcactgctgcagcaacagcaagctgtgatgctgcagcagcagcaactacaggagttctataaaaaacaacaggagcagctgcatctgcagctcctacagcagcagcagcagcaacagcagcagcagcagcaacagcaacagcagcaacagcaacagcagcaacagcaacagcagcagcaacagcaacagcaacagcaacagcagcaacagcaacagcaccccggcaaacaggccaaggaacagcagcagcagcagcagcagcagcagcaacttgctgcgcagcagctggtgttccagcagcagctgctctag

SEQ ID NO: 188170 - DNA, 2148 bp, synthetic construct
  misc_feature 1..2148: note = Description of Artificial Sequence: Synthetic coding sequence
  source 1..2148: mol_type = other DNA
atgatgcaggagagcgccaccgagaccatcagcaacagcagcatgaaccagaatggaatgtcgacattgagcagtcagctcgatgcaggctctagggatggacgtagctcaggcgatacgagttcggaagtgagcacagtcgaactactacacttgcaacagcagcaggccttgcaagctgcccgacagctcctcctgcaacagcaaacctccggcctcaagtcccccaagtcctcagacaagcagaggcccctgcaggtccctgtctcagtggccatgatgaccccccaggtgattactcctcagcaaatgcaacagatcctgcagcagcaagtactaagcccccagcagcttcaggccctgctgcaacaacagcaggcggtgatgcttcagcaacagcagctccaggagttctacaaaaaacagcaagaacaactccacctgcagctcttgcaacagcagcagcagcagcagcaacagcagcagcagcaacaacaacagcaacagcagcaacagcaacagcagcagcagcagcaacagcaacagcaacagcagcagcagcagcagcagcagcacccaggtaagcaggccaaggaacagcaacagcaacaacagcagcagcaacaattggcagcccaacagctcgttttccagcaacagctgcttcagatgcagcagcttcagcagcagcaacacctcctgtcactccagagacagggtctcattagtatccctccaggtcaggccgccctgcctgtgcagagccttccccaggccggtttatctccagccgaaattcagcagctctggaaagaggtgacaggagtgcatagcatggaggataacggaattaagcacgggggcctggacctcaccactaacaatagctcgtctacgacctcatctaatacctctaaggcctcacctcctatcacccaccatagtatcgttaacggccaaagtagcgtgcttagcgcccgccgggattcttctagccatgaagagacaggagcctcacacacgttatacgggcacggagtgtgcaagtggccggggtgcgaatccatctgcgaggacttcgggcaattcctgaagcacttgaacaacgaacatgcactcgatgaccggtcaaccgctcagtgtcgggtgcagatgcaagtggtgcagcagctcgaaatccaactttccaaggagagggaaagactccaggccatgatgacacacctgcacatgaggccctcagagcccaaaccttccccaaagcccctgaacctggtctcttcggtgaccatgtccaagaacatgttggagactagcccccagagcctgccacagacccccaccacgcccaccgccccggtcacccctataacgcaaggcccgagcgtcatcactccagcttccgtcccaaatgtgggtgccattagaaggagacacagcgacaaatataacatccctatgtcttctgagattgctccaaactacgagttttataagaacgccgacgtacgcccaccttttacttacgccaccttgattagacaggctatcatggaaagctcggacagacagttaacactgaatgagatctacagctggttcactaggacatttgcctacttccgaaggaatgcagctacatggaagaacgcagtgcgccacaacctttccctgcataagtgcttcgttcgggtcgagaacgtgaagggagccgtgtggacagtggacgaggtagaatatcaaaagcggcgctcccagaaaattaccggctcccccactctggtgaagaatatccccacctccctcggttacggtgcggcactgaatgcgagtttgcaggccgctttggccgaaagctcactcccgctgcttagcaatccaggcctgatcaacaacgccagtagcggtctgttgcaggcggtccatgaagacttgaacggtagcctggatcatatagacagcaacgggaactcttcccccggttgctcccctcagccgcacattcactcaatccatgttaaagaagagcccgtcatcgctgaggatgaggattgccccatgtctttggtgaccacggccaaccattcaccggaactcgaagatgaccgcgaaattgaagaggaaccactgagtgaagacttggagtag

SEQ ID NO: 188171 - DNA, 1299 bp, synthetic construct
  misc_feature 1..1299: note = Description of Artificial Sequence: Synthetic coding sequence
  source 1..1299: mol_type = other DNA
atgatgcaggagagcgccaccgagaccatcagcaacagcagcatgaaccaaaatgggatgtctaccctcagcagtcagctggacgcaggctccagagatggccggagttctggagacacttcaagcgaggtgagcacagtcgaactcctgcatcttcagcagcagcaggctctgcaggccgctagacagctgctgctacagcagcagacctccggacttaaaagtcccaaatcttccgacaaacagcggcccttgcaagtcccagtgtctgtggcaatgatgacaccccaggttatcacgccacagcagatgcagcaaattctccagcagcaggtcctgtcaccccagcaactgcaggctctcctacagcaacagcaagctgtgatgctgcagcagcagcagttacaagagttctacaaaaagcagcaggaacagcttcatcttcaattactacagcagcagcagcagcagcagcaacagcaacagcagcaacaacaacagcaacagcaacagcagcagcagcagcagcagcaacaacagcagcaacagcagcagcagcaacagcagcagcagcacccaggcaagcaggcaaaggagcagcagcaacaacaacagcagcagcagcaactcgccgcgcagcagctcgttttccagcaacaattgttgcagatgcagcagttgcagcaacaacaacatcttctaagcctgcaacgccaaggactaatctccattccacctggccaggccgcactacccgtgcagagcctgccccaggcaggtctgtcccctgccgagatccaacagttgtggaaggaagtgaccggcgtgcatagcatggaggataacggaatcaagcacggtggactcgacttaaccacaaataacagtagcagtaccactagctcaaacaccagcaaggctagtcccccaatcacacatcactccatcgttaacggccaatcttctgtgctatcagcacggcgcgattcctccagccacgaggagacgggggcctcacacacactgtacggtcatggcgtttgcaagtggccgggctgcgagtccatctgtgaagattttggtcaatttctgaagcatctaaacaatgaacacgctctcgatgatcggtctacagcacagtgtagggtacagatgcaggtagtgcagcaactggaaatacaactgagcaaggaaagggagaggcttcaggccatgatgacacatctgcacatgcgcccatccgagccaaaaccttctcccaaacccgtgagcgcttactgcttcatcaattctaagtag

SEQ ID NO: 188172 - DNA, 1371 bp, synthetic construct
  misc_feature 1..1371: note = Description of Artificial Sequence: Synthetic coding sequence
  source 1..1371: mol_type = other DNA
atgcaggagagcgccaccgagaccatcagcaacagcagcatgaaccagaatggaatgtctaccctttcgagccagttagatgcagggtctagagatggccgcagctcgggggatacgagcagcgaggtcagcaccgttgagttgttacacctgcaacagcaacaggccctgcaagctgcccgccaattgctgctgcagcagcaaacatctggacttaagtcaccgaagagtagcgacaaacagcgccccttgcaggaactactccctgagactaaattgtgcatctgcggccattcaagtggagacggtcacccacacaataccttcgccgtgcccgtgtctgtggctatgatgacaccacaagtgattactccgcagcagatgcagcagatcctgcagcagcaggtgctctcacctcagcagctgcaggccctgctccagcagcagcaggctgttatgctccaacagcagcagctgcaggagttttacaaaaagcaacaagaacaattgcacctccagctactgcagcagcagcagcagcaacagcagcaacagcaacagcagcaacaacagcagcaacaacagcagcaacagcagcagcagcaacaacagcagcagcagcaacagcagcagcagcagcagcagcatccaggaaagcaggcgaaagaacagcagcagcagcagcagcaacagcagcagctggccgcccaacaactggtgttccaacaacagctgctgcagatgcagcaactccagcagcagcaacacctgctttccctccaacgccaggggctcatatccataccccccgggcaagctgccctccccgtccagagcttaccacaggccggcctttctccagcggaaattcagcaactttggaaagaggtaacaggtgttcactcaatggaagataacggtattaagcacggtgggcttgacctgacaacaaacaattcctcctcaactacgtcttccaacaccagcaaagccagccctccaatcactcaccattctatcgtgaacgggcaatcctccgtgctatccgccaggcgggattctagttctcatgaagagacaggggcctctcacactctatatggtcatggggtatgtaagtggccaggttgtgagtctatttgcgaggacttcgggcagttcctgaaacacctcaataatgagcacgctcttgacgaccgcagcaccgctcaatgtcgcgtccagatgcaggtcgttcagcagctagaaatccagctcagcaaggagcgcgagaggcttcaagcaatgatgacacacctccacatgagaccctcagaacccaaaccttcgccaaaaccagtttcggcttattgcttcattaattcgaagtag

SEQ ID NO: 188173 - DNA, 1872 bp, synthetic construct
  misc_feature 1..1872: note = Description of Artificial Sequence: Synthetic coding sequence
  source 1..1872: mol_type = other DNA
atgatgaccccccaggtgatcaccccccagcagatgcagcagatcctgcagcagcaggtgctctcccctcagcagcttcaggctttattgcagcaacagcaggcggtgatgctgcagcagcagcaactgcaggagttctacaagaagcagcaggagcaacttcacttacagttactgcaacagcagcaacagcagcagcaacagcagcagcagcaacagcagcagcaacagcaacagcagcagcagcagcagcaacaacaacagcagcagcagcagcaacagcagcagcagcagcagcacccgggaaaacaggccaaggaacagcagcagcagcagcagcagcagcagcagctggccgcacagcagttggtgttccagcagcagctgctacagatgcaacagttgcagcaacagcaacatttgctgtctctacaacgtcagggtctcatatccataccaccaggccaggcagccctgccagtgcaaagtttgcctcaggcaggcctgtctcctgcggagatacagcagctctggaaggaagttaccggagtgcactctatggaagacaacggtattaagcacggaggactggatcttacaacaaacaatagttcctccacaacttccagtaacacatccaaggcatctcctccgatcacccaccacagtatcgtgaatggacagagttcagtactcagcgcccgcagagactcatcttcccacgaggagacaggcgcatctcatacattgtacggtcatggggtctgtaagtggccgggctgcgaatctatttgcgaggacttcggccagtttctcaaacacttgaataacgagcatgccctggacgatagatcgacagcacagtgccgggtgcagatgcaggtcgtgcagcagctcgagatccaactgtctaaggagcgggagagactgcaagcaatgatgacccatctgcatatgaggccttctgaaccaaaaccttcccccaagccactcaacttggtgagtagtgtgacgatgtcgaaaaacatgctggaaacctccccgcagtcactcccccagacaccaactacccccaccgccccagtaactcctataactcagggtccgtctgtgattacccccgcctccgttcctaacgtgggtgcaattcgtaggagacacagcgataagtataacatacccatgagttccgagattgcgcctaactatgagttttacaagaatgccgacgttaggcccccctttacttacgcgaccttgattcggcaggctatcatggagagctcagataggcaactgaccctgaacgagatttattcatggtttactaggactttcgcctatttcaggcgcaacgcggctacgtggaagaatgctgttcgccataatctgagcttgcacaagtgctttgtgcgcgtcgagaacgttaaaggcgcagtctggaccgtcgacgaagtggagtaccagaagagacgctcacaaaagattactggttctcccacacttgtgaaaaacattcctacaagtctgggctatggagccgccctgaacgccagcctgcaggctgcactcgccgaatccagccttccactgctgtctaatccgggcttgataaacaatgcaagtagcggactcctccaagccgttcatgaggatttaaatgggagccttgatcacattgattctaatggcaactcaagtcctgggtgttcgccacagccccatattcattccatccatgtgaaagaggagccagtcattgctgaggacgaagactgcccaatgagtctcgtgaccaccgccaaccatagcccagaactcgaggatgatagagaaatagaggaagaacccctcagcgaggatctggaatag

SEQ ID NO: 188174 - DNA, 1593 bp, synthetic construct
  misc_feature 1..1593: note = Description of Artificial Sequence: Synthetic coding sequence
  source 1..1593: mol_type = other DNA
atgatgaccccccaggtgatcaccccccagcagatgcagcagatccttcaacagcaagtgttgagccctcaacagctgcaggcacttttacaacagcagcaagctgtgatgctacagcagcagcaactgcaggagttctacaaaaagcagcaggagcagctgcatcttcagctgctgcagcagcagcaacagcagcagcagcagcagcagcagcaacaacaacagcaacagcaacagcagcaacaacagcagcagcagcagcaacaacagcagcagcagcagcagcaacagcagcagcatcccggcaaacaggctaaagagcaacaacaacagcagcagcaacagcagcagctcgctgctcagcaacttgtgtttcaacagcagctgctgcagatgcaacagcttcagcagcagcagcacctcctgtccttacaaaggcagggcctcattagcatccctcccggtcaggcagcgctgccggttcagtccctcccccaggcgggactatcccccgccgagatccagcagctgtggaaggaagttacaggcgttcattctatggaagataatggcatcaaacatgggggcttggaccttactaccaacaattcctcaagtacgacaagcagtaacacctctaaggcatccccccccataacccatcacagtattgtgaatggacagagctcagtgttgagcgcaagacgagattctagctcacatgaagaaacaggagcgagccatactctgtacggacacggtgtgtgcaagtggcccggctgtgagtctatctgtgaggactttgggcagttcctgaagcaccttaataacgagcatgcgttagacgaccgatcgacagctcaatgtcgcgtgcagatgcaagttgtacagcaactggagatacagctttctaaagaaagagagcgtctccaggctatgatgacacaccttcatatgagaccttccgagccgaagccgtccccaaagcccgcaataatggagagtagtgaccggcagttgacgttaaatgaaatctactcttggtttactcgcacgtttgcttactttcgcaggaacgccgccacatggaaaaacgccgttcgtcataacctctcactgcataagtgctttgtgcgtgttgagaatgtgaagggcgcggtttggacagtcgacgaggtggagtatcagaagcggaggagtcagaaaattactgggtctcccaccctcgtgaagaacatacccaccagtctgggatatggggccgctctaaatgcttctttgcaggcggccctggctgagtcctctcttcccttgctcagcaatcccggacttatcaacaatgcgtcatccggcctgctccaggccgtccatgaagacctcaatggttccctcgatcatatcgattcaaatggcaacagctcccctggctgtagcccacagccacacattcactctattcacgtgaaggaggagcccgtgattgctgaggacgaggactgcccaatgagtttagtaaccactgcaaaccacagtcccgagcttgaggacgaccgtgagatagaggaagagcccctgagcgaggacctggagtag

SEQ ID NO: 188175 - DNA, 2148 bp, synthetic construct
  misc_feature 1..2148: note = Description of Artificial Sequence: Synthetic coding sequence
  source 1..2148: mol_type = other DNA
atgatgcaggagagcgccaccgagaccatcagcaacagcagcatgaatcaaaatgggatgtctacactgagctcccagcttgacgcgggcagtcgggacggcaggtcgtccggagacaccagcagcgaggtcagcaccgtcgagctgctacatctgcagcagcagcaggctctgcaagccgccaggcaactcttactgcaacaacagacctccggtctgaagtcccctaagtcaagcgacaagcagagacccctgcaggtccccgtttcagtcgccatgatgacccctcaggtgataacaccacagcagatgcagcagatcctgcagcaacaggtactgtcgcctcaacagctacaagctctgctccagcagcagcaggccgttatgctgcagcaacagcagctgcaggagttttacaagaaacaacaagagcagctgcatctacagctgctgcaacaacagcagcaacagcaacagcagcaacaacagcaacagcagcaacagcagcagcagcaacagcagcaacagcaacagcagcagcagcagcagcaacaacaacagcagcagcagcagcaccccggaaaacaggctaaggagcaacagcagcagcaacagcagcagcagcagcttgccgcacaacaactcgtgttccagcagcaactgcttcagatgcaacagctgcagcagcagcagcacctccttagcctccagcgccagggccttatcagcatccctcccggacaggctgctttaccggtccagagtcttccgcaggctggcttaagccccgcagaaatacagcagctgtggaaggaggtgaccggagtacacagcatggaagataacggaatcaagcatggcggactggaccttaccacaaacaattcctccagcaccaccagcagtaatacttccaaagcgagccccccaattacacaccactccatagtgaatggacagtccagcgtcttatccgctcggagggattccagctctcatgaagagacaggcgcctctcacacattgtacggtcacggggtgtgcaagtggccaggatgcgagtcaatttgcgaggattttggacagttcctgaaacatctgaataacgaacacgctcttgacgatcgctcgacagcccagtgccgtgtgcagatgcaggtcgtgcaacaacttgagatccaactgtcaaaagaacgcgaacggcttcaagcgatgatgacgcaccttcatatgagaccatcagagccaaagccttcccctaagcccctgaatctggtatctagcgtcacaatgtccaagaacatgctggagacctcgccacaatcactaccgcaaactcccactacccccaccgcaccagtcacacctattacgcaggggccttctgtaataaccccagcctctgtgccaaatgtgggagcaatccgccgtcgtcattctgacaaatacaacattcccatgtcctcggagatagccccgaattacgagttttacaagaacgcggatgttcggcccccctttacatacgctaccctgatcagacaggcgattatggaatcgagcgaccgccagctaactctaaacgagatctatagttggtttaccaggacatttgcctattttagacgcaacgccgcaacctggaaaaacgcagtgaggcacaatctgtcactgcataaatgtttcgtgcgagtggagaatgttaagggcgctgtctggactgttgacgaagtcgagtaccagaaaagaagaagccagaagattacagggtctcctaccttggtgaagaacattcccacatcactcggatacggtgcagcactaaacgccagcctccaggccgctctggccgagtcatccttgcctctgctgtccaatccaggtctgatcaataacgcttctagtggtctgttgcaggccgtgcacgaggatcttaatgggagccttgatcatatcgattccaatggcaattctagcccaggttgctcaccccaacctcatattcattccatccatgttaaagaggagccggttatcgcagaggacgaggactgccccatgtcactcgtgaccaccgcaaaccactcacccgagttggaagacgatagagagatcgaagaggagcccctgtccgaagatctggaatag

SEQ ID NO: 188176 - DNA, 1149 bp, synthetic construct
  misc_feature 1..1149: note = Description of Artificial Sequence: Synthetic coding sequence
  source 1..1149: mol_type = other DNA
atgatgaccccccaggtgatcaccccccagcagatgcagcagatcctccagcaacaggttttgagcccacagcagttacaagccctgctgcaacagcagcaggcagtgatgctacagcaagactttctagactccgggcttgaaaatttcagggctgccttggaaaagaaccaacaattgcaggaattctacaagaagcagcaggaacagttacacctgcagctgttgcagcagcagcaacagcagcaacagcaacagcaacagcagcagcagcagcaacagcaacagcaacagcagcagcaacagcaacagcaacaacagcaacagcagcaacagcaacagcagcagcatcctggcaaacaggcaaaagaacagcagcaacagcaacagcaacagcagcagctcgcagctcaacagttggtctttcagcaacaacttcttcaaatgcagcaattacagcagcaacaacacctgctcagcctccagcggcagggtctgattagcattcctcccggccaggcagccctgcctgtgcagtctctcccacaggccggactatcccccgccgaaattcaacagctctggaaggaggtgacaggtgtccattcaatggaggacaatggcataaagcacgggggacttgacttgactacgaacaattcttccagcaccacgtcttcaaatacctccaaagcttcacctcctataactcaccacagcatcgtgaatggtcagagttccgtgcttagtgcccgaagagactcatccagccatgaagagacgggcgcgagtcacaccctgtatggccatggagtctgcaagtggcctggctgtgagtctatatgtgaggactttggtcagttcctcaaacatctgaataacgaacatgccctggacgataggtccaccgcccagtgtagagtgcagatgcaggttgtacagcagctcgagattcagctctcaaaggagcgcgagcgactgcaggctatgatgactcacctgcacatgcggccctcggagccgaagccatcccccaaacccaacatttgtaaagtgacttaccgctgcatctggatgttccttaggttttccaattacgccgaagtcctgctgtacattccagagaagctcaccccagtcgccctgtag

SEQ ID NO: 188177 - DNA, 2199 bp, synthetic construct
  misc_feature 1..2199: note = Description of Artificial Sequence: Synthetic coding sequence
  source 1..2199: mol_type = other DNA
atgatgcaggagagcgccaccgagaccatcagcaacagcagcatgaaccagaacgggatgagcaccctgtcttctcaacttgatgccggcagccgcgacgggagatctagtggagacacttcctccgaggtctctactgtggaactcctgcacttgcagcagcagcaagccctccaggccgccaggcaacttctattacaacagcagacctctggactgaaaagtcctaagagctcggacaagcagcgcccgcttcaggtgccggtgtcagtcgccatgatgacaccccaggtgattacaccccagcagatgcagcaaattctccagcaacaggtgctcagcccacagcaactgcaagcactgctacagcagcagcaggctgttatgctgcaacaggactttcttgacagcggcctagaaaacttccgcgcagctttggaaaaaaaccagcagttacaggagttctacaagaaacagcaggaacagctgcatctgcagcttctgcagcagcaacaacagcaacaacagcagcagcagcaacagcagcaacagcagcaacagcagcaacagcagcagcagcagcagcagcaacagcagcagcaacagcaacagcaacagcagcagcacccaggtaagcaggccaaggaacagcagcagcagcaacagcagcagcagcagctcgctgctcagcagcttgtcttccagcagcagttacttcagatgcaacagctgcaacagcagcaacacctgctgagcctgcagaggcagggattaattagcattcctccaggccaagcagctttaccagtgcagtccttgcctcaggccggtctcagtcccgcggagattcaacaactgtggaaagaggtgaccggcgtgcactctatggaggataacggcataaaacatggcgggctggacctgaccactaacaattctagctcaaccacaagcagtaacacatcaaaagcaagtccaccgataacacatcacagtatcgttaacggacagagttctgttctgtccgcccgccgggatagctcttcccacgaggaaaccggcgcaagtcatactctttatgggcacggcgtgtgtaagtggccaggatgtgaatccatttgtgaagatttcggccagtttctgaagcacctcaacaacgaacatgctcttgacgaccgctcaaccgcacagtgtcgcgttcaaatgcaggtggtgcaacagttagaaatccaattaagcaaagagcgcgagaggctgcaggcaatgatgacacacctgcacatgagacccagtgaacctaaaccatcgcccaagcctctgaacttggtgagctccgttactatgtcaaagaatatgctggagacctccccacaatcactgccccagaccccaactaccccaaccgcacccgtaactcccattacgcaagggccgagtgttatcacacctgcaagcgtacccaatgtcggagctatccgtcggcgacacagcgacaagtataacatccccatgagctctgaaatcgccccaaactatgagttttacaaaaacgccgacgtgagaccgcccttcacctacgctactctgatcagacaggccatcatggagtcctcagatagacagctgaccttgaatgagatctactcctggttcacccggaccttcgcatatttccgcagaaatgccgctacatggaagaacgccgttcgccataacctgtcccttcacaaatgctttgtgcgcgtggaaaatgtgaagggcgcagtctggactgtcgacgaggtggagtaccagaagcgccgttcccaaaagatcacagggagccccactttggtgaaaaacatcccaacctccctggggtacggcgctgctctcaatgcctctctccaggccgcacttgccgaatctagcctgccattgctgtctaacccgggtttgatcaacaacgccagtagcggacttcttcaagccgtgcacgaggacctgaacggcagtttggatcacatcgattccaacggaaattctagcccagggtgcagccctcagccccacatccatagtatccacgttaaagaggagcccgttattgcggaggacgaagactgccctatgagtctagtcacaaccgcaaaccattcacccgagctcgaggatgatcgtgagatcgaggaggagcctctgtccgaggacttagagtag

SEQ ID NO: 188178 - DNA, 2223 bp, synthetic construct
  misc_feature 1..2223: note = Description of Artificial Sequence: Synthetic coding sequence
  source 1..2223: mol_type = other DNA
atgatgcaggagagcgccaccgagaccatcagcaacagcagcatgaatcagaacgggatgagtaccctctctagccaactcgacgctggctcaagggatggacgctcctccggcgacacatcaagtgaggtgtccacagttgagttactccaccttcagcaacaacaggcactgcaggccgccagacagctcctcctgcagcagcagacaagcggactgaagtcacctaagagtagcgacaaacagcgaccactgcaggagctgctacctgagaccaagctgtgtatctgtgggcattccagtggggacggacatcctcataatacctttgccgtccctgtcagcgtggcaatgatgacaccccaagtcatcacgccacagcagatgcaacagattttgcagcagcaggtgctgagtcctcagcaactccaggcccttctgcagcagcaacaagctgtgatgctgcagcagcaacaactgcaggagttttataaaaagcagcaagagcagctgcacttgcagttgctacagcagcagcaacagcagcagcagcaacaacagcagcagcagcaacagcaacagcaacagcaacaacaacagcagcaacaacagcagcagcaacaacagcagcagcaacaacagcaacagcacccaggtaagcaagcgaaggaacaacagcagcagcaacaacaacagcagcagctggccgcccaacaactcgtgtttcagcaacagctcctacagatgcagcagttacaacagcagcagcatctgctgagcttgcagcgacagggcctaattagcatcccaccaggtcaagcagcccttcccgttcagtcactccctcaagccggattgtcccctgccgagatccaacagctttggaaggaggttactggcgtgcacagcatggaagataatggaatcaagcatggtggacttgatctcaccactaacaactcctcttctaccacatcttctaacacctccaaagcgtccccaccaataacccaccattcaatcgtgaacggtcagtcgagtgtgctgtccgctagacgcgattcatcaagccatgaagaaacaggtgctagccataccctttacggacatggcgtgtgcaagtggcctggatgcgaaagtatctgcgaggacttcggccagttccttaagcatctcaacaatgaacatgccttggacgaccgatcaactgcacagtgcagggtccaaatgcaggtggtgcaacagctggaaatccagctgtcaaaggaaagagagaggctgcaggcaatgatgacacatctccatatgaggccctctgagcctaagccaagccctaaacctctgaaccttgtttctagcgtcacaatgagtaaaaatatgttggagaccagcccacagtccttaccccagacccccactactccaacggcccctgttactcctatcacccaagggccgtcagttatcacccctgccagcgtccccaatgtgggcgccatccggaggaggcattctgacaaatacaacatccctatgagttccgagatcgcacccaattatgagttttacaagaacgcggatgtacgccctccttttacatacgcgaccctgatcagacaggcgattatggaaagctctgacaggcagcttaccctcaatgaaatctatagctggttcacaagaaccttcgcttacttcaggcgcaatgcggccacttggaaaaatgctgttcgccataatctgagcctgcataagtgctttgtccgggttgagaacgtgaagggagctgtctggaccgttgatgaggtggagtaccaaaaaaggagatctcaaaagataacaggctctcctaccctggtaaagaatatccctacatcgctcgggtatggcgccgcgctgaacgcatccttgcaagcagccctcgcggaatcttccctgccactcctgtcaaaccccggactaattaataatgcgagcagcggtctgctgcaagcagttcatgaagatctgaacggctctctagaccacatcgattccaatgggaatagttcacccggttgtagcccacagccacacattcactccattcatgtgaaagaagaacctgtcatcgccgaggacgaagactgcccaatgagtctggtcacaactgcaaaccatagtccggagttggaagacgaccgggagatagaagaagagcctctttccgaggatcttgagtag

SEQ ID NO: 188179 - DNA, 1191 bp, synthetic construct
  misc_feature 1..1191: note = Description of Artificial Sequence: Synthetic coding sequence
  source 1..1191: mol_type = other DNA
atgcccaacccccggcccggcaagcccagcgcccccagcctggccctgggtccaagccccggagcatcacccagctggcgcgccgctccaaaagctagtgatctgttgggggcccgtggtccagggggaaccttccaggggcgtgatctccggggaggcgcgcatgctagctcgagcagcttaaatcccatgccaccctctcagctgcagctgtcaacggtcgatgctcatgccagaacaccggtcttgcaggttcacccactggaaagccctgcaatgatcagtctgactccccctaccacagctacaggggtgtttagcttgaaagctagacccgggttaccacctggaattaatgtcgcctctcttgagtgggtatcgagggagcctgcactgttatgcacattccctaacccctccgctccacggaaggactccacactgtccgcagtgccccagtcctcttaccccctgctcgcgaatggagtttgcaaatggcccggttgcgagaaagtgttcgaagaacccgaggacttccttaagcattgccaagcagatcacttgcttgatgagaagggcagggcccagtgcctgctccaacgtgagatggtccaatccctagaacagcagctcgtgctggaaaaggagaagctcagcgccatgcaggcgcatttagctgggaaaatggctctcaccaaagcgtcatccgtggctagttctgataagggcagttgctgtatcgtggccgcaggaagccaaggccctgtggtgccagcatggtctggtcctcgggaagctccagacagccttttcgccgtgcgaagacatctgtgggggagtcatgggaactcgacgtttccggagttcctgcataatatggactacttcaagttccacaacatgcgcccgccattcacatatgccacactcatccgttgggccatcctggaggcccccgaaaagcagcggacccttaacgagatctatcactggtttacgaggatgttcgcgttcttccggaaccacccggcaacctggaaaaatgctatccgccacaatctgtctctccataagtgctttgtccgggtagagtctgagaagggggcggtgtggactgtggatgagctggagttccgcaaaaagcgctctcaaaggccctctcgctgtagcaaccccactccaggtccctag

SEQ ID NO: 188180 - DNA, 1296 bp, synthetic construct
  misc_feature 1..1296: note = Description of Artificial Sequence: Synthetic coding sequence
  source 1..1296: mol_type = other DNA
atgcccaacccccggcccggcaagcccagcgcccccagcctggccctcggcccatccccaggcgcgtccccaagctggagagcggctcccaaggcatccgatctgctgggtgcgcgtggccccggcggcacctttcaggggagggacttgcggggaggggctcacgcatcttcttcctccttaaatcccatgccccctagccaactgcagcttcctacccttcctctagtgatggtagctccctccggagccaggcttggtcccctccctcatctgcaggcccttctccaagaccggcctcacttcatgcaccaactgagcaccgtggacgcgcatgcgcgtactccagtgctccaggtacaccctttggaaagccccgccatgatttccctgacccctcccactaccgcaaccggtgtgttctccctgaaggctcgtccagggcttccacccggcattaacgttgcgtcgctcgagtgggtatcgcgcgaaccggccctgttatgcacctttccgaacccaagcgccccccggaaggactcgaccttgtctgctgtgcctcagtcctcttacccgctgctggccaacggagtatgcaagtggcccggatgtgagaaagttttcgaggagccagaagacttcctgaagcattgccaggcagaccatttgctggacgaaaagggacgggcccagtgcttgttgcaaagagaaatggtgcaatccctagagcagcagttagtgctcgagaaagagaagttgtccgccatgcaggcccacttggccggaaaaatggcattaacaaaggctagtagtgtggcaagttctgataaggggagctgttgcatagtagccgcggggagtcaggggccagtagtccctgcctggtctggcccacgagaagccccagacagtctgttcgcagtcagacgacacttgtgggggtctcacggcaactcaacctttccagagtttctacacaacatggattactttaagtttcataacatgaggccgccctttacgtatgccacactcattcgttgggcgatcctcgaggccccagagaaacagaggacactaaacgaaatctaccactggtttacacggatgtttgcgttctttcggaatcaccccgctacttggaagaatgccattcggcacaacttaagccttcacaagtgcttcgtccgggtggaatccgagaagggtgctgtgtggacagtagatgaactagaatttcgaaaaaaaagaagccaacgcccttctcgctgttccaaccccactcctggtccttag

SEQ ID NO: 188181 - DNA, 1215 bp, synthetic construct
  misc_feature 1..1215: note = Description of Artificial Sequence: Synthetic coding sequence
  source 1..1215: mol_type = other DNA
atgcccaacccccggcccggcaagcccagcgcccccagcctggccctggggcctagccctggggctagcccgtcctggagggccgcacccaaggccagtgatctgcttggcgcgagagggcccgggggtacattccagggaagagacctcagggggggagctcacgcttcttcttctagtctcaatccaatgcctccctcccagctgcagcttcccaccctgccattagtaatggtggcaccatcaggagcccgattggggccactgcctcatctgcaagcgcttctgcaggatcgacctcatttcatgcatcagctgagcacagttgatgcacacgcaagaacgcctgtgctgcaagtgcatcccctcgagagccctgctatgattagcttgacacccccaaccaccgccactggagtgttttcactgaaggctcggcccggcctgccacccggaataaacgttgcatctctggagtgggtctcgagagagcctgcattgctttgtactttccctaacccctcagcccctagaaaggactctaccctgagtgcagttcctcaatcatcttatccccttcttgcaaacggcgtctgtaagtggcccgggtgtgagaaagttttcgaagagcctgaagactttctaaagcattgccaggccgaccatcttctagacgagaaaggcagagcccaatgcctgctccagagagagatggtacagagccttgaacagcaggcaagtagcgacaaagggtcatgttgtattgttgcagctggctctcaggggcctgtggtgcctgcttggtctggcccgcgcgaggcccctgattcactgttcgccgttcgacgacacctgtgggggagccatgggaatagcacattccctgagttcctgcacaacatggattattttaagttccacaatatgagacctccctttacctacgccactttgatccggtgggcaattcttgaggctcctgagaaacagcggactctgaacgaaatctatcactggtttactcgcatgttcgccttctttcgaaaccatccagcgacttggaaaaacgcaatcaggcataacctctctctccataagtgctttgtgcgggttgaatctgagaagggagccgtgtggactgttgacgagctcgaattccggaagaaacggagccagcgcccgtcccgttgctcaaaccccactcctggcccatag

SEQ ID NO: 188182 - DNA, 1191 bp, synthetic construct
  misc_feature 1..1191: note = Description of Artificial Sequence: Synthetic coding sequence
  source 1..1191: mol_type = other DNA
atgcccaacccccggcccggcaagcccagcgcccccagcctggccctgggcccttctccaggcgccagcccatcatggagggcggctcctaaggcatctgatctgctcggcgccaggggaccaggaggaactttccaggggagggacctgcgggggggggcccatgcctcctctagcagtctgaatcccatgcccccttcacagttgcagctgagcaccgttgatgcccatgcccgaacaccagttcttcaggtgcacccgctggagtcccctgccatgatctctttaaccccacccacaactgctactggagtattttccctaaaagctagacctggtttgcccccaggaataaacgtcgcctccctggaatgggtgtccagagagcctgccttgctgtgcacttttcctaacccatctgcccctcggaaggattcaacattaagtgccgtgcctcagtcctcataccccctgctggctaatggtgtttgcaagtggcctggatgtgaaaaggttttcgaagaaccagaagacttcctgaagcactgccaggcagatcatctgcttgatgagaagggccgcgctcagtgtctgctccaacgggagatggtgcagagtctagaacagcaactggtactggagaaggagaaactgagcgctatgcaagcacacctggctggcaaaatggccctgacaaaggcgagctccgttgcatcctcggacaaagggagctgctgtattgtcgccgctgggtctcaaggacccgtcgtgccagcctggtcgggaccacgggaagccccggactctctgtttgcggtcaggaggcacctctggggcagtcacggcaacagcactttccccgagtttttgcataatatggactatttcaaattccataacatgcgacccccattcacctacgccacactcatcaggtgggctattctggaagcgccagaaaaacagcgaaccctgaatgaaatttatcactggttcacccggatgttcgctttcttccggaaccatcctgcgacctggaagaacgctattagacataacctgtccctgcataaatgcttcgtgagggtggagagtgagaagggcgccgtttggaccgtggacgaactcgagtttcggaaaaagcgatcccagcggccttcccgatgctccaatcccacacctggcccttag

SEQ ID NO: 188183 - DNA, 2043 bp, synthetic construct
  misc_feature 1..2043: note = Description of Artificial Sequence: Synthetic coding sequence
  source 1..2043: mol_type = other DNA
atgatggtggagagcgccagcgagaccatccggagcgcccccagcggtcagaacggtgtcggctcactgtcaggccaggcggacggcagctcaggaggggcaacaggtaccacagcctcaggaaccgggagggaggtgacaacaggagcagattctaatggagagatgagtcctgctgagctcttgcattttcagcagcagcaggctctgcaagtggctagacagttcctgctgcagcaagctagtgggctgtcgagtcctggtaacaacgactctaaacagtctgcgtctgccgtccaagtgcctgtcagtgtggcgatgatgagtcctcagatgcttaccccccagcaaatgcaacagatcctcagccccccacagctgcaggccctgctgcaacaacagcaggccctgatgctgcagcagttacaggagtactataagaagcagcaggagcagctgcatctgcagcttctgacgcagcagcaggcaggaaaaccccagccgaaagaggcgctgggtaataagcagctggctttccaacagcagctgctgcagatgcaacagctacagcagcagcacctactcaatctccaacggcagggactggtttctttgcagccaaatcaggcatctggaccgctccagaccctcccccaagctgctgtctgccccaccgatctcccgcagctttggaaaggcgagggcgcacctggtcagccggccgaagatagcgttaaacaggaagggctggacctgacagggaccgctgctaccgctacatcatttgcggctccccctaaagtgtctcctcccttatcccatcatacgctgcccaacggacagcctacagtattgacaagtaggagggatagttcttcacatgaggaaacccccggcagccacccgctctacggccatggcgagtgcaagtggccaggctgtgagacattatgtgaagacctgggccagttcattaaacacctaaacaccgaacatgcccttgacgatcggagcaccgcacagtgtcgagttcagatgcaggtggtgcaacagttggagattcagctggcgaaagaatctgagcggttgcaggcaatgatggcccatctgcatatgcggccaagcgaacccaagccgttttctcagcctctgaatccagtgcctgggtcttcgtctttttcaaaggttactgtatccgcagcagattctttcccagacggcttggttcacccacctacctctgctgccgcaccggtgacacctctgaggccacccgggctggggtccgcgagtctgcatggtgggggcccagccagaagacgtagtagtgacaagttctgttccccaattagctccgagttggctcagaatcatgaattctataagaatgctgacgtccggccaccgttcacgtacgcctcactgattagacaggccatcttagaaacgcctgaccgacagctgaccctcaatgaaatttacaactggttcactaggatgttcgcttacttcaggcgaaatacggccacttggaaaaacgcagtacggcacaatctgagtctacataagtgtttcgtgcgcgtggagaacgttaagggagcagtatggacggtggacgagcgggagtaccaaaagaggcggcctccaaagatgaccggcagtcccacactcgtcaagaacatgatctccggcctgagctacggtgccctgaacgcttcttaccaggccgctttggctgaaagcagcttccccctactgaattcccccggtatgcttaatccaggtagtgccagttctctgcttcccctcagtcacgatgatgttggagcgccagtcgagccactgccaagcaacgggtcatcttctccgccccggcttagcccccctcagtacagccatcaagtacaggtgaaggaggagcctgccgaagctgaagaagacaggcaaccaggacctccattaggggccccaaatccttccgctagtgggcctccggaagatcgagatctggaggaagagctgcctggagaggagctctcttag

SEQ ID NO: 188184 - DNA, 2037 bp, synthetic construct
  misc_feature 1..2037: note = Description of Artificial Sequence: Synthetic coding sequence
  source 1..2037: mol_type = other DNA
atgatggtggagagcgccagcgagaccatccggagcgcccccagcggtcagaatggagtcgggagtctaagcggacaagccgacggatcatccggcggcgcgacgggaaccactgcctccggtaccggccgcgaagtgacaaccggtgccgactctaatggggagatgagtccagcagagcttttgcacttccagcagcagcaggcgctgcaggttgcacggcagttcctgcttcagcaggccagcgggttgtcatcacctgggaataacgactccaaacagtctgcatctgccgtgcaggtccctgtgagtgttgccatgatgtcgccacaaatgctaacccctcagcaaatgcagcagattttgtcccccccccagcttcaagcacttctccaacagcaacaggccttgatgctccagcaagagtactataaaaagcagcaggagcagttacatctgcagctactcacccagcaacaagccggtaagccgcagcccaaggaagcgctaggcaacaaacagcttgccttccagcaacagctgttgcagatgcagcagttgcagcagcagcacctccttaatctgcagagacaaggactggtttccttgcagcccaaccaggctagtggtcccttgcagacactccctcaagccgccgtgtgcccgactgatctgcctcagttgtggaaaggtgagggcgctcccggccagccagccgaagattcggttaaacaggaaggcctagacctgactggtacagcggctacagcaacatcttttgcggcgcctcccaaggtgtccccccctctctcacaccacactctgcccaatggacagcccaccgtgctcacttctcgcagggactcttcttcccacgaggagaccccagggagccatccattatatggccatggtgagtgtaagtggccaggatgcgagactctgtgcgaggacctgggacagtttattaagcatctgaacacggagcacgccctcgatgacagatccaccgctcagtgtagagtgcagatgcaggtggtccagcagctggaaatacagttggcgaaggagtcagaacgcctgcaggcaatgatggcccatctgcatatgcggccttctgagcctaaaccattttctcagcccctcaatccagtacccggtagcagcagcttttctaaagtaacagtaagcgcggctgattcctttcccgatggcctcgtgcatccacccacttccgcagctgcaccagtgactcccttgaggccccccggcctcggttctgccagtttgcacggaggagggcccgccagaaggcgctcctcagataaattttgttcacctatatccagcgaactggctcagaaccatgaattctacaaaaacgcagacgtgcggccacctttcacgtatgcatccctcataaggcaggcaattctcgagacaccggacaggcagctcaccttaaatgaaatctataattggtttacccgcatgttcgcctactttaggcgcaacactgccacatggaagaatgccgtgcgtcataacctgagcctgcacaagtgcttcgtcagggtggaaaacgttaaaggagccgtgtggactgttgacgagagagagtatcagaaacgccgtcccccaaagatgactggatcaccaacacttgtcaagaatatgataagcggacttagttacggtgccctgaacgcaagctaccaagccgccctggctgagtcatcatttcctcttctgaacagccctggtatgctgaatcctggctccgcaagcagcctgctacccctcagtcatgatgacgtaggggcacctgtggagccactaccctcaaatgggagttccagccctccacgtttatccccacctcagtactcccaccaggttcaggttaaggaggagcctgcagaggcagaggaggatcgccagccaggcccacctctgggcgctccaaatccttcagcatccggccctcctgaggaccgggacctcgaggaggaactaccgggagaagagctatcatag

SEQ ID NO: 188185 - DNA, 2043 bp, synthetic construct
  misc_feature 1..2043: note = Description of Artificial Sequence: Synthetic coding sequence
  source 1..2043: mol_type = other DNA
atgatggtggagagcgccagcgagaccatccggagcgcccccagcgggcagaacggcgtcggaagtctgtccggccaggctgatgggtccagcggcggtgctacggggacgaccgcgtctgggaccggaagagaagtaactactggcgccgatagtaacggtgaaatgtcccccgctgagctgctgcattttcagcagcaacaggccctgcaagtcgcgaggcagttcttgctacagcaggcatcggggctgtcctcacctggaaataacgatagtaagcaaagcgctagcgccgtccaggttcccgtcagcgtcgcaatgatgagcccacaaatgctgacaccgcagcaaatgcagcagatcctgtcacctccccagctgcaggccctgctgcaacagcaacaggctcttatgctccagcagctccaggagtactacaaaaaacagcaggaacagctccatctgcaactcctgacacagcagcaggccggcaaaccccagcccaaagaggccttgggcaacaaacaactggcttttcagcagcagttgcttcaaatgcagcaactgcaacagcaacacctcctcaacctccagcgccaaggacttgtcagccttcagcccaatcaggcttcgggacctctccagactctcccacaagccgccgtgtgccccaccgacctgccccaactgtggaaaggggagggagctccgggccagcctgcagaggatagtgtcaagcaggaaggcctggacttgaccggtaccgccgccacagctacctcattcgcggcaccaccgaaggtgagtcctcctctttcccatcataccctgccaaatggccaacccacagtgctgacttcaaggagggacagcagttcacacgaggagaccccgggcagccatcctctctacggccacggggagtgtaaatggcctggatgtgagaccctttgtgaggacctcgggcaattcattaagcatctgaacaccgaacacgccctcgatgacagatccaccgcccagtgccgtgttcaaatgcaggtggtgcagcagctggagatccagctggccaaggagagcgagaggcttcaggccatgatggctcacctacatatgagacctagtgagccaaagccgttcagccagccgctaaaccctgttcctggcagctcatctttttcaaaggttacagtgtcagcggccgattccttccctgacgggctggttcatcccccgacttcggcagctgccccggtgactccactcaggccccccggcctgggatctgcaagccttcatggtgggggccctgcgcggcggcggtcgagtgacaagttttgcagcccgattagctccgaattggctcaaaaccatgaattttacaagaatgcggatgtgcgcccccctttcacctatgccagcctaatccgccaggctatactcgagacccctgacagacagcttactttgaacgagatctacaactggtttaccaggatgtttgcatacttcaggcggaatacagcaacctggaaaaacgctgtgaggcacaacctgagcctgcacaagtgctttgtaagagtggagaacgttaagggcgctgtctggacagtggacgagcgtgagtaccaaaagcgtcggcctccgaaaatgactggatcccccaccctagtgaaaaatatgatctcaggcctgagctacggggcactgaacgcatcttaccaggccgcacttgccgaatcctcattcccgctattgaacagcccgggaatgctcaacccgggcagtgcctccagcttactaccactgtcacacgatgacgtaggcgcgcctgtagagcccttgcctagcaatgggagttcatcacctccaagactcagcccacctcagtacagtcatcaagtccaagtgaaggaagagcccgctgaagccgaagaagacagacagcccggtccaccacttggcgcaccaaatccatccgcatctggtcctcctgaggacagggatctggaggaggagctgcctggagaggaattaagctag

SEQ ID NO: 188186 - DNA, 2004 bp, synthetic construct
  misc_feature 1..2004: note = Description of Artificial Sequence: Synthetic coding sequence
  source 1..2004: mol_type = other DNA
atgatggtggagagcgccagcgagaccatccggagcgcccccagcggccagaacggagtagggtccctcagtggacaggcagacggatcaagcggaggcgctactggcaccaccgccagtggaaccggcagagaagtaacaactggcgctgactcgaacggcgaaatgtcccctgccgagctgctgcacttccagcagcagcaggcgctgcaggttgcccgccaatttctgctccagcaagccagcggtttatcgtcccccggcaacaatgattccaagcagagcgctagcgccgttcaggtgcctgtgtcagtcgcgatgatgtctccccaaatgcttacaccacagcagatgcagcagattctctcgccccctcagttgcaggcactgttgcagcagcagcaagctctgatgcttcaacagcttcaggagtattacaaaaagcagcaggaacaattacatcttcaacttctgacgcagcagcaggcaggcaagccgcagcccaaagaggcgctcggcaataagcagcttgcgtttcagcagcaactcctccaaatgcagcaactacagcagcagcatctgctgaatctgcagaggcaggggctggtgagcctgcagccaaaccaagcttctggaccactgcagacgctgccccaggctgtgtgcccaacggatctcccacagttgtggaaaggggaaggcgctcctggacagcccgctgaggacagcgtaaaacaagagggactggacctgactggtaccgctgcgaccgccacgagctttgccgccccaccgaaggtgtctcctcctttgagccaccatacactgcctaacggacagcctaccgttttgacctcccggcgtgactcttctagccacgaagagaccccgggaagccaccctctctatgggcatggcgaatgcaaatggcccgggtgtgaaactctctgcgaagacttgggccagttcatcaaacatctgaacactgagcacgccctagacgatagaagtacggcccagtgtcgggtgcagatgcaggttgtacagcaactagaaatccaactcgcaaaggaaagcgagcggttgcaggcaatgatggcacacctccacatgcgcccgagcgaaccaaagccgttttcacagccagttacagtgtcagctgccgattcattcccggacgggctggtgcacccaccaacgtccgctgccgcccctgtgactcccctgcgcccaccaggactaggcagcgcctcattgcatggcggtggacccgcgaggaggaggtcaagcgacaagttttgcagccccatcagtagcgagctagcacaaaaccacgagttttataagaacgccgatgttagaccaccatttacatacgcgagtctgataagacaggctatactcgaaacacccgatcgacagttaaccctgaatgagatctataactggtttacacggatgttcgcctacttccgtcggaataccgccacatggaagaacgccgttcggcacaacttgagtctgcacaagtgttttgtccgggttgagaatgtcaaaggcgccgtgtggacagtggacgagcgtgaatatcagaagaggcgccctccgaagatgactggctccccgaccctcgtgaagaacatgatcagcggactgagttacggtgcgttaaatgcaagttatcaggcagctctggcggagagctcctttccgctgctgaactccccaggcatgctgaatcctgggagcgcatctagcctattgcctcttagtcacgacgatgtaggtgctcccgtggagcctctcccttcaaatgggagcagttcccctcccagactcagcccgcctcaatacagccaccaagtgcaggttaaggaagagccagcagaggccgaggaggatagacagccaggcccccccttaggagcacccaacccatctgccagcgggccaccagaagatagggaccttgaggaggaacttccaggggaggaactgtcctag

SEQ ID NO: 188187 - DNA, 2007 bp, synthetic construct
  misc_feature 1..2007: note = Description of Artificial Sequence: Synthetic coding sequence
  source 1..2007: mol_type = other DNA
atgatggtggagagcgccagcgagaccatccggagcgcccccagcggccagaatggggtgggcagtctctcagggcaggctgatggaagcagcggcggcgccactggcactactgcttctggaactggccgggaggtgaccaccggagccgattcaaatggcgaaatgagccctgcagaacttttgcactttcaacagcagcaggccctacaggtggcacgccagtttctgctgcagcaggctagtggcctgagtagccccggcaacaacgactctaaacagtctgccagtgcggtgcaggtcccagtcagcgtggccatgatgtcacctcagatgctgaccccacaacagatgcagcagattctgtcccctccccagctgcaggctctgctacagcagcaacaggcactgatgcttcagcagctccaggagtactacaaaaaacagcaagagcagctgcacttacaattgctcacccagcaacaggccggtaaacctcagccaaaagaggctctagggaacaaacagcttgctttccagcagcagctattacaaatgcaacagttgcagcaacagcacttactcaatctgcagcgacagggcctcgtgagtctacagccaaaccaggcttctggccccttacagaccctccctcaagcagcagtatgccccactgacctgccccagctttggaaaggcgaaggtgcccctggtcagccagcggaggattccgtgaagcaggagggtttagatctgaccgggaccgctgctaccgctacaagttttgcagcccctcctaaagtgtctcctcccctgtcccatcacacactgccaaacggacagccaaccgtgcttacatctcgaagagatagctcctctcatgaagaaactcctgggagccacccactctatggacatggcgaatgtaaatggccaggatgcgagacactttgtgaagacctgggccagtttatcaagcacctgaacacagaacatgccctagatgaccgctctaccgcccagtgcagggttcagatgcaggtggtgcagcagctcgaaatacagctggctaaagagtctgaaaggctgcaggcaatgatggcacatctgcatatgcgcccatccgaaccaaagccctttagccagcctgtgacagtctctgccgcagactccttccctgacggactggtgcaccccccaacctctgccgccgccccggttactcccctgcggcctcctggacttgggtccgcgagcttgcatggtgggggcccagcccggaggcggtctagtgacaagttttgtagccctatatcaagcgagctggcccagaatcacgaattttacaagaacgccgatgtccgccctccctttacatacgcctctcttattcgtcaggcgatccttgagactcctgatagacaactcacactgaatgaaatctataattggttcactcggatgtttgcctactttcgtcggaatacagcaacctggaaaaacgcagtccggcataatttatccttgcacaaatgttttgtgcgcgtggaaaacgttaagggggcggtgtggaccgtggatgagcgtgaataccaaaaacggcgtcccccaaagatgaccggaagccccacactggttaagaacatgatcagcggacttagctacggggctttgaacgcctcttatcaggcagcactggctgagtcttcattcccactcttgaactcccccggtatgctcaaccccggcagcgcgagctctctgctgccattgagccatgacgacgtcggagctccagtggaacctctcccctccaacggctcctcatctcctccacggctgtccccccctcagtatagccatcaggttcaggtcaaggaagagcccgctgaggcagaggaggatcgacagccaggacctccgttaggggcgcccaatccctccgctagcggtccaccggaggatcgggacctcgaggaggagttgcccggagaggaactgtcctag

SEQ ID NO: 188188 - DNA, 1212 bp, synthetic construct
  misc_feature 1..1212: note = Description of Artificial Sequence: Synthetic coding sequence
  source 1..1212: mol_type = other DNA
atgaagctggaggtgttcgtgccccgggccgcccacggcgacaagcagggctctgatctcgaaggagcagggggaagcgacgcgccaagtcccttaagcgctgctggggacgattctctgggctctgatggcgattgcgcggccaactctcccgccgcggggggaggcgcccgtgatacacagggggacggtgagcagtcagcgggtggcgggccgggggcagaggaagccataccagccgctgcagctgctgctgtggtagccgagggggcagaggcgggagccgccggccccggcgctggaggagccggaagcggggagggcgcccggtctaagccctacactcgccggccaaaacctccgtacagctatatcgccctgatagctatggccatcagggatagcgcaggaggtagattgactctcgctgaaattaatgagtacctgatgggaaagtttcctttctttcggggcagttacacaggctggagaaatagcgtacgacataatttgagtcttaatgactgtttcgtgaaggtgttgcgggacccatcccggccatggggcaaagacaactactggatgctgaatcctaattccgaatacactttcgccgatggtgtcttccgccggagacgcaagcgcctgtcccatcgggcacccgtgcctgcgcctggtctccgacccgaagaggcaccaggcctgccagcggccccccccccagcaccagccgcgccggcctctccaagaatgcgctcacctgcccgacaggaagagagagcctctcccgccggaaagttctctagttcctttgctattgacagtatccttagaaagccctttcgatccagacggttgagagacaccgcgcctggcacgaccctccagtggggagctgcaccttgcccccccctccccgcatttccagctctcctgcctgcggcaccctgtcgcgcactgttacctttgtgtgcgtatggtgcgggggagcccgcccggctgggcgcccgggaggcagaagtgccccccactgcacccccattactgttagcccctctgcctgcagcggctcctgccaagccgctaagggggcccgccgccggcggcgcgcacctttactgcccacttcgtcttccagccgctttgcaggcagccagtgtgaggcgacccggcccccatctcccttatcctgtggagactctactggcctag

SEQ ID NO: 188189 - DNA, 1626 bp, synthetic construct
  misc_feature 1..1626: note = Description of Artificial Sequence: Synthetic coding sequence
  source 1..1626: mol_type = other DNA
atgagccagctggtggagtgcgtgcccaacttcagcgagggcaagaaccaggaagtgatcgacgccataagtggtgctatcactcagacccctggttgcgtgctgctcgacgtggacgcaggccctagcactaaccggactgtctacaccttcgtgggcccacccgaatgcgtggtggagggcgcgttaaatgccgctcgcgtagcttccaggctgatcgacatgtccagacaccagggagaacatcctcgaatgggcgcactcgacgtgtgccctttcattccagtgaggggcgtaagcgtggacgaatgcgttttatgcgcacaggccttcggccagcgtcttgccgaagagttggatgtgccagtgtacctgtacggggaggctgccagaatggactccaggcggactctaccagctatccgtgccggagagtacgaggcactcccaaaaaaactgcaacaagcggactgggcccccgattttggcccctccagcttcgtaccgtcttggggtgcgaccgctacaggagcaaggaaattcctgatagcgttcaatatcaacttattaggcaccaaagagcaggcccacaggatcgccctgaacctacgtgagcagggacggggtaaagatcaacccggcaggcttaagaaggtgcaggggatcggttggtatcttgacgagaagaatcttgcccaggtgtccacaaaccttctggattttgaggtcactgccctccatactgtttacgaagaaacctgtagggaggcacaggagctgtcactccctgtcgtagggtcccagttggtcggtctggtccctctgaaagccttgttggacgcagctgctttctactgcgagaaagaaaatttatttatccttgaagaagaacagagaattcgcctggtggtaagcagactcggactcgactcattgtgcccctttagccctaaggaacgcatcatagagtatctcgtgcctgagagaggaccagagagagggctgggctccaagtccctgagggccttcgtgggcgaagtcggggctcgctccgccgcaccgggaggcggctctgttgctgccgcagccgctgccatgggcgccgcattggggtcgatggtcggcctcatgacatacgggaggaggcaatttcagtcattggacacgactatgaggaggctgattccacccttcagagaggcctcggccaaactcaccaccctagtagatgcagacgcagaggcattcacagcatacctcgaagccatgcggctacctaagaacacaccagaagagaaagaccgaagaacagcagccctgcaggaaggactccgcagggccgtctctgtgccgttaaccttagccgagaccgtggcaagtttatggccggcactgcaggaactcgcacggtgtggaaatcttgcctgtcgtagcgacctgcaagtggccgccaaggcactggagatgggggtgttcggagcatactttaacgtgttaatcaacctccgggatatcactgacgaggcgtttaaggatcagatccatcatagagtatcctcattactgcaggaagcaaagactcaggcagccttggtcctggattgcttggagacacgacaggaatag

SEQ ID NO: 188190 - DNA, 1488 bp, synthetic construct
  misc_feature 1..1488: note = Description of Artificial Sequence: Synthetic coding sequence
  source 1..1488: mol_type = other DNA
atgagccagctggtggagtgcgtgcccaacttcagcgagggcaagaaccaggaggtcattgatgccatctcgggtgccatcactcagactcccgggtgtgttctgctggatgttgatgcaggcccatccactaaccgtacggtgtacacattcgtagggccccccgagtgcgtcgtagagggcgctttgaacgctgcgagggttgcctcccgcctaattgacatgtcgagacatcagggtgagcaccctcggatgggagcgctagacgtgtgcccatttattcctgtgcggggcgtaagcgtagatgaatgtgtgctgtgtgctcaggcattcggacaacgtttggccgaggaacttgatgtccccgtgtacctctatggtgaggctgcccgaatggattctcgtaggactctgccagctattagagcaggcgagtatgaggccttgcccaagaaactgcagcaagctgattgggcccccgatttcgggccctcttcgtttgtcccctcttggggggcaaccgctaccggggctagaaaattcttgatagcttttaatatcaacctgttaggtaccaaggagcaggcacaccggatagccctcaacctgagggaacagggcaggggcaaggaccagccaggccgtctcaaaaaagtccaggggatcggatggtacttagatgaaaagaatctggcacaggtgtcaacgaaccttcttgatttcgaggttactgcgctgcatacagtgtacgaggagacatgtcgtgaggcgcaggagctttcactgccagtggttgggtcccagctggtcggactcgtgcccttaaaagcgctgctcgatgccgcagccttctactgcgagaaggaaaacctgtttatacttgaggaagagcaacgcattcgacttgttgtgtcccgcctaggcctcgacagcctgtgtcctttttcgcccaaggagaggatcatcgaatacctggtcccggagagagggccagagagaggactgggaagtaagtcgctacgggcattcgtgggggaagtcggagcacgatcagcggcgcctgggggcgggtccgtggcagctgcagccgccgctatgggagccgctcttggttctatggtgggcctgatgacttatggccgccggcagtttcagagtttggacacgacgatgcgtcgtttgatcccaccattcagggaggcctcagccaagttaactacattggtggatgccgatgctgaagccttcactgcttatctggcccatggtggtcctaccggtggaagtgaagccggctccctgtgcgctgcagacgccggaggtgatgggggcctcgctgttgcgggcccggcaggaacaggaccggtctgggagccagggctgccagtgaggccacccggtggtggccagtctcctggggacggaagagtgtggagaatctttcaacgagcacaccaacccgaaggacatcaccgccgtggcatttag

SEQ ID NO: 188191 - DNA, 1719 bp, synthetic construct
  misc_feature 1..1719: note = Description of Artificial Sequence: Synthetic coding sequence
  source 1..1719: mol_type = other DNA
atgagccagctggtggagtgcgtgcccaacttcagcgagggcaagaatcaagaagtgatcgatgcaatctcgggtgccattacacagacccctggctgtgtcctgctcgacgtggacgcagggccatcgactaatagaacagtctatacattcgtgggtcctccggagtgcgtggtggaaggcgcacttaacgctgcccgggtcgcgtcccgactaatcgacatgtcgcggcatcaaggggaacacccgcggatgggcgcccttgatgtctgcccttttattcctgttaggggcgtgtctgttgacgagtgcgtgttgtgcgcccaggcctttgggcaacgtctggccgaggaattagacgtgccggtgtatttgtatggagaggccgctcgcatggacagccggagaactctgcctgctattagagccggagaatatgaagcactgcccaaaaaactgcagcaggctgattgggcacctgactttgggccgtcttcatttgtcccttcatggggggccacagcaactggcgctcgaaagtttctgatcgccttcaacatcaacctgctaggtaccaaggagcaggcgcatcgcatagccctcaatttgcgtgaacaaggcaggggtaaagaccagcccgggcggttgaagaaggtgcaagggatcggttggtacctggacgagaaaaatttagcacaggtgagtacgaatctgctagatttcgaggtaaccgcactgcataccgtttatgaggaaacttgtcgagaggcacaggaactctctcttcccgtagtgggtagccaattagtgggcctggttcccctgaaggccctgctcgacgctgccgccttctattgtgaaaaggagaacctcttcattttggaggaggagcaaaggatccgtctggttgtgtcccgtctgggattggattctctatgtcctttttcccctaaggaacgcatcatcgaatatctggtgcctgagagaggccccgaacggggtctgggtagcaaaagtctcagggccttcgttggcgaagtgggcgcccggagcgccgcacccgggggaggcagcgtggccgcggccgccgctgccatgggcgcagccctgggctctatggtaggcctgatgacgtatggccgacgccagtttcagtctctggatacaactatgcgccggctaatacctccctttagggaagcttccgcgaagctcaccacactggtagacgctgatgctgaggcctttacagcatatctagaggccatgcgattacctaaaaacacccctgaggaaaaggatcggcgcacggctgctttacaggaaggcctgagacgggcggtgtccgtgcctctgactttagctgaaaccgtcgcttccctctggccagccctacaggagctggctcgttgcggaaacctggcatgtcgctcagacctgcaggttgcagccaaagctctcgagatgggcgtctttggcgcctactttaacgtcctaataaaccttagggatattactgacgaggccttcaaggatcagccccccgccggctcccaggacccagggtgcaccggggctggcctgctgggcgaccctgcaggcgtcaccgtgcgagaggcctcacctggctcagtggcccctccaagccccattccaaggggccaatcctgtgatctggagacaccagggactgccggaccaagtaccctagaagggtag

SEQ ID NO: 188192 - DNA, 1488 bp, synthetic construct
  misc_feature 1..1488: note = Description of Artificial Sequence: Synthetic coding sequence
  source 1..1488: mol_type = other DNA
atgagccagctggtggagtgcgtgcccaacttcagcgagggcaagaaccaggaagtcatcgatgcaatcagcggcgccatcacacagacccccggctgtgtcctcctggatgtggacgcaggaccttcaaccaacaggacggtgtacaccttcgtgggcccgccagaatgtgtcgtggaaggtgcgctcaacgccgcccgggtggcatctcggctgattgatatgtcccgccaccagggcgagcaccctcggatgggcgccctcgacgtatgccccttcattcccgtgaggggcgtgtccgtggacgagtgcgtcctgtgtgcgcaagcattcggacagcgcctggctgaggaattagatgtgcctgtctacctgtacggggaggccgcccgcatggacagtaggcggacactcccagcaatccgcgctggcgagtatgaagcactaccaaaaaaattgcaacaggcagactgggctccagacttcggaccctcctcctttgtcccatcttggggggccaccgctactggagcccgcaagtttctaatcgcattcaatatcaatctactaggaacaaaagaacaggcccaccgaattgctctgaatcttagagaacaggggcgaggaaaggatcaaccagggcgactgaagaaggtccaaggcattggatggtatctggacgagaagaatctagctcaggtgtcaacaaatctcctggatttcgaggtgactgcgctgcacaccgtctatgaagagacgtgtcgggaggcccaagaactctcactcccagtggtaggctctcagctcgtcggcctcgtgcctctgaaggcattactcgatgctgccgctttctactgcgagaaggaaaacttgtttattctggaggaagagcagaggatcagactggtggtgagccgtttggggctagactctctctgtccgtttagcccaaaggagcggatcattgagtaccttgttccagagagggggccagagcgagggctaggaagcaagtccctccgggctttcgtgggcgaggtgggggctcgaagcgccgccccagggggaggttccgtggccgctgcagctgctgcgatgggtgcggcgcttggttccatggtcggtcttatgacctacggccggaggcagttccagagtttggataccaccatgcgccgccttataccccctttcagggaagcctccgcaaaactcacgacactggtggatgccgatgcagaagcatttacggcctatctggcacacggggggcctacagggggttctgaggcggggtccttgtgtgctgccgacgccggtggcgacggaggactggctgtggccggtccagcgggaaccgggcctgtctgggaacctggattgcctgtgagaccacctggggggggtcagagccccggagatggccgcgtgtggcggatttttcagagagcacaccagccggaggggcatcaccgtagagggatttag

SEQ ID NO: 188193 - DNA, 1626 bp, synthetic construct
  misc_feature 1..1626: note = Description of Artificial Sequence: Synthetic coding sequence
  source 1..1626: mol_type = other DNA
atgagccagctggtggagtgcgtgcccaacttcagcgagggcaagaaccaggaagtgatcgacgccatctccggagctattacgcaaacgcctggctgtgtcctgttggacgtagacgcagggcctagcactaacaggactgtgtacacttttgttggccctccagagtgtgtagtggagggggccctgaacgcagcacgcgtcgccagccgtctcatagatatgagccggcaccagggtgagcacccgcggatgggagccctggacgtttgtcctttcatccctgtgaggggcgtgtccgtggacgaatgtgtcctctgcgcgcaggcatttggacaaagactagcagaggagctggacgtgcccgtctacctctacggagaagctgctcgaatggattcccgcagaacgctgcccgctatccgagctggtgagtacgaagccttacccaaaaaactgcagcaggccgattgggcaccggactttggcccgagctcattcgtgccatcgtggggagcaacggccacaggggctcgaaaattcctcattgcattcaatattaatttgttgggaacaaaggagcaggcccatcggattgccctcaatcttagggagcagggccgtggcaaagatcagccgggcaggcttaaaaaggtgcagggcattgggtggtatctggatgagaaaaacctcgcacaggtgagcaccaaccttctggatttcgaagtgacagcgctgcacacagtatatgaagaaacatgccgagaagcccaagagctctccctgcccgtcgtcggatcccagctggtgggactcgttcccctgaaggcgctccttgatgcagccgcattctactgcgaaaaagaaaacctgtttattttggaggaggagcagagaatccgtcttgtggtatcccgcttggggctggattcactttgtccatttagtccaaaagagagaatcatcgagtatctggtccctgagcgggggccagaacgcggcctgggctctaaaagtttgagggcctttgtcggtgaggtcggagcacgcagtgctgcgccgggtggcggttccgtggcggccgctgctgctgccatgggcgcagcattaggttccatggtcgggctgatgacatatggcagaaggcaatttcaatcactcgataccacaatgcggaggcttattcccccctttagggaagcttccgctaagctcactacgttggtggatgccgacgctgaagcatttactgcttatctggaggctatgcggcttcctaaaaacaccccagaagagaaggaccggcgaactgcagcgttgcaagaagggcttcgccgcgcagtcagtgtccctttaaccctggcggagacagtcgcttcgctgtggccagctctacaggaattagcaaggtgcggcaatttagcttgcaggtcagatcttcaagtagccgctaaagccctggagatgggtgtgttcggagcgtatttcaacgtgctgattaaccttcgtgacatcacggacgaggccttcaaagatcagatccaccatcgggtttcatccctcctacaggaggctaaaacccaggctgcactcgtccttgactgtctggaaacacgccaggaatag

SEQ ID NO: 188194 - DNA, 1719 bp, synthetic construct
  misc_feature 1..1719: note = Description of Artificial Sequence: Synthetic coding sequence
  source 1..1719: mol_type = other DNA
atgagccagctggtggagtgcgtgcccaacttcagcgagggcaagaaccaagaggttattgacgcaatcagcggtgcaattacccaaacgcccggatgtgtcctcttagacgtggatgctggcccgagcacaaatcgcactgtttacacctttgttgggcctccagaatgtgttgtggagggtgctctgaatgctgctcgtgtggcgagccggctgatcgacatgtctcgacaccagggagagcacccacggatgggcgcactggatgtctgtcccttcatcccggttcgcggcgtgtctgttgatgagtgcgtgttgtgtgctcaggcttttgggcaaagactggctgaagaactcgatgtgcccgtgtacttgtatggtgaggctgcccggatggactctcggagaactttacccgctatccgggccggggagtatgaggctctgcccaaaaagttgcaacaggctgattgggcacccgattttgggccatctagtttcgtaccttcttggggagctaccgcgaccggcgctcggaaattcttgatcgctttcaacatcaaccttctggggaccaaggagcaggcccaccgcatcgccctcaatctgagggagcagggccgcggaaaggaccagcccggtcgccttaagaaagtacagggcattggctggtaccttgatgagaagaatcttgctcaggtgtctaccaatctgttggacttcgaagtaaccgccctgcacaccgtatacgaggaaacctgtagagaagcccaggagctctcgttgcccgtggttggttcccagctcgtggggctcgtccctctcaaagcgttgctcgacgcagcggctttttactgcgaaaaagagaacctgttcattctcgaggaggagcaacgcattaggcttgtggtctctcgcctggggcttgatagtctttgccctttctcgccaaaagaaagaattatcgagtatctggtgcccgagcggggcccagagcgcggcctgggtagtaaaagtctccgtgcatttgtgggtgaggtcggcgctagaagcgctgcccctgggggagggagtgtggccgccgccgcagctgccatgggggccgctttgggatccatggtcggcctgatgacatatggacgaagacagttccaatctctggatactactatgcgaaggctcattccaccgtttagggaggcttctgctaagcttactactctggtggatgctgacgccgaagcattcaccgcgtacttggaggccatgcggctccctaaaaatactcccgaagaaaaggacaggcgaacggcagcccttcaggaggggctacggcgggccgtgagcgtgccactcaccctcgcagagactgtggcttccctgtggcctgctctgcaagaactggccagatgtggcaatctggcatgcagaagtgatctccaggttgccgctaaggccctcgaaatgggagtcttcggtgcatactttaatgtcttgattaacctcagagatatcacagatgaggcatttaaggatcagccgcctgctgggtctcaggatcctggctgtacaggagcaggcctcctgggagatccggcgggggttactgtgcgagaagccagtcccggatctgtcgctcccccctcccctatccctcgggggcaaagctgcgatctggagactcctggtactgctggaccctctactttagagggatag

SEQ ID NO: 188195 - DNA, 1779 bp, synthetic construct
  misc_feature 1..1779: note = Description of Artificial Sequence: Synthetic coding sequence
  source 1..1779: mol_type = other DNA
atgagctggggcaccgagctgtgggaccagttcgacaacctggagaagcacacacagtggggaatcgatatcctcgaaaagtatatcaagtttgtgaaggagcgcactgagattgagttgagctacgctaagcagctccgtaacctatcgaaaaaatatcagccaaaaaagaactccaaagaagaggaagagtataaatatacttcctgtaaagcctttatctctaatctgaatgagatgaatgactacgctggccagcatgaagtgatttcagaaaacatggcttcacagatcatcgttgatctagctagatatgtgcaggagctcaaacaggaacgcaagagcaattttcacgacggacgcaaggcacagcagcacattgagacttgctggaaacaactcgagtccagtaaaaggaggttcgagagagattgtaaagaagctgatcgagctcagcaatactttgagaagatggatgctgatatcaatgtcacgaaagcagatgtcgagaaggcccggcagcaggcccagatccgacaccaaatggctgaagactcaaaagccgactactcctcaattctccagaaattcaatcatgaacagcatgaatactatcacacgcacattcctaacatctttcagaagatccaagagatggaagagcggcgaatcgtgcgcatgggcgagtctatgaaaacatatgccgaggtggatcggcaggtgattccaatcatcgggaaatgtctggacgggatcgtcaaggcagcagaatctatcgatcagaagaatgattcccagctcgtcattgaggcttataagtctggctttgaaccacccggcgacatagagtttgaggattacacacagccgatgaaacggacagtttccgataactccctgtctaatagcagaggagaggggaaaccagacctgaagtttgggggaaaaagcaaagggaagctgtggccatttatcaagaagaataagagtcccaaacaacagaaggagccgttatctcatcgatttaatgaatttatgacctctaaacctaagattcactgttttcggtcccttaagcgtggccattcacttttgaagggcgccactcccgaggatttttccaatttgccacctgagcagcgccggaagaagctgcagcagaaagtagacgagctcaataaagaaattcaaaaggagatggatcagcgcgacgccattaccaagatgaaggacgtttatttaaagaatccccagatgggcgatcccgcttcattagatcataagctcgccgaggtctctcagaacatcgagaaactgagagtggagacccagaaatttgaggcttggctggcagaggtggaggggaggctcccagctcggtctgaacaagcccgaagacaatcggggctctatgactcacagaaccctcccacagtgaacaattgtgcccaggaccgggaaagtcctgatgggtcatacacagaggagcaatcccaggagagtgaaatgaaggtgctcgctaccgactttgacgacgaatttgacgacgaagaaccactgcccgccatcggcacctgcaaggccctctatacctttgagggtcagaatgaagggactatttccgtggtggagggagagaccctgtatgtaattgaggaggataaaggagatggctggactcgaatcaggagaaatgaggatgaagagggatacgtgccaacttcttatgtcgaagtgtgcctcgacaagaatgccaagggcgcgaaaacctacatctag

SEQ ID NO: 188196 - DNA, 1854 bp, synthetic construct
  misc_feature 1..1854: note = Description of Artificial Sequence: Synthetic coding sequence
  source 1..1854: mol_type = other DNA
atccggtggaccgacgagctgtgggaccagttcgacaacctggagaagcatacccagtggggaatcgacatattagaaaagtacatcaagttcgtgaaagagagaacggagatagagctaagttatgcaaagcaactgcggaacctcagcaagaagtatcaaccaaaaaaaaattcgaaagaagaggaagaatacaagtatacatcctgtaaagctttcatcagcaatctgaatgagatgaatgactatgcaggccaacacgaggtcatcagcgagaacatggccagccaaatcatagtagacctggctaggtacgtgcaggaactgaaacaggaacgcaaaagtaactttcacgacggtcggaaagcccagcaacacatagagacatgctggaagcaactagagagctctaagcgaagattcgaacgcgactgtaaagaggcagaccgcgctcagcagtatttcgagaaaatggacgccgatatcaatgtgactaaagctgacgtcgaaaaggctcggcaacaggcacaaattcggcatcagatggccgaagactctaaagctgattactcctccattctccagaagtttaaccacgagcagcacgaatattatcacacacacatcccaaatattttccagaaaatccaggaaatggaagaaagaagaatcgtgcgcatgggcgaatccatgaagacctacgcggaagttgacagacaagtgattcccatcattggaaagtgcctggacggtatcgtaaaagctgccgagtctatagaccagaagaatgattctcagcttgtcattgaggcctataagagtggatttgaaccccctggtgatatagagtttgaggattatacgcagccaatgaaacgcacagtcagcgacaactctttaagcaacagcaggggtgaaggtaaacccgacctaaagttcggaggaaaatctaaggggaagctgtggccgtttataaagaaaaataagctcatgtcgctccttacgtccccacatcagccccccccccccccacccgcttccgcctccccaagtgccgtgcctaatgggccgcagtctccgaagcagcagaaagagcccctgagccaccggtttaacgaattcatgacttcgaagcccaagattcattgcttccgttctttaaaaagaggaccttcattcaaacagggtgccacaccagaggacttctccaacttgccacctgaacagcgccgaaaaaagcttcagcagaaagtggatgaattaaataaagagatacagaaggagatggaccaacgggatgccattaccaaaatgaaggatgtctaccttaagaacccccagatgggtgacccagctagccttgaccacaaacttgctgaggtgagccagaatattgagaaactcagagtcgagactcagaaattcgaggcatggctggcagaggttgaaggaaggcttcccgcacgttctgagcaggctcgtcggcaatcggggctgtacgattcccagaatcctccgacagtcaacaactgcgcccaagaccgcgaaagccctgacgggagctacacagaggaacagtctcaggagtctgagatgaaggttctggccaccgatttcgatgacgaattcgatgatgaagaaccgttgccggcaataggaacatgcaaggcactgtacacctttgagggtcagaatgagggcaccatcagcgtggtggaaggagaaacactgtatgttatcgaagaggataaaggcgatgggtggacacggataagacgaaatgaagatgaggagggatacgtaccaacatcttacgtcgaagtctgcctcgataagaatgcgaaagattcgtag

SEQ ID NO: 188197 - DNA, 1854 bp, synthetic construct
  misc_feature 1..1854: note = Description of Artificial Sequence: Synthetic coding sequence
  source 1..1854: mol_type = other DNA
atgagctggggcaccgagctgtgggaccagttcgacaacctggagaaacacacacaatggggcatcgacatactggagaagtacattaaatttgtgaaagaacgcactgaaatagagctctcctatgctaaacagcttaggaatctatcaaagaagtaccagcccaaaaaaaatagcaaggaagaggaagaatacaaatacacttcttgcaaagccttcatctccaatctcaatgagatgaacgattacgctggacagcatgaagtcatcagcgagaatatggcttctcagatcatcgtggatctggctaggtacgtgcaggagctcaaacaggaacgaaaatctaatttccatgatggaaggaaggcccaacaacacatcgaaacttgctggaagcagttagagtcaagcaaacgtcgcttcgagcgcgattgtaaagaagctgacagggcccagcagtactttgagaagatggatgcggacattaatgtcactaaggctgatgtggaaaaagccagacagcaggcacagattcgtcatcaaatggccgaagatagcaaggccgactattcttccatcctgcagaaatttaaccacgagcaacacgaatattaccatacacacatccccaacatctttcaaaaaatccaagagatggaagagaggcgcatagtgcgtatgggcgaatcaatgaaaacttatgctgaggttgatagacaagttattcctatcattggtaaatgtcttgacggcattgtcaaagctgcagagagtatagatcagaaaaacgacagtcaactcgtaattgaagcgtacaagtccgggttcgagccccctggtgacatcgagtttgaggactacacacaaccgatgaagcggacagtttctgacaattcactgtcgaactcaagaggcgaggggaaaccggacctcaagtttggtgggaaaagtaagggcaagctgtggccgtttataaagaaaaataagttgatgtccctactaacaagtcctcatcaaccgccaccaccccctcctgccagcgctagcccctctgccgtcccaaacggcccgcaatcacctaaacaacaaaaggaaccattgagtcacaggttcaatgaattcatgacaagtaagcccaagatccattgcttccggtccttaaaaagagggcattctcttttaaaaggcgctactccagaagactttagtaacttgccacctgaacagcggcgaaaaaaactgcagcagaaagtggacgaactcaacaaagaaatccagaaggagatggatcaaagagacgctatcacaaagatgaaagacgtgtatttaaaaaacccacaaatgggagaccctgcgtcattggatcataagctggccgaggtctcccaaaacatcgaaaaattgcgtgtcgagactcaaaagtttgaggcctggttagcagaggtggagggccgcttaccggctaggagcgaacaagcgaggagacaaagcgggctgtacgactctcagaaccccccaaccgtaaacaattgcgcacaggatcgagagtctccagacggaagctacactgaagaacagtcccaggagtcggagatgaaggtgttagctaccgattttgatgatgaattcgacgacgaggagccactgccagccataggaacatgcaaggctctgtataccttcgaagggcagaacgagggcactatttctgtcgtggagggcgagaccctgtacgtgattgaggaggacaagggcgacggatggacacgaatccggaggaatgaagatgaagagggctatgtacccactagctacgtggaagtgtgtttagataaaaacgccaaagactcctag

SEQ ID NO: 188198 - DNA, 1827 bp, synthetic construct
  misc_feature 1..1827: note = Description of Artificial Sequence: Synthetic coding sequence
  source 1..1827: mol_type = other DNA
atgagctggggcaccgagctgtgggaccagttcgacaacctggagaagcatacccagtgggggattgacattcttgagaaatatatcaagttcgttaaagagaggactgaaattgagttgagctacgccaaacaactccgaaacctctctaaaaagtaccagcctaaaaaaaattctaaggaagaagaggagtacaaatatacctcttgcaaagcgttcatctcgaatttgaacgaaatgaacgattacgcaggacagcacgaggtgatatcggagaatatggctagccagattatcgttgaccttgcccgatacgttcaggaactgaagcaggagcgcaaaagtaacttccacgacgggcggaaagcacagcaacacatcgagacttgttggaaacagctggaaagtagcaagcggaggttcgagagggattgtaaggaggcggacagggcccagcagtacttcgagaaaatggatgctgatatcaacgtgacaaaggcagacgtcgagaaggcacgccagcaagctcagatccgacaccaaatggctgaggactccaaagcagactatagttccatccttcagaagttcaaccacgaacaacacgaatactaccatacacacatccctaatatttttcagaagatacaggaaatggaggaaagaagaattgtgcggatgggagaatctatgaagacctacgctgaggtagacaggcaggtcatacccataatcggcaaatgcttggacgggatagtaaaagccgcagagtcaatagaccagaagaatgattcccaattagtgatcgaggcatataagagtggcttcgagccccccggagacattgagtttgaagactacacccagcctatgaagagaacggtctcagataactctctgtccaattcccgcggtgaagggaaacccgatttaaagttcggaggtaaaagcaagggtaaactgtggccctttatcaaaaagaacaaacctcccccaccaccgccagcttcagcttcaccgtctgctgtgcccaacggccctcagagcccaaagcagcagaaggagccactgagccacagatttaacgaattcatgacatcaaagccaaaaattcattgtttcagaagcctgaagcgcggtcactctctgactctccagggcgccacccctgaagactttagcaatttgccacccgagcagaggaggaagaagctccagcaaaaagtcgatgaactgaacaaggagattcagaaagaaatggaccagcgggatgctatcaccaaaatgaaggacgtctatctcaagaatccacaaatgggtgaccccgcctccttagatcataaattagccgaagtctcacagaatatagaaaaacttcgagtggagacccagaagttcgaagcatggttggcggaggttgagggaagactgcctgccagatccgagcaggctcgccggcagagcgggttgtacgactcacaaaatccccctaccgtcaataattgtgcccaggaccgtgaaagtcctgacgggagttataccgaggaacagtcccaggagagcgaaatgaaagtgttggctaccgactttgatgacgaattcgacgatgaggagccactcccagctataggcacatgtaaggctctatatactttcgagggacagaacgagggtaccatctccgtggtggagggagaaaccctgtacgtcattgaggaggacaagggggatgggtggaccagaatcagacggaatgaagacgaagagggatatgtgcctacgtcctacgttgaggtgtgcctggacaagaatgcaaaagattcatag

SEQ ID NO: 188199 - DNA, 738 bp, synthetic construct
  misc_feature 1..738: note = Description of Artificial Sequence: Synthetic coding sequence
  source 1..738: mol_type = other DNA
atgaagcggaccatcggcaagcccacctacgccttcgaggcccgggactatgtgctgtcattgaaactcggagcaacccctgaggatttctccaacctgcctcccgaacagcgccgcaaaaagctccagcagaaggtcgatgagcttaataaggaaatccagaaggaaatggaccagcgtgacgccatcacgaagatgaaggacgtgtacctgaaaaaccctcagatgggggaccctgccagcctggaccataagctagccgaggtttctcagaatattgaaaaattgcgagtcgaaactcagaaattcgaagcctggctggcagaggtggaggggcggctgccagcgaggagcgagcaagcgcgacgtcagtctggcctgtacgactctcaaaacccccccacagtaaacaactgtgctcaggaccgagagtcacccgacggctcttatacagaggagcaatcccaggagagcgagatgaaggtgttggctacagatttcgatgatgagttcgacgacgaggaacctctgcctgccatcggaacatgcaaagccttatatactttcgagggtcagaacgaagggacaatttccgtggtggaaggggagaccctgtatgtgattgaagaagataagggagatggctggactcggattcggcggaatgaagacgaagagggttacgtccccacaagttatgtagaggtctgtctggataaaaatgctaaggactcgtag

SEQ ID NO: 188200 - DNA, 1854 bp, synthetic construct
  misc_feature 1..1854: note = Description of Artificial Sequence: Synthetic coding sequence
  source 1..1854: mol_type = other DNA
atgagctggggcaccgagctgtgggaccagttcgacaacctggagaagcacactcaatggggcatcgacatcctggagaagtatattaagtttgtaaaagagagaactgagatcgaactcagctacgctaagcagttacgcaatctgagcaaaaagtatcaacccaagaaaaattctaaggaagaggaggagtacaaatatacatcctgtaaggcttttattagtaatcttaatgagatgaatgattatgcaggccagcatgaagtgataagcgagaacatggcttcccagattattgtagatctggcacggtacgtgcaggaactgaagcaggagcgcaagtctaacttccacgacggcagaaaagcccaacagcatatcgagacttgttggaaacagcttgagagctcaaagaggcgctttgagagggactgcaaggaagcagaccgggcccagcagtacttcgagaaaatggatgccgatatcaacgtgactaaagctgatgtggagaaggcccgacagcaagctcaaatcagacaccagatggctgaagactctaaagcagattactcttctatcctgcaaaaattcaatcatgaacagcacgaatattatcacactcacattcccaatatcttccagaagattcaggagatggaagagcgcagaattgttcgaatgggagagagtatgaaaacctacgctgaggtcgatcgacaggtcatacctattatcggtaaatgccttgacggaattgtgaaggctgctgagtcgatcgaccagaagaatgactctcaactagtgatcgaggcgtacaagagcggattcgaacctcctggagatattgagttcgaggactacactcaacctatgaagcggacagtgagtgacaatagtctgtcaaacagtcgcggcgagggaaagccagacttgaaatttgggggtaagagtaagggcaaactgtggccctttattaaaaagaataagctcatgtcccttctgacttcgcctcaccaacccccgccccccccccctgcctccgcgagcccaagtgcagtgcctaatggcccgcagagtcctaaacagcagaaggaacctctgtcacatcggtttaatgagttcatgacctccaagcctaaaatccattgttttaggtctttgaagaggggactgtcacttaaattaggggccacgcctgaggatttcagcaacctaccacccgagcagagaagaaagaagctccaacaaaaggttgacgagctgaataaggaaatccaaaaagagatggatcagagggacgccattaccaagatgaaggacgtttacctcaaaaacccccagatgggcgatcctgcgagcctagatcataagctggccgaggtttcccagaatatcgaaaagctcagggttgagacacagaaattcgaggcctggctggccgaggtggaggggcgcttacctgcacgctctgagcaagctcggcgccaatccggcctctatgattcccaaaaccctccaacagtcaacaattgcgcacaggaccgtgaatccccagatgggtcttacactgaggaacaatcccaggaatcagagatgaaagttttagctaccgacttcgacgacgagttcgacgacgaggaacccttgcccgccattggcacttgtaaagctctgtacactttcgaaggacagaatgagggtaccatctcagtggtggagggcgaaacgctctacgttatagaggaggataagggggacggatggactcggattcgcaggaacgaggacgaggaagggtatgtcccaactagctacgtggaggtgtgcctggacaagaacgctaaagattcgtag

SEQ ID NO: 188201 - DNA, 1722 bp, synthetic construct
  misc_feature 1..1722: note = Description of Artificial Sequence: Synthetic coding sequence
  source 1..1722: mol_type = other DNA
tgactgagctacgccaagcagctgcggaacctgagcaagaagtaccaacccaagaagaactccaaagaagaggaagaatacaagtacacttcatgcaaggcattcatctccaatctgaacgagatgaacgactacgcagggcagcacgaggtgatcagcgaaaatatggcctcacagattattgtggacctggcccgatatgtgcaggaattgaaacaagagagaaagagcaattttcacgacggacgtaaagcacaacagcacatcgaaacctgttggaagcagctcgaatcctcgaagcgtcgtttcgagagagattgtaaagaggccgaccgggctcaacagtatttcgaaaaaatggacgcagatataaatgttacaaaggccgatgtagaaaaggccagacagcaggcccagatcaggcaccaaatggccgaagacagcaaggccgattacagcagtatactgcagaagttcaaccacgagcagcacgagtattatcacacacacatacccaacatatttcagaagattcaagagatggaggagaggcgtattgttcgaatgggggagtccatgaaaacctatgccgaggtagatcggcaggttatccctattattggtaaatgtctcgatggcattgtaaaggctgcagaatcaatcgaccagaagaacgacagccagctagtaatcgaggcatataagtccggttttgagccacccggcgacattgaattcgaggactacacccagcccatgaaaagaaccgtgtccgacaattctctgtccaactcccgaggcgaggggaaacccgaccttaagttcggcggcaagagcaaaggcaaactctggccctttattaagaaaaataaaccaccaccccctccccccgcgtccgccagtccttctgcagtcccgaacgggccgcagagccccaaacagcagaaggaacccctttcacacaggttcaatgagtttatgacaagcaagcctaagatccattgttttcgtagtctcaagagggggcactcgttgctgaagggagccacccctgaggacttctccaacctcccaccagagcaacgaagaaaaaaactgcagcagaaagtggacgagctcaataaagaaattcaaaaagaaatggatcaacgcgatgccataaccaaaatgaaagacgtctatctgaaaaatccgcaaatgggagaccctgcaagcctcgatcataaactcgccgaagtttctcagaacatcgagaagctccgtgtggagacccagaagttcgaagcatggctagctgaggtggagggcagactgccggcccgttcagaacaggctagacgccaaagcggactctatgactcacagaatcctccaacagttaacaattgcgcacaagatcgtgaatctcctgatggctcgtacacagaagaacaatcacaggaatcggagatgaaggtgcttgctactgactttgatgatgagttcgatgatgaagagcccctgccagcaattggaacttgcaaggccttatataccttcgagggccagaacgaggggacaatctcagtggtagagggggaaaccctgtatgtgattgaagaggataagggtgatggttggacccgcatcagacgtaacgaagatgaggaagggtatgtgccaacctcatatgtggaagtctgcctcgacaagaatgctaagggggctaaaacgtatatttag

SEQ ID NO: 188202 - DNA, 3495 bp, synthetic construct
  misc_feature 1..3495: note = Description of Artificial Sequence: Synthetic coding sequence
  source 1..3495: mol_type = other DNA
atggccggcggcgaggaccggggcgacggcgagcccgtgagcgtggttaccgtgcgggtgcagtacctcgaggatactgacccctttgcctgcgcaaatttcccggaacctaggcgggcccccacatgtagcctcgatggagccctccctcttggcgcgcagattcccgcagtgcaccgcctcttgggcgccccactaaagttggaagattgtgcactgcaagtgtctccatccggctattacctggatactgagctgtcacttgaagagcaacgagagatgctggaggggttctatgaggagatatccaagggtcggaaacctacgctgatcctacgcacccaactgagtgttagggtgaatgctattttagaaaagctgtatagctcttccggcccggaattgcgcaggagcttattttcactgaaacagattttccaggaggataaagatctggtgcccgagtttgttcattcagagggtttgagctgtctcattagagtcggtgccgccgccgaccacaattaccagtcttacatactgcgtgctctgggtcagctcatgctctttgtggacggaatgctgggggtggtcgcgcactcggacacaatccaatggttatacaccttatgcgcatctctatcgcgcctggtggtgaagaccgccttaaaactgttgctcgtgttcgttgagtacagcgaaaataatgcccctctgtttatcagagctgtcaactcagtcgcatctactaccggagcgcctccctgggctaacctggtctccattctcgaggagaaaaacggtgccgaccccgagctgctggtctacacagttaccctcataaacaagaccctagccgccctacccgaccaggacagcttttacgatgtaacagacgccctggaacagcagggcatggaagctttagtccagaggcacctcggcacggccggtacagacgtggatctcaggacgcaacttgtgctgtacgagaacgccctgaaacttgaagacggtgacatagaagaggctcccggcgcgggcggaaggcgggaacgacgcaaaccgagttccgaagagggcaaaaggagcagacgctcactggaaggcggcgggtgcccagcgcgagcacctgagccagggcctacgggccctgcaagtccagtgggaccaacgagcagcactggccccgcattactgaccggccccgcatcttcgccagtgggacctccaagcgggctccaggcatcagtaaacctgttccctaccatttccgtcgctccatctgccgacacttccagcgagcggtctatctataaagctaggttcttagaaaacgtcgcagctgccgaaacagagaagcaggtggcactggctcaaggccgcgccgagactctggctggtgcaatgccaaacgaggccggcggacatcctgatgcaagacaactgtgggatagcccagaaaccgccccggccgctcgaaccccgcaatcccccgccccttgcgtcctattgcgcgctcagagaagtctggcaccagagccaaaagagccactgatccctgccagtcccaaggctgaacctatttgggagctgccaacaagagctcctaggctctcaatcggagatttagacttttccgacttgggcgaggacgaagaccaggacatgctgaatgtagagtctgttgaggctggcaaggatattccagccccctcccctcctctccctctcctctccggtgtcccaccacctccaccccttcctccaccacctcccatcaagggcccatttcctcccccaccaccgcttcctctggccgccccactgccgcactccgtaccagactccagcgccctccccacaaagcggaaaacagtaaaactgttttggagggaacttaagcttgcaggtggtcatggggtgtccgcatctcggttcggtccttgcgctactctctgggcctctttagaccctgtttccgtcgataccgccaggctcgaacacctgtttgaaagccgcgccaaagaggtcctccctagcaaaaaggcaggggagggtcggagaacgatgaccacagtgctcgatccaaaacgttcaaatgctattaatattggcctaaccactctgccaccggtccatgtgattaaggccgctcttctgaacttcgatgagttcgcagtgtccaaagacggaatcgaaaaactccttacaatgatgccaactgaggaggagcgtcagaagatagaggaggctcagctcgctaacccagatattccccttggaccagcagagaatttcctgatgacgctggcttcaatcgggggcctggcggctcgccttcagctgtgggcctttaagcttgattacgactcaatggagcgtgaaatcgctgagccgctttttgacctgaaggtaggtatggagcagcttgtgcaaaacgccacatttcgttgtatactagctacactcctcgcagtgggaaacttcttgaacggatcacagtcaagcgggtttgagctcagctacctagaaaaggtttctgaggtgaaggacacggtgcggagacagagtcttctgcaccacctttgctccttggtccttcagacacgacccgagtccagcgatctgtatagcgaaattccggctctgacaagatgtgccaaagtcgacttcgagcagctcacggagaatctcggacaattagagcgtagatctcgagctgcagaggagtccttgcggagcttggctaaacatgagttggcgcccgctctgcgcgccaggttaacgcactttttggaccaatgcgccaggcgcgttgccatgctccgcatcgttcaccgtcgcgtgtgtaataggttccacgcttttctgctgtacctagggtacacaccccaagccgcgagggaggtacggatcatgcagttctgtcacactctccgcgaatttgctttggagtatcggacatgtcgagagcgcgtccttcaacaacagcaaaagcaggccacctaccgcgagcgcaacaaaacccggggaagaatgattacagaaaccgagaagttctccggagttgcgggagaggcaccctcaaatccgtccgtgcctgtcgcagtatcctcaggccctggcaggggcgatgcagactcccacgcttctatgaaatcactcctgactagtaggccagaggataccacgcacaaccgcagaagccgaggaatggtgcagtcttcctccccgattatgcctacagtcggaccctcgaccgcttcgccagaggagccacctggatcttccttgccgtctgacaccagcgatgaaataatggatttgctagtccagtccgtaaccaagagttctcccagagccctggcagcaagagaacggaaacggagcaggggcaaccgcaagtcgctccgacgcacgctgaagtctgggctcggagacgacctggtgcaagcccttgggctgagcaaggggcccggattagaggtctag

SEQ ID NO: 188203 - DNA, 4320 bp, synthetic construct
  misc_feature 1..4320: note = Description of Artificial Sequence: Synthetic coding sequence
  source 1..4320: mol_type = other DNA
atggccaccctggcctgccgggtgcagttcctggacgacaccgacccttttaacagtactaactttcctgagcctagtaggccccctctctttacatttcgtgaagacttggccttggggacgcagctcgctggagtacaccgcttgctccaggctccccataagttggatgattgtacacttcagctgagccacaacggcgcttatctggacttggaggccactctggcagaacagcgcgacgagctggaggggtttcaggacgatgccggtagagggaagaagcactctatcatactgaggacccagctgtctgtgcgagtacatgcttgtatcgagaagctgtacaattcttccggcagagatcttcggagggccctgttctctctgaagcaaatcttccaggatgataaagatctggttcatgagttcgtggtggccgagggcttgacctgccttatcaaagtgggcgctgaagctgaccagaattaccagaattacatcctccgggcactcgggcagatcatgttatatgtcgacgggatgaacggggtgatcaacaggaacgagacaatccagtggctgtataccctcatcggatcgaaatttcgcctggtcgtcaagaccgctttgaagttactcttggtcttcgtggaatacagtgaatccaatgctccacttttaattcaagccgtaaccgccgtggacaccaaacgtggggtgaaaccctggtctaatatcatggagatcttggaagagaaagatggtgtggacaccgagttactcgtctacgcgatgaccctggtcaataaaaccctgtctggtttgccagatcaggacactttctatgacgtggtcgactgtcttgaagagctgggcatcgccgccgttagccagcgccatctgaataagaaagggaccgacctcgacctggtggagcagctcaacatatacgaggtcgcgctcagacacgaggacggagatgagactacagagccaccaccaagtggctgtcgcgatcgacggcgcgcatccgtctgctcaagcggtggaggcgagcacagagggctggaccgtagaaggtcacggcgacactctgtgcagagtatcaaaagtacgttaagcgctcctactagcccttgcagtcaaagtgcaccaagttttaaacccaaccaagttagagatcttagagaaaagtatagcaacttcggtaacaattcttaccacagcagtcggccatcaagcgggtcgagcgtacccaccacacccacctcttccgtgtcgccaccccaagaggcccgattggagcgctcaagcccatctggcctgcttacatcgtcctttagacaacaccaagagagtctggccgctgagagagaaaggcgcagacaggagcgagaagagcgtctacaacgcattgagcgggaggagaggaacaagttctctcgggactatctggacaagcgggaggaacaaaggcaggccagagaagagcgatacaagtatctcgagcagctggcggccgaagagcacgagaaggaacttcggagtcggtctgttagcagggggagggctgatctgtctcttgacctaaccagtccagctgctccagcctgcctagcccctctgagtcactccccctctagtagcgattcccaagaggcgttgacggtgtcagcgagcagtccaggaaccccccaccatcctcaggcctcggccggagaccctgagcccgagtccgaagctgaacctgaagccgaagccggcgcgggacaagtagctgatgaagccgggcaggacatagccagtgcccatgaaggggcggaaacagaggttgagcaggccttggaacaggagcctgaggaaagggcttctttgagcgagaaggagcggcaaaacgagggggtcaacgagagggataattgtagtgcctcaagtgtctcatccagttcctcaactctggaacgggaagagaaagaggataaactcagccgtgaccgcaccacaggactctggcctgctggcgttcaggacgctggcgtgaatggacagtgtggtgacatcctgaccaacaagaggttcatgttggacatgctgtacgcgcacaaccgcaagtcgccagatgatgaggagaaaggtgacggagaggctggcagaactcaacaagaagctgaagccgttgcatccctcgccaccagaataagcacgctgcaggcaaattcccagactcaggacgagtccgtgcgccgcgtggatgtgggatgtctagacaacagggggagtgttaaagcgttcgccgaaaagttcaactctggggacctaggcagaggcagcattagcccggacgctgagcccaacgacaaggtgcctgagaccgcaccagtacagccaaagactgaatccgactacatctgggatcagctgatggcaaacccaagagaacttaggatccaggacatggatttcacagacctaggtgaggaagacgatattgatgtgctcgacgtcgacctcgggcatagggaggctcccgggccgcctcccccccctccacctacttttcttggacttccaccaccgcctcctcccccgctgctcgacagcatcccgccacctcccgtgcccggcaacctcctggtgccacctccaccagtcttcaacgctccgcaaggcttgggatggtcgcaggttcctcgtgggcagcccacttttactaagaagaagaagaccatacgcctgttttggaacgaggttagaccatttgactggccttgtaagaacaatagaagatgccgggaattcttgtggtccaagctggaacccatcaaagtcgacacctctaggctggaacatctgtttgaatctaagtccaaagaactgtccgtctccaaaaaaactgctgccgatgggaagaggcaggagataatcgtcctcgatagtaagcgctccaacgcaatcaatattgggcttacagtgttgccccccccaagaactatcaagatcgcaatcttgaacttcgatgaatacgctttaaataaagagggaatcgagaagattttgacgatgattcccactgatgaggaaaagcagaagatccaggaagctcagttggctaaccctgagattcccttaggctcagccgaacagtttctgttaacactgagcagtatcagcgaactctccgcccggctccatctttgggcgttcaagatggattacgagacgaccgaaaaagaggtcgcagaaccgctgctggatttaaaggagggcattgatcagctggagaacaataagactctcgggtttatcctgtctaccctgctggcaatagggaattttctgaatggcaccaacgctaaggcatttgaattgtcgtatctggaaaaggttcctgaggtgaaagacactgtccacaagcagtccctgcttcatcatgtgtgcacgatggtcgtggagaatttcccagatagctctgacctgtattcagagatcggggccatcacaagatccgcaaaggtcgactttgatcagcttcaagacaatctgtgccagatggagaggagatgtaaagcaagctgggatcatctgaaggcaatcgccaaacatgagatgaaaccggtgctaaagcagcgcatgtccgagtttctgaaggactgtgctgagaggatcatcattttgaaaattgtacaccgcagaatcattaatcggtttcatagcttcctcctgttcatgggacaccccccttacgccatccgtgaggtgaatattaataaattctgccgcatcattagtgaattcgctctggagtataggactacccgggagcgggtgctgcaacagaaacagaaaagagcaaatcatcgagaacgcaataaaactcgcgggaagatgatcaccgactccgggaagttcagcggcagctctcctgcaccaccctctcagccgcagggcctgtcttacgccgaggatgcggctgaacacgagaatatgaaggccgtgctaaaaacgtcttcacctagcgttgaagatgccacccccgccctgggggtacggaccaggtcgcgagcgtcccgcggaagtaccagttcttggactatgggcacagacgattccccaaatgtgacagacgatgccgccgacgagatcatggacaggattgtgaagtcggctacccaagtaccctctcagcgggtagtgcctcgcgaacgaaaacgctcacgcgccaacaggaaatcactgagacgcaccttgaaaagcgggttgacccctgaagaagctagagccctgggattggtaggcacctcagagctgcagctgtag

SEQ ID NO: 188204 - DNA, 4269 bp, synthetic construct
  misc_feature 1..4269: note = Description of Artificial Sequence: Synthetic coding sequence
  source 1..4269: mol_type = other DNA
atggccaccctggcctgccgggtgcagttcctggacgacaccgacccattcaattctaccaattttccagaaccgagccgaccacctctgtttacctttcgagaggatcttgctcttgggacccagctggccggggtccacagacttttgcaggcaccgcacaaacttgatgactgtactctgcagctgtctcataacggcgcttacctagacttggaagctaccctggccgagcagagggatgaactggaaggattccaggacgacgctggccgcgggaagaaacattctatcatcctgaggacccaactgtcagtgagagtccacgcctgcatcgagaagctctacaacagctcaggcagggacctgcgccgtgccctcttttcacttaagcagatttttcaagatgataaggatctggtgcatgagttcgtggttgcagagggactaacttgtcttataaaggtcggagccgaagcagatcagaactaccagaactatatcctccgtgctcttgggcagatcatgctgtacgttgatgggatgaacggtgttattaatcgaaatgagacgatccaatggctatatactctgataggcagtaagtttcgactagtagtcaaaaccgctctgaagctcttgctggtctttgtggagtatagcgagagcaacgccccccttcttatccaggcagtaaccgcagttgatacaaaacggggtgtgaaaccatggagcaatatcatggaaattctggaggaaaaggatggagtggataccgaactactcgtgtacgctatgacgctggtgaataagactctgtcaggactgcctgaccaggatacattctacgacgtcgttgattgccttgaagagttgggcattgccgccgtaagccaacggcatctgaacaaaaaggggactgatctggacctggtagagcagctgaacatctacgaggtggcgctgaggcatgaggacggcgacgagaccacagagccccctccttcaggctgccgagacagaaggcgagccagtgtctgcagtagtggaggaggagagcatagagggctggatagacgcagaagccggcgccatagtgtgcagtcaatcaagtctacactaagtgccccaacctccccatgctctcagagcgcccctagctttaaacctaaccaggtgcgggatctacgcgaaaagtacagcaactttgggaataattcttaccactccagccgcccaagctctgggtcaagcgttcccaccactcctacatctagtgtgagcccccctcaagaagcccgcttggagcgcagctccccttcgggcttgctcactagttcattccggcagcatcaggaaagtctggctgctgagcgcgaacgtaggcgtcaggagcgggaggaacggcttcaacgcatcgagcgtgaagagagaaataagttccggtacaagtacctggaacagctggcagctgaggaacatgagaaagagcttagatcccgaagtgtgtcaaggggcagagcagacctgtccttggacctaaccagccccgccgctccagcttgtttagctcccctgagccactctccttctagttccgactctcaggaggccctcactgtgtccgcgtcttcacccggaacaccccaccatcctcaggccagcgcgggtgatcccgaacctgaatcagaggctgagccagaggcagaggcgggcgccggccaagtcgctgacgaggcaggtcaggatatcgcatccgctcatgaaggtgctgagacggaagtggagcaagcattagaacaggaacccgaggaacgagcaagtctaagcgagaaagaaaggcagaatgaaggggtgaacgagagggacaactgctccgcctccagcgtctccagctcctctagcacgttagaacgcgaagagaaggaggataaactgtctagagatcgaacaacgggcctgtggcccgctggagtgcaggacgccggcgtgaacggtcagtgtggagacatcctgaccaataaaagatttatgctggatatgctctacgcgcacaatcgaaaaagtccagacgacgaggaaaagggtgatggcgaagctggcaggacacaacaagaggctgaggctgttgctagtttagctacgcgtattagtaccctgcaggcgaatagccaaacccaggatgagtctgttagaagggtcgacgttggctgcctagacaaccgtggctcggtaaaagctttcgcggagaaattcaacagcggagatctgggccggggtagcatttctcccgatgcagaaccaaacgataaagtgcccgaaacagcacccgtgcagcccaagaccgagtccgactacatttgggatcaactgatggcaaaccctcgggagttgcgcattcaagatatggactttacagatctcggcgaggaagacgacatcgacgtgctggacgttgatctaggacatcgtgaagcaccgggtcctccccctccccctccccccaccttcctaggcctgccaccacctcctccccctccacttcttgattctatcccgccaccccctgtcccaggcaatttgctcgtcccccccccccccgtgttcaatgccccccagggactgggctggtctcaagtgccacggggccagccaaccttcaccaaaaagaagaagactataagactgttctggaacgaagtgcgaccattcgattggccctgtaagaataacaggcgctgccgggaatttttatggagcaaactagagccaattaaagtcgataccagccgactggagcacctgttcgaaagcaagtcaaaagagctgtccgtgtccaagaaaacagctgctgacggtaaaagacaggaaattatcgttcttgattcaaagcgcagcaacgcgatcaacatcggactgaccgtcctacccccacctcgcacaattaaaatcgccatccttaatttcgacgaatacgcactcaataaagaaggcatcgagaagatcctcaccatgattcccactgacgaagaaaagcaaaagattcaggaggcccagctagcgaatcccgagatacccttaggatcagcggagcagttcctcctgaccctcagcagcatttccgagttgtccgcacggttacatctctgggccttcaagatggattatgaaacaactgagaaggaggtggctgagccattgctcgatctcaaggaggggatcgaccagctggaaaataacaagacactgggcttcatacttagtacgctcctggccatcggcaactttctaaatgggactaatgccaaagcttttgagctgtcataccttgaaaaagtgccagaagtgaaggatacagtgcataagcagtctctcttgcatcacgtttgtaccatggtagtggaaaattttccagactcaagcgacctttactccgaaatcggcgccattacccggtctgccaaggttgattttgatcaactccaggataacctgtgccagatggagcgcagatgcaaagcatcctgggatcaccttaaagctatcgcaaagcatgaaatgaaacctgtgttgaaacagagaatgagtgagttcctgaaggactgcgccgaacggattattattttaaagattgttcaccgtaggattattaatagatttcactcctttctgttgttcatgggacaccccccttatgcgatcagggaggtgaacattaacaaattttgtagaatcattagcgagttcgccctggaatatagaacaactagagaacgtgtgctccagcagaagcagaagcgtgctaaccatagagagaggaataaaacgaggggcaaaatgattacagactccggaaagttctctggcagttccccagcgccaccaagccagccacagggcctctcttacgctgaagacgccgcagaacacgagaatatgaaggctgttctaaaaacatcctccccatccgtggaggacgcaacccctgccctcggagtacgcacgaggagccgggcgagcagaggaagtaccagctcatggacgatggggaccgacgactcacccaatgtgactgatgacgccgcagacgagattatggatagaatcgtgaagtctgctactcaagttccctctcaacgggtggttccaagagagcgaaaacgcagtcgggctaaccgcaagagtctacgaagaacactcaaatctggtctaacgcccgaggaagcccgcgccttgggactggtgggtacaagcgagttgcagctttag

SEQ ID NO: 188205 - DNA, 4206 bp, synthetic construct
  misc_feature 1..4206: note = Description of Artificial Sequence: Synthetic coding sequence
  source 1..4206: mol_type = other DNA
atggccaccctggcctgccgggtgcagttcctggacgacaccgacccgttcaatagcacaaacttcccggaaccgtctcggcctcccttgttcacgttccgagaggacctggcactcgggacccagctcgctggggtccaccgactcctacaggccccacataaactggatgattgcaccttgcagttgagtcacaacggtgcatacctggacctggaagcgactttggctgaacagagggatgagctcgaaggattccaggacgacgccggtagggggaaaaaacactcaataatattacggacacaactaagcgtgcgggtacacgcctgcattgagaagctctacaacagtagtggacgcgacctccgacgtgctctcttttcgttgaagcagattttccaggatgacaaagatctcgtccatgaattcgtggtggccgaaggcctgacttgtctgatcaaagtgggtgctgaggccgaccagaattatcagaactacatcctgagggctctcggccagattatgctttatgtggatggcatgaacggagtgatcaaccggaatgaaacaatccagtggctgtatacattgatcggtagcaagttccggttggtagtcaagaccgctctcaagttactcctagtgtttgtcgaatattccgagtccaacgcccctctgttaatccaggccgtcactgcagttgacaccaaacgcggcgttaaaccgtggtcaaacataatggagattttagaggaaaaagacggcgtggatacagagctgctcgtctacgccatgaccctcgtaaataagaccctctcaggcctgcccgaccaggatacattctacgatgttgttgactgcctggaggagttaggaattgccgcggtgtcgcagcgccacctaaacaagaagggcacagaccttgacctggttgaacagctcaacatctacgaagtggccctccgtcacgaagatggggatgagaccacagagcccccccctagcgggtgcagggatcggcgacgggcctctgtatgtagttcaggtggcggcgagcaccggggccttgaccgcagacgatccagaaggcattccgtgcagagcattaaatctaccttgtccgctccaactagcccatgctcacaatccgccccctcctttaaaccgaaccaagtgcgcgatctccgcgagaaatcttcccccagcggcttactgacctcctcctttcgccaacatcaagagtcgctggccgccgagagagaaaggcgccggcaggaacgagaagagaggctacagcgtatcgaaagggaggaacggaataaattctcccgcgactacctggacaagcgggaggaacagcggcaggctcgcgaggagcgctacaaatacctcgagcagctggccgcagaggagcacgagaaagagctgcgctctagaagcgttagtagagggcgggctgaccttagtctcgacttgacctcccctgccgcccccgcctgcttagctccgttaagccacagcccctccagctccgacagccaggaggcgttgaccgtcagcgcgtccagtcccggcacacctcatcacccccaggcatcagcaggcgacccagagcccgaaagtgaagccgaacctgaggccgaggcaggggcggggcaagtggccgacgaggccggccaggatatcgcttccgcacacgagggagccgagactgaagtggaacaagcactggagcaggaacccgaggaacgtgcctcacttagcgagaaagaaagacagaacgaaggggttaacgaaagagacaactgcagcgcatcgtctgtgtcaagcagtagttctactctggaacgggaggagaaggaggacaagctgagtcgcgacagaactaccggcttatggccagccggggtacaggatgcgggggtcaatggacagtgtggagatatccttaccaataagagatttatgcttgacatgctgtatgcacacaacaggaagtctcccgatgatgaggaaaaaggtgacggcgaggctggacgaactcagcaggaggctgaagcagttgccagtctggcaacccgcatctcaactctccaggccaactcccagactcaggatgagtccgtcagacgagtggacgtggggtgtcttgacaatcggggtagcgttaaggctttcgctgaaaaatttaattctggcgaccttgggaggggaagcattagtcctgatgcagagccaaatgataaggttcccgagacagccccagtgcagcccaaaacagagtcagactacatttgggaccagcttatggctaacccccgtgaactgcgcatccaagatatggatttcaccgatttgggcgaagaagacgatattgatgtgttggacgtggatttgggccaccgcgaggcacccggtcctccccccccccctccacccacatttctgggtctgccaccccctccgccaccaccgctgctggactctattccgccccctcctgtacctggcaatctcctagtgccaccccccccagtgtttaacgccccccaggggcttggctggagccaggttcccagaggccagcccaccttcacaaagaagaagaagaccattaggctgttttggaacgaggtaaggcccttcgactggccatgtaagaataatagaaggtgccgcgagtttctgtggtcaaagctcgagccaatcaaggtggatacgtcccggctagaacacctgttcgaatctaaatctaaagagctttcggtcagcaagaaaacggctgctgatgggaagcgtcaagaaataatcgtgcttgatagcaaacggtctaatgcaatcaacatcggccttaccgttttgccacctccaagaaccataaaaattgccattctcaactttgacgagtacgcactgaacaaagaaggtatcgagaaaatccttacaatgattcctactgacgaagagaagcaaaaaattcaggaggcccagctggctaatcctgaaattcccctgggcagtgccgaacagttcctcctgaccttgtcgagtatttccgaacttagcgccagacttcacctgtgggcttttaaaatggactatgaaacaaccgaaaaggaggtggcagagccgctcctcgacctgaaggagggtatcgatcagctggaaaacaataagactttaggcttcatattgtccacactgctggcgatcggaaactttctgaatggtacgaatgccaaagccttcgaactgtcttacctggagaaggtgccagaggtgaaggacactgtccacaaacagtccttgctacaccatgtgtgcactatggtcgtcgagaatttccctgactcctctgatttatatagtgagattggggctattacacgttctgcaaaagtggactttgatcagcttcaggataacctctgccaaatggagaggcggtgtaaggcttcttgggaccaccttaaggccatagcaaagcacgagatgaagccagtgctcaagcagcgcatgagtgagtttctcaaagattgcgccgagagaatcatcatcttgaaaattgtgcatcggcgaattatcaaccggttccatagtttcctgctgtttatggggcacccaccttacgctattcgggaggtgaatataaataagttctgtcgcatcatcagtgaatttgctctggagtataggacaactagagaacgggtactacagcaaaaacagaagagagctaatcaccgcgaacgcaacaaaactcgcggcaaaatgattactgactctggtaagttctcaggcagcagccccgcccccccgtcccagccgcagggcttgtcatatgccgaggacgcagcagagcatgagaatatgaaggcagtgttaaagacaagcagtccgagcgtcgaggacgcaacgcctgctctgggggtcagaaccaggtcacgagcatctcggggcagtacatcctcttggacaatgggcaccgacgactctcccaatgtcacagatgatgcggccgatgagattatggaccgaatcgtgaagagcgccacacaggttcccagtcagagagtggtacctagagagaggaaaaggagcagggctaaccgcaagtccctccgccggacactgaagagtggcctgacccctgaagaggcccgtgcactgggccttgtgggcacaagcgaacttcagctatag

SEQ ID NO: 188206 - DNA, 1053 bp, synthetic construct
  misc_feature 1..1053: note = Description of Artificial Sequence: Synthetic coding sequence
  source 1..1053: mol_type = other DNA
atggagaccaacagcagcctgcccaccaacatcagcggcggcacccctgccgtgagtgcgggctacttgtttctcgacattattacctatctcgtatttgccgtcacattcgtgcttggggttttggggaacggtttggttatatgggtcgctgggtttagaatgactcacaccgttactaccatctcttatctcaatctggcagttgctgatttctgctttacatcaaccctgccgtttttcatggtgcgcaaggctatgggcggccactggccttttggctggtttctgtgtaagttcgtctttacaatcgttgatataaatcttttcggttccgtgtttctaatcgctctaatagcattggacagatgcgtgtgcgtgctccatcctgtgtggacacagaaccacagaaccgtgtcactggccaaaaaggtgatcatcgggccttgggtaatggctctgctcctcaccctgcccgtcattatcagggtcacaacagtgcccgggaagacgggcacagtggcgtgcacgtttaattttagcccgtggacaaatgaccccaaggagcggattaatgtcgccgtagccatgctgacagtgaggggtatcattaggttcatcatcgggttttccgcccccatgagcatcgttgccgtgagctacgggctgatagccacaaaaatacacaaacagggcctgataaagtcgagtcggccacttcgtgttctctctttcgtcgccgcagcgttcttcctgtgctggtccccgtaccaggtcgtggctctgattgccactgttcgcattagggagctgctgcaaggcatgtacaaggaaattgggattgccgtcgacgtgacctcggccctagccttctttaacagttgtttaaaccctatgttgtacgtatttatgggccaggacttccgcgagcgtttgatccacgctctcccagcctccctggaacgggccctcactgaagactctacacaaacctcagatacagccacaaactccacactaccgagcgctgaagtggagttgcaggcaaagtag

SEQ ID NO: 188207 - DNA, 1053 bp, synthetic construct
  misc_feature 1..1053: note = Description of Artificial Sequence: Synthetic coding sequence
  source 1..1053: mol_type = other DNA
atggagaccaacagcagcctgcccaccaacatcagcggcggcacccccgctgtttctgctggatacctgtttttggacattatcacctacctggtcttcgctgtgacattcgtgctgggggtgcttgggaatggactggtcatttgggttgcaggctttaggatgactcataccgttactaccatatcctacctcaacctagccgtcgccgatttctgcttcacttctactctgcctttttttatggtccgcaaggccatggggggacactggcctttcgggtggttcttgtgtaaatttgtttttacgatagtggatatcaacctgtttggttcagtgttcttgatagcactgatcgctctagatcggtgcgtgtgcgtgctgcaccccgtctggacacaaaatcaccgcacagtcagcttggcaaaaaaagtcatcatcgggccttgggtgatggctctcttactgactttacctgtgataattcgagttaccaccgtccccggaaaaactggcaccgtggcctgcacatttaacttcagcccctggaccaacgatccgaaggaacggatcaatgtagctgtcgctatgctaaccgtgagaggcatcatccgatttattatcggcttttctgccccaatgtcgatcgtggctgtatcctacggcttgattgcaaccaaaatacacaagcagggcctaatcaaaagcagcagaccactacgggttctgtctttcgtcgccgctgcatttttcctttgttggtccccgtatcaggtggtcgcactgattgctaccgtccgaattcgcgagttgctccaaggcatgtacaaggagatcggcattgctgtggatgtgacgtctgctctcgccttcttcaactcttgcctcaatcccatgctgtacgtgttcatgggccaggacttccgcgagaggttaatccatgcactgcctgcgtcacttgaacgggctctgacggaagactccacacagacatccgataccgccactaattcgacccttccatccgccgaggtcgagctgcaggctaagtag

SEQ ID NO: 188208 - DNA, 1056 bp, synthetic construct
  misc_feature 1..1056: note = Description of Artificial Sequence: Synthetic coding sequence
  source 1..1056: mol_type = other DNA
atggagaccaacttcagcacccccctgaacgagtacgaggaggtgagctacgagtccgcagggtacactgttctccgtatcctaccgttggttgtgttgggcgtgacttttgtgttgggtgtccttgggaatgggttagtgatttgggtcgctggctttcgaatgacaagaacagtcaccaccatctgctatctcaacctggccttagcagacttttcgtttaccgccactctgcctttcctcattgtgtccatggctatgggagaaaagtggccatttgggtggttcctttgtaagctgatccacattgtggtagacataaacttattcggtagtgtttttttaataggctttattgcactggacagatgcatttgcgtactgcaccccgtgtgggcccaaaatcaccggacagtgagcctggctatgaaggtaattgtgggcccctggatcttggccttggtccttacacttccagtgttcctgtttctcaccaccgtgaccatccctaacggagatacctactgcacttttaacttcgcctcatgggggggaacccccgaggaaagattaaaggtggcgattacgatgctgactgccagagggattattagattcgtgatagggtttagcttgcctatgtcaatagtggccatttgctatggattgattgcagctaagattcataagaaggggatgattaagtcaagccggcctttacgggtcctaactgccgtcgtagcctcttttttcatatgttggttcccattccaacttgtcgccctgttaggtaccgtttggctgaaggaaatgctgttctatgggaagtacaaaattatcgatatcttagttaatcctacgtcgagtttagcttttttcaattcttgcctcaaccctatgctgtatgttttcgtcggtcaggactttcgcgaacgtctcattcatagtctgcctacatctttggaacgggccttgtccgaggattctgccccaactaatgacactgcggccaatagcgccagcccacctgccgaaaccgaactgcaagctatgtag

SEQ ID NO: 188209 - DNA, 1056 bp, synthetic construct
  misc_feature 1..1056: note = Description of Artificial Sequence: Synthetic coding sequence
  source 1..1056: mol_type = other DNA
atggagaccaacttcagcacccccctgaacgagtacgaggaggtgtcctatgaatctgccggatataccgtgttgcgaatcttgcctctggtggtgctgggagtcactttcgtcctgggcgtgctcggaaacggtttggtcatttgggtcgccgggttccgaatgactcgcactgtcacgacaatttgctatctcaacttggcactggcggacttcagcttcacagccacccttccctttttgatcgtgtccatggcgatgggcgaaaagtggcctttcggctggtttctttgtaaactaatacacatagtggtggatatcaacctgttcggatctgttttcctgattggatttatcgccctcgacagatgcatttgtgtgctgcacccagtgtgggcacagaatcacaggacagtgagtctggctatgaaggtcattgtgggaccatggattctggcactcgttctgaccctgcctgtgtttctctttcttactacagtgaccattccgaacggtgatacttactgcactttcaacttcgctagctggggcggaactccggaagagcggctgaaggttgctataaccatgcttactgccagggggataattaggttcgttattggattttctctgccaatgtctatcgttgcaatttgttacggcctgatcgccgctaagatccacaagaagggaatgattaaaagctcacgacctcttcgcgtactgaccgcagtagtggctagcttctttatttgttggttcccattccagctggtcgctctgctagggactgtgtggttgaaagagatgctgttctatgggaagtacaagattatcgatatcctggtcaatcccacatcaagtctggcattttttaactcatgtttaaaccccatgctgtatgtgttcgttggccaagatttccgcgagcgcttaattcattcccttcctacctcactggagagagcgctgagcgaggactctgcaccgaccaatgacaccgccgctaattctgcttctcccccggcagaaactgaacttcaggcaatgtag

SEQ ID NO: 188210 - DNA, 1062 bp, synthetic construct
  misc_feature 1..1062: note = Description of Artificial Sequence: Synthetic coding sequence
  source 1..1062: mol_type = other DNA
atggagaccaacttcagcatccccctgaacgagaccgaggaggtgctcccagagcccgcaggccacactgttttgtggatatttagcctgctggtgcacggggtcacattcgtgtttggggtgttaggaaatgggttggtgatctgggtggctggatttaggatgacacggacagtgaataccatctgctacctgaacctagccctcgcagatttctctttttctgccatactgcctttccggatggtgtctgtcgcaatgcgcgagaagtggcccttcggaagcttcctatgtaaactggtgcacgtgatgatcgatattaatctgttcgtgtctgtctatctgatcaccattatcgccctggatagatgcatttgcgtgctgcacccagcatgggcccagaaccaccggaccatgagtttagcaaaaagggttatgactggcttatggatattcacaatagtcctcaccctgcccaatttcatcttttggacaacgatttcaaccaccaacggggatacatattgtatattcaatttcgccttctggggtgacaccgctgtggagcgcctgaatgttttcattactatggcaaaagtgtttcttattctgcacttcatcatagggtttagtgtgcctatgtccataatcacggtgtgttacggcattatcgccgctaaaatacatcgtaatcacatgattaaatcttcccggccactgcgcgtgttcgccgctgtggtggcttcctttttcatttgctggtttccttatgagttgatcggaattctcatggctgtctggttaaaggagatgctcctcaatggtaaatataaaattattcttgtgttgattaatccaactagtagtcttgccttttttaattcttgcctcaatcccatcctctatgtgttcatggggaggaacttccaggagagacttataaggagtctgcctacgagcttagagagagcactcaccgaagttcccgatagtgcacagacatcaaacactgatacaacttccgcctcccccccagaggaaactgaactccaggcaatgtag

SEQ ID NO: 188211 - DNA, 816 bp, synthetic construct
  misc_feature 1..816: note = Description of Artificial Sequence: Synthetic coding sequence
  source 1..816: mol_type = other DNA
atgttccgggacttcggcgagcccggccccagcagcggcaacggcggaggatacggaggccctgcacaaccaccggctgcagctcaggcagcccagcagaagtttcacctcgttccttccatcaacacgatgtcaggtagccaagaactgcagtggatggttcagccccatttcctggggccgagttcctatcccaggcctttaacctacccacagtatagcccccctcagcctcgacctggagtgatacgtgctctgggccccccccctggcgtcaggcgacgtccgtgtgagcagattagcccggaagaagaagagcgacgccgggtacgccgggaaagaaacaaattagccgctgcaaaatgcagaaatagacgcaaggagctcacggacttcctccaggctgaaaccgataagctcgaggacgaaaagtcaggcttacagcgtgagatagaggaactgcaaaagcagaaagagcggctggaattagtcctggaggcacatagacccatctgcaaaattcctgagggagccaaggagggtgatacgggttcaacatcgggaacctcctctccacccgctccatgccgccctgtcccatgcatctcactgtccccaggaccagtactcgaaccagaggcccttcatacccccactctgatgaccacaccgtcactaactccattcaccccctctttggtgtttacatacccatcaactcccgagccctgtgcgagcgcccaccgtaaatcctcctcttcctctggagaccccagcagtgatcctttgggctctccgacactgctggctctttag

SEQ ID NO: 188212 - DNA, 510 bp, synthetic construct
  misc_feature 1..510: note = Description of Artificial Sequence: Synthetic coding sequence
  source 1..510: mol_type = other DNA
atgttccgggacttcggcgagcccggccccagcagcggcaacggcgggggctacggggggcccgcccagccccctgcagccgctcaggccgcccagcaggagactgacaagttggaagacgaaaagagtggacttcaacgcgagatcgaagaactacagaaacagaaggagagactggagttagtcctggaggcacataggcctatttgcaagataccagagggtgccaaagagggagatacagggagcacttctgggacttccagcccacctgccccctgccggcccgtgccctgcatttctctctccccaggccccgttcttgagcccgaggcactccacacccctactctgatgactactccctccctcaccccttttacgcccagcctggtgtttacttatcccagcacccccgaaccctgcgctagcgcccatcgaaaatccagctcttccagcggcgacccctcctcagaccccctgggctcccccactttgctggctctgtag

SEQ ID NO: 188213 - DNA, 351 bp, synthetic construct
  misc_feature 1..351: note = Description of Artificial Sequence: Synthetic coding sequence
  source 1..351: mol_type = other DNA
atgttccgggacttcggcgagcccggccccagcagcggcaacggcggtggctatgggggacccgcccagccacccgccgctgcccaggcggcgcaacagaaattccacttggttccctctattaataccatgagcggtagccaggagctgcagtggatggtgcagccccacttcctgggcccctccagctacccaagacccttgacttatccccaatactctcccccgcagccaaggcctggtgtgatcagagcattaggtcctccaccaggagttcgtcgccggccttgtgagcagatcagccctgaagaagaggagagttggcagccgagggattttgtggatccatag

SEQ ID NO: 188214 - DNA, 981 bp, synthetic construct
  misc_feature 1..981: note = Description of Artificial Sequence: Synthetic coding sequence
  source 1..981: mol_type = other DNA
atgtaccaggactaccccggcaacttcgacaccagcagccggggcagttctggctctcccgcccatgctgaatcttatagtagcgggggcggcggccagcaaaagttcagagtggacatgcccgggtcaggaagcgccttcattcccaccatcaatgccataaccaccagccaagacctacaatggatggtccagcctacggtcatcacatcgatgagcaatccttacccacggagccatccctacagcccactccccggccttgcttctgtcccggggcatatggccctgccccgcccaggtgtgatcaagaccatcggcactacagtgggacgtcgcaggagggacgaacagctttctcctgaagaagaagagaagagacgaatacgaagggagaggaacaagctcgccgctgctaaatgcaggaatcggcggcgagagctaaccgagaagcttcaagctgaaacagaggagctggaggaggagaagtcgggactgcagaaagaaatcgccgagctgcaaaaagagaaagaaaagctggagttcatgctggtcgcgcatggcccagtctgtaagattagtccagaggagcggagaagcccaccagctcctggtctgcagcccatgcgttcaggtggaggctcggttggtgcagtggtggtaaaacaggagcccctggaagaggacagccccagttcatcctccgctggcctcgataaagcccaaagatccgtgataaaaccgatctctattgccggcgggttttatggagaagaacctctacacacacctatagtggtgacttccacacctgcagtaacccccggaacttccaatcttgtctttacataccccagcgtgctggaacaggaatcaccagctagcccttccgaatcttgctctaaagcacatagacgctcatccagcagcggcgaccagtcgtcagattccctgaacagcccaactctgttggccttatag

SEQ ID NO: 188215 - DNA, 864 bp, synthetic construct
  misc_feature 1..864: note = Description of Artificial Sequence: Synthetic coding sequence
  source 1..864: mol_type = other DNA
atgcccggcagcggcagcgccttcatccccaccatcaacgccatcaccactagccaagatttgcagtggatggtgcagcccacggtcattaccagtatgagcaacccttatcctcgcagtcatccctactctcctctgccaggtctcgcaagtgttccaggccacatggctctcccacgaccgggagtgatcaaaactattggcaccactgtgggacgtcgccgacgtgatgagcaactttctccagaggaggaggagaaacggcggattcgacgggaacggaataagctcgccgccgccaagtgcagaaatcgtagacgagagctgaccgaaaagttgcaagccgagacagaagagctggaagaggaaaaaagcggactgcagaaggaaatcgcagaattacaaaaggagaaagaaaagctggaattcatgttggttgctcacggccccgtatgtaagatctcccctgaggagcgccgaagtcccccagctcccggactgcagcctatgcgctctggggggggttctgtcggcgcggtggtcgtgaaacaggagcccctggaagaagacagtcctagctcttcctcggcgggtctcgacaaagctcagaggtctgttatcaaaccaatctctattgccggaggcttctacggagaagagcccctgcacaccccgattgtagtgacctctacacccgctgtgacaccaggcaccagtaacttagtttttacgtatccatcagtcctggagcaagagtcccccgctagccccagtgagtcttgcagcaaggcccaccgccgatccagctcttctggtgaccagagctcggattctctgaacagcccgaccttgttggccctttag

SEQ ID NO: 188216 - DNA, 972 bp, synthetic construct
  misc_feature 1..972: note = Description of Artificial Sequence: Synthetic coding sequence
  source 1..972: mol_type = other DNA
atggccgagaagttcgactgccactactgccgggaccccctgcaggggaaaaagtacgtgcagaaggacggacatcattgttgcttgaaatgctttgataagttctgcgccaacacgtgtgtggagtgtagaaaaccaatcggcgcagattctaaggaagttcattacaaaaaccgcttctggcacgatacatgcttcagatgtgccaagtgcctgcatcctcttgccaatgagactttcgtggccaaggacaacaagattttgtgtaacaagtgcactaccagggaagattcacccaaatgtaagggttgttttaaggccatcgtagctggcgatcaaaacgtggagtataagggcactgtgtggcacaaagactgtttcacttgttccaattgtaaacaggttattggtactggttcatttttcccaaaaggggaagatttctattgtgtgacgtgtcacgaaaccaagtttgccaaacactgcgtgaagtgcaataaagccatcacaagtggcggaatcacctaccaggatcagccctggcacgcagattgtttcgtgtgcgtaacttgctcaaagaagctcgcggggcagcgctttacagccgtggaggaccagtattattgcgtcgactgttataaaaacttcgtggcaaagaagtgcgcggggtgcaaaaatcccattacaggcaagcggactgtatctagggtttcacatcctgtctccaaggctagaaaaccacctgtatgtcacgggaaacgactgcccctaaccttgtttccatcagccaacctgcgtggcaggcacccaggcggtgaacgtacctgtcctagctgggtcgtagtcctctatcgcaagaaccgatctcttgcagctccaaggggcccaggactggtgaaagcccccgtgtggtggcccatgaaggacaatcccggaaccaccacagccagcaccgctaagaatgctccctag

SEQ ID NO: 188217 - DNA, 774 bp, synthetic construct
  misc_feature 1..774: note = Description of Artificial Sequence: Synthetic coding sequence
  source 1..774: mol_type = other DNA
atggccgagaagttcgactgccactactgccgggaccccctgcagggcaaaaagtacgtgcaaaaggacggacaccactgttgcctcaagtgctttgataagttctgcgctaacacatgcgtggaatgcagaaaaccgatcggtgctgattcgaaggaggtccattacaagaacaggttttggcatgatacctgcttccgctgcgccaagtgcctccaccccttagctaatgagacgtttgttgcaaaggataataagattctttgtaacaagtgtaccacccgagaagattcacccaagtgtaaggggtgcttcaaagctatcgtggcaggggatcagaacgtggagtacaagggcaccgtgtggcataaagattgctttacctgtagtaactgtaaacaggtgattggtacaggcagcttttttccaaaaggggaggacttttattgtgtaacctgccatgaaacaaagtttgccaaacattgtgtgaaatgcaacaaagcaataacttcggggggcataacctatcaggaccagccgtggcacgcagactgttttgtgtgtgtgacatgtagcaaaaagctcgctggacagcgatttactgctgtcgaggatcagtattactgtgtagactgctataaaaattttgttgccaaaaaatgtgctggctgtaaaaatccgattacggggtttggaaaaggtagctctgtagtcgcgtacgagggacagtcatggcatgactactgctttcattgcaagaaatgcagcgtgtag

SEQ ID NO: 188218 - DNA, 633 bp, synthetic construct
  misc_feature 1..633: note = Description of Artificial Sequence: Synthetic coding sequence
  source 1..633: mol_type = other DNA
atggccagccaccggcacagcggccccagcagctacaaggtgggcacaatggccgaaaagttcgactgtcattattgccgagatcccctccagggtaagaaatatgtacagaaggacggccatcattgctgcttgaagtgctttgacaaattttgtgcaaacacctgtgtagagtgtcgaaaacccattggggctgactcaaaagaagtgcattacaaaaaccggttctggcacgatacttgttttcggtgtgccaagtgcctgcaccccctggccaatgaaacattcgtcgccaaagacaataagattctgtgcaataagtgcacaactcgggaagactctcctaagtgcaaagggtgcttcaaagcaatcgttgcgggggaccagaatgtagagtacaaaggcacggtatggcacaaggactgctttacctgctctaactgtaagcaggttatcggcactgggagcttctttcccaagggggaggatttctattgcgtgacatgccacgagaccaagtttgctaaacattgtgtgaaatgcaataagggcctggtgaaggcccccgtgtggtggccaatgaaagacaatccggggaccactactgcttcaacagcaaaaaacgcaccgtag

SEQ ID NO: 188219 - DNA, 891 bp, synthetic construct
  misc_feature 1..891: note = Description of Artificial Sequence: Synthetic coding sequence
  source 1..891: mol_type = other DNA
atggccagccaccggcacagcggccccagcagctacaaggtgggcaccatggcagagaaattcgattgtcactactgccgcgacccactgcaaggaaaaaaatatgtccagaaggacggccatcactgctgcctcaagtgttttgataagttctgtgcaaatacctgcgtcgagtgccggaagccaatcggggctgatagcaaagaggtgcactacaagaaccgattctggcacgacacatgtttccgctgcgcaaagtgtttacaccccttagcaaatgagaccttcgtcgctaaggacaacaagatcctatgcaacaagtgtactacaagggaggactcacccaagtgtaaagggtgttttaaggcgattgtggcgggggaccaaaacgtggaatacaaaggcaccgtatggcacaaggattgctttacatgttctaattgtaagcaggttataggcacaggctcgttcttcccaaaaggagaagacttctattgcgtcacttgtcacgagaccaaattcgccaaacactgcgtgaagtgtaataaagccataacctcaggcggcattacttaccaagatcagccttggcacgcagactgtttcgtgtgtgtgacctgctctaaaaaattagccggtcaaagatttacggcagttgaagaccagtactattgcgtcgattgctataagaattttgtggctaagaaatgtgcaggctgcaaaaaccctataaccgggttcggcaagggaagttcagtggtggcatacgaagggcagagttggcatgattattgtttccactgcaagaagtgttccgtgaatcttgccaataaacggttcgtgtttcaccaagaacaggtgtattgccctgactgcgccaaaaagctgtag

SEQ ID NO: 188220 - DNA, 843 bp, synthetic construct
  misc_feature 1..843: note = Description of Artificial Sequence: Synthetic coding sequence
  source 1..843: mol_type = other DNA
atggccgagaagttcgactgccactactgccgggaccccctgcaggggaagaaatatgtccagaaggatgggcaccactgttgcctcaagtgctttgacaagttctgcgctaacacgtgtgtcgagtgcaggaagcctattggcgctgacagcaaggaagtccactacaagaataggttctggcatgatacttgcttcagatgcgccaaatgcttgcatccccttgctaatgaaacattcgtggccaaggataataaaatcctctgcaataagtgtacaaccagagaagactcaccgaagtgtaagggctgcttcaaggctatcgttgcaggtgatcagaacgttgagtacaaaggcacagtctggcataaggactgctttacttgttctaattgtaaacaggtgattggaactggcagttttttcccgaagggggaggacttttactgcgtcacctgccatgagaccaaatttgccaagcactgcgtgaaatgcaataaggcaattacctctggcggaattacataccaagatcaaccctggcacgccgactgtttcgtctgcgtaacctgttcaaagaaattggctggccaacggttcacggcagttgaggaccagtactactgcgtcgactgctacaagaacttcgtagccaagaagtgcgccggttgcaagaaccccattacagggtttggcaaagggagctcagttgtcgcttatgagggacagtcttggcacgactactgcttccattgcaaaaagtgcagtgtcaacttagcgaacaagagatttgtcttccatcaggagcaggtgtactgtcctgactgcgcaaagaaactgtag

SEQ ID NO: 188221 - DNA, 843 bp, synthetic construct
  misc_feature 1..843: note = Description of Artificial Sequence: Synthetic coding sequence
  source 1..843: mol_type = other DNA
atggccgagaagttcgactgccactactgccgggaccccctgcagggaaagaagtatgtgcagaaagacggccatcattgctgcctcaagtgctttgataagttttgcgccaacacctgcgtggaatgtcgcaaaccgatcggcgctgatagcaaagaggtgcattacaaaaacaggttttggcacgacacctgcttccgctgcgcgaagtgtctgcaccctttggccaatgagactttcgtggctaaagacaataagattctctgcaacaaatgcaccactcgggaagactcccctaagtgtaagggctgcttcaaggccattgtagcaggcgatcaaaacgtggagtataaaggtacagtgtggcataaagattgcttcacatgtagtaactgtaagcaagtcatcggtaccggctcattcttcccaaagggggaagacttttattgtgtgacatgccatgagacgaagttcgccaagcattgcgtgaaatgcaacaaagcgattacctccggcggcataacctaccaagaccagccttggcacgcagattgctttgtgtgtgtaacatgcagcaaaaaattggccgggcaacgtttcactgcggtcgaggaccagtattactgtgtcgattgttacaaaaatttcgtggccaaaaaatgcgcgggctgtaagaacccaatcacgggcttcggcaaaggttcctccgtggttgcttatgaaggacagtcctggcacgactactgctttcattgtaaaaaatgttcagtcaacctggcaaacaagcgatttgtgttccaccaggagcaagtgtactgtccagactgtgcgaagaagctgtag

SEQ ID NO: 188222 - DNA, 972 bp, synthetic construct
  misc_feature 1..972: note = Description of Artificial Sequence: Synthetic coding sequence
  source 1..972: mol_type = other DNA
atggccgagaagttcgactgccactactgccgggaccccctgcaggggaagaaatatgtgcagaaagacggacaccactgttgcctcaaatgttttgataaattttgcgcaaacacatgcgttgaatgcagaaagcctatcggtgccgactcgaaagaagtccactacaagaataggttttggcatgacacttgttttcggtgcgccaagtgtttacacccactggcaaacgagacatttgtggccaaagataataagatcttatgcaataagtgcaccacccgtgaggactccccaaaatgcaagggctgctttaaggcaattgtagccggcgaccagaatgtcgaatacaaagggacagtctggcacaaggattgttttacttgtagtaactgtaaacaggtgatcggaactgggagcttcttccctaagggagaagatttctactgcgttacttgtcacgagacaaagtttgcaaaacactgtgtgaagtgcaacaaagctatcacctcagggggaatcacttaccaagaccaaccatggcatgctgactgcttcgtatgcgtcacgtgtagcaagaagctggccggccagcggtttacagcagtggaggatcagtattattgcgtagattgctacaaaaacttcgtcgccaagaagtgtgcgggatgtaaaaaccccatcacgggcaagcgcacggtgagcagggtgagccatcccgttagcaaagcccggaaacccccagtgtgccatgggaagagactgcccctcaccctgtttcctagtgcaaaccttcgcggcagacacccagggggagagcgcacctgcccatcctgggttgttgtcctttaccgtaagaacaggtctcttgcggctcctcgcgggccaggactagtgaaggcacccgtatggtggcccatgaaggataaccccggcactaccaccgcctccacagcgaaaaatgctccatag

SEQ ID NO: 188223 - DNA, 615 bp, synthetic construct
  misc_feature 1..615: note = Description of Artificial Sequence: Synthetic coding sequence
  source 1..615: mol_type = other DNA
atggccgagaagttcgactgccactactgccgggaccccctgcagggtaagaagtacgtgcagaaggacggacatcactgttgtctgaagtgtttcgacaaattttgcgctaacacctgtgtggaatgccggaagccaatcggcgcagactccaaggaagtccattacaagaatcgattctggcacgatacctgtttccgttgcgcaaaatgtctgcatcccctggccaatgagaccttcgtggctaaagacaataagattttgtgcaataaatgtaccacccgtgaggattccccaaagtgcaagggctgctttaaagcaatcgtggccggcgaccagaacgtcgagtacaagggcactgtttggcacaaggactgctttacatgctctaattgcaagcaggtgatcggcacaggcagttttttccccaaaggcgaggacttctattgcgttacctgtcatgagaccaaattcgccaaacattgtgtaaaatgcaacaaagcaattacatccggcggtatcacataccaggaccagccctggcacgctgattgtttcgtctgtgtgacttgcagcaagaaactagctggccagagattcacagctgtggagtag

SEQ ID NO: 188224 - DNA, 624 bp, synthetic construct
  misc_feature 1..624: note = Description of Artificial Sequence: Synthetic coding sequence
  source 1..624: mol_type = other DNA
atggccgagaagttcgactgccactactgccgggaccccctgcagggcaagaagtacgttcagaaggatggccaccactgctgcctgaaatgtttcgacaaattttgcgccaatacctgcgtcgaatgtcggaagcctatcggcgcagattcaaaagaggtccactacaagaatcggttttggcacgatacctgtttccggtgcgctaagtgcctgcatcccctggcaaacgagactttcgtggctaaagacaacaaaattctgtgcaataagtgtaccacaagagaggattcgcctaagtgtaaaggctgttttaaggctattgtggcaggagaccaaaacgtggagtacaagggtaccgtgtggcacaaagattgtttcacatgtagcaattgtaagcaggtgatcggcacgggatccttctttcctaagggggaagatttctattgtgtgacctgtcacgaaactaagtttgcaaagcattgcgtgaagtgtaataaagcaatcaccagcgggggaattacctaccaagaccagccttggcatgcagattgcttcgtttgtgtcacctgctccaagaagttggccggccaaaggttcaccgctgttgaggaccagtactag

SEQ ID NO: 188225 - DNA, 426 bp, synthetic construct
  misc_feature 1..426: note = Description of Artificial Sequence: Synthetic coding sequence
  source 1..426: mol_type = other DNA
atggccgagaagttcgactgccactactgccgggaccccctgcagggaaagaaatatgtccagaaagacggccatcactgttgcctcaaatgtttcgacaaattctgtgctaacacttgcgtcgaatgcagaaaaccgataggagccgacagtaaggaggtccattacaaaaacaggttctggcatgacacttgttttagatgcgcaaaatgcctccatccgttagcaaatgagacatttgtggctaaggataataagatcctctgtaacaagtgtaccacccgcgaagacagtccaaaatgtaaaggttgctttaaagctatcgttgcaggtgaccagaatgtggagtataaaggaaccgtgtggcacaaagactgctttacgtgttcaaactgtaagcaagttattggcacaggatctttctag

SEQ ID NO: 188226 - DNA, 624 bp, synthetic construct
  misc_feature 1..624: note = Description of Artificial Sequence: Synthetic coding sequence
  source 1..624: mol_type = other DNA
atggccgagaagttcgactgccactactgccgggaccccctgcaggggaagaaatacgtgcaaaaggatggccaccactgctgccttaagtgttttgataaattttgcgcaaacacatgcgtggagtgcagaaaacctattggcgctgatagcaaggaagtgcattacaagaaccgattttggcatgatacttgcttcaggtgcgctaagtgcctgcaccccctcgccaacgaaactttcgtagcaaaagataataaaatcctttgtaataagtgcaccacccgcgaggattctccgaagtgcaaaggctgttttaaagccattgtggccggggatcagaacgtcgagtacaagggaacggtgtggcataaggactgtttcacatgttccaattgcaaacaggtaatcggcactgggtcatttttccccaagggtgaagatttctattgtgtcacatgtcacgagacaaagttcgcaaagcattgtgtcaaatgcaataaggcaattacaagcggtggtataacctatcaggatcaaccctggcacgcagattgttttgtgtgcgtgacctgttcaaagaaactagctggccagcggttcaccgctgtggaggaccagtattag

SEQ ID NO: 188227 - DNA, 963 bp, synthetic construct
  misc_feature 1..963: note = Description of Artificial Sequence: Synthetic coding sequence
  source 1..963: mol_type = other DNA
atgagccacttcatcctgcggcacctgggcagctgcttccagccctatccagcctttgcggaatacatattgtccgctacacacccagcatcgggtcctagttcttacaaggtcggaacaatggccgaaaagttcgactgccattattgtcgggaccctctgcaaggcaaaaagtatgtccagaaggatggccaccactgctgcttgaagtgctttgacaaattttgtgcaaacacgtgtgttgagtgccgtaaacccattggcgctgacagcaaggaagtgcactacaagaaccgattctggcacgatacatgctttaggtgtgctaagtgtttgcatcccctggcaaacgaaacattcgtagcaaaggataacaagattctgtgcaacaagtgcacaactcgagaggattcccctaaatgcaaggggtgcttcaaggccatcgttgcgggtgaccagaacgtggaatacaaggggacggtgtggcacaaggattgcttcacctgctccaattgtaaacaggtgataggtacaggatcattctttccaaaaggagaagatttctactgcgtgacgtgccatgagaccaaatttgctaaacattgcgtgaagtgtaataaggccataacttctgggggaatcacataccaggatcaaccatggcatgcggattgctttgtgtgcgtgacgtgcagtaagaagctggccggccaacggtttacagctgtggaggatcagtattattgcgtggattgctacaagaatttcgtggccaagaaatgtgccgggtgcaagaacccaattaccggatttggaaaaggctccagcgtagtggcgtacgaaggacagtcttggcacgactattgctttcactgcaagaagtgctctgtgaacctcgcgaataaaagattcgtgtttcaccaggaacaggtgtactgtcccgattgcgccaaaaagctatag

SEQ ID NO: 188228 - DNA, 618 bp, synthetic construct
  misc_feature 1..618: note = Description of Artificial Sequence: Synthetic coding sequence
  source 1..618: mol_type = other DNA
atggccgagaagttcgactgccactactgccgggaccccctgcagggaaaaaagtacgttcagaaggatgggcatcactgctgcctgaagtgtttcgacaagttttgtgccaacacctgcgtggaatgcagaaaacctatcggggcagattctaaggaggtgcattacaaaaacagattctggcatgacacatgcttccgttgcgccaagtgtctgcatccattggcgaacgaaacttttgtcgcaaaagacaacaaaattctctgtaacaagtgcactacgagggaggattcaccaaagtgcaagggatgctttaaagctattgtggcgggcgatcaaaacgttgaatacaaaggcacggtttggcacaaagactgttttacatgctcaaactgcaagcaggtgattgggacaggaagttttttcccgaagggtgaggacttctactgtgtgacctgccatgaaacaaagtttgccaaacactgtgttaagtgtaataaggcgattacatccggaggaattacatatcaagaccagccgtggcatgccgattgctttgtgtgcgtcacgtgcagtaagaaactcgccggccagagattcacagctgtggaagattag

SEQ ID NO: 188229 - DNA, 468 bp, synthetic construct
  misc_feature 1..468: note = Description of Artificial Sequence: Synthetic coding sequence
  source 1..468: mol_type = other DNA
atggccgagaagttcgactgccactactgccgggaccccctgcagggaaaaaagtacgtgcaaaaggacgggcaccactgttgtctcaaatgtttcgacaaattttgtgctaatacttgtgtggagtgccggaaaccaattggggcagattctaaagaggtgcactacaaaaaccggttctggcacgatacttgtttccgctgtgctaaatgcctgcaccctctcgccaatgaaactttcgttgccaaagataacaagatcctctgtaacaaatgtacaacccgggaagattccccaaagtgcaaggggtgtttcaaagctattgtcgccggagaccagaatgtcgaatataaaggcactgtctggcataaagattgtttcacatgcagcaattgcaaacaagtgatcgggacgggctcattcttccccaaaggtgaggacttttactgcgtcacctgccacgagtag

SEQ ID NO: 188230 - DNA, 843 bp, synthetic construct
  misc_feature 1..843: note = Description of Artificial Sequence: Synthetic coding sequence
  source 1..843: mol_type = other DNA
atggccgagaagttcgactgccactactgccgggaccccctgcagggcaaaaagtacgtccagaaggatggtcaccactgttgtcttaagtgctttgacaaattctgtgccaatacctgcgtcgagtgcaggaaacccatcggagccgacagtaaggaggttcactataaaaacaggttctggcacgacacatgtttcaggtgcgccaagtgtctgcacccccttgctaacgaaactttcgtggcaaaggataacaagattttgtgcaacaagtgtaccactcgcgaagactctcctaaatgcaagggctgtttcaaggctatcgtggcaggggatcagaacgtggagtataagggaaccgtgtggcacaaagactgtttcacctgttcaaactgcaagcaagtcattgggactggctcttttttccctaagggcgaagatttttattgtgtcacctgccacgaaacaaagttcgcaaagcactgtgttaagtgtaacaaggccatcaccagtggtggcatcacctaccaggaccagccttggcatgctgattgcttcgtctgtgtgacatgctccaagaaactggctggacagagatttacagccgtggaggaccaatattactgtgtggactgctataagaattttgtcgccaaaaagtgcgccgggtgcaaaaatcccatcactgggtttggcaagggaagctcagtcgtggcctacgaggggcaaagctggcatgactattgcttccattgcaagaaatgttcagtgaatctggccaacaagagatttgtgtttcatcaggagcaggtttattgtcctgattgcgctaagaagctctag

SEQ ID NO: 188231 - DNA, 783 bp, synthetic construct
  misc_feature 1..783: note = Description of Artificial Sequence: Synthetic coding sequence
  source 1..783: mol_type = other DNA
atggccgagaagttcgactgctgcctgaagtgcttcgacaagttctgcgcaaacacctgcgtcgaatgtcggaagcctataggcgctgattctaaagaagtacactacaagaaccgcttctggcatgacacttgcttccggtgtgctaaatgtctacaccccctggctaatgagacattcgttgcaaaagataacaaaatactgtgcaacaagtgcaccacaagggaagactcaccaaaatgcaagggctgtttcaaggccattgtagcaggggatcagaacgttgagtataaaggcacggtgtggcacaaagactgctttacctgtagcaactgcaaacaggttatcgggactgggtcattcttcccgaagggtgaggatttctattgcgtcacgtgtcatgaaaccaaatttgcaaagcactgcgtcaaatgtaataaagctattacttctggaggaataacctaccaagatcagccctggcacgccgactgtttcgtctgcgtgacatgctccaagaagctggctggacagcgcttcacagctgtagaagaccagtattattgcgtggactgttataagaactttgtggctaaaaaatgcgccggctgcaagaatcctatcaccggcttcggcaagggcagttcagtggtcgcatacgaaggccaatcctggcacgattactgcttccattgtaagaagtgcagcgtcaatctcgctaacaagagatttgttttccaccaggagcaggtgtactgccctgactgtgccaaaaagctgtag

SEQ ID NO: 188232 - DNA, 930 bp, synthetic construct
  misc_feature 1..930: note = Description of Artificial Sequence: Synthetic coding sequence
  source 1..930: mol_type = other DNA
atgaccttctacgtggccagcctggccctggagctgatctggatgctgtcctcccctgccggtccaagttcctacaaggtgggaacaatggccgagaaatttgactgtcactattgcagggacccattgcagggtaagaagtacgtacaaaaggacggacaccactgctgcctaaaatgctttgacaaattctgcgcaaatacctgtgttgaatgccgcaagccaattggcgctgattccaaggaggtgcattacaaaaataggttttggcatgatacttgcttcaggtgtgctaaatgcctgcatcctctggcaaacgagacctttgtggccaaagataacaaaatcttgtgtaacaagtgtacaactcgggaggattctcctaaatgcaaggggtgttttaaagctatcgttgcaggagaccagaacgttgaatacaagggaacagtttggcacaaggattgctttacatgctctaattgtaaacaggtgatcggaacgggatccttcttcccaaaaggagaggacttttactgcgtgacatgtcacgagaccaaattcgccaagcactgtgtcaagtgtaacaaggccatcacctccggaggaatcacataccaggatcagccttggcatgcagactgttttgtctgcgtaacttgtagtaagaaactggccggtcagagatttacagcagtggaagaccaatactactgcgtggattgttacaagaattttgtggccaagaagtgtgccggctgcaaaaatccaatcacagggttcggaaaggggagctctgtcgtggcttacgagggacagtcgtggcatgattattgcttccactgtaagaagtgttccgtgaacctggcaaataagcgattcgtctttcatcaggaacaggtgtactgtccagattgcgccaaaaaactctag

SEQ ID NO: 188233 - DNA, 828 bp, synthetic construct
  misc_feature 1..828: note = Description of Artificial Sequence: Synthetic coding sequence
  source 1..828: mol_type = other DNA
atggccagccaccggcacagcggccccagcagctacaaggtgggcacaatggctgaaaagttcgactgtcattattgccgcgatccgttgcaaggcaagaagtacgttcagaaagatggacatcactgttgcctgaaatgcttcgacaagttttgtgctaacacatgcgttgaatgtagaaagcccatcggcgcggattcgaaagaggtgcactacaagaatagattctggcacgacacctgctttagatgcgccaaatgcacaacgcgcgaagatagtcctaaatgtaaaggctgtttcaaagcaatcgtcgctggagaccagaacgttgagtataagggaaccgtgtggcacaaagactgcttcacatgttccaactgtaagcaagtgattggcaccggatctttctttcccaagggcgaggacttctattgcgtcacctgccatgagactaaattcgctaaacactgtgtgaagtgtaacaaggcgatcaccagtggcgggataacttatcaagaccagccctggcacgcagattgcttcgtttgtgtaacgtgctccaagaaactcgcaggtcaacgctttacagctgttgaagatcagtactattgcgtcgactgctacaagaattttgtcgcaaaaaagtgcgcagggtgcaagaacccgattaccggattcggaaaaggctctagcgtcgtggcttacgaagggcagtcatggcacgactactgcttccactgtaaaaaatgctccgtaaacctagctaacaagaggtttgtgtttcatcaggagcaagtatactgtccggactgcgctaaaaagctatag

SEQ ID NO: 188234 - DNA, 843 bp, synthetic construct
  misc_feature 1..843: note = Description of Artificial Sequence: Synthetic coding sequence
  source 1..843: mol_type = other DNA
atggccgagaagttcgactgccactactgccgggaccccctgcagggcaagaaatatgtccagaaagacgggcaccattgctgtctgaagtgttttgataaattttgcgcgaacacatgcgttgagtgcaggaaaccaatcggcgcagactctaaggaggtccactataaaaatagattttggcatgacacttgcttcaggtgtgcaaagtgtcttcatcctctggcgaatgaaacattcgtagccaaggacaataaaatcttatgcaacaaatgcaccacccgagaggatagtccaaaatgtaagggctgcttcaaggctatagtggccggcgatcagaatgtcgaatacaaggggaccgtatggcacaaagactgctttacctgtagcaattgtaaacaggtgatcggcactggaagctttttccccaagggagaagacttctattgcgttacttgccatgagactaaattcgcgaagcactgcgtgaaatgtaacaaggctattacttccggaggtattacttatcaggatcagccatggcacgccgattgcttcgtgtgtgtgacctgttctaagaaacttgcggggcagcggtttacagcagtggaggaccaatactattgcgtcgactgctataaaaattttgtggcgaagaaatgtgccggttgtaaaaatcccattacgggattcggaaagggctcttctgttgtcgcttatgagggccaaagctggcatgattactgtttccactgtaaaaagtgtagcgtgaacctggctaataaaagatttgtttttcatcaagagcaggtgtattgtccagattgtgcgaagaaattatag

SEQ ID NO: 188235 - DNA, 840 bp, synthetic construct
  misc_feature 1..840: note = Description of Artificial Sequence: Synthetic coding sequence
  source 1..840: mol_type = other DNA
atgaccgagcggttcgactgccaccactgcaacgagagcctgttcggaaaaaagtacattttgagggaggaaagtccctattgcgtggtgtgctttgagactcttttcgccaacacctgtgaggaatgtggcaaaccaattgggtgcgattgcaaagatttgagctacaaagacaggcactggcacgaggcctgtttccattgctctcagtgtaggaacagtcttgtcgataaacctttcgctgctaaagaagatcagctattatgtacagattgttacagcaacgaatatagcagcaaatgccaggaatgcaagaagacaatcatgcccgggacacggaaaatggagtataaaggttcttcctggcatgagacatgctttatttgtcatcgctgccagcagccgattggaaccaagtctttcataccgaaggataaccagaacttttgcgtgccctgttatgagaaacagcacgctatgcagtgcgttcagtgcaagaagcccattaccactgggggcgtgacctatcgggaacagccatggcacaaagagtgctttgtgtgtacagcttgcagaaaacagctctccggccagcgatttaccgccagggatgattttgcctactgcctcaactgtttttgcgacctgtacgccaaaaagtgtgccggctgtactaacccaatctcaggtctcgggggcacaaagtacatatcatttgaagaaaggcagtggcacaacgactgctttaattgcaaaaagtgtagcttatctttggtcggccggggattccttacagaaagggacgacatcctatgtccagattgcgggaaggacatttag

SEQ ID NO: 188236 - DNA, 456 bp, synthetic construct
  misc_feature 1..456: note = Description of Artificial Sequence: Synthetic coding sequence
  source 1..456: mol_type = other DNA
atgaccgagcggttcgactgccaccactgcaacgagagcctgttcggcaagaaatacatcctccgcgaggagtccccttattgcgttgtgtgcttcgagacattgttcgcaaacacgtgtgaggaatgcggcaagcctatcggttgtgactgcaaggtgcctgcccgctggtccactagagcagccgcggggatgaggccagcaagtagcgccaccgcagcttcttctcaactggagccgcgagtgagcagccctaagactattcggatcagtgtgtgcccagctatgcggaataacatgccttgttccgccttttctgcgaaatcaccctctcccagagagggaagcctgaccggctccagccctggaacgcgctcagccagctgcgccccacccgcagggtccagctgtctgggatcagctagccaattggccatgacactcccaacagcctag

SEQ ID NO: 188237 - DNA, 1170 bp, synthetic construct
  misc_feature 1..1170: note = Description of Artificial Sequence: Synthetic coding sequence
  source 1..1170: mol_type = other DNA
atgacccggcggggcttcagccgggccggcgccgcccagcggagcaccagacctgccgccgaacctcagcctccggcggctcgcgccctccagccaagaccaggcgtccccggacccctgcgttgtcgggagtaccttcagccgcccgcaccccgccgagaagcagagggcctatcccaccagggctccgaagttggcgcggagtcaggcgctagaccaaaggagcgcggggccgagccagagctcggtcggctgtggctgcgcacggtaagcagttggcgcttggggtggcattttgatttcggcgtcgccgagaaacccggagtcaaaatgaccgagcgcttcgactgccatcactgcaacgaaagcctcttcgggaagaaatatatactgcgggaggaatccccttactgcgtggtatgtttcgaaacattgtttgctaacacatgtgaggaatgcgggaagcccatcggctgcgattgtaaagatctttcttacaaagaccgccactggcacgaagcatgtttccattgctcacagtgccgtaactccctggtcgacaagcccttcgcagccaaggaagaccagctgctatgcacggactgctactctaacgagtattcaagtaagtgtcaggagtgcaagaagacaatcatgcccggcacccgcaaaatggagtataagggatcttcatggcacgagacatgttttatatgccaccgctgtcagcagccgatagggactaaaagtttcatcccgaaggacaaccagaatttctgtgtaccctgctacgaaaagcagcacgccatgcagtgtgtccagtgcaagaaaccgatcacaacagggggcgtcacttaccgggagcaaccatggcataaagagtgtttcgtgtgtaccgcatgcagaaaacagttaagtggccagagattcaccgcaagagatgattttgcttactgcctgaactgtttctgcgacttatacgccaagaaatgcgcggggtgcaccaatcctatttcaggactgggcggcacaaaatatatcagctttgaggaaagacagtggcacaatgactgcttcaattgtaaaaagtgctcactctctctggtgggccgcggctttctgacggagagggacgacattttgtgtccagactgtggaaaggacatttag

SEQ ID NO: 188238 - DNA, 840 bp, synthetic construct
  misc_feature 1..840: note = Description of Artificial Sequence: Synthetic coding sequence
  source 1..840: mol_type = other DNA
atgaccgagcggttcgactgccaccactgcaacgagagcctgttcggtaagaaatacatcttgcgggaagaatcgccttattgcgtcgtatgtttcgaaactctatttgcgaatacctgcgaagagtgcgggaagccaatcggttgcgactgcaaggatttgtcctataaagaccgacactggcacgaggcctgctttcattgtagtcaatgccgtaactcgttggtcgataaaccctttgcagccaaggaggatcaattgctgtgcacggattgttacagtaacgaatacagcagcaagtgccaggaatgtaagaagaccataatgccagggacccgaaagatggagtacaaagggtctagctggcatgaaacatgctttatctgtcacagatgtcagcaacctataggcaccaagtccttcatccccaaggataaccagaacttttgtgtgccttgttacgagaagcagcacgcgatgcaatgcgtgcagtgcaagaagcctatcaccacaggcggggtcacttacagagagcagccgtggcataaagagtgctttgtgtgtactgcttgtaggaagcaactgagtggacagcgttttaccgcccgtgatgattttgcatattgtctcaactgcttttgtgacctgtacgccaaaaagtgcgccggatgcaccaaccctatcagcggtctagggggcaccaaatatatcagttttgaggagaggcagtggcacaatgattgctttaattgcaagaagtgtagtctgagcctggtgggcagaggattcctcactgaaagggacgacatcttatgtccggactgcgggaaggacatttag

SEQ ID NO: 188239 - DNA, 840 bp, synthetic construct
  misc_feature 1..840: note = Description of Artificial Sequence: Synthetic coding sequence
  source 1..840: mol_type = other DNA
atgaccgagcggttcgactgccaccactgcaacgagagcctgttcggtaagaagtatatcctacgggaagaatctccatactgtgtggtttgctttgaaacactgttcgctaatacgtgtgaggaatgcggaaaaccaatcggctgcgattgtaaggacttgtcctataaagatcgccactggcatgaagcgtgtttccattgctcccagtgtcggaactccttagtcgacaagccattcgccgccaaagaggaccaacttctctgcaccgattgctattccaatgaatattcgagcaaatgtcaagaatgcaaaaagaccattatgccaggcactcgcaaaatggagtataagggttcatcatggcacgagacttgctttatctgccatcgatgccagcagcccatcggcacgaaatcctttatcccaaaggataaccagaacttttgcgtcccgtgttatgaaaagcagcacgccatgcagtgcgtgcaatgcaagaagcctattactacaggcggagtgacataccgggagcagccttggcataaggagtgttttgtgtgtactgcctgccgcaaacaactgtcaggacaaagatttacggcaagggatgatttcgcatactgccttaattgtttctgtgacctgtacgccaagaaatgtgcaggctgcactaatcctatctctggccttggaggaaccaagtatatcagcttcgaagagcggcagtggcataacgattgttttaactgcaaaaagtgttcgctttctctagtgggccgcggcttcttgactgagcgcgacgatattctctgtccagattgtggcaaagatatatag

SEQ ID NO: 188240 - DNA, 840 bp, synthetic construct
  misc_feature 1..840: note = Description of Artificial Sequence: Synthetic coding sequence
  source 1..840: mol_type = other DNA
atgaccgagcggttcgactgccaccactgcaacgagagcctgttcgggaagaagtatattttgcgcgaggaatcaccctattgcgttgtgtgcttcgaaaccctgttcgctaacacctgtgaggagtgcggaaaaccgattggctgcgactgcaaagatttaagctataaagacagacattggcatgaagcatgtttccattgttcccagtgccggaattccctcgtcgataagccatttgcggctaaggaagatcaactgctgtgcacagactgttattcaaacgaatattcatccaagtgtcaagagtgtaagaagacgattatgcctggaacccggaaaatggaatacaagggctcttcatggcacgagacatgttttatctgccaccggtgtcaacagcccataggaacaaagtcctttatccctaaagataatcaaaatttttgcgtgccttgctacgagaagcaacacgcgatgcagtgtgtgcagtgcaaaaagccgatcacaacggggggcgtgacctaccgcgaacagccctggcacaaagagtgctttgtctgcactgcatgccgaaagcagctgagcggacagcgctttacagcccgtgatgattttgcatactgtctgaactgtttttgcgacctgtatgctaagaagtgcgcaggttgtacgaatcctattagcggtctgggtgggactaaatatatctctttcgaggagagacagtggcacaacgactgtttcaattgcaagaagtgctccctatcactggtgggccgcgggttcctcacagagagagacgacatactctgccctgattgcggcaaggacatttag

SEQ ID NO: 188241 - DNA, 840 bp, synthetic construct
  misc_feature 1..840: note = Description of Artificial Sequence: Synthetic coding sequence
  source 1..840: mol_type = other DNA
atgaccgagcggttcgactgccaccactgcaacgagagcctgttcggtaaaaagtacattctgagagaggaaagcccatattgtgtggtctgctttgagacactgttcgccaatacttgcgaagagtgcggaaagcccatagggtgcgattgcaaagacctcagctataaagatcgacattggcacgaggcatgtttccattgtagccaatgtcggaactcccttgtggataagccatttgcagctaaagaggatcagctgttgtgtacagactgttacagcaacgaatactcaagcaaatgccaggagtgtaagaagaccattatgccaggcaccagaaagatggaatataagggatcatcatggcacgagacttgtttcatctgtcatcggtgtcaacagcccattggcaccaagtcttttatacctaaagataatcagaacttctgtgtgccgtgctacgaaaaacagcacgcaatgcagtgtgtacagtgcaagaagccaattaccacaggaggcgtgacatatcgggaacagccttggcacaaagagtgcttcgtttgtacagcttgccgcaaacagctgtctgggcaacgatttacagccagggacgatttcgcctattgcctcaactgcttctgtgacctctatgctaaaaaatgcgccggctgtactaatccaattagtggtttgggtggcacaaagtatatctcttttgaggagaggcaatggcacaatgattgcttcaactgcaaaaagtgcagcctgtccttagtgggaagagggttccttaccgaacgcgatgacatcctctgtccagattgcggaaaggatatctag

SEQ ID NO: 188242 - DNA, 840 bp, synthetic construct
  misc_feature 1..840: note = Description of Artificial Sequence: Synthetic coding sequence
  source 1..840: mol_type = other DNA
atgaccgagcggttcgactgccaccactgcaacgagagcctgttcggcaaaaaatatatcctgagggaagagtctccctattgcgtcgtctgcttcgaaacactgttcgcaaacacctgcgaagaatgtgggaagccaatagggtgcgactgcaaagatctcagttacaaggaccgtcattggcatgaagcatgctttcattgttctcagtgcaggaactcactagttgacaagccgtttgccgcaaaagaagaccaattgctttgcaccgactgttactcaaacgagtactcaagtaaatgccaggaatgtaagaagacaataatgcccggtacccggaaaatggaatacaagggcagcagttggcacgagacctgctttatttgccatagatgccagcagcccattggaacaaaatctttcatccccaaagataatcagaacttttgcgtcccttgttacgaaaagcagcacgctatgcagtgtgtgcagtgcaaaaagcctatcacaacagggggcgtgacttaccgagagcaaccctggcataaggagtgctttgtgtgtactgcctgtcggaaacaactttctggccagcgttttactgcaagagacgactttgcatattgtctcaattgtttttgtgacctctacgctaagaaatgtgcagggtgtaccaatcctatttcggggcttggtggtacgaagtacattagtttcgaggagaggcagtggcacaacgactgtttcaattgtaagaagtgcagcctgagccttgtggggcgcggctttctgactgagcgcgatgatatactgtgtccggactgcggaaaggacatctag

SEQ ID NO: 188243 - DNA, 840 bp, synthetic construct
  misc_feature 1..840: note = Description of Artificial Sequence: Synthetic coding sequence
  source 1..840: mol_type = other DNA
atgaccgagcggttcgactgccaccactgcaacgagagcctgttcgggaagaaatacatcctgcgggaggagtccccatattgtgtggtgtgtttcgaaacactgtttgcgaatacatgtgaggaatgtggaaagccgatcggttgtgactgtaaggacttgtcatataaagatcggcactggcatgaggcctgcttccactgtagccagtgccggaatagccttgtggacaaacccttcgccgcaaaagaggaccagctgttgtgtacagactgttatagcaatgagtactcaagcaagtgccaagagtgtaaaaagacaatcatgccagggacccgcaaaatggagtacaagggctccagctggcacgaaacttgttttatctgtcaccgatgccagcagcccatcggcactaagtctttcatccccaaggataaccagaacttctgcgtcccatgctacgagaagcagcacgcgatgcagtgcgtccaatgtaaaaagccaattacgacaggcggagtgacctaccgcgagcaaccttggcataaagagtgctttgtgtgtacagcatgcaggaaacagctgagtggacagcggttcactgccagggatgatttcgcttactgtttgaactgtttttgtgacctctatgctaaaaagtgcgccggctgtacaaaccccataagcggtttgggaggtacaaagtacatctcatttgaggagcgacagtggcacaatgactgttttaactgtaaaaagtgttcactgtctctggtgggaaggggttttcttaccgagcgggacgacattctctgtccagactgcgggaaagacatttag

SEQ ID NO: 188244 - DNA, 60 bp, synthetic construct
  misc_feature 1..60: note = Description of Artificial Sequence: Synthetic coding sequence
  source 1..60: mol_type = other DNA
atgaccgagcggttcgactgccaccactgcaacgagagcctgttcgggaagaaatactag

SEQ ID NO: 188245 - DNA, 435 bp, synthetic construct
  misc_feature 1..435: note = Description of Artificial Sequence: Synthetic coding sequence
  source 1..435: mol_type = other DNA
atgacccggcggggcttcagccgggccggcgccgcccagcggagcacgcgtcccgccgcggaaccacagcctccagccgcgcgtgctctacagccaagaccaggcgttcccggcccactgcgctgccgagagtacttgcaacctcctgcgccccgccgcgaagctgagggactgtcacatcagggaagtgaagtgggcgcagaaagtggagctaggccaaaagagaggggagcagagcccgagctgggcaggctgtggcttagaaccgtttcgtcatggcgactgggctggcacttcgattttggtacggaatcacgtttcgtcgctcaggccggcgtgcagtggcacgatctctcgtcacttcaggccctacccttagggtctaggcactctcctgcccccgcgagtcaggtcgctggaaccaccggatgttag

SEQ ID NO: 188246 - DNA, 843 bp, synthetic construct
  misc_feature 1..843: note = Description of Artificial Sequence: Synthetic coding sequence
  source 1..843: mol_type = other DNA
atgagcgagagcttcgactgcgccaagtgcaacgagagcctgtacggacgaaaatatatccaaactgactccggaccctactgtgtgccgtgctacgataacacctttgcaaatacatgtgctgaatgccagcagctgatcggccatgactcacgcgaactgttctacgaggacagacatttccacgaaggctgttttagatgctgcaggtgccagaggtcattagcagacgagcccttcacatgccaggattctgagctcctatgcaacgattgttactgtagcgcttttagcagccagtgctccgcatgcggcgagacggtcatgcccgggagtaggaagctcgaatacggtggtcaaacatggcatgaacattgcttcttgtgctctggttgcgagcagcccttaggcagtaggagctttgtaccggataaaggcgctcactactgtgtgccatgttacgaaaataaattcgcgccaaggtgtgccagatgtagcaagacactgacccaagggggagtgacatatcgtgaccagccatggcacagagagtgcctggtatgtaccggatgccagacgcccttagcgggccagcagtttacctctcgcgacgaggacccttactgtgtggcatgcttcggagagctgtttgcacctaaatgcagctcttgcaagagacccatcgtgggacttggaggcggaaagtatgtctctttcgaggaccgccattggcatcataactgcttttcttgcgcgaggtgtagtacctctctggttgggcaaggtttcgttccggacggtgatcaggtattgtgccaaggatgttcgcaggccggaccatag

SEQ ID NO: 188247 - DNA, 855 bp, synthetic construct
  misc_feature 1..855: note = Description of Artificial Sequence: Synthetic coding sequence
  source 1..855: mol_type = other DNA
atgaccaccgcccacttctactgccagtactgcaccgccagcctgctgggtaagaagtacgttctgaaggatgactccccatactgtgtgacctgctacgatagggtgttttctaactattgtgaagaatgcaagaagccaattgaatctgactctaaagacttgtgttacaaagacagacactggcatgagggttgttttaaatgtacaaagtgcaaccatagtcttgtagagaagcctttcgcggcgaaagatgaaagattgctgtgcactgaatgctacagcaatgaatgctcctccaaatgttttcattgcaaaagaacaatcatgccaggcagccggaaaatggaattcaagggcaattattggcatgaaacatgttttgtgtgtgaaaattgccgacagcccataggtactaaaccgctgatttccaaagaatccggaaactactgtgtcccttgctttgaaaaagagttcgcccattattgcaatttctgtaaaaaagtgattaccagcggcggtataacgttttgcgaccaactgtggcataaagagtgttttttatgtagcggctgcaggaaggatctgtgtgaagaacagtttatgagccgcgacgattatccattctgcgtggactgttataaccacctgtatgcaaataaatgtgttgcctgcagcaagcctatctccgggcttacaggcgccaaattcatttgttttcaggattcccagtggcacagcgagtgttttaattgtgggaagtgttctgtgtctcttgtggggaaaggatttctgactcaaaacaaggaaattttttgccagaaatgcggtagcgggatggataccgatatttag

SEQ ID NO: 188248 - DNA, 633 bp, synthetic construct
  misc_feature 1..633: note = Description of Artificial Sequence: Synthetic coding sequence
  source 1..633: mol_type = other DNA
atgaccaccgcccacttctactgccagtactgcaccgccagcctgctcggaaagaagtacgtattgaaggatgacagtccatactgtgtgacgtgctacgacagagtattttctaattattgcgaagaatgtaaaaaacccattgaaagcgactctaaagacctgtgctataaggacagacattggcacgaggggtgtttcaaatgcactaaatgcaaccattccctcgttgagaagcccttcgcagccaaagacgagaggctgctgtgcacagagtgttattctaatgagtgctcatcgaagtgtttccattgtaagcgcacaatcatgcccggttcgagaaagatggaatttaaaggcaattattggcacgagacttgttttgtctgcgaaaactgccggcagccaatcggcacaaagcccttaattagtaaagagtcagggaattattgtgtgccatgtttcgagaaggagtttgctcattactgtaacttctgtaagaaagtgataactagtggcggcatcacattctgcgaccagctttggcacaaagagtgttttctgtgcagtgggtgtagaaaggatctctgcgaggagcaattcatgtctcgagatgattaccccttttgttag

SEQ ID NO: 188249 - DNA, 855 bp, synthetic construct
  misc_feature 1..855: note = Description of Artificial Sequence: Synthetic coding sequence
  source 1..855: mol_type = other DNA
atgaccaccgcccacttctactgccagtactgcaccgccagcctgttagggaagaaatacgttttaaaggacgattctccatactgtgtgacttgctatgaccgggtattctccaactactgtgaggagtgcaagaagccgatagaatcagattccaaagatctgtgctataaggatcgccactggcacgaaggctgttttaaatgtacgaaatgcaatcattctctggtagagaaaccttttgccgccaaggacgaacgcctgctctgtacagaatgctacagcaatgagtgtagcagtaaatgtttccactgcaagcggacaatcatgcccggcagtcgcaagatggaatttaagggaaattactggcacgagacctgctttgtttgtgagaattgccgacagccaattggtacaaagcccttaatctctaaggagtcagggaattactgcgtcccatgcttcgagaaggagttcgcccattactgcaatttctgtaagaaagtaataacaagtggcggtattactttttgcgaccagctgtggcacaaggagtgttttctgtgctccgggtgccgaaaagatttgtgcgaggagcagttcatgtcccgggatgattatcctttctgcgttgattgctacaatcacctttatgcgaacaaatgcgttgcatgcagcaagcctatttctggattaaccggagctaagttcatttgttttcaggacagccagtggcactctgaatgtttcaattgcggaaaatgtagcgtctccttggtcggcaaaggttttttgacacagaacaaggaaatcttttgtcagaaatgcggctccgggatggacacagatatatag

SEQ ID NO: 188250 - DNA, 1314 bp, synthetic construct
  misc_feature 1..1314: note = Description of Artificial Sequence: Synthetic coding sequence
  source 1..1314: mol_type = other DNA
atgggccggcggatgcggggcgccgccgccaccgccggcctgtggctgctcgcactggggagtctgttagctctgtggggtggcctgctgcccccgaggaccgagctaccggcatctcggccaccagaggacagactgcctagacgaccagcccggtccggtggacccgcacccgcacccaggtttcctttacctcctccactggcctgggacgctagggggggatctctgaaaacctttagggcactcctaacactggccgccggggcagacggaccccccagacagagtcgctcagaacccagatggcacgtcagcgcccggcagccacgcccagaagagtccgccgctgtacatggcggagtgttctggtcacggggccttgaagagcaagttcctcctggattctcagaggcccaggcagccgcgtggttagaagctgcaaggggggctcggatggtggccctcgagcgagggggatgtggacgctcctcaaatcgcctggcacgcttcgcagatggtactcgcgcttgtgtgcgatacggtattaaccctgagcagattcagggcgaagctttatcttactacctggcacgtctcctgggcctccagcgacacgttcccccattagccttggcacgtgtagaagcaaggggtgcccaatgggctcaggtgcaggaagagctgagagcagcgcactggacagagggatccgttgtgagccttacaagatggttacccaacttgacagatgttgtggtgcccgcaccctggcgcagcgaagatggcagactgcgccccctcagggacgcaggaggagagcttgcgaatttaagccaagctgaactcgtggacctcgtacaatggacggatctgattctctttgactatctgacagctaactttgaccggttggtctcgaatctgttctctcttcagtgggatcccagggtcatgcagagagccactagcaatctgcacagaggtcctggaggggcactggtttttttggataatgaagccggacttgttcatggctacagggtggccgggatgtgggataaatataacgaacctctcttgcaatccgtatgtgtgtttcgcgagcgcacagcgcgcagagtcttagagttgcacaggggccaagatgccgcagcccggctccttcggctgtacagacggcatgagccccgctttcctgaattggctgcgctggccgaccctcacgcacagctgctccagcgaaggctggatttccttgcaaaacatatactgcattgcaaggcaaaatacggtcggcgttcaggaacctag

SEQ ID NO: 188251 - DNA, 312 bp, synthetic construct
  misc_feature 1..312: note = Description of Artificial Sequence: Synthetic coding sequence
  source 1..312: mol_type = other DNA
atggagcggcagcagcagcagcagcagcagctgcggaacctgcgggacttcctgctcgtatataatagaatgaccgagctttgctttcagaggtgtgtcccatccctacatcaccgcgctctggacgccgaagaggaggcctgtcttcacagctgcgcgggtaagctgatacattctaatcatagactgatggctgcctatgtgcaattgatgcctgccctggttcagcggaggatagccgactacgaagccgccagcgcagtccctggcgtggctgccgagcagccaggcgtgagccccagtggcagttag

SEQ ID NO: 188252 - DNA, 312 bp, synthetic construct
  misc_feature 1..312: note = Description of Artificial Sequence: Synthetic coding sequence
  source 1..312: mol_type = other DNA
atggagcggcagcagcagcagcagcagcagctgcggaacctgcgggacttcttgctggtgtataacagaatgacagagctgtgttttcaaaggtgtgtgcctagcctgcaccaccgcgccttggacgccgaagaggaagcctgtctccacagttgcgcaggtaaactgatccactccaaccaccgcctcatggctgcatacgttcaacttatgcctgcactggtgcagcgcagaatcgccgattacgaagcagcatccgcggtgcctggagtagccgccgagcagccaggggtgtcaccttctggtagttag

SEQ ID NO: 188253 - DNA, 312 bp, synthetic construct
  misc_feature 1..312: note = Description of Artificial Sequence: Synthetic coding sequence
  source 1..312: mol_type = other DNA
atggagcggcagcagcagcagcagcagcagctgcggaacctgcgggatttcctcctggtctataataggatgactgagctttgtttccagcggtgtgtgccctcgcttcatcaccgcgcattagatgctgaggaagaagcttgcctgcactcgtgtgccggcaagctgattcattcaaatcaccgactcatggccgcttacgttcagttgatgccagcactggtgcaacggcgcattgccgactacgaagctgccagcgccgtgcctggtgtggccgcagagcagcccggggtatccccctccggctcgtag

SEQ ID NO: 188254 - DNA, 948 bp, synthetic construct
  misc_feature 1..948: note = Description of Artificial Sequence: Synthetic coding sequence
  source 1..948: mol_type = other DNA
atgcacggccacggcggctacgacagcgacttcagcgacgacgagcgctgcggagagagctcaaaaagaaagaaaaggacagtcgaggacgacctgctgctgcagaaaccatttcagaaggagaagcacggtaaggtggcccataagcaagtagcagccgaacttttggatcgtgaggaagcgcggaaccgcaggtttcaccttattgcgatggatgcataccagcgtcacacaaaattcgtgaacgactatattctttattatggtggcaagaaggaggactttaaacgcctgggggaaaacgataaaaccgacctggacgtcatcagagaaaatcaccgtttcttgtggaatgaagaggacgagatggacatgacctgggagaagcgtctggccaagaagtactacgataagttatttaaagaatattgcatcgccgacttatctaagtacaaggaaaacaagtttggctttagatggagagttgagaaggaggttatctccggcaagggccaattcttctgtgggaataaatactgcgataaaaaggaggggctaaaatcatgggaagtgaacttcggatacatagagcacggcgaaaagcgtaacgcactggtcaagctcagactatgtcaggaatgcagcatcaagttgaactttcaccaccgtcggaaggagatcaaatctaaaaagcgcaaggacaagaccaagaaagactgcgaggagtcttcacacaagaagagtagactgtcatccgctgaggaggcctctaaaaagaaagataaggggcatagcagctcaaaaaaatcagaagattcactgctgcggaactctgatgaagaagaaagcgcttcggaatccgagctgtggaaagggcccttacctgaaacagatgaaaaatcacaggaggaggagtttgatgagtatttccaagacctgttcttgtag

SEQ ID NO: 188255 - DNA, 948 bp, synthetic construct
  misc_feature 1..948: note = Description of Artificial Sequence: Synthetic coding sequence
  source 1..948: mol_type = other DNA
atgcacggccacggcggctacgacagcgacttcagcgacgacgagcgctgtggagaatctagcaaacgcaagaaacgcaccgtggaggacgacctcttactgcaaaaaccctttcagaaagagaagcatggaaaggttgcccataagcaggttgccgccgagctcctcgaccgtgaagaagctagaaaccgcaggtttcatttgatcgctatggatgcatatcaacgccatacaaagttcgttaacgactatatcctttattatggaggcaagaaggaggattttaaaagactgggggaaaacgataaaacagatctcgatgtgatccgtgagaatcataggttcctgtggaacgaggaagacgagatggatatgacctgggaaaagcgcttggctaaaaaatattatgataaattgtttaaggaatactgcatcgcagatctctctaaatataaagaaaacaaatttggattccggtggcgcgtcgaaaaagaggtcatctcaggcaaaggacaattcttttgtggcaataagtactgtgacaagaaggaaggactgaagtcctgggaggtcaactttggatacatcgaacacggggagaaaagaaatgccctcgtgaaactgcgcctgtgtcaggaatgctctattaaactcaactttcaccacagaaggaaggagattaagagcaaaaagcgtaaagacaaaactaagaaagattgcgaagaaagctcccacaagaagagcagactcagttccgcagaagaagccagtaagaagaaggacaagggacacagctcctcaaagaagtctgaggactctctcttacgacggatgctggaggaactgcagatgttcacctgggaaaaatctgaacgaatggggggcaaaaggctgattatcatcataggagaggagctgagtgctaatgtgaccacttttaagatgtag

SEQ ID NO: 188256 - DNA, 942 bp, synthetic construct
  misc_feature 1..942: note = Description of Artificial Sequence: Synthetic coding sequence
  source 1..942: mol_type = other DNA
atgcacggccacggcggctacgacagcgacttcagcgacgacgagaggtgtggcgagtcttcaaagcgtaaaaagaggaccgtcgaggacgacctcctgttgcagaagcctttccaaaaggagaaacacgggaaagtcgcccataagcaggtcgcagccgaacttctggaccgggaggaagctagaaatcggcgatttcatctgatagctatggatgcgtatcagagacatacaaagtttgtcaatgactatatactgtactatggaggaaaaaaggaggactttaagaggctgggcgagaacgacaagacagacttggatgttatcagggaaaaccaccgcttcctgtggaacgaagaggacgaaatggatatgacttgggagaagaggctcgccaaaaagtattacgataagttgttcaaggaatattgtattgcagatctatctaagtacaaggagaacaagtttggatttcggtggcgagtggagaaggaagttatttccgggaaggggcagtttttctgtggcaataaatactgcgataagaaagaagggctgaaatcctgggaagttaatttcgggtatatcgagcacggagaaaagcgcaatgcactcgtgaagctaagactgtgccaggaatgttcaatcaagctcaactttcaccacagaagaaaagaaatcaaatcaaaaaagcggaaggacaagaccaaaaaagactgtgaagagagttcgcacaaaaagtcacggctgagcagcgccgaagaggcgagcaagaagaaggacaaaggacattctagtagcaagaaatccgaagattccctgttgaacggtgttatgctcttccatcccggttggagcgctgtggcccggtctcaactgacagcagccccggctagccaggtgcaaacaaacaaccactactggagaggggtcgtctgctag

SEQ ID NO: 188257 - DNA, 879 bp, synthetic construct
  misc_feature 1..879: note = Description of Artificial Sequence: Synthetic coding sequence
  source 1..879: mol_type = other DNA
atgcacggccacggcggctacgacagcgacttcagcgacgacgagaggtgcggtgagagctctaagcggaagaaaagaaccgtggaggacgatttgctgctgcagaagccgtttcagaaagagaaacatgggaaagtggcccacaagcaagtggccgcggagctgttggatagagaggaggcaagaaaccgccgatttcatttaattgccatggatgcctaccagagacacaccaaattcgtaaacgactacattttgtactacgggggcaagaaggaagattttaagcgcctaggagagaacgacaaaacagacttggacgtcatacgcgagaatcacagatttttgtggaatgaggaagatgagatggatatgacttgggagaagcgcctcgctaagaagtactacgacaagctctttaaagagtattgcatcgctgacctgtctaaatacaaggagaataaattcggattccgttggcgcgtggaaaaagaggtgatctcagggaaggggcagttcttttgtggcaacaaatattgcgataagaaagagggcctaaaatcttgggaggtgaatttcggttacatcgagcacggtgagaaaaggaatgccctggtgaagctccgactgtgtcaggagtgcagtattaaactcaatttccaccatcgccggaaagagattaagtccaagaaacgcaaggataagaccaaaaaagactgtgaagagtcatcccacaaaaagtccaggctttcctccgcggaggaagcctcaaaaaagaaggacaagggccacagttcatccaagaagtccgaggactccctgctaaagacctacttcgtgggcctactctctgaatcaaatgaaaagacctatatgtag

SEQ ID NO: 188258 - DNA, 831 bp, synthetic construct
  misc_feature 1..831: note = Description of Artificial Sequence: Synthetic coding sequence
  source 1..831: mol_type = other DNA
atgcacggccacggcggctacgacagcgacttcagcgacgacgagcggtgcggggagtctagcaagcggaagaaaagaaccgtggaggatgacttgctgctacagaagcccttccaaaaggaaaagcacgggaaagttgctcataaacaggtggctgcagaactcttagacagggaggaggcaagaaatcggcgctttcacctgattgctatggacgcatatcagcgacatacgaaatttgtcaacgactacatcctctactacggcggcaagaaagaagactttaagcgcctgggcgagaacgataagaccgaccttgatgtgatccgggagaaccataggttcctatggaacgaggaagacgagatggacatgacctgggagaagcgcttggccaagaagtattatgacaagctctttaaggagtattgcatcgctgacctctccaagtataaagaaaataagtttggatttcggtggcgagtggagaaggaggtgatttccggcaaagggcagttcttttgtggtaataaatactgtgacaaaaaggaaggcctcaagtcctgggaggttaattttgggtatatcgagcacggagaaaagagaaacgcactggtaaagctgaggttatgtcaggaatgttccatcaaactgaatttccatcataggcgcaaagagatcaagtccaaaaagcgtaaggataaaaccaaaaaagactgcgaagagagcagccacaagaaaagtcgcctgagctccgcggaggaagcctcaaaaaaaaaggacaagggccacagcagttccaaaaaaagtgaggatagtctgttaaactag

SEQ ID NO: 188259 - DNA, 978 bp, synthetic construct
  misc_feature 1..978: note = Description of Artificial Sequence: Synthetic coding sequence
  source 1..978: mol_type = other DNA
atgggcatcttccccggcatcatcctgatcttcctgcgggtgaagttcgccacagcagcagttattgtttccggccaccaaaaaagcactaccgtatcacacgagatgtcaggcctcaattggaagccatttgtttacggtgggttggcttcaattgtggctgagtttggcacatttcctgtcgacttaacgaaaaccagactccaggtgcaggggcaaagtatcgacgccaggttcaaggaaataaagtatcgcggaatgtttcatgcactgttccggatatgcaaggaagagggagtgctggcgctctactctgggatcgcaccagccttactgagacaagcgtcatacggcaccatcaaaatcggaatttatcagagcctgaagaggctgtttgttgaacgtttagaggacgaaacactgcttatcaatatgatctgcggggttgtgtccggggttattagcagtactatcgctaatcccacggatgtgttaaagatcagaatgcaggcccagggttcattgtttcaaggttcaatgatcggctcgttcatcgatatctatcaacaggagggtactcggggcctctggcggggagtggtgcccaccgcccagcgcgctgccatagtggtgggggtcgagttgcctgtatatgatattaccaaaaaacacctaatcctaagtggaatgatgggcgataccattttaacgcactttgtttccagttttacctgtgggttagccggagctttggcatctaaccccgtagacgtggtgaggactcgcatgatgaaccagcgggccatcgttggacatgtggacctgtacaagggcacagtggatggaattctgaagatgtggaaacatgaggggttctttgccctctataagggtttctggccgaattggcttcggttaggcccatggaatatcattttctttattacctacgaacaactgaagcgactgcagatctag

SEQ ID NO: 188260 - DNA, 894 bp, synthetic construct
  misc_feature 1..894: note = Description of Artificial Sequence: Synthetic coding sequence
  source 1..894: mol_type = other DNA
atggaggagctggtggtggaggtgcggggcagcaacggcgccttctataaggcgttcgtgaaagacgtgcatgaggatagcattacagtggccttcgaaaataactggcagcctgataggcaaatcccgttccacgacgtccgcttccccccgccagtggggtacaacaaggacatcaacgaatccgacgaggtggaggtctattcccgagcaaatgaaaaggagccctgctgttggtggttagctaaggttcggatgattaaaggagaattttacgtcatagagtatgctgcatgcgatgccacatacaatgagattgtcaccatcgagagactgagatcagtgaatcctaacaagcccgctactaaggataccttccacaagatcaaactggatgtgcccgaggatcttcggcagatgtgtgctaaggaggccgcccacaaagactttaaaaaagctgttggcgcgttttcagtaacttatgatccggagaactatcagctggtcatattaagcataaatgaagtgacatcgaagagggctcatatgcttatcgacatgcacttcagatctctgaggactaagctctctttgataatgcgaaatgaagaagcttcaaaacagctcgagtcctcacgacaactagctagtcgctttcacgaacagttcatcgtcagggaggacctgatgggacttgccatcggaactcatggagctaatatccagcaagcacgcaaggtaccaggcgttacagcgattgatctggacgaagatacctgcacctttcatatttatggggaggatcaggacgcagttaaaaaggctaggtcctttctggaattcgctgaggatgtgatccaggttcccagaaatctggtaggcttaaagatatag

SEQ ID NO: 188261 - DNA, 1773 bp, synthetic construct
  misc_feature 1..1773: note = Description of Artificial Sequence: Synthetic coding sequence
  source 1..1773: mol_type = other DNA
atggaggagctggtggtggaggtgcggggcagcaacggcgccttctacaaggcattcgtcaaagatgtgcacgaagatagcatcactgtggccttcgagaataactggcagcctgacaggcagataccttttcacgacgtacggtttcctcctccagtaggttacaataaggacatcaacgagagcgatgaggtggaagtctacagtagagccaacgaaaaggagccttgttgctggtggcttgcaaaggtgcgaatgatcaagggggaattttatgtaattgagtatgcggcctgtgacgcgacttacaacgagatcgttaccatcgagagactaaggtcagtcaacccgaataagcctgccaccaaagacaccttccacaaaataaagctcgacgttccagaggatctccggcagatgtgtgccaaggaggccgcccacaaggatttcaagaaggctgtgggagcttttagcgttacctacgatccggaaaactaccagttggtgatcctctctattaatgaagtcacttctaagagagcacacatgcttatcgacatgcactttcggtccctccgcacaaaactgagtctgataatgaggaatgaggaggccagcaagcagctggagagctccagacagttagcatcgcgatttcatgaacagtttatcgtacgagaggacctcatgggtttggctatcggcacacacggagctaatattcaacaggccaggaaggtgccaggggtgaccgctattgatctcgacgaggatacatgtacgttccatatctatggcgaggatcaagacgccgtaaaaaaggccagaagtttcttggagttcgcagaagacgtcatccaggttccgcgcaacctcgtcgggaaagtgatcggaaaaaatggtaagctaatccaagaaatcgtggataagtccggggtggttcgtgtacggattgaggccgaaaatgagaaaaacgtcccacaagaggaagagattatgccacccaatagcctgcctagtaataactcacgggttggccctaacgcacctgaggagaaaaaacatctcgacatcaaggagaatagcacccatttttcgcagcccaactcaacaaaagtacagcgggttctggtggcatcctcagtggtcgctggcgaaagccagaaacccgagttgaaagcttggcagggcatggtgcctttcgtgtttgtggggaccaaggattctattgccaacgctacagtcctcttggattaccacctaaactaccttaaggaagtggaccagctgagacttgaacgcctgcaaatagacgagcagctccgacagatcggggcatcaagtcgacctccccccaacagaacagacaaggagaagtcctacgtaactgacgacggccaaggcatgggacggggctcgagaccctatcgtaatagaggtcatggaagacgtggacctgggtatacaagcgccccaaccgaagaggaaagagaaagtttcctgagaaggggagatggccggcggagaggagggggaggacgaggccaggggggtcggggacgcggcggaggctttaaggggaatgacgaccacagcaggactgacaatcgacccagaaaccctagggaggccaaaggcagaacgacagatggctccttgcaaaatactagctccgagggatccagacttcggacaggaaaagacagaaatcagaagaaggagaaacctgactccgtcgatggacaacagcccttggtgaatggagtcccctag

SEQ ID NO: 188262 - DNA, 1614 bp, synthetic construct
  misc_feature 1..1614: note = Description of Artificial Sequence: Synthetic coding sequence
  source 1..1614: mol_type = other DNA
atggaggagctggtggtggaggtgcggggcagcaacggcgccttctacaaggctttcgttaaggatgtgcacgaagactctataacagtagccttcgaaaacaattggcaacccgacaggcagattccatttcatgatgtccgctttcctccccctgtcggttataacaaggatattaatgagagtgatgaggtggaagtgtattcccgtgcaaatgagaaagaaccatgttgctggtggctcgctaaggtccgcatgattaaaggcgaattctatgtgatcgaatatgcagcctgcgatgctacatacaatgaaatcgttaccatcgagcggctgcggagtgtcaatcctaataagcctgccaccaaggataccttccataagattaagctagatgttccagaagatttgagacagatgtgcgctaaggaagcagctcacaaggatttcaagaaagcagtgggcgcatttagcgtcacatacgatccagaaaattaccagcttgttattttaagtataaatgaagtcacctcaaaaagagcacacatgttgattgatatgcacttccgctcactgaggaccaagttaagtcttattatgagaaacgaagaggcaagcaagcagctggagagctctagacaattggcatctcggtttcacgagcagtttatcgtgcgggaagatctgatgggtcttgcaatcggcacccacggggccaatattcaacaggcccgcaaagtgcccggagtgaccgcaatagatttggacgaagatacatgtacattccatatctatggggaggatcaggacgctgtgaagaaagcacgtagtttcctcgaattcgctgaagatgtaatccaggttccaagaaatctcgttggtaaggtgatcggcaaaaatggcaagctcattcaagagatcgtggacaaaagtggtgtggttagggtgagaatcgaggcagagaatgaaaagaacgttccacaggaggaggagatcatgcctccaaattcccttcccagcaataattccagagttggtcctaacgcccctgaggagaaaaaacatcttgacattaaggaaaattctactcacttctcccagccaaattctacaaaggtccaaagggtgctggtagcctcaagcgtggtagccggtgagtcccaaaaaccggaactcaaagcctggcaagggatggtacctttcgtgtttgttggaactaaagactcaatcgcaaacgcgactgtcctactggattaccatctgaattacctgaagctgcagcagagaaagcgaggtagagcatcctgtgccgaggaaacagacggcggagtggaaggggaagaagaggataaggaggaggaggatgtggaggaagccagcaaagagactacgatcacaccagaacagattattgtacatgtcatccaagagcgccttaaagaggaacaacaaatggaccccttccgcagcgagttaaccgcgattatgaaaggggtgagcactttgaagcactatcggatcccgcctgtgaaagtggtcggttgcgcgcgggttaaaatcgtcactagacggaagcgatcccagactgcttggatggtgagtaaccattcttag

SEQ ID NO: 188263 - DNA, 1899 bp, synthetic construct
  misc_feature 1..1899: note = Description of Artificial Sequence: Synthetic coding sequence
  source 1..1899: mol_type = other DNA
atggaggagctggtggtggaggtgcggggcagcaacggcgccttctacaaggctttcgtcaaggatgtgcatgaggattctatcacagtggccttcgagaataactggcagccagatagacaaatccctttccatgacgtgagattccctccccctgtgggatacaataaggatataaacgagtcagatgaggtggaggtctacagccgtgccaacgaaaaagaaccatgttgttggtggctggccaaggtccgcatgatcaagggagagttctatgtcatcgaatatgcagcttgcgatgcaacctataacgagattgtgacaatcgagaggttacgatctgtcaaccctaataaaccagcaactaaagacacctttcacaagatcaagctggatgtccctgaagatctaaggcagatgtgtgcaaaggaagccgcacacaaagactttaaaaaggctgtgggcgcatttagtgtgacctatgatcctgagaattaccagctagtgatactttccataaacgaagtcacgagcaagcgcgcccatatgctgatcgacatgcactttcgatccttgcgtaccaaattgagtcttattatgcgcaacgaggaggccagcaagcagctggagtcttctaggcagctggcctcgagattccatgagcaatttatcgtgcgcgaggatcttatgggcctggcaattggaactcatggggcaaacatacaacaggcgcggaaggtgcccggcgttaccgccatagatctggatgaggacacgtgtaccttccatatctatggggaggatcaggatgccgttaagaaggctcggtctttcttagagttcgcagaggacgttatccaggtcccaaggaacctcgtcggcaaggttattggtaaaaacggtaaactgatacaggaaatcgtggataagtcaggggtggtgcgtgtaaggatcgaagctgagaacgaaaaaaatgttcctcaggaagaggaaatcatgcccccaaacagtcttccctctaacaacagtcgcgtgggccccaatgctccagaggagaagaaacatctggatatcaaagaaaacagcacacacttctcccagcctaatagcacgaaagtgcaacgagtgctggtggctagctctgtggtggccggtgaatctcagaagcccgagttaaaggcctggcaggggatggttccatttgtgttcgtgggtaccaaggactccatagcaaatgccacagtgttattggactaccatcttaattaccttaaggaggtcgatcagctccgactggagcggctgcagatcgatgagcagctgcgccagattggtgcatcgagccggcccccacccaacagaaccgacaaggaaaaatcatatgtgacagacgatggccagggcatgggaaggggaagccgcccataccgaaacagggggcatggacgtcggggtcccgggtacacatccggtacaaatagcgaggcatctaatgcctctgaaacagaatcagatcaccgtgacgaattgtcggactggagtctcgcaccaactgaggaagagagggaaagtttcctgcggcggggggatggaaggcgtcgcgggggtggaggtaggggccagggaggacgtggaagaggaggggggttcaaaggcaacgacgatcacagtcggactgacaacaggcctcggaacccacgcgaagcgaaaggcaggacaaccgacggttctctgcagataagggtcgactgcaacaacgagcggagcgtgcacaccaagaccctgcagaatacctcaagcgagggctctagactacgtactggcaaagatagaaaccagaagaaagagaagcctgactctgtggacgggcagcagccactagtgaacggagtgccatag

SEQ ID NO: 188264 - DNA, 1749 bp, synthetic construct
  misc_feature 1..1749: note = Description of Artificial Sequence: Synthetic coding sequence
  source 1..1749: mol_type = other DNA
atggaggagctggtggtggaggtgcggggcagcaacggcgccttctacaaagcatttgtaaaggatgtccacgaagacagtatcacagttgccttcgagaacaactggcagcccgacagacagattccatttcacgacgttcggttccccccacccgtcgggtacaacaaagacattaacgagtctgacgaggtcgaagtatacagtagggccaatgagaaagagccgtgttgttggtggctggccaaggttaggatgattaaaggcgagttctacgtcattgaatatgctgcatgcgacgctacctataacgaaatcgtgactatcgagcgactccgatccgtcaatcctaataaacccgcaacgaaggacacattccataagatcaagctagacgtccctgaagaccttaggcaaatgtgcgcaaaagaagcagcccataaagactttaagaaagctgtgggcgccttttcagtcacatacgatccggagaattaccagttggttattttatctataaacgaggtgacatcaaagcgcgctcacatgcttatcgatatgcattttagatcgctcagaacaaagctaagtctcatcatgagaaacgaggaggccagtaagcagctcgagtctagcagacagctggcctcgagatttcacgagcagttcatcgtgcgcgaagacctgatgggattagcgatcggcacacacggcgcaaatatccaacaagcccgcaaagtgcccggagttactgccatagacttagatgaagatacctgtactttccacatctatggtgaggaccaggacgccgtgaaaaaggctcggtcatttttagagtttgctgaggatgtgattcaagtgccgagaaatctggtcgggaaggtgattggaaaaaatggtaagctcattcaggaaatcgttgacaaatctggagttgtccgtgtgcgcatagaggccgagaacgaaaagaacgtcccccaggaagaggagattatgcctcctaattcactgccctctaacaattctcgggtggggcctaatgcgcctgaggaaaagaaacatctcgatatcaaggagaatagcacacatttttctcaaccgaactccactaaagttcagcgtggtatggtaccatttgttttcgtgggtacaaaggattccatcgcgaacgccaccgtgcttctggattaccatttgaactacctgaaagaggtggatcaactgcgtctggagcgcttgcagatagacgagcagctcagacagatcggagcttctagcagaccaccaccgaacaggaccgacaaggagaagtcctatgtgacagatgacgggcaaggaatgggcaggggaagcaggccttatagaaaccgcgggcatggtaggagaggtcctggttacacatctgagtccgatcacagggatgagctctctgattggagtttagctccaacagaggaagagcgggagagctttctgagacggggggacggtcggagaagaggaggtggagggagaggccaaggcggacgaggtcgggggggtggatttaagggcaacgacgatcattctcgcaccgacaatcgtccaagaaatcctcgagaagcaaagggtagaaccacagatggttcgctgcaaaatacgtcatcagaaggtagtcggctacgcacaggcaaagaccgcaaccagaaaaaggaaaagcctgacagcgtcgatgggcaacagccattagtgaatggcgtaccttag

SEQ ID NO: 188265 - DNA, 1779 bp, synthetic construct
  misc_feature 1..1779: note = Description of Artificial Sequence: Synthetic coding sequence
  source 1..1779: mol_type = other DNA
atggaggagctggtggtggaggtgcggggcagcaacggcgccttctataaggcctttgttaaagacgtccacgaagactcgattacagtagccttcgaaaataactggcagccagaccgccagatccccttccatgacgttcgctttccacccccggtggggtacaacaaagacatcaacgaaagcgacgaggtggaagtctacagtagggccaatgagaaagagccctgttgttggtggctggccaaagtcagaatgattaagggcgagttttacgttatagagtatgccgcttgcgacgctacctacaatgagatcgtgaccatcgaacgacttcgttctgtaaacccgaataagcctgccaccaaggacacctttcataagatcaaacttgatgtgcctgaggacctacggcagatgtgcgccaaggaagcagcccacaaagacttcaaaaaggctgtgggcgctttctcggtgacttacgacccggagaactaccagttagtaattctctcaatcaacgaagtgacaagcaaacgcgcgcacatgctcatcgatatgcactttcgatcgctgagaacaaaactgagccttataatgcgcaacgaggaggccagtaagcagttggagagcagccggcagttagccagcaggttccatgaacagttcatcgtacgcgaagacctgatgggtctggcaattggtacgcatggcgctaacattcagcaggccagaaaggtaccaggggtcactgctatagacctggatgaggatacatgtacctttcacatttacggagaagaccaggacgcagttaagaaggccaggtcctttcttgaatttgccgaagacgtgatccaggtgcccagaaatttagtggtgatcggtaagaatggcaagctgatccaggagattgtggacaagtccggggttgtgagagtcaggattgaagcagaaaacgaaaagaacgtgccacaggaggaggagattatgccccctaactcactgccctcaaacaactcacgggtaggcccgaacgcacccgaggagaaaaaacatttggatatcaaagagaacagcacccatttcagtcagcctaactccacaaaagttcaaaggggaatggttccctttgtgtttgtcggtacgaaagactccatcgcaaatgcaactgtgctgctggattaccatcttaattatctcaaggaggttgaccagctcaggctagagcgcctgcagatcgacgagcaactgcgccagattggcgccagcagtagacccccccccaatcgtacggataaagaaaagtcttatgtgaccgatgatggtcaggggatgggtcggggctcgcgaccgtatcgcaaccgcggccacggccgtaggggtcccggatatacctccgggaccaacagcgaagccagtaacgcctctgagaccgagtcagatcaccgtgatgaactttctgattggagcctcgctccaactgaagaagagcgtgagtcatttctccgaaggggggacggacggagacgagggggcgggggcaggggccagggcggcaggggaagagggggtggattcaaggggaatgacgaccatagcaggaccgacaatagaccgcgaaaccctcgggaggcaaaggggcgcacgactgatggatccttgcagaacacttctagtgagggctcaaggcttagaactggcaaggacaggaaccagaaaaaggagaagccagactccgtggacgggcagcagccacttgttaacggggtgccatag

SEQ ID NO: 188266 - DNA, 789 bp, synthetic construct
  misc_feature 1..789: note = Description of Artificial Sequence: Synthetic coding sequence
  source 1..789: mol_type = other DNA
atgccccccaacagcctgcccagcaacaacagccgggtgggccccaacgccccagaggaaaagaagcacctggatatcaaagaaaatagtacccacttctctcagccgaatagcacgaaagtgcaaagaggaatggtaccttttgtgttcgtcggcaccaaggattcgattgccaacgcgaccgtcttgctagactaccatttgaattatttgaaggaggtggatcaactcagattggagagattgcagatcgatgaacagttgcgacagattggggcgtccagtaggccacccccaaacagaaccgataaagaaaagtcttacgtgaccgacgatggccagggtatgggcagagggtcacgaccataccgtaaccgtggccatggaaggagaggccctgggtacacctctggaactaatagcgaagcctctaacgcaagcgagaccgagagtgaccaccgtgacgaactgtccgactggtctctggcgcccacagaggaagaaagagagagcttcctgcgccgaggcgacggcagacgacgcgggggcggaggcagaggacagggcggccgtggccgaggaggggggtttaaaggcaatgatgatcactcgagaacggacaatcgcccaagaaacccaagggaggccaaaggccgcaccaccgatgggagtctgcaaaacacatccagtgaaggttcaagactgcgtaccggaaaggaccgcaaccagaagaaggaaaagccggacagcgtcgacggacagcagccgctggtgaacggagtaccctag

SEQ ID NO: 188267 - DNA, 1611 bp, synthetic construct
  misc_feature 1..1611: note = Description of Artificial Sequence: Synthetic coding sequence
  source 1..1611: mol_type = other DNA
atgatgaagggcgagttctacgtgatcgagtacgccgcctgcgacgccacttacaatgagattgtaaccttcgagcgcctgcgccccgtgaaccaaaataagacagtcaagaaaaatacatttttcaagtgtaccgtggacgtgccggaagatctgcgggaagcctgtgctaatgagaacgcgcacaaggattttaagaaggcagtgggggcctgtagaatcttttaccaccccgagacaacccagctgatgattttatccgcttccgaggcaaccgtgaagcgtgtcaacatcctgagtgacatgcacctgcgctctattcggacgaaactcatgctcatgtcacgaaacgaggaggctacaaagcacctggagtgcactaagcagctggccgcggcttttcacgaagagtttgtagtgagggaggacttgatgggtctggctataggaacccacgggagcaacattcaacaggcccgcaaggtgcctggcgtaacagccattgagctggatgaagatacgggtactttcaggatctatggtgagagcgcagatgccgtaaaaaaagcccgcggcttcctggagttcgtggaggactttattcaggtgcccagaaacctcgttggaaaggtgatcggcaaaaacgggaaggtaattcaggaaattgtcgataaatccggagtggtgagggtgcgaattgaaggagacaacgagaacaagcttcccagagaggatggaatggtcccttttgtcttcgtaggcacaaaagaatctatcggcaatgttcaggttctgctagaatatcacatcgcttacctgaaagaggtggagcagctgcgtatggagaggctgcagatcgatgagcagctgcggcagattggctctaggtcctacagtggccggggacgtggcaggcgcggacccaactatacatcggggtacggaactaatagcgagttatcaaatcccagcgagacagaaagcgagagaaaggacgaactctctgattggtccttagccggtgaggatgatagagactcacgacatcagcgagactccaggcgaaggccaggggggagggggagatctgtgtctggcggacgaggccggggcggtccacgcggtggtaaaagttccattagctccgtgctgaaggaccctgactccaatccttactccctgctggataacacggaaagtgaccagacagcggacacagacgcttccgagagccaccatagtaccaataggcgccggcggtccagacggagacgtactgatgaggatgccgtcctaatggacggaatgacagaaagcgacactgcttccgtcaacgagaacggcctggtgacagtggcggactacatctcccgcgctgagtctcaatctcgtcagaggaacctgccaagagagactctggccaagaataagaaagagatggccaaggatgtcattgaagagcacgggccgtcagagaaagccatcaatggaccgacgagcgcatccggtgacgatatatccaaactgcagcgcacgccaggggaagaaaagataaacaccctgaaagaggaaaatacccaagaggcggccgttttgaacggtgttagttag

SEQ ID NO: 188268 - DNA, 1866 bp, synthetic construct
  misc_feature 1..1866: note = Description of Artificial Sequence: Synthetic coding sequence
  source 1..1866: mol_type = other DNA
atggccgagctgaccgtggaggtgcggggcagcaacggcgccttctataaaggatttatcaaggacgtccatgaggactccctaaccgttgtgttcgagaataattggcaacctgagcgacaggtgccttttaatgaggtcaggcttcctcctcctcctgacattaagaaggagatttctgagggcgacgaagtagaagtgtattctagagcgaacgaccaggagccatgtggttggtggttggcaaaggtgcggatgatgaagggtgaattctacgtcatagagtatgcggcctgtgatgcgacctacaacgagattgtcacatttgagcgactacgtcccgtcaatcagaataagacagtgaagaagaatacttttttcaagtgtactgttgatgtccccgaggacctgcgcgaggcctgcgccaacgaaaatgcccataaggactttaaaaaggccgtaggagcctgcaggatcttctatcaccccgagactacccagctgatgatactgtctgcctcagaagctactgtgaagagagtcaacatattatccgatatgcacctgagatccatccggaccaaactgatgctgatgtcccgaaacgaagaagcaacaaaacacctagagtgcactaaacaactcgctgccgcattccacgaggaatttgtggtcagagaagatctgatggggctggcaatcgggacccacggttctaatatccagcaggctcgaaaggtcccaggcgtgacggcaatcgaactggatgaagataccggtacctttagaatttatggcgagagtgctgatgcagtgaaaaaggcccgaggattccttgagttcgtggaggacttcatccaggtgccacgtaacctggtaggcaaggttatcgggaaaaacggcaaggtcatccaggaaattgttgataaatctggcgtcgtgcgggtgcggattgagggcgataacgagaacaaactcccacgggaggatggaatggtgccctttgtgtttgtggggactaaggagtctattgggaatgtacaggtcctactggaataccacatcgcgtacttaaaggaggtcgagcagcttagaatggagcggctgcagattgatgagcagttaaggcagatcggctcccggtcttattccgggcgtggcagaggaaggcgcggcccgaattacaccagcgggtatggcactaactccgagctgtctaacccttcagaaacagagagtgagaggaaagatgaactgagcgattggtcactcgcgggggaagatgatagagacagcagacaccaacgagacagtaggcgccggccaggcggacgcgggaggtcagtatccggaggacgtggacggggcggaccccgaggcggcaagtcaagcatatcctcagtgcttaaagaccccgattcgaatccctactctttactcgacaacacagagagcgatcagaccgctgacacagatgcatctgagagccaccactcgactaacagaaggcggcggtcgcgccgtcgaagaacagacgaagatgccgtgctgatggacggaatgacggagtccgacactgcttccgtgaacgagaatggtctagtgaccgttgccgactatatcagccgagcagagtcccagagcaggcagcgaaacctgccacgcgagactttggcgaaaaataagaaagaaatggctaaggacgtgattgaggagcatggtccgagtgaaaaggcgattaacggtccaacctcagcttcaggcgatgacatatccaaacttcaaagaaccccgggcgaagagaagattaacaccctcaaagaggagaacacacaggaggcggcagtgcttaacggagtgagctag

SEQ ID NO: 188269 - DNA, 1620 bp, synthetic construct
  misc_feature 1..1620: note = Description of Artificial Sequence: Synthetic coding sequence
  source 1..1620: mol_type = other DNA
atggccgagctgaccgtggaggtgcggggcagcaacggcgccttctataaaggcttcatcaaggatgtgcatgaggattcactaaccgtggtattcgagaataattggcagccagagcggcaggtcccattcaacgaagtcagactgcctccgccccctgacatcaagaaggaaattagtgagggcgatgaagttgaggtgtattcacgcgccaatgatcaagagccatgcggctggtggttggctaaggttaggatgatgaaaggcgagttttacgtgattgaatatgcggcctgtgatgcaacctataacgaaatcgtgacattcgagcggctaaggccagtcaaccagaacaaaactgttaagaagaacacattcttcaaatgcaccgtggacgtccccgaggacctgagggaggcttgtgcaaatgagaatgctcataaggacttcaagaaggctgtgggtgcatgcaggatcttttaccaccctgaaactactcaactgatgatcctgagtgcctcggaagccaccgttaaaagggtcaacatcttgagcgacatgcatttgcgctctattcgtaccaagcttatgctgatgtctagaaatgaagaggcaacgaaacacttggaatgtaccaaacagctcgcggccgcttttcatgaagaatttgtggttcgtgaggacctgatgggcctagcaattggcactcatggttccaatattcagcaagcgagaaaggttcctggcgtaaccgccatcgagttagacgaagacaccgggaccttcaggatttacggtgaatcagctgacgcagtaaaaaaggcgcgcggtttcctggagttcgttgaagacttcattcaagtgcctcgcaacctggtcgggaaagtgataggtaaaaatggtaaagttattcaggagatcgtggataaaagtggcgtggtgagggtgagaattgagggggacaatgaaaataaactgccaagagaagatggcatggtcccttttgtgtttgtaggcactaaagaatcaatcggtaatgtgcaagtgctcttggaataccacattgcctaccttaaagaggtggaacaactaaggatggagagattgcagatcgatgaacaactgcggcagatcggatcaagatcatatagcgggagaggcagaggacgtagaggaccgaattacacctccggctatggcactaatagtgagttgagtaaccccagcgaaaccgagtcagagagaaaagatgagttatccgactggtcccttgcgggagaggatgacagagacagcagacatcaaagggactcgagacgacgaccgggagggaggggtcgtagtgtatctggcggacgaggaagggggggtcctcgcggcggaaaatcttctatttcttctgttttaaaagaccccgattctaacccctactcactcctagataacacagaatctgatcaaactgccgacactgacgcttcggagtctcatcattccactaacaggcggcgccgctcccgacgtcgtcgaacagatgaggatgctgtgctgatggacgggatgaccgagagtgatacggcatccgtgaatgagaacggcctgggcaagagatgcgactag

SEQ ID NO: 188270 - DNA, 1827 bp, synthetic construct
  misc_feature 1..1827: note = Description of Artificial Sequence: Synthetic coding sequence
  source 1..1827: mol_type = other DNA
atggtgaccgagggcttcatcaaggacgtgcacgaggacagcctgaccgtggtgtttgagaacaattggcagcccgagcgccaggttcctttcaatgaggtcagactcccccctccacccgatataaaaaaggagatctctgaaggcgacgaagtggaggtatattctcgggccaacgaccaggagccctgtggatggtggctggccaaggtacgcatgatgaaaggcgagttctatgttatcgaatacgcagcctgcgatgctacctacaacgaaatcgtgaccttcgaaagactcaggccggtgaaccagaacaaaaccgttaaaaagaatacattcttcaagtgcacggtggacgtccccgaggatctcagagaggcctgtgctaatgaaaacgcccacaaggatttcaagaaagctgtcggcgcttgccgaatcttctatcaccctgagactacacagttgatgatcttgtcagcttccgaggccaccgtgaagcgcgtgaatatcttatccgacatgcatctgcggagtatccggactaaactgatgctaatgtcacgaaatgaagaagcaactaagcacctagaatgtacaaagcaactggctgccgccttccacgaggagtttgtggttcgggaagatctcatgggtcttgcgataggaacccacgggagcaacatacagcaagcccggaaagtgccgggggtgacggccatcgagctggacgaggacactgggactttcaggatctatggggagtccgctgacgcggtgaagaaggctcgcggcttcctggaattcgtggaggattttatccaggtgccccgtaatctggtgggcaaggtaatcggaaagaatggaaaggttatccaagagatcgtggataaatccggagttgtgagggtgagaatcgaaggcgataacgagaacaagctgccacgggaagacgggatggtgccattcgtctttgtggggaccaaggaatccatcggtaatgtgcaggtactgctcgagtaccatattgcatacctgaaagaggttgagcaattacgcatggaaagattacagattgatgagcagttacgacagattggcagtcgtagttattccgggcgcggacgggggcggcgcgggcctaactacacgtccggctatggaacaaacagcgaactgtctaatcctagcgagaccgagagcgagagaaaagatgaattatccgactggagtttggctggggaggatgatcgggactctcggcaccaacgtgactccaggcggcgccctgggggtcggggccggagtgtgtcaggtggcaggggtagaggcggcccccgtggggggaagagttcaatctcgagtgtcttaaaggatccggatagcaatccttactccttgcttgataataccgaaagcgaccaaacagccgatacagacgcttcagagtctcatcactcaaccaatagaaggagacgctccaggaggaggcgcaccgacgaagacgcagtgttaatggatggtatgaccgagtctgacacagcgagcgtgaacgagaacggtctggtgacagtggctgattacatctccagagcagagagccagtcaagacaaagaaatctcccacgcgagacactagccaagaacaagaaagaaatggcaaaagacgtgatcgaagaacatggcccatccgagaaggccatcaacggcccaactagcgcttccggggacgatattagcaagctgcagaggacaccaggcgaagagaagatcaacacactgaaagaagagaacacccaggaggcagccgtcctgaacggggttagctag

SEQ ID NO: 188271 - DNA, 2022 bp, synthetic construct
  misc_feature 1..2022: note = Description of Artificial Sequence: Synthetic coding sequence
  source 1..2022: mol_type = other DNA
atgggcggcctggccagcggcggcgacgtggagcccggcctgcccgtggaagtaaggggcagtaacggcgctttctataaaggctttgtgaaagatgtccatgaggactctgtgaccatattctttgaaaacaactggcagtctgaacgccagattccctttggagatgtgagactgccaccccccgctgactataacaaagaaataaccgaaggggacgaagtggaggtgtacagccgagccaacgagcaggaaccatgcggctggtggctggcgcgagtacgcatgatgaaaggcgacttttacgtcattgagtacgccgcttgcgatgccacttataatgagatcgtgacgctcgaaaggctgagacctgtgaatcccaatcccctcgccacaaagggtagcttctttaaggtcactatggccgtcccagaagacctgcgtgaggcttgctcaaatgaaaacgtacataaggagttcaagaaagccctcggcgctaattgcatctttctgaatataaccaacagcgagcttttcatcttatctacaacggaagcgcctgtgaaaagagcctctctgctgggagacatgcacttccgcagcctgaggaccaagcttttactcatgtcaaggaacgaggaggccactaagcatcttgagaccagcaaacagctggccgccgcattccaggaagaattcacggtgagggaggatttgatgggcctggcgatcgggacccatggagctaacatacaacaagcccgcaaggtgcccggcgtcaccgctatagagctgggagaagaaacctgcacatttcggatctatggcgagacgccagaagcatgtaggcaggccaggtcctaccttgaattctccgaggattccgtccaggttccacgtaatctggtgggcaaggtgataggcaagaatggtaaggttatccaagaaatagtggataaaagcggggttgttagggtacgagtggagggggataacgacaagaaaaaccctagggaggaggggatggtgccttttatcttcgtggggacaagagagaacataagcaacgcacaggctcttctcgaatatcatttaagttacctgcaggaagtggagcaactacgactagaacggctccagattgacgagcagctgcgacaaataggactggggtttaggccccccggatccggacgaggctcaggcggaagcgataaagcaggatactcaaccgatgagtcatctagttcttctctgcatgccacacggacgtatggcggtagctatgggggacggggccgagggaggagaaccggcggtcccgcctacgggccctcatcggacgtttccacagctagtgaaaccgaaagcgaaaaaagagaagaaccaaaccgcgctggcccaggggatagggacccaccaacacgaggagaggagtcgcgccggcggccgactggcgggcgggggcgcggtcccccgccagcacccagacctacatccagatacaactcctcaagcataagtagtgtcttaaaggatccagattccaatccgtacagcctgctggacacctctgaaccggagccgccggtggactccgagcccggggagcctccaccagcgtccgcccggcgtcggcggagcaggaggaggcggaccgacgaggaccgcacggtaatggacggcggactggaatctgacggcccaaatatgacagagaatggattggaagacgagagtaggccccagaggagaaataggtctcggcggaggaggaatagaggcaaccgaacagacggatcaataagcggcgaccggcagcccgtaaccgtcgcagattatatatctcgggccgaaagccagtcgcgccaaagacctcccttggagagaacaaaaccgtctgaagatagcttgtccgggcagaagggggatagcgttagtaaactgcctaaaggaccctcagagaatggtgagttgtccgcccctttggagctgggctctatggttaacggtgtttcctag

SEQ ID NO: 188272 - DNA, 6540 bp, synthetic construct
  misc_feature 1..6540: note = Description of Artificial Sequence: Synthetic coding sequence
  source 1..6540: mol_type = other DNA
atgaacagcctgagctggggcgccgccaacgccgtgctgctgctgttgctgctggcttgggcctctcctaccttcattagtattaacagaggcgtgagggtgatgaaagggcacagcgctttccttagtggagatgatctgaaatttgccattcctaaagaaaaggatgcgtgtaaggttgaagtcgtgatgaacgaacctattacccagagagttggcaaactcaccccgcaggtatttgactgccacttcctcccaaacgaagtgaagtacgtacacaacgggtgcccaattcttgacgaggatacagtcaagcttcgattataccgctttacagagcgcgataccttcattgaaacctttatcctgtgggtatacctgctggaacccgactgcaacatcatccacatgagcaacaacgtcctggaagtgccggaatttaatggtctcagtcaggccattgataagaacctgctaagattcgactacgatcgtatggcgtctctcgaatgtaccgtaagcctcgacacagctaggacaaggcttccggcacatgggcaaatggtgctgggagagcctcgaccagaggaaccacgaggagaccagccccacagtttctttccggaaagccagctacgggctaaattgaagtgtcctggaggaagctgcacaccaggattgaagaaaataggctctctgaaagttagctgtgaggagttcctcctcatgggtctccggtaccagcatcttgatccgccctcgcccaacattgattatattagtatccaactggatctgactgacacaagatccaaaatagtctacaagagcgagtcagcctggcttcctgtgtacatacgtgctggaatccctaaccaaattcccaaggccgcctttatggcagtgtttatcctggaggtcgaccagtttattctcacatccctcacgacgagcgtcttggactgcgaggaggacgagacacccaagccactgcttgtctttaacatcaccaaagcacccctacaaggctatgtgacccatctgctggatcatacgagacctatttcttccttcacatggaaggatttgtccgacatgcagatcgcataccagccacccaacagttctcactccgagagaaggcatgacgaggtagagctcgaggtgtatgattttttttttgaacgctcagctccgatgaccgtgcatatcagtatcagaaccgcagatacaaatgctccccgggtctcctggaatacaggtctgagcctcctcgaggggcagagccgggcaatcacatgggagcagttccaggtcgtggacaacgacgacattggcgccgtgcgcctagtcacagtaggcgggctgcagcacggctggctgaccctgaggggtgggaagggcttcctgttcactgttgctgatctacaggcgggcgtggtgaggtaccaccatgacgattctgacagtaccaaggacttcgtcgtttttagaatctttgatgggcatcacagcattcgtcacaaatttccaataaacgtgctgccaaaagacgatagtccaccattccttatcacaaacgttgtcatcgaactggaggaaggtcagaccattctaattcagggctctatgctacgtgcatctgatgtggatgcatccgatgattacatattctttaatataaccaaaccacctcaagcaggagagatcatgaaaaagcccgggcctggcctaattggctatccagtgcacggattcctccaacgagatctatttaatggtataatctattacaggcacttcggcggagagatcttcgaggatagtttccagtttgtactgtgggacagccatgaaccgcctaatctgtcagtgccgcaagtagcaaccattcatatcacccctgtcgatgaccaacttcctaaagaagcccctggagtgagtaggcatcttgttgtaaaagaaacagaggtggcttacataaccaaaaagcagctccatttcatagattctgagagttatgaccgggaactcgtatacacaatcaccactccgccattcttctcatttagccaccggcatctggatgctgggaagttgtttatggtggatagtatccccaaggtcgtcaagaatccaacggccctggaactgcgtagcttcacacagcatgccgtgaattatatgaaggtcgcgtacatgcccccaatgcaagatattggtccgcactgcagggacgtgcaatttaccttcagtgtgtcaaatcagcatggcggcacactccatggcatctgtttcaacataactattcttcctgtcgacaatcaggtgcctgaggcctttactaatcctttgaaggtgaccgagggagggcagtcaatcatcagtaccgaacatatcttaatctccgatgccgatactaaattagataatattgacttgtcgctgcgggagttaccgcttcatggtcgtgttgaactgaacggttttccgctgaatagtggcggcacattctcctggggagacctgcatacactgaaagtgcgataccaacatgacggaacagaagtgctgcaagatgatttattgctcgaagtgaccgacggcaccaacagcgcagagtttgtgctccatgtcgaggttttccccgtaaatgatgagcccccggtcctgaaagcggacctgatgcctgtaatgaattgctctgaaggcggagaggtcgtcatcacttcagagtacatcttcgcgactgacgtggacagcgacaacctcaagctaatgttcgtcatcgcccgggaacctcagcatggcgtggtgaggagagctggtgttaccgtggaccagttttcacaaagagatgttatttcagaggccgtgacctacaaacacaccggcggagagattggcctcatgccatgctttgacaccatcacgctagttgtgagtgacggggaagcagggccatttgtgaacggttgttgttataatggaccaaaccccagcgttccactgcacgcctcatttcctgtgtatgacctcaatatcactgtatatcctgtagacaatcaaccaccaagcattgcaattgggcctgtttttgttgttgacgagggctgctcaaccgcccttacggtcaatcatctgtcggctacggatccagataccgccgcagatgacttggaattcgtgcttgtatcgccaccacagtttggataccttgagaacatccttccgagtgtcggcttcgaaaagtccaatatagggatctcgatagactcctttcagtggaaagatatgaacgcctttcacattaattacgtgcagtcccggcacctcagaatcgaaccgacagccgatcagttcacggtgtatgtgacggacggtaaacaccactcactggaaataccgttcagtatcattattaaccctaccaacgacgaggcccccgatttcgtggtgcagaacatcaccgtctgcgaggggcagatgaaagagctggactcctctatcatcagtgccgtggatcttgacattccacaggatgcactgcttttcagcattactcagaagcctaggcatggcttgctcattgatagaggcttctccaaggacttcagcgagaataaacagcccgcaaatccacatcaaaaacatgctcctgtgcattccttttcgatggagctgttaaaaacgggcatgcgcctgacctacatgcacgatgattctgagtccctggctgacgacttcactatccaattgagcgacgggaaacacaagattctgaagactatctccgtggaagtaatccccgtcaacgatgagaagcctatgttatctaagaaggccgaaatcgcaatgaacatgggagagacaagaattatttcctctgcgatcctgtcagcgatagacgaagatagtcccagggagaagatttactacgtgttcgaaaggctacctcagaacggccaacttcagttgaagattggcagggattgggtacctttatcccccgggatgaagtgtactcaagaggaggtggatctcaatctgctccggtacacccacacgggcgcgatggactctcaaaatcaagacagcttcacgttttacctgtgggacggtaataaccgtagccccgctctcgactgtcaaattacaatcaaggatatggaaaagggggatatcgtgattctcaccaagccattggtggtaagcaaaggggaccgaggcttcctgacgacgactacattactcgccgtcgacggaacggacaagcccgaagaattgctgtacgtcattaccagcccccctaggtacggacaaatcgagtacgtgcattaccccggcgtgcctataactaatttttcccagatggacgttgtcgggcagacggtttgctatgtgcataagtccaaagttactgtgagtagtgacagattcagatttataataagtaacggcctgagaaccgaacacggtgtgtttgagattactctcgaaaccgtagatcgtgcgctgcctgtggttactaggaacaaaggtctgaggctggcacagggggccgtcgggttactaagtccagatctgctccagttaactgatccggatacacccgctgagaatctaacctttctgctggtgcagctgccgcagcatgggcagctctacttgtggggaactggcctcctgcagcataacttcactcaacaggatgttgacagcaaaaatgtcgcctaccgccattctggtggggatagtcagaccgattgcttcaccttcatggcgacagacggtacaaaccaggggtttattgttaatgggcgcgtttgggaggagcccgtgctgtttaccatccaggttgatcagctcgacaagaccgccccaagaattacccttctccatagcccatctcaggttggactgttgaagaacggctgctacggaatctatatcacatcacgagttttgaaggcatctgacccagatactgaggacgaccagatcatttttaagattctgcagggaccaaaacatgggcaccttgaaaacacaacaacaggagagttcatacacgagaagttttcacagaaggacttgaactccaaaaccatcctctacatcattaatccaagtctcgaggtgaactctgatacagttgaattccagattatggacccgactggcaatagcgctacgccacaaattctcgaactgaagtggagtcatatcgagtggtcacagacagaatacgaggtctgtgagaatgtcggtttgcttcccttggaaatcattcgccgaggctattccatggatagtgcctttgtggggattaaagtcaaccaagtctcggctgcggtcggcaaggatttcaccgtgatcccttccaaactgattcagtttgacccaggtatgagtacaaaaatgtggaacattgctatcacttacgatgggctcgaggaagatgacgaggtttttgaagttattctgaatagtccagttaacgctgtgttgggcacaaagaccaaggcagcagtgaaaatccttgacagtaaaggcggacagtgccatccctcttatagctcaaaccagtctaagcatagtacatgggagaagggtatctggcatttgttgccaccgggatccagtagcagtaccacgagtgggtccttccacctggagaggagacctcttccaagtagtatgcagctcgctgtcattcggggggacactctcaggggctttgacagcacggacctctctcagcgaaagttaagaacaaggggtaacggtaagacagttagaccctcatctgtgtataggaatgggaccgacatcatttataactaccacggcattgtgtcccttaaattggaagatgactccttccctacccataaaagaaaagccaaggtgtccatcatttctcagcctcagaaaacaatcaaagtcgcggagctgccccaggccgataaggtagagtccacgacggattcccactttccaaggcaggaccagctgccatccttccccaagaactgcacccttgaactcaagggtctgtttcacttcgaggagggtatccagaagctgtaccagtgcaatggtatcgcctggaaggcctggtccccacagacaaaggacgtcgaggacaaatcatgccctgccggctggcaccagcactctggctactgtcacatcttgattacggaacagaagggtacatggaatgccgccgcgcaggcctgccgggaacagtatcttgggaacctcgtgacagtgttctcacgccagcacatgcggtggctttgggacattggcggaagaaagagtttctggatcggtctgaatgatcaggttcacgcagggcattgggaatggattggcggggaacctgtagcgttcaccaacgggcggagggggcccagtcagaggagtaaactggggaaaagctgcgtccttgttcaaaggcaaggcaagtggcagaccaaggactgtcgcagggccaagcctcacaactacgtgtgctcccgaaagctctag

SEQ ID NO: 188273 - DNA, 6543 bp, synthetic construct
  misc_feature 1..6543: note = Description of Artificial Sequence: Synthetic coding sequence
  source 1..6543: mol_type = other DNA
atgaacagcctgagctggggcgccgccaacgccgtgctgctgctgctcctgttggcatgggcctctccaaccttcattagtatcaatcggggtgtgagggtcatgaaaggacactccgccttcctgagcggcgacgacttaaaattcgcgataccaaaagaaaaagatgcatgcaaggtcgaggtcgtgatgaacgagcctataacccaaagagtgggcaagttgacaccccaggtgtttgattgtcacttcctccccaacgaggtgaaatacgttcacaatggctgccccatcctcgatgaagatactgtgaaactgaggctgtaccgctttacggagagggacaccttcattgagaccttcatcctgtgggtctatttactggaaccggactgcaatattatccacatgtctaataacgtcctagaagttccagagttcaacggcctgagtcaggccatcgacaagaacctgctgagattcgactatgataggatggcgtcgctagaatgcacagtgtcattagacactgctcggacaagactgcctgcccatgggcagatggtactcggcgagccaaggccggaggaaccaagaggtgaccagccccattcttttttcccagaaagccagttgagagctaagctgaaatgtccagggggatcctgtacgccgggccttaagaagattgggagcttaaaggttagttgtgaagagttcctactaatgggcctccgttatcagcacctggaccctccttcgcccaacatagattacatttctatccagttagacctcacagacaccaggtctaaaattgtatataagaaaagcgaatctgcctggcttcccgtttatatccgcgccggaattcctaaccagattccaaaagccgcctttatggcagttttcattctggaagtggaccaattcatcctgacaagtcttacgactagtgtgcttgattgtgaagaagatgaaacccctaaaccgcttctcgtatttaatattaccaaggcaccgctacaaggctacgtgacacaccttctagatcacacccggccgatttcctcttttacttggaaggatctttccgatatgcagattgcctatcagcctcctaacagctcacacagtgaacgccgtcatgatgaggttgaactcgaggtttatgacttcttttttgagaggtctgccccaatgactgtccatatttctatccggactgcagacacaaatgccccacgcgttagctggaacactggccttagcttattggaaggccagtctcgtgcaattacgtgggaacagtttcaggtcgtcgataacgatgatatcggtgccgtcagactagtcaccgtcgggggactgcagcacggctggcttaccctgagaggcgggaaaggcttcctgttcaccgttgcagacctccaggctggagtcgtgcggtaccaccatgacgatagtgacagcacaaaagactttgtagtgttccgtatatttgatggccaccattcaatccggcacaaattccctataaacgttctgccaaaagacgactcgccacccttcttaataacaaatgtcgtcatcgaactggaggagggtcagacaatcttgatccaggggtccatgctgcgcgcctcggatgttgatgccagtgatgattacatctttttcaatatcactaaaccccctcaggcgggtgagatcatgaagaaacctggacccggacttatcggctaccctgtccacggattccttcagagagacttgttcaacgggatcatctactaccggcattttggcggggagatatttgaggactcttttcagttcgtgttgtgggatagccacgaacccccaaatttgtccgtccctcaggtggcaacgattcacatcacaccggtggacgatcagctgcccaaagaggcccctggcgtcagtaggcatctggttgtgaaggaaacagaggtcgcctatatcacgaagaaacagcttcactttatcgattccgaaagctacgacagagaactcgtgtataccatcacgactcctccctttttcagcttttcccatcgccacctagacgccggcaaactgtttatggtcgacagtattcccaaggtggttaagaatccgacggcactggagctgcgatcgttcactcagcacgccgtcaactatatgaaagtagcttatatgcctccaatgcaggatattggacctcactgcagggatgtgcagttcacatttagtgtctcaaatcaacacgggggcactctgcatgggatatgctttaacataacaatactacccgtcgacaatcaggtacctgaagctttcacaaaccccctcaaggtgactgagggcggccagagtattatcagcaccgagcatatcttgatctctgatgctgacacaaagctggacaatattgatttgagcctcagagaactgccactgcacggtagagtggagctgaacgggtttccactcaattctggcggcactttttcctggggggacctacatactctcaaagtcagataccagcatgatggcactgaagtcctccaagatgatttgctgctggaagttacagatggaactaactccgccgagttcgtcttgcacgtagaagtctttccagtcaatgatgagcccccggtcctgaaagccgacttgatgccagttatgaattgcagtgaagggggagaggtggtgatcacctcagaatacatatttgccaccgatgtggatagtgataatcttaaactgatgttcgttattgcccgtgagccccagcacggcgtcgtgcgtagggccggcgtgacagtggatcaattctctcagagggacgtaatttccgaggccgttacatacaaacatactggcggcgagatcgggctcatgccctgtttcgacacaataacgttggttgtttcagacggtgaggccggccctttcgtgaatggttgctgctacaacggaccgaatccctccgtgccactccacgctagtttccccgtgtatgacctgaacatcacggtgtatcctgtagacaaccagcctccttctattgcgataggccccgtcttcgtcgttgacgaaggatgttcgactgccctgactgtgaaccacctgagcgccacagatccagatacggctgcagatgacttagagttcgtgttggtcagcccaccccagtttggctacctggagaacatactgccaagcgtgggtttcgagaaaagcaacattggcatctccatcgatagcttccagtggaaagatatgaacgcattccacataaattacgtgcagagccgtcacctcaggattgagcccacagcggaccaatttactgtctacgtgacagatggcaagcatcactctctagaaattccgtttagtattatcattaatccaacaaacgacgaggctcccgattttgtggtacagaatattaccgtttgtgaaggacagatgaaagagctggacagtagtatcattagcgccgtcgatttggacattccacaagatgccctactgttcagcatcacacaaaagccaagacatggacttttaatcgacaggggctttagcaaagacttttcagaaaacaagcaaccagcgaaccctcatcaaaaacacgcccccgtccactctttctcgatggaactcctgaaaactggtatgcggctgacgtacatgcacgacgacagcgaatctctagccgatgactttacgatccaattgtccgatgggaagcacaaaatactgaagactatctccgtggaagtcattcccgtgaacgatgagaaaccaatgctcagtaaaaaggcagaaattgcgatgaatatgggtgagacccgaataatatcctcagcaatcctcagtgctattgacgaagactcaccaagggagaagatctattatgtctttgagaggcttccacagaacggacagctgcagctaaagatcgggagggattgggttcccctatcaccagggatgaagtgtacacaggaagaagtagatttaaatttgttgagatacacccatactggggccatggactcccagaatcaggatagcttcaccttctatctgtgggacgggaacaaccgcagcccagcactggactgtcagattacaatcaaggacatggagaagggggatatcgttattctgacgaaacctctagttgttagcaagggtgatcgcggattccttacaacgactacattgctcgctgtggacggcactgacaaacccgaagagctcctatacgttattacgagcccaccaaggtatggccaaatcgaatacgtccattaccctggtgtcccaatcaccaatttttcacagatggatgttgtgggacaaactgtatgctatgtgcacaagagcaaagttacagtgagctccgataggtttcggtttatcataagtaatggacttcgaaccgagcacggagtgttcgaaattactctcgaaacagttgacagagctctgcctgtcgttacacgtaataagggccttcgcctcgctcaaggcgcagtgggcctgctgagcccggatctcctccagctgaccgacccggacacacctgctgaaaatttaacttttctgctggtccagcttccacaacatggtcaactctacctgtggggcaccgggctgctgcagcataacttcacgcagcaggatgtggactcaaaaaacgtagcttacagacatagcggcggggattcgcagacagactgcttcacgttcatggctaccgacgggactaaccaaggttttatcgtgaacggcagagtctgggaggaacctgtgctgtttactattcaggtcgatcagctggataagactgcccctcgcatcaccttgttgcacagtccaagtcaagtagggctcctcaagaatggctgctacggaatctacattacctcgcgggttctcaaggcctctgatcccgacacagaggatgatcaaatcatctttaaaattttgcaagggcctaagcacggacacctggagaacacaacaaccggggagtttattcatgaaaagtttagccagaaggatttaaactcaaagacgattctctacattatcaatcccagcctggaagtgaattcagacaccgtagagttccagatcatggaccccaccggtaatagcgcgacccctcagatcctcgagctgaagtggtcacatattgagtggagtcaaacagagtacgaagtctgtgaaaatgtgggcctgcttcccctggagatcatccgtcgaggctacagcatggacagcgccttcgtggggattaaagttaatcaggtctcagcagctgtggggaaggattttacggttattcccagcaagctaatccaatttgaccccggaatgagtacaaagatgtggaatatagctatcacttatgatgggctcgaggaggacgacgaagtttttgaagttattcttaattcaccagtcaatgccgtgttgggcactaagaccaaggcagctgtaaagatcctggacagtaaaggcggccagtgccacccatcttattcctcgaatcaaagtaagcacagtacatgggagaagggaatctggcatctcctgcctcccggctcgagtagcagtaccacctcgggatcatttcacctggagcgtaggcctttgccaagttctatgcaactggcagtgattcggggcgacactctccgcggatttgattcgacagacctgagtcagcgtaaacttcgaaccaggggcaacggaaaaacggttcgacccagtagtgtgtaccgaaacggtacagatattatctacaactatcacgggatcgtctccttaaagctcgaggacgatagcttcccaactcacaagagaaaggcaaaggtgtccattataagtcagccacagaaaaccattaaggtggcagagctgccacaggctgataaagtggaatctaccaccgatagtcactttccacgacaggaccaactccctagctttcctaagaactgcactcttgagctgaaggggttgttccatttcgaggagggcattcagaagctgtaccagtgcaacggaattgcctggaaagcctggagtccacagactaaagacgtcgaggataagtcttgccctgcgggttggcaccagcattccggatattgtcatattctcatcactgagcagaagggcacttggaatgctgcagctcaagcctgccgtgagcagtacttgggtaatctcgtgaccgttttctccaggcagcacatgcggtggctctgggacatcggtgggcgaaaaagcttctggatcggcctgaacgaccaggttcatgccggccactgggagtggatcgggggagaacctgtggcctttacaaacggccgccggggaccctcacagagatccaaactcgggaaatcctgcgtactggtacagcgccaaggcaagtggcagaccaaagactgtcggagagctaagcctcacaattacgtgtgctctagaaaactctag

SEQ ID NO: 188274 - DNA, 648 bp, synthetic construct
  misc_feature 1..648: note = Description of Artificial Sequence: Synthetic coding sequence
  source 1..648: mol_type = other DNA
atgctggacgagagcctggccgtgcggcggagcaagaagtgcaaggagatgatcatgcactgggagaaaaaggaagacatagatatcgtgaacacggtagaccagctggataaaactgcgcctaggattactctgctgcactctccatcgcaggtagggcttttgaaaaacggctgctatgggatctatatcacttctcgcgtactgaaggcctctgacccggacaccgaagatgaccaaataatattcaagatcctccaggggccgaaacacggacacctggagaacacgacaacaggcgaatttatccatgagaaattttcccaaaaagacttgaattcgaagaccatactgtacatcataaatccgagcctggaagtgaactctgataccgtggagttccagataatggatcctactggaaactctgcaaccccccaaatattggaacttaaatggtcgcacatcgagtggagtcaaaccgagtatgaggtttgtgagaacgtcggcctcctgcccctggagattatccggcgaggatacagtatggatagtgcattcgtgggaatcaaggtcaaccaggtgtctgccgctgtcggtaaagacttcacagtcatcccatcaaaactcatacagttcgatccatag

SEQ ID NO: 188275 - DNA, 2148 bp, synthetic construct
  misc_feature 1..2148: note = Description of Artificial Sequence: Synthetic coding sequence
  source 1..2148: mol_type = other DNA
atggtgacccaggagagcatgctgaaggccgccctgcccctgttcactaggtttattatttctaatgggctgaggaccgagcatggggtcttcgagattaccctggagacggtggatagagcccttcctgttgtgaccaggaacaagggcctacgcctggcccaaggcgccgtgggcctgctgagcccggaccttctgcagctcacagatccagacactcctgcagaaaatcttacatttttacttgtgcagttgccacagcatggacagctctatctgtggggaacggggctgttgcaacacaacttcacgcagcaagacgttgactccaagaatgtcgcttataggcacagtgggggcgatagccagaccgactgcttcaccttcatggccaccgatggcaccaatcaggggtttatcgtaaacgggcgcgtttgggaagagccggtgctatttacaattcaagtggatcagctcgacaaaaccgctccccggatcacactcctgcactcccctagccaggtgggtttactgaagaacgggtgctatgggatatatattacatctagggttctcaaggcttccgatccagatacagaggatgaccaaatcatcttcaaaatactgcagggaccaaagcacggacaccttgaaaacacaactacaggagagtttatccatgagaagtttagccagaaggatctcaattcaaaaaccatcctgtatattataaatcccagcttggaggtcaattctgatactgtcgaattccaaattatggaccctacaggaaacagcgccactccccagatactggagctgaaatggtctcacatcgaatggagccagacagagtatgaggtgtgcgagaacgtcggcctgttgccattggaaattattcggagggggtactctatggactccgctttcgttgggatcaaagttaatcaagtctcagcagccgtaggaaaggactttactgtaatccccagcaagttgatccagtttgatcctggcatgtccacgaagatgtggaacatcgccatcacatacgatggtcttgaagaagatgatgaggtttttgaagtgatcctgaatagccctgtgaatgccgttctcggaaccaagacaaaggccgcggtgaaaatcctggactccaagggagggcagtgccatccctcctatagttcgaaccagtcgaagcacagcacatgggaaaagggaatctggcatctgctgccaccaggcagcagttcctccacaacgagcgggagctttcatctcgagagaaggcctcttcctagtagtatgcagctggctgtgatccgaggcgatacactgagggggttcgattccaccgaccttagccagaggaaactcaggacgcgtggaaatggcaagacagtacgacccagctctgtgtatagaaatggtacggatattatttacaattatcatgggatagtgtcactcaagctggaggacgattcgttcccaacccacaagagaaaggcaaaagtttccattatatcccagccgcagaagacgatcaaggtcgcggagctgccccaggccgataaagtagagtccaccactgattcccatttcccccgccaggaccagttaccttcgtttccaaagaactgcaccttggagctgaaggggttgtttcactttgaggaaggaatccagaagctctatcagtgcaatggaatagcctggaaggcatggagcccacagacaaaggatgtagaggataagtcttgtcctgcagggtggcatcagcacagcgggtactgtcacattctcattaccgaacagaagggcacttggaacgctgctgcccaagcttgccgtgagcagtacctgggtaacctggtcaccgtgttttccaggcaacatatgaggtggctgtgggatatcggtggcagaaagtccttttggatcggacttaacgaccaggtccacgccggacattgggagtggattggaggggaacctgtcgcttttactaatggccgacgaggcccctctcagagatcaaagctggggaaatcctgtgtgctggtgcagcggcaaggaaagtggcagacaaaagactgccgcagggccaagccacacaactatgtctgctctcgtaagctgtag

SEQ ID NO: 188276 - DNA, 6540 bp, synthetic construct
  misc_feature 1..6540: note = Description of Artificial Sequence: Synthetic coding sequence
  source 1..6540: mol_type = other DNA
atgaacagcctgagctggggcgccgccaacgccgtgctgctgctgctcctgcttgcgtgggccagtcccacattcattagcattaatcgcggcgtgagggtcatgaaaggacattccgccttcctgagcggcgatgatctgaaatttgccataccgaaagaaaaagacgcatgtaaagtggaggtggtgatgaatgaaccaataacacagagggtcggaaagctgaccccccaagtgtttgattgccactttctgccaaatgaagtcaaatacgttcataatggctgtcccattctggatgaggacacagtgaagttacggctgtaccgctttaccgagagggatacctttattgagacattcatcctttgggtttacctgctggaacccgattgcaatatcatccatatgtctaacaacgtgctggaggttcctgagttcaacgggcttagtcaagccatcgataaaaatttgctgcgcttcgactacgaccgaatggccagcctggaatgtaccgtgtcgttggatacagctcgcacaaggctgccagcccacggacagatggtattgggcgagccccggcccgaggagccaaggggagaccagccacatagcttttttccggagtcacaacttcgggctaagctaaaatgtcctggaggcagctgcacgccaggccttaagaagataggaagcctcaaggtctcatgcgaggaattcctgctgatgggactgagataccagcatttagacccaccctcccctaatattgattatatttcaatccagctggatctgactgacacccgttcaaagatcgtgtacaaaagtgaatccgcgtggctgccagtctacatcagagctggaatccctaatcagatacccaaggcagcatttatggcagtgttcatccttgaagtggatcagtttattctcacctctctgaccacgagtgtactggactgcgaggaagacgagactcctaagcccctcttagtcttcaatatcaccaaagctcctcttcaggggtacgtgactcatcttctggatcacacgaggcctatctcaagtttcacttggaaagatcttagtgatatgcaaatcgcatatcagcctcccaattcatcacatagcgagagaaggcacgacgaggtcgagctggaagtgtacgatttctttttcgagaggtcagcgccgatgacggttcatatctctataagaaccgcggacaccaacgccccacgtgtgtcctggaataccggtctcagcctgctggaaggccaaagccgcgccatcacttgggaacaattccaggtcgtggataatgatgacatcggagccgtacgcctggtcactgtggggggccttcaacatggctggctcaccctccggggggggaagggcttcctgttcaccgtggctgacctccaggctggggttgtccgctaccaccatgacgattctgacagcaccaaggactttgtcgtctttaggatctttgacggacaccacagcatcaggcataagtttcccatcaacgtgttacccaaagacgattccccccctttcctgataaccaacgtagtgatcgaactcgaggaagggcagaccatactgatccaaggaagcatgttgagagcatctgatgtcgatgccagcgacgattacatctttttcaatattaccaagccgccccaagctggtgaaattatgaaaaagcccggaccgggcttgatcgggtaccccgtccacgggttcctgcagcgagacctgttcaacggcatcatttactacagacacttcggtggggaaatcttcgaagattcgtttcaattcgttctatgggacagccacgagccacctaatttgtcagttccgcaagtggccactattcatatcacgcccgtggacgaccaactcccaaaggaggccccgggggtgtcccggcacctcgtggtcaaggaaacggaagtcgcttacatcaccaagaagcaactgcactttattgactctgaaagctacgatagagagcttgtgtacaccattaccaccccgccattcttttcgttcagccataggcacctcgatgcgggcaaattatttatggtagatagcataccaaaggtggtgaagaacccaactgccttggagttgagatctttcacacagcatgccgtcaactatatgaaggtggcgtatatgcccccgatgcaagacatcggcccacattgcagagatgtgcagttcactttcagcgtgagtaaccagcatggcgggaccttgcatggcatttgtttcaacatcaccattcttcctgtggataaccaggtcccagaagcttttacgaatccacttaaggtgactgagggcggacagtccataatcagcaccgagcatatacttatcagcgatgcggatactaaactcgacaacatagacctgagccttcgcgaactccccctacatggacgggtagaactcaatgggtttcccctgaactccggcggcacgttctcctggggcgaccttcataccctcaaggttcgataccaacacgatggtacagaggtgctgcaggatgacctcctgttggaggtcactgatgggacaaactctgcagaatttgttctgcatgtcgaagtttttcctgttaacgatgaacctcccgtgctgaaggctgatcttatgcctgtaatgaattgcagcgagggtggcgaggtcgttataaccagcgaatacatcttcgccaccgatgtggactccgacaacctgaagcttatgtttgtgatcgccagagagccacagcacggagtagtgcgccgagccggcgtgacagtcgaccagtttagccagcgggacgttatctccgaagccgtgacatataaacataccgggggggaaataggccttatgccctgctttgacaccataactcttgtggtctctgatggagaagcgggcccatttgtcaatggctgttgttacaacggccctaacccatccgtgcctcttcacgcaagctttcctgtatacgatctgaatattactgtttatccagtggacaatcagccaccttctatcgcaatcgggccggtcttcgtggtggacgaaggctgttccaccgcgctgaccgtgaaccacctttccgcaacagatcccgacaccgctgctgacgacctcgagtttgtgttagttagcccccctcagttcggttacttggagaatatccttccgtctgtgggctttgaaaaaagtaacattgggattagtatcgattcctttcaatggaaggacatgaacgcttttcacatcaattacgtccagtctagacacttgcggatcgaacccaccgcggatcagttcacagtgtatgtgacagacggaaaacaccattccttggagatcccattcagtatcatcattaaccctacgaacgatgaagcgcccgacttcgttgtgcagaacattaccgtgtgcgaaggacaaatgaaggaactcgactcaagcattattagtgctgtcgaccttgatataccacaagatgcattacttttctctattactcaaaaaccacgacacggattactcattgacagagggttcagcaaggacttctcagagaataagcagccggcaaatccccatcaaaagcatgcccctgtgcactctttctccatggaattgttgaagacggggatgcgcctaacttacatgcacgatgatagcgaaagtttagccgatgacttcacaatccaactgagtgatgggaaacacaaaatcttgaagacgatatctgtggaagtgattccggtgaacgacgagaaacccatgctctcaaagaaggctgaaattgcaatgaatatgggtgaaactaggataatttcttcggccatcttgtccgctattgatgaggattctccacgggagaagatctactacgtatttgagaggcttccccagaatggacagttacagctgaaaatcggtcgggactgggtcccactctctcccggcatgaaatgcacacaagaggaagtggatcttaacctgttacggtacacccataccggtgctatggactcacagaatcaggattcatttactttttacctgtgggacgggaataaccgttcgccggccttggattgtcagattaccattaaagacatggagaaaggcgacattgtaatcctgaccaagccacttgtcgtgtctaaaggggaccgggggttcctgaccaccactactcttctggccgtggacgggacagataaaccggaagaactgctgtacgtcattaccagccctccacgctatggccagattgagtacgtgcattacccaggggtccccatcacaaacttcagtcaaatggacgtcgtgggtcaaactgtgtgttacgttcacaaaagcaaggttacagtatcctccgacaggtttcgctttatcatctctaacggtctacggacagagcacggcgtgtttgagattaccctggaaactgtcgaccgggctctcccggtggtgactaggaataaagggttgcgattagcccagggagcagtagggttgctgtcccccgatctattacagctcacagaccctgacacccccgctgagaatctgacattcttgctggtccagctgcctcagcacggacagctgtacctttggggcaccggtctccttcagcacaatttcacacaacaagacgtcgattctaaaaacgtggcatatcggcattcagggggggacagtcagacagattgtttcacatttatggctacggatggtaccaaccagggcttcattgtgaacggcagagtatgggaggagcctgtattatttactatccaggtcgaccaacttgacaagaccgctccccgaattactttactgcattccccttcccaggtgggactgctgaagaatgggtgctacggcatttacataacaagccgtgtgctgaaggcttccgatcccgacacggaagatgaccagattattttcaagatcttacaaggccccaagcacggacatttagagaacaccaccacaggcgagttcattcacgagaaattcagtcagaaggatttgaactcaaaaaccatcctgtacatcattaacccttcgctggaggtgaacagcgacacggtggagtttcagataatggatcctacaggaaactcagcgacgccccagattcttgagctgaaatggagccacattgagtggtcccagaccgagtatgaggtgtgcgaaaacgtagggctgctcccactagagataatcagacgcggctatagtatggacagcgcttttgtggggattaaggtgaatcaggtctccgccgcagtgggaaaggacttcactgtgattcccagtaagttaatccaattcgatcctggtatgagcacaaagatgtggaacatcgcaattacctacgacgggctggaggaagacgatgaggttttcgaagtgatcctgaacagcccagtgaatgctgtgttgggtacaaagactaaagctgcagtgaaaatactcgactctaagggtggacagtgccatccatcctattcatcaaaccaatccaaacattccacttgggagaagggtatttggcacctgctccccccaggatctagcagcagtaccacttcgggttcatttcacctcgaaagacggcctctcccttcctccatgcagctcgcagtgattagaggagacacgcttcgaggattcgatagcactgacctttcgcagcgaaaattgagaacacgagggaatgggaagactgtgaggccatcttccgtgtaccggaatggaacagacatcatttacaactaccatgggattgtgtctctgaagctggaggatgattcctttcccactcacaagaggaaggccaaggtcagtatcatcagtcagccccagaagaccattaaggttgctgaactgccgcaggcagataaagttgagtctactaccgattcccatttccctcgacaggaccagcttcccagctttcctaaaaattgcacccttgagttgaagggcttgttccactttgaggagggaatccagaaactgtatcaatgcaatggtattgcctggaaagcctggtcaccgcagactaaggacgtagaggacaaatcatgcccggccgggtggcatcagcattcgggatattgccacatcctgataacagagcaaaagggtacatggaacgccgccgcacaggcatgccgggagcaatatctgggcaacctggtgaccgtgtttagtcggcaacacatgcgctggctctgggacattggtggtaggaaatccttttggattggcctgaatgatcaagtgcacgcaggccactgggagtggattgggggtgagccagtggctttcacaaatggccgacgcggcccctctcagaggagcaagcttggcaaatcttgcgtgcttgtgcagagacaggggaagtggcagaccaaggattgcagaagggccaaaccacacaactatgtgtgctcacgaaagctctag

SEQ ID NO: 188277 - DNA, 9510 bp, synthetic construct
  misc_feature 1..9510: note = Description of Artificial Sequence: Synthetic coding sequence
  source 1..9510: mol_type = other DNA
atgcacagcgccggcacccccggcctgagcagccggcggaccggcaatagcacttctttccagcccgggcctccgcccccccccaggttgcttctgctcctcttactcctgctgtccctggtgagccgtgttcccgctcagccagccgcattcggccgggcactcctcagcccaggccttgcaggggctgctggggtacctgcggaggaagccattgtgcttgccaaccgcggcctgcgggtgccatttggacgggaagtgtggctagacccgcttcacgatctggtactgcaagttcaacccggagatcgctgcgccgtgtccgtgctcgataatgatgcccttgcccagagaccggggagactctcaccgaagcgcttcccctgtgactttggaccaggtgaggtgcggtacagccatctcggcgctcggagcccgagtcgtgatcgggtgcgacttcagcttcgatacgatgcccccggaggagccgttgtcctgccgctggtcctcgaggtagaggtggtctttacgcagctagaggtagtcactcgcaacctgcctctggtggtggaggagctactgggcacctccaacgccctagatgctaggtccctggagttcgcttttcagccagaaactgaggaatgtagggtggggattctatcagggctcggagcattaccgagatacggggagctcctccactacccacaggtacctggaggggcccgggaaggtggggcgcctgaaaccctgctaatggattgcaaggccttccaggagcttggcgttcgctatcgccacacagctgcatcacgctctccgaacagggactggattcctatggtggtggaattgaggtcacggggagcaccggtcggaagtcccgccctgaaacgggaacactttcaggtacttgttaggatacggggaggggcagagaacaccgccccaaaaccttcattcgtggcaatgatgatgatggaggttgatcaatttgtgttaaccgcactaactcccgatatgctggccgcagaggatgctgagagtccttctgacctgctgattttcaaccttacgtccccgttccagccaggtcagggatatctggtctcgacagacgatcgctctttacctctttcctccttcacccagagagatctccgattactcaagatcgcttaccaaccaccctccgaagatagtgaccaggaacggcttttcgagctggaattggaggtggtcgaccttgagggggctgcctccgacccctttgcctttatggtcgtagtcaagcctatgaatacaatggccccagtggtaacccggaacacgggccttatattatatgagggccagtcacggccactgactggcccagctgggagcgggccccagaatctggtcatttccgatgaagacgatctggaggctgtgcggctcgaggtggtggccggcttacggcacgggcatcttgtcattctgggagcatccagcggcagctcggcaccgaaaagttttactgtggccgaactcgccgccgggcaagtggtgtatcaacatgatgatcgcgacggatccttgtcagataacctagttctacggatggttgatggaggagggagacatcaagttcagttcctgtttcctatcacgttggtgccggtggacgaccaaccacctgtactgaatgccaatactggactcaccctggcagaaggggagacagtgccgatcctgcccctgtccctctctgccacagacatggactccgatgacagcctgcttctctttgtgctcgagtctccattccttaccacgggccacctactgctccggcagacacaccccccgcacgaaaagcaagaactgttgcgtggcctctggaggaaagagggggcgttttatgaaagaacggtgactgaatggcagcagcaggatattactgagggcagattattctaccgccattcgggcccacacagcccaggccctgtaacagaccaattcacctttcgcgtgcaagacaatcacgatcccccgaatcagagcggattacagaggtttgtgattcgcatacaccctgtcgatagactgcctcccgaattgggttccgggtgcccactccggatggtggtgcaggagtcacagctcacgccactgcggaaaaagtggctgcgctataccgacctggatactgacgacagggagctcagatatacagtgacacaaagcccgactgacaccgatgaaaatcacctcccagcgcccctcggaacattagttctcacagataatcctagcgtcgttgttacccactttacgcaggcccagattaaccaccacaagatcgcatatagaccccccgggcaggaactcggcgtcgccaccagagtagcccagttccaattccaggttgaagatagagcgggtaacgtagcgcccggcacctttaccctatacctgcatcccgttgacaatcaacctccagaaatcctgaacaccgggtttactatccaggaaaagggccaccatatattatcagaaacagaactgcacgttaacgacgtggacacagatgtcgcccacatcagctttaccctgacacaggccccaaaacacggacatatgagagtgtctgggcagatcctacatgtgggcggtcttttccatctggaagatatcaagcaaggacgagtgagttacgctcataacggggataaaagcctgactgactcctgctccctcgaggtttccgatcggcaccatgtcgtccccataacactccgcgtgaacgtccgtcccgtcgatgacgaagtgccaatactttcccatccgaccggcaccctagaaagctacctggacgtgttagagaatggagctactgagatcaccgcaaacgtcatcaaaggtacgaacgaggaaaccgacgacctgatgcttaccttcctcctggaggatcccccgctgtatggggaaattctggtcaacgggattcccgcagaacagtttacgcaacgagacatcttggagggctccgtcgtctacacacacaccagtggggagatcggtctcttgcccaaggcggatagctttaatctaagtctctcagacatgagccaggagtggcgtataggaggaaatacaattcagggagtaacgatttgggtgactattctgccagtagacagccaagccccagagatttttgtgggcgagcagctgatcgtgatggagggggacaaaagtgtcatcacaagcgtgcacatttccgcagaagacgtggattctctgaatgacgacattctgtgtaccattgtgatccagcctacatctggctatgtcgaaaacatctctccagcccccggatccgagaagtcccgggctggtattgccatcagtgcctttaacctgaaggatctgaggcagggccatattaactacgttcagagtgtgcataaaggcgtggagccggtggaggacaggtttgtattcagatgttcagacggcattaattttagcgaaagacagtttttccctatagtgatcattcccacgaacgacgagcagcccgaaatgttcatgcgcgaattcatggtgatggagggcatgagtctcgtcatcgacactcctatcctgaacgcagccgatgctgacgtgccgttagacgacctgactttcacaataactcaatttcctacccatggacacattatgaaccagcttatcaacggaaccgtcctagtggagtcattcacattggaccagatcatcgaaagcagcagtatcatctatgaacacgacgactcagagacacaggaggactctttcgttatcaaactaacagatggcaagcactccgtcgagaaaacagtattgatcatcgtcatacctgtggacgatgaaactcctagaatgactataaacaacggactcgagatcgagatcggtgataccaagataattaataacaagatactgatggcaacggacctagactctgaggataagtctttagtctatatcataagatacggccccggacacggacttctccaaaggcggaaacctactggagcgtttgaaaatataaccttaggaatgaactttactcaggacgaagtggatcgtaatctgatacagtatgtgcatctggggcaggagggaatacgcgacttgattaagtttgacgttacggatggaatcaacccgctgattgacagatacttttacgtgagcataggatctattgacattgttttccctgatgtgatctctaaaggcgtgagccttaaggagggcggaaaagtcaccctgacaaccgatttgctgtccacttcggatctgaatagtccagacgagaacctcgtgttcaccatcacacgggctcccatgcgggggcacttggagtgtactgaccagcctggtgtgagcatcacaagcttcactcagctgcaactcgccgggaataagatctactacatccatacagccgacgatgaggtgaagatggactcatttgaatttcaggtcacggatggtaggaatcctgtcttccggactttcagaatctcaatcagcgacgtcgataacaaaaagccggtggtgaccatacacaagctcgtggtgtcagagtccgagaacaagttgattaccccatttgagcttaccgttgaagaccgcgacaccccagataaactgctgaaattcacaataactcaggtgcccatacatggccatctgctttttaataatactagacctgttatggtgttcaccaagcaggatctgaatgagaatctcatatcgtacaagcatgatggaacagagtccagcgaggacagcttcagtttcaccgtcactgatggaactcataccgatttttacgtcttcccggatactgtgtttgaaacccggcggcctcaagttatgaagattcaggtgttggccgttgacaattctgtgccccagattgctgtgaacaaaggcgcctccacgcttcggacactcgctaccggccacctgggcttcatgataactagtaagattctcaaggtggaagacagggattctctgcacattagtcttcgcttcatcgtgaccgaggccccgcagcatgggtacctgctgaatcttgataagggtaaccactcgattacacaatttacccaggccgacattgacgatatgaaaatttgctacgtcttgagggagggtgcaaatgctacatccgatatgttctactttgctgtcgaggatggggggggcaacaaacttacctaccaaaattttcgcctgaactgggcttggatttcttttgagaaggagtattatcttgtgaacgaggactcaaaattcctcgacgtcgtcttaaagcgacgtggctacctcggcgagaccagctttattagtattggcactagagatagaacagcggaaaaggataaggattttaaagggaaagcccagaagcaagtccaattcaacccggggcaaactagggcaacatggagggttcgaatcctgtctgacggtgagcatgaacaaagcgaaacctttcaggtggttctgtccgagcccgttctcgccgctttggagttcccaactgtcgctacagtagagatagtcgatccaggtgacgagccgacagtgttcattcctcagtccaaatactctgtggaagaggacgtgggggaacttttcattccaatacggcgctcaggcgacgtgagccaagagctgatggtcgtgtgttatacgcagcagggcaccgccaccgggacagtgccaacgtctgttctcagctattctgactatatttcccggccagaggaccatactagcgtagtgcgcttcgacaaggacgaacgggagaagctgtgccgcatcgtcatcattgacgactcgctgtatgaagaggaagaaacgtttcacgtgttgctgtcgatgcccatggggggccgaataggcagcgagttccctggcgcccaagtgacaatagtgccggacaaagacgacgagccaatcttttacttcggtgacgtggaatatagcgtcgatgagagcgctggttatgtggaggtccaggtgtggcgcactgggactgatctctcaaagtcaagttcggtgactgttagaagccgcaaaacagatcccccgagcgctgacgcaggtaccgactatgtcgggatcagtcggaacctggacttcgctcccggcgttaacatgcagcctgtacgggtggtgattctggacgacttggggcaacctgccctggaaggcatagaaaagttcgaactggtgctcagaatgccaatgaacgccgccctgggcgaaccatccaaggccacagtgtcgattaatgattccgtctccgacctcccaaagatgcagttcaaggaaagaatctataccggtagtgagagtgacggacagatcgtgaccatgattcacaggactggggacgtgcagtacagatcttccgtgagatgctacactagacagggatctgctcaggtaatgatggacttcgaagagcgcccaaacactgatacaagcataatcaccttcttgcccggagaaacagagaagccatgcatcctggagctgatggatgacgtgctatacgaagaggtcgaagaacttcgcctggtgctagggaccccacagtctaactctccttttggggccgccgtgggcgagcagaatgagacactgataagaatccgcgacgacgctgacaagaccgttataaagtttggagagactaaattcagtgtgactgagcccaaggaacccggcgagagtgtggttattcgaattccggtgattaggcagggcgatacatccaaagtcagtatcgtgcgggtgcataccaaggacggctctgccacctctggagaagattatcatcccgtctctgaagagatcgagtttaaagagggcgagactcaacacgtggtggagattgaagtgactttcgatggggtgagggaaatgcgggaggcatttactgtgcatctgaaaccagacgagaatatgattgcagagatgcagctcactaaggctatcgtatacatcgaggagatgagttccatggcagacgtcacatttccttcagtgccccagatagtctcactgctgatgtacgacgataccagtaaggccaaagagtccgctgaacccatgtccggctacccagtcatttgcatcaccgcatgtaatcctaagtatagcgattatgacaagacgggttcaatttgcgcatctgagaatatcaacgataccctgaccaggtatagatggctgatctccgcgccggcaggccctgacggggtgacttcaccgatgcgcgaggtggattttgatacattctttaccagctctaagatggtgacactggactccatatactttcagcccgggagtcgcgtacaatgtgccgcacgtgcggtgaatacaaatggagatgaaggcctggagttgatgtcacccatagtgacaatcagccgcgaggagggcctgtgtcaaccaagagtgcctggagtggttggagccgagcctttttctgcaaagctgagatataccggccccgaggacgcggattatactaatcttatcaagctcaccgtcacgatgccccacattgatggcatgctccccgtgatctctactcgtgagttgtcaaatttcgagctgactctcagtcccgatgggacgagagtcgggaatcataagtgctccaacctgctggactacactgaggtgaaaactcactatggcttcctcacggacgctacaaagaaccctgagattatcggggaaacttacccataccagtattccctcagcataagagggagcaccacgctgcgattttatcggaacctcaacctagaagcttgcctgtgggaattcgtaagctactatgacatgagcgaacttctggccgactgcggtggaaccatagggacggacgggcaagtcctgaacttggttcagagttacgttaccctgcgagtcccgctttacgtaagttacgtattccattcccctgttggggtagggggctggcaacatttcgatctcaaatcggagctgagactgactttcgtttatgacacagcgatcctttggaacgatgggattggatcacccccagaggctgaactccagggcagcttgtacccaactagcatgagaatcggcgatgaaggccgcctggccgtccactttaagactgaggctcagttccacggactgttcgtactgagccaccccgcttcctttacgtcaagtgtgatcatgtcagcggatcatcccggcttaaccttttctctgaggctcatcaggtcagaacccacatacaatcagcctgtacaacaatggtccttcgtaagcgacttcgcggtacgggactatagcggtacatacacagtcaaactcgtgccatgtacagcgccatctcaccaggaatacaggttacccgtgacgtgtaatcctagggaacccgtcacatttgacctggacataagattccagcaggtctctgatcctgttgccgcagaatttagcttaaacacccagatgtacctgctgagcaagaagtccctctggctatccgacggctcaatgggcttcggccaagagtcagacgtagcgttcgccgaaggggatatcatctatggacgcgtcatggtagacccagtacagaatctgggagattctttctactgctcaatcgagaaagtcttcctgtgtacaggggcggatggatacgtaccgaagtattctcccatgaacgctgagtatggctgcctggccgactcaccctcgttactctatagattcaaaattgtcgataaagcacaacccgaaacccaggccaccagctttggaaacgtgctgtttaatgctaaactagctgtcgacgaccccgaggctatcctattagtaaatcaacctggcagcgatgggtttaaggtcgattccactcctcttttccaggttgctctgggccgagaatggtatatccatacaatttacacagttcgcagcaaggataatgccaaccggggcataggtaagcggtccgtcgagtatcattccctggtgtcccagggaaaacctcagagcaccactaaaagccgcaaaaagcgcgagatacgcagtacgccatcactggcttgggagatcggcgcagagaattcaagggggaccaacattcagcatatcgctcttgatagaaccaaaaggcagatccctcatggtcgcgcaccacctgatggtatccttccttgggagcttaactctccttctagcgctgtatccctggtcaccgtcgttggcggcacgactgtcgggctgcttacaatctgcctcaccgtcatcgcagtgctcatgtgccgcggcaaggaatccttccgcgggaaggacgcccccaagggatcctcgtcaagcgagccaatggtgcccccacagagccaccataatgacagttctgaagtgtag

SEQ ID NO: 188278 - DNA, 12039 bp, synthetic construct
  misc_feature 1..12039: note = Description of Artificial Sequence: Synthetic coding sequence
  source 1..12039: mol_type = other DNA
atgggcgtgctgaaggtgtggctgggcctggccctggccctggccgagttcgccgtcctgccgcatcattccgagggcgcctgtgtatatcaggattctctgctggccgatgctacaatatggaagccagattcctgccaatcttgcaggtgtcacggggacattgtgatttgcaagccagcagtttgccggaatccacaatgcgcgttcgaaaagggcgaagtgctgcagattgcagcaaaccaatgctgccccgaatgcgtattgcggacccccggttcatgtcatcatgagaaaaaaatccacgaacacggtaccgagtgggctagctctccttgcagcgtatgctcatgtaaccacggcgaagtgcggtgtacccctcaaccatgcccacccctcagttgtgggcatcaggagctggcctttatccctgaaggctcttgctgtccagtgtgcgtgggactggggaaaccatgtagttacgagggccatgtgtttcaagacggagaagattggagattgtctcgctgcgccaagtgcctatgtagaaatggcgtggcacagtgtttcaccgcacagtgccaacctctcttttgtaatcaggacgagacagtggttcgcgttcctggaaaatgctgtccccaatgtagcgctcggagctgttcagcagctggccaggtttacgagcacggagaacagtggtccgagaacgcttgtactacatgtatctgcgatcggggcgaggtgaggtgtcataagcaagcgtgcctgccgctgcgctgcgggaaaggtcagtctagagctcgaagacacggccagtgttgtgaggagtgtgtttccccagcaggaagctgtagttatgacggggtggtgcgttatcaggacgagatgtggaagggcagtgcttgcgagttttgcatgtgcgaccatgggcaggtcacatgtcagacaggagagtgcgccaaagtagagtgcgccagggacgaagagttgatccaccttgacggcaaatgctgtcctgagtgcattagtcggaacggatactgcgtgtacgaagagaccggggagtttatgtcttcgaacgcaagcgaagtcaagcggatcccagagggcgaaaagtgggaagatgggccttgtaaagtctgcgagtgccgcggagcccaggtcacatgttatgaaccctcgtgccccccttgtcctgtcgggactttagcattggaggtgaagggccaatgctgccctgactgtaccagtgttcactgtcaccctgactgcctgacctgctctcaatctccggaccactgcgatctgtgccaggacccaaccaagctgttgcagaatggctggtgtgtgcatagttgtggtctgggcttctaccaagctggcagcttatgcctcgcctgccagcctcagtgctctacgtgtaccagtggcctggaatgttcgtcgtgccagccccctctgttgatgaggcatggacagtgcgtacctacatgtggagatggtttctatcaggaccggcatagctgtgctgtttgccatgagtcttgcgccgggtgctggggacctacagagaagcactgcctcgcatgtagagatccactccacgtcctaagagacggcggatgcgagtcttcgtgcgggaaaggcttctataaccggcagggcacctgcagcgcttgtgaccaatcgtgtgactcttgtggcccatccagtcccaggtgccttacgtgcactgagaagaccgttctgcacgacggaaagtgcatgtcagagtgtccgggaggctattatgctgatgctacggggcggtgcaaggtctgtcacaatagctgtgcgtcctgcagtggacctacaccctctcactgtactgcttgctcaccacctaaagccctccggcaaggacattgcctccctaggtgcggcgaaggcttttacagtgatcatggtgtgtgcaaagcttgccactcttcatgtctcgcttgcatgggacctgccccaagccactgcaccggctgcaaaaaacctgaggagggactccaggttgagcaactgagcgatgtgggcatcccatcgggtgagtgcttggcccagtgcagagctcacttttatctggagtccacagggatctgcgaggcatgtcatcagtcttgttttcgctgcgcaggcaagtcgccccacaattgcacagattgcgggccgagccacgtactcctagatggccagtgtctgtcccaatgtcccgatggatattttcatcaggagggcagctgtacggagtgccacccaacctgccggcaatgtcacggccctctagagtcggattgcatttcttgttaccctcacataagtctgactaacggaaactgccgcacctcctgccgcgaagaacagtttctgaacctcgttgggtactgcgcagattgccaccacctatgtcagcattgtgctgctgacttgcacaacaccgggagcatttgcttacggtgccagaacgctcactacctgctgctgggagaccactgcgtgccagactgtccgtctgggtattatgccgagaggggcgcttgcaagaagtgccactccagctgccgtacctgtcaaggccgtggtccttttagctgcagctcatgtgatactaacctcgtgttgtcccacactggaacctgctcgactacttgctttccaggccactatctagacgacaaccacgtttgccagccctgtaacacccactgcgggtcctgcgactctcaggcctcttgcacatcttgccgcgatcccaacaaggtgctcctgtttggcgagtgccagtatgaatcttgcgcgccacagtattatttggatttttcaactaatacctgtaaggagtgtgactggagttgtagcgcttgtagcggtcccctgaagacggattgtctgcagtgcatggatggttacgtgctccaggacggtgcctgcgtggagcagtgcttatcaagcttttaccaggatagtggcctgtgtaagaattgtgacagctactgcctccagtgccaggggccccacgagtgtactcgctgcaaggggccatttctcctgttggaggctcagtgtgtccaagagtgcggcaaaggatacttcgcagatcatgccaagcacaagtgcacggcttgtccacagggatgtttacaatgctcacacagagatcggtgtcatctctgtgatcatggattcttcctgaaatccggcttgtgtgtttataactgcgtaccagggttttccgtgcatacttctaacgagacctgcagcggtaagattcacacacctagtttgcatgtgaatggctctctcatattgcccattggcagtatcaagcccctggattttagcttactgaacgtgcaggaccaagagggcagggttgaggacttactctttcatgtggttagtactcccactaatggtcagctggtcctgagccgaaacggaaaagaggtgcagctggacaaggcagggcggtttagctggaaggatgtgaacgagaagaaagtccgattcgtgcactccaaggagaaactcaggaaaggttatttgtttctgaaaatcagcgaccagcagttcttcagcgagccgcagctgatcaatatccaggccttctccacccaagccccttacgtgttacgtaacgaggtcttacacatcagtcgcggtgagcgcgcaactattaccacacagatgttggatatccgagatgacgacaatccgcaggatgtagtgattgaaatcatcgacccccctctgcatggccagcttttgcagaccctccagtcaccagccacgcccatttatcagtttcaattagacgaactctctagaggtcttctgcactacgctcatgacggaagtgactctacaagcgacgttgcagtgcttcaggccaacgacggccatagtttccacaacatcctctttcaggtcaaaacggttcctcagaacgacaggggtctgcagctcgtggccaactcgatggtttgggttcccgagggtgggatgctccagattactaatcggatcctgcaggccgaagcaccgggagcctctgcggaagagattatttacaaaatcacacaggattacccccagttcggagaggttgtcttgctggttaatatgcctgctgatagccccgccgacgaaggacagcatttgccagatggaagaactgccacgcccactagtacgttcacccagcaggacattaacgagggaatcgtatggtaccggcactctggcgcacccgcacagagtgattcctttcgattcgaagtgtcctcagccagcaatgctcaaactcgattggagagccacatgttcaatatagcgatcctgccgcagaccccggaggctcccaaggtgtcactagaggcctcgctccatatgaccgcaagggaagacggccttacagttatccagccacactctctctcttttatcaactctgaaaagccctccggcaagatcgtgtacaatatcaccctgcctcttcacccaaaccaaggtatcatagagcatagagaccacccacacagtccaatcaggtactttacccaggaggacatcaatcagggcaaggtcatgtatcgcccgccgcctgctgctcctcatctgcaggagttgatggccttttctttcgcaggtctgcccgaatcggtgaagttccactttacagtgtctgatggggaacacactagtcctgagatggttttgaccatccatttattaccgagcgaccagcagttgcctgtgtttcaagttacagccccacgcctcgcagtttcgccaggcgggtccacgtctgtagggttgcaggtcgttgtgcgtgatgccgaaaccgctcccaaggaactgtttttcgaattaagaaggcctccccagcatggagttcttctaaagcacaccgccgagtttaggcgccccatggctactggagatacctttacctacgaagacgtggaaaagaatgctctgcagtacatccatgacggaagctctactagggaggacagcatggaaatttccgtcactgacgggttgacggtcacaatgctcgaggtccgggtggaggtgtctctcagcgaggatcggggacctcggctcgctgctggtagctccctgagcatcacggtcgcgtctaagagcacggccattattacacgctctcatttggcctacgttgacgactcttcacccgatcccgagatttggatacaactgaattatctgccatcatatggtacactgctccgcatctctggttccgaggtggaggagctctcagaagtgtctaacttcactatggaagatattaacaacaagaagatccgttatagcgctgtcttcgagacagatgggcatctggtcaccgacagcttttattttagcgttagtgatatggaccataaccatttagataatcagatattcactattatgatcacacccgccgaaaatcctcccccagtaatcgcctttgctgatctgatcactgtggatgagggggggagggcccctctgtcctttcaccacttttttgcgactgacgacgatgataacttacaacgggacgccatcattaaattatctgcactccctaagtatggttgtattgagaataccgggaccggtgatcggtttggaccggagaccgcatccgatctggaggcaagtttccccatccaggacgtgcttgaaaactacatatactacttccagtcagttcacgagtcaatcgaaccaacccatgatattttctcattttatgtgtcagatggcacatcccgctctgagattcattccattaacatcactatcgaacgcaaaaatgacgaaccacccagaatgactcttcagcccctacgggtacagctcagcagtggcgtcgttatcagcaactctagtctctctttgcaggacctagatacccccgataatgaattgatctttgttctcacaaagaaacccgaccatgggcatgttctgtggaggcagactgcctctgaacccctggaaaacggtcgtgtgttggtccaaggatcaaccttcacctatcaagatatcctggccggacttgtgggctatgtgccaagtgtccccgggatggttgtcgatgagtttcagttttccctgacagatggacttcatgtggacacaggccgcatgaagatctataccgaactaccagcaagcgatacccctcacctcgctattaaccagggtctgcaactgagcgccgggtccgtcgccagaattaccgagcaacacctcaaggtcactgacattgacagcgacgatcatcaagtgatgtatattatgaaggaggaccccggcgccggtcggctgcagatgatgaagcacggcaacctggaacagatcagtatcaaaggccctattcgcagcttcacccaggcagacatctcacagggccacgtggagtattcacatggaactggagagcctggtggcagttttgcttttaaattcgacgtggtcgatggagagggaaacaggttgatcgataaatcctttagcatctccattctggaagacaaatcccccccagtcatcactactaataagggcctggtgctggacgagaattcagtaaaaaaaataactactttgcagctgtcggccactgatcaggacagcggtccaaccgaactgatctacagaatcactcggcaaccacagctcggacacttggagcacgcggcttcccctggcatccagatttcctctttcacccaagccgaccttacctcgaggaacgtgcagtacgttcactcttctgaagctgagaaacatagtgatgctttttcattcaccctgagcgacggcgttagcgaggtgacacagacattccacattacacttcacccagtggacgacagtctcccagtagtccaaaacctggggatgcgcgtgcaggaaggcatgagaaaaactatcacagaattcgagctaaaggctgtggacgccgataccgaagctgaatccgtaacttttacaatagtgcaaccgccccgacatggaacaattgagcgaacgtctaatgggcagcactttcacctgacttccactttcaccatgaaagacatttaccagaacagggtttcatattcacacgacgggtcaaatagcctgaaagacaggttcacattcactgtaagcgatggcactaaccccttcttcattatcgaggaaggcggtaaggaaatcatgaccgcagccccccaacccttccgcgtagacattctccctgtcgatgacggcacgcctagaatcgtgactaatctgggactgcagtggctggagtacatggatggcaaggctacaaatctaattacaaagaaggaactgctgaccatggatccagatacagaagatgctcagttagtgtacgagatcaccacaggacctaaacatggctttgtggagaataaactccaaccagggagagccgctgcaacattcacgcaggaagacgttaatttagggctgatccgatacgtgctgcataaagagaagattagagagatgatggacagcttccagtttctcgttaaagattccaaaccaaacgtggtttcggacaacgtgtttcacatccagtggtccctcatttccttcaagtacacatcttacaatgtctccgaaaaggccggatcagtttccgtgaccgttcagcgaaccggcaacctgaaccagtatgccatcgttttgtgtcgcaccgaacaagggacggcatcttcttcgagtcgggtgagcagccaacccggccagcaggactacgtggaatatgccggtcaagtacaattcgacgaaagggaggatacaaaaagctgcacaatcgttatcaacgatgacgatgtgtttgagaatgtggagtcgttcacagtggagttgtcgatgccagcgtacgccctgctgggcgagttcacacaagccaaggtgattatcaacgatacggaggatgagccgacccttgagttcgacaagaagatctattgggttaatgagagcgctgggttcttgttcgctcccattgaacgcaaaggcgacgcatcctccatagttagcgccatatgctacacagtccccaagtccgccatgggcagctcgctgtatgccttagaatcaggtagcgactttaaatcacgcggcatgtccgcggcgtccagagtgatcttcggacctggcgtcaccatgtccacctgcgacgtgatgcttatagacgacagcgagtatgaagaagaggaggagttcgaaatcgctctcgccgacgcgtccgataacgcgcgcatcggcagggtggcgactgcaaaagtgcttattagtgggccgaatgacgctagcactgtcagtctggggaacactgccttcaccgtgagcgaggacgccggcactgtcaagataccagtaattaggcatggcactgacttgtctaccttcgccagcgtttggtgcgccacacgtccgagcgatccggcatccgccacccctggggtggactacgtcccgtctagtcggaaagtggagttcgggcctggtgtgattgagcaatattgcactttgacgattcttgacgacactcaataccccgtgatcgaaggcctggagaccttcgttgtgttcctgtcatcagcacagggagccgaattgacaaagcccttccaagccgttatcgcaatcaacgacacatttcaagatgttccttcaatgcagttcgcaaaagatttgctcctggttaaggagaaagagggtgtgcttcatgtcccgattacaagaagcggagatttgagttatgagtcatccgttcgctgctacacccagagtcatagcgcccaagttatggaagactttgaagagcggcagaatgctgacagctctcgcattacattcctgaagggagacaaagtgaaaaattgtacagtgtatattcacgatgactctatgttcgagccagaagaacaattccgcgtatatttgggtttgccgctcggaaatcactggagcggcgccaggattggcaaaaataacatggcaaccatcaccatctctaacgatgaagacgcccccacgatcgaattcgaggaggcagcgtaccaggtgcgtgagcctgcaggccctgacgctatcgctatcctgaacattaaggttattaggcgaggcgaccagaataggacatcaaaggtcagatgttcaactagggatgggagcgcccaatctggtgtggattactacccaaaatcccgggtactgaaattctctcccggagtcgatcacattttctttaaggtggagattctgagtaacgaggatagggagtggcacgaatcattctctttggttttaggccctgacgaccccgtagaggcagtattgggtgatgtgacaaccgccaccgtgacaatactggaccaggaggccgcgggttccctgattttaccagcacctccaatcgtggttacgctggccgattatgaccatgtggaagaggtgactaaggagggcgtcaaaaagagtccctctcccggctatccgctggtatgcgttaccccctgtgatccccacttccctcggtatgccgtcatgaaggaacgctgctctgaggcaggcattaatcagacctcggtgcagttctcttgggaagtggcagcccccacagatggcaacggcgcgcgcagcccctttgagacaattactgataacacccctttcacatccgttaaccacatggtcctggatagtatttattttagccgaagatttcacgtgaggtgcgtcgctaaagcggtagataaggttggccacgtcgggactccattgcgttctaatatcgtcacgatcggcaccgacagcgcaatttgtcacaccccagtggtggcgggcacttcacgcgggtttcaggcccagagctttatcgccactctgaaatatcttgacgtgaaacataaagaacaccctaatcgcattcatatatccgtgcagatcccacaccaagatggaatgcttcccctgatttctaccatgcctcttcataaccttcacttcttgctgtccgaatctatatacaggcaccagcatgtgtgttccaatctggtgacaacttacgatctcaggggtattagcgaggccgggtttctcgatgacgtggtctacgactccaccgccttaggacccggttatgacaggccttttcagttcgatccctcagtccgcgaacccaaaacaattcagttgtataaacatctaaatctaaagtcttgtgtttggacctttgacgcctattacgatatgaccgagctcattgatgtttgcggtgggtctgtgacggctgattttcaagtcagagactctgcccagtcttttctgacagtgcacgtgcctctatacgtttcctacatctatgtaactgctccacgcggttgggcaagcttggagcaccacacggagatggaattctccttcttttacgacacagtgttatggaggacagggatccaaactgacagcgttctttcggcgagactccaaatcatcagaatttacattcgcgaagacggtcgtctggtcattgaattcaaaacacacgctaaattcagggggcagttcgtgatggagcaccatacattaccagaggtgaagtcttttgttctgacccctgatcatttgggagggatcgaatttgaccttcagttattgtggtcagcccaaacctttgatagcccccatcagctatggcgagccactagttcttacaaccgaaaagattattctggcgagtacactatatacctcattccatgtacagttcagcctactcagccttgggtggaccctggcgagaaaccactagcctgcaccgcgcacgcccccgagcggttccttattcccattgcctttcagcagactaatagacctgtcccggtcgtgtactcacttaatacggaatttcagctgtgcaataatgaaaaagtctttctcatggatccaaatacatccgacatgtctctggcggaaatggactacaagggagccttcagtaaaggccagatcttatacgggagagtgttatggaaccccgaacagaacctgaattcagcctacaagctgcagctcgagaaggtttacctgtgcactggtaaagacgggtatgtgccgttcttcgatccgacaggcacaatttataacgaaggccctcagtatggatgcatccagcccaacaaacacttgaagcatagattcctcctactcgaccgtaatcagcccgaggttacagataaatacttccatgatgtgccatttgaagcgcactttgcctcggagctcccagatttccacgtcgttagcaatatgcccggcgtggatgggttcacccttaaggtggatgctctgtataaagtagaggccggtcatcagtggtacttacaagtaatctacatcattgggcccgatactatcagcgggcctagggttcaaagatctcttacggctcctctgcgccggaaccggcgggatctggtcgagccggacgggcagttgattctggatgattctctcatctatgataacgaaggagaccaggtcaagaatgggaccaatatgaagtctctgaacctagaaatgcaggagcttgcggtggcggcctccctctcacaaaccggagcttctattgggtctgccctggccgcgatcatgttactgcttctggtgttcctggtggcctgctttatcaatcgcaagtgccaaaaacagcggaaaaaaaagcctgcagaagacatccttgaagagtacccactgaacacaaaggtcgaagtgcctaaacggcaccctgacagagtggagaagaacgttaacaggcactactgcactgtgcggaacgtgaacatcctttcagagcctgaggccgcgtacacattcaagggcgccaaagtgaagaggcttaatctcgaggtgcgggtgcataataacctccaggatggcactgaggtgtag

SEQ ID NO: 188279 - DNA, 2214 bp, synthetic construct
  misc_feature 1..2214: note = Description of Artificial Sequence: Synthetic coding sequence
  source 1..2214: mol_type = other DNA
atgggcgtgctgaaggtgtggctgggcctggccctggccctggccgagttcgcagtgttaccccaccactcggaaggtgcctgcgtttatcaggatagtctcctggccgatgcaactatatggaaacctgacagttgtcaaagctgtaggtgtcatggggacatcgtgatatgtaaacccgcagtatgccggaatccacaatgtgcattcgaaaaaggtgaagtcctgcaaatcgccgccaatcagtgctgtccagagtgtgtccttcggacaccgggctcgtgtcaccacgaaaagaaaatccacgaacatggcaccgagtgggcttcctccccttgctcagtgtgttcctgcaatcacggagaggtgaggtgtaccccccagccttgcccgccactctcctgcgggcatcaggaattggcttttatccccgagggctcctgctgccccgtctgtgtaggattaggcaaaccgtgcagctacgaagggcacgtctttcaggacggcgaggactggcggctgtcacgctgtgccaaatgcctgtgcaggaatggagtcgctcaatgctttactgctcaatgccaacccttgttttgcaatcaggatgagacagtggtgcgtgtgcctggcaagtgctgtccacagtgctctgcccgctcttgcagtgctgcaggccaggtctatgagcacggcgaacagtggagcgagaatgcgtgcactacttgcatatgtgatcgaggagaggtgcgctgccacaaacaggcctgtcttccgctcagatgcggcaaggggcagagtagggccagacgtcacgggcagtgctgcgaggagtgcgttagcccagcgggctcctgcagctacgatggggtggtcagataccaggatgagatgtggaaaggaagcgcctgcgaattttgtatgtgtgatcacggccaggtgacctgccagacaggagagtgtgcaaaagttgagtgcgctagagatgaagaactgatacacctcgacggcaaatgctgcccagaatgtatatcccgaaatgggtactgtgtctatgaggagactggtgagtttatgagttccaatgccagcgaagttaagcgtatccccgaaggcgaaaaatgggaagacgggccttgtaaagtttgtgaatgccgtggagcacaagtaacctgttacgaaccttcctgccccccatgtcccgtgggtactcttgccctagaagtgaagggtcaatgttgtcccgactgtacgtcagtccattgtcatcccgattgtcttacttgcagtcagagcccagatcattgtgacctatgtcaggatcctacaaaactgctccagaatggctggtgcgtccattcgtgtggacttggcttttatcaggccggctcactttgtttagcatgccagccgcaatgttccacttgcacctcaggactggaatgtagcagctgtcagccaccactgttaatgagacatggacaatgtgttccaacctgtggcgatggcttttatcaggatcgccactcctgtgccgtctgccacgaaagctgcgcgggatgctggggacccacggagaagcattgcctggcctgtagagaccctttgcatgtgctccgcgatggggggtgcgaaagcagttgtggaaagggattttacaatagacaaggcacctgctcggcgtgcgatcagagctgtgactcatgtggaccctcttcgcctaggtgtctgacatgcactgagaaaacggtgctccacgatggaaaatgcatgtccgagtgccctggcggttactacgcggatgcaacggggcgctgtaaagtgtgccacaactcttgtgcctcttgcagcgggccaacccctagtcactgtaccgcttgcagcccgccaaaagctctgaggcagggacattgtcttcccaggtgcggagaaggtttctacagtgatcatggagtttgtaaggcctgtcattctagctgcctcgcctgcatgggtccagctcccagtcactgcaccgggtgcaaaaagcctgaagaaggattgcaagtcgagcagctcagcgacgtcgggattccatcaggggagtgtctcgcgcagtgtagggcccacttctatctggagagcaccggaatttgtgagggccaaaacctggatttctgccagaatcttgaggttatcagtgctgtctgtctgggaataagtagcacggaaaactag

SEQ ID NO: 188280 - DNA, 954 bp, synthetic construct
  misc_feature 1..954: note = Description of Artificial Sequence: Synthetic coding sequence
  source 1..954: mol_type = other DNA
atgggcgtgctgaaggtgtggctgggcctggccctggccctggccgagtttgccgtccttccacaccactccgagggcgcctgcgtttatcaggactccttactcgctgacgcaactatttggaagccggatagctgccagagttgccgatgtcacggagatattgtcatttgtaagcccgctgtttgtagaaatcctcaatgcgcatttgagaagggcgaagtgctacagatagccgctaatcagtgttgtcccgaatgtgtgctgcgcacccccggaagttgccaccatgagaaaaaaattcatgagcacggcacagaatgggcaagtagtccgtgtagcgtgtgcagctgcaaccacggcgaagtgagatgcaccccgcaaccctgtccaccactatcttgtggacaccaagagcttgccttcatcccagagggttcatgctgcccggtgtgcgtggggctggggaagccttgttcctatgaggggcacgtttttcaggacggagaggactggagactctcacgctgtgccaagtgcttgtgtcggaatggcgtggcacagtgctttactgctcagtgccagccgttattctgcaaccaggatgaaaccgttgtacgcgtcccgggtaagtgctgcccccaatgcagtgctcgttcttgctccgccgcagggcaggtgtatgagcacggggagcagtggagcgagaatgcttgcacaacttgtatctgtgaccgcggagaggttcggtgccataaacaggcatgtctgcccttgagatgcgggaaagggcagagtcgggcccgcagacacgggcagtgctgcgaggagtgtgtaagtcctgccttggcctcgcagagcgttgggataacaggcatgtcccaccacgcccagagccttctggggccttttctgacccagatcaagaagccgcacttctcttgccttgagtag

SEQ ID NO: 188281 - DNA, 6726 bp, synthetic construct
  misc_feature 1..6726: note = Description of Artificial Sequence: Synthetic coding sequence
  source 1..6726: mol_type = other DNA
tgaagcgaggtgagcaacttcaccatggaggacatcaacaacaagaaaatccgctacagtgctgtcttcgagactgatgggcatctggtgactgacagcttctacttctccgtgtctgacatggaccataaccacctcgacaatcaaatctttacaattatgataacgccagctgaaaacccacctcctgtcatcgccttcgccgatttgatcactgtggatgagggtggcagggcacccttgagtttccatcacttctttgcaactgatgatgacgataacctccaacgggacgcaattataaaacttagtgctttgccgaaatacggctgcatagagaacacaggcacaggggatcgcttcggccccgaaacggcctctgacctggaagcatcattccctatacaggatgtgttagagaattatatctactatttccagagcgttcacgaatccatcgaacctacacacgacatcttctctttttatgttagcgatgggacctccagatcagagatccacagtattaatatcactatcgagcggaaaaatgatgagccaccgcgcatgactcttcagccactcagagtgcaactgtcatccggagtagtgatcagtaactcatccctttccctgcaggatctggatacccccgacaacgagctgatattcgtactgactaagaaacccgatcacggacatgtcctctggcgccagactgcatccgagccactcgagaacggcagagttttagtacaagggtcaaccttcacatatcaggatatccttgctggattagtgggatatgttcccagcgtacctggaatggtcgtcgacgaatttcaattcagtttgactgacggcctccatgtcgataccggccggatgaaaatatataccgagctgcctgcaagtgacacgccccacttggcgatcaaccaggggttgcagttatccgccgggtctgtggcccgcataactgagcaacacttaaaagtaactgatatcgacagtgacgaccaccaggttatgtacataatgaaggaggacccaggcgctggccgactccagatgatgaagcacggtaacctggaacagatcagcattaaaggcccaattcggagctttacccaggccgatattagtcaaggccacgtcgaatactcgcatggtacaggcgagccaggagggagtttcgcttttaaattcgatgtggttgatggcgaaggcaaccgtctgatcgacaaatccttttcaatttcaattctggaggacaagagccctcctgtgattacaacaaacaagggcttggtgctggacgagaactcagtaaagaaaatcacaactctacagttaagtgcaaccgaccaggatagcgggcccaccgagctgatttaccgtattacgaggcagccccagctgggccatctggagcatgcggcctcgcccggcattcagattagctcatttacacaagctgaccttaccagtcgcaacgtccagtacgtacattcttcggaagctgagaagcattctgatgccttctcattcaccctgtcagacggcgtctccgaagtgacccagaccttccacatcacgctgcaccccgtggatgattctttaccggtggtgcagaatctaggcatgcgtgtacaagaagggatgcgaaagacaatcacagagtttgagctgaaggccgtggacgcagacaccgaggctgagtctgtcacatttacaatcgtccagccaccccgtcacggtaccatcgaaaggacctctaacggacagcattttcatctaacgtcaacctttactatgaaggacatctaccagaatcgggtcagctacagtcatgacggatccaacagcttaaaggaccgattcacattcacagtttcggatgggacgaaccccttttttataatcgaagagggcggtaaggagattatgaccgccgctccgcagccctttcgggtcgacatcttacctgtggacgatggtacgccaagaatcgtaacaaacctggggcttcagtggttagagtatatggatggcaaggctacaaatctgatcacaaagaaggagctgctgaccatggaccctgatacagaagatgcacagctggtgtatgagattaccaccggccctaagcatggattcgttgagaataaattgcaacccggtcgcgccgctgccaccttcacccaggaggacgtgaatctgggcttaattcgctacgtgcttcataaggagaagatccgtgagatgatggatagtttccaattcctcgtaaaggatagtaaaccaaacgttgtctccgataatgtgtttcacattcagtggtctctgattagtttcaaatacacttcttataatgtttctgaaaaagctggatcagtgagtgtcaccgtgcaacggactggaaatctgaaccagtatgcaattgtactgtgtagaaccgaacagggcactgctagtagcagcagccgcgtctccagccagccaggtcagcaagactacgtggaatacgcagggcaagtccagttcgacgagagagaagacaccaaaagctgtaccatcgtcatcaatgacgatgatgtatttgaaaacgtagaaagtttcacagtcgaacttagcatgcctgcctatgctcttctcggcgagtttacacaggctaaggtaatcatcaacgatacagaagacgaacctacgttggagttcgataaaaagatctactgggtgaacgaaagcgccggctttctctttgctcccatcgaacgaaaaggggatgcaagctccatagtgtccgccatctgttatactgtgcctaagagcgcaatgggaagctctctgtacgccctggagtcgggcagcgactttaagagcaggggcatgtcagctgcatcccgagttattttcgggcccggggtaactatgtcaacatgcgatgtcatgctgatcgatgattccgagtacgaagaggaggaagagtttgagatcgccctggctgacgctagcgacaatgcccgtatcggccgtgtggccactgccaaggtcttgatttccgggcccaacgatgcctctacggtaagccttggcaacaccgcgttcacagtgtctgaggatgctggtaccgtgaagattcccgtgattcgacatggaactgacctgtcaacttttgcttccgtctggtgtgctacgagaccctcagatccagcatccgccacgccaggggtcgactatgtcccttctagccgcaaagtggaatttggacccggcgtgattgaacagtattgcacacttacaatattggacgatacccaatacccagtaatcgagggcttggaaacattcgtcgtttttctctcatccgcacagggtgccgagcttaccaaaccctttcaggccgtgatagctatcaacgacacattccaggatgtaccttccatgcagtttgcaaaggacttattgttggttaaggagaaggaaggagttcttcatgtgcctatcactaggagcggcgatctgagctatgaatctagcgtccgatgctacacacaaagtcatagcgctcaggtgatggaagattttgaagaaaggcaaaatgccgacagctctaggatcacttttcttaaaggggataaggtcaagaactgtaccgtgtatatccacgacgacagcatgttcgaaccagaggaacaatttcgtgtgtacttaggtctgccactgggcaatcattggtcaggcgcccggataggaaagaacaacatggctaccattacgatttccaatgatgaagatgcacccaccatcgagttcgaggaggcggcttaccaagtaagggagcctgccggtcccgacgccattgccatcctaaacattaaggttatcagacggggagatcaaaataggacctctaaggtgaggtgctcaacacgcgatggtagcgcacagtcaggtgtcgactactacccaaaatcaagagttctgaaattcagtcctggagtggatcacattttcttcaaggtggagatattgagtaatgaagaccgtgaatggcacgaaagttttagtcttgtgcttggtcctgacgatccggtggaagccgtgcttggcgatgtgaccacggcaaccgtcaccatcctggatcaggaggctgccggaagtctgattctccccgctcctcccatcgtagtaaccctagctgactacgatcatgtggaggaagtgactaaggagggcgttaagaagtctccaagcccagggtatccactcgtctgcgtaacaccatgcgacccacactttccccggtacgctgtgatgaaggagcgttgtagcgaagcgggaatcaaccagacatctgtgcagttctcctgggaggttgctgcccctactgacggtaacggcgcccggagtcctttcgagactatcacggacaatacgccctttacttctgtgaatcatatggtcctggacagtatctacttctcacggcgctttcacgtcaggtgcgtggcaaaggccgtggataaggtggggcatgtgggcacccctctgaggtcaaatatcgtgaccatcggaactgactccgcgatctgccacaccccagtggtggccggaacctcccgtggattccaggctcagtctttcatcgctacactcaagtacctggacgttaagcacaaggagcacccaaatcgcatccatatcagcgttcaaattccccatcaagatggcatgctaccactgataagtacaatgcctctgcataacctgcattttctactgtccgagtcaatatatcggcaccagcacgtctgtagcaacctcgtgaccacatatgacctcagggggattagcgaagccgggttcctggatgatgtggtttatgacagcactgcactgggccccggatacgacaggccgttccaatttgatccatcggtgagggagccaaagaccatccagctttataaacatctcaatcttaagagctgcgtttggaccttcgacgcctattacgatatgaccgaattaatcgatgtgtgcggaggctcagtcacagccgattttcaggtccgcgacagtgcccagagttttcttactgtccacgttccactctacgtgtcttacatctacgtgactgctcctcgaggctgggccagcttagaacaccatacagagatggagttctccttcttttatgataccgtgctgtggcgcactggcatccagaccgactcagtgctctcggccaggcttcagataatcagaatctatattcgcgaggatgggcggctcgtgatcgagttcaaaacacacgcgaagttcaggggacaatttgtgatggaacaccataccctgcccgaggtgaaaagctttgttctgactcccgaccacctgggaggaattgaattcgatctgcagctcttgtggtccgctcagacctttgattctccgcaccaattatggcgcgctacatcatcgtacaataggaaagactatagcggcgaatacacgatctacttgattccatgcactgtgcaacctactcagccttgggtcgacccaggcgaaaaacctcttgcttgtactgcacacgctcccgagcgattcctgatccctatcgcgtttcagcagaccaaccggccagtccctgttgtatatagcctaaacactgagtttcagttgtgcaacaacgaaaaagtgtttttaatggaccccaatacatcggatatgtccctcgcggagatggactacaagggggcctttagtaaaggacaaattctgtacggaagggtgctttggaaccccgaacagaatcttaatagtgcgtacaagctccagctggaaaaggtctacttatgtacagggaaggacgggtacgtgccctttttcgatcccacggggaccatttacaacgagggaccccaatatggctgtatccagccaaacaaacacctgaagcatcggttccttctgttagaccggaatcagccagaggtgactgacaaatattttcacgatgttccatttgaagcccacttcgcatccgaattgcctgactttcatgttgtgagcaacatgcccggtgttgatggtttcacactgaaggtagatgccctctataaggtggaagccgggcaccaatggtacctccaggttatttatattattgggcccgacaccatctcagggcctagggtgcagcgctctctgactgcacccttgcggcggaatagacgcgatctggttgagcccgatggccagctgatcttagacgactccttgatttatgataatgaaggggatcaggtgaagaatggcacaaatatgaagtccttgaacttggagatgcaggaactcgctgtagcggcgtccctgagccagacaggcgcgtctatcggttccgcgctggctgcgattatgctgctgttgcttgtgttcctggtagcttgttttattaaccggaaatgccagaaacagagaaagaagaaacccgcggaggatatcctggaagagtatcctttaaataccaaagtggaggtccccaaacgtcatcccgaccgggtcgagaaaaacgttaataggcattactgtactgtgcggaacgtcaatattctgagtgagccggaagccgcttacacctttaagggggcaaaggtaaagcgtctaaacctcgaagtgcgtgtgcacaataatctccaggacggcactgaggtctag
